United States Patent Application Publication US 2006/0150283 A1 - sequence listing, part 23

SEQ ID NO: 86838 - DNA, 1048 bp, Arabidopsis thaliana
  misc_feature (1)..(1048): Ceres Seq. ID no. 12694169
  misc_feature (1)..(1048): Ortholog of  Ceres SEQ ID NO 14313014 as cited in SEQ ID NO 54841
  misc_feature (1)..(1048): Ortholog of  Ceres SEQ ID NO 14316091 as cited in SEQ ID NO 57622
  misc_feature (1)..(1048): Ortholog of  Ceres SEQ ID NO 13639317 as cited in SEQ ID NO 59781
  misc_feature (1)..(1048): Ortholog of  Ceres SEQ ID NO 13654578 as cited in SEQ ID NO 68583
aaaaaaccaagttcaacacaatccatcacatccatttcaatagaagacgaagaacgtttcagaatcatcaaccaaattcagaaaatttcagccatgacaggatcacaagaagaccaacctaagatcatcattgatcaagagcaacccaaaactctagaaacagagcaccaaccagaaccttcttcatcgtctccggatcagaagaaatggggtactcacgtgatgggagctccggcagctccagttgctcatcccgataaccaacaggcggcggcgtgggtcgctggagataaccagcagacgcagtaccaaccgtacgtcatctactctcctgtcgaacatccaacaactaacaaccctctcgagccagtcatcggaatgttccatacctggagtcgcaaggcagaaaccgtcgcacgtaacctctggcacaatctgaagacaggaccgtctatgtcggaaacggcgtgggggaaggttaatttgacggccaaagcgataacaaaaggaggattcgagtcgcttttcagacagattttcggaacagagccaaacgagacgctgaagaaaactttcgcttgttatctctcgacgacgacaggtcctgttgctggaactgtctatctttcgaatgctcgtgtcgctttttgtagcgatcgtcctctgtacttcacagcaccttctggtcaagaatcttggagctactacagggtggttgtacctttggcgaatgtagcgacggtgaatccggtggtggtgaaagagactccacctgagaagtatattcagttgacgacggtggatggtcatgacttctggttcatgggttttgtgaattatgagaaggctacgcatcatctgctgaccagtgtctccgattttcaaaccgcacacggctctgtgtctggttaaaacttactattcctctaatgtttttctttagttgtgtggttggtttctgctgcttctcatgtttctatatgtttatgtaaattatataccagagctggacttttgtgtgttgattcagagttggtttcacttattc

SEQ ID NO: 86839 - protein, 303 aa, Arabidopsis thaliana
  peptide (1)..(303): Ceres Seq. ID no. 12694170
KKPSSTQSITSISIEDEERFRIINQIQKISAMTGSQEDQPKIIIDQEQPKTLETEHQPEPSSSSPDQKKWGTHVMGAPAAPVAHPDNQQAAAWVAGDNQQTQYQPYVIYSPVEHPTTNNPLEPVIGMFHTWSRKAETVARNLWHNLKTGPSMSETAWGKVNLTAKAITKGGFESLFRQIFGTEPNETLKKTFACYLSTTTGPVAGTVYLSNARVAFCSDRPLYFTAPSGQESWSYYRVVVPLANVATVNPVVVKETPPEKYIQLTTVDGHDFWFMGFVNYEKATHHLLTSVSDFQTAHGSVSG

SEQ ID NO: 86840 - protein, 272 aa, Arabidopsis thaliana; identical to SEQ ID NO: 43518
  peptide (1)..(272): Ceres Seq. ID no. 12694171

SEQ ID NO: 86841 - protein, 229 aa, Arabidopsis thaliana; identical to SEQ ID NO: 43519
  peptide (1)..(229): Ceres Seq. ID no. 12694172

SEQ ID NO: 86842 - DNA, 989 bp, Arabidopsis thaliana
  misc_feature (1)..(989): Ceres Seq. ID no. 12694173
  misc_feature (1)..(989): Ortholog of  Ceres SEQ ID NO 12610607 as cited in SEQ ID NO 56214
  misc_feature (1)..(989): Ortholog of  Ceres SEQ ID NO 13664294 as cited in SEQ ID NO 61328
  misc_feature (1)..(989): Ortholog of  Ceres SEQ ID NO 13596425 as cited in SEQ ID NO 62039
agcagctgagcgacttttgcacatttctagggttccaatcaaaatctatctgcaacaaaaatggctaatcgtttcagatcagggatctccttcttcaagaccatcgccgtaacagattctgtctcctccgttagatccaagtcgcttttcccagcgttgagaacttatgcaactgcttctgctcaaacaaccgctaatgttaaggtgcctattgctttagttggtgaaaatgggaactttgcttcatggctatacattgcagctgtgaaaatgaattccttggaaaagattgagacggatctttctgagatgattgaggcaatgaagacagctcctatttttgctcagtttacaaaggatccctctgttcctagagggacaagattggctgctattagggatgcttgtgatcaagcaaagtttgccgaacccactaagaacttcctctctttgttagctgagaatggaaagctgaagaacctagatgccattgtgaagaaatttatgcagctgacaaacgcacataggggagatgtcaaagttttggttaccacagtcattccgcttccccctgctgaggagaaagaactgactgagacgcttcaggagatcattggagcagggaagaaaatcactgtggaacaaaagattgatccaagtatctacggtggactaatcgtagagttccaacaaaaggtgttggacatgtcaatcaggacaagggcacaacagatggagaggctcctccgtgaacctgttgacttcaacaacctctgaaaatcttgagagaaatttcccccaagaaaacatgcttgtgatgaatgccaccaattgacaaataaatatggaccctcctgggaaacaatataatagctggccacttctctccctttgaattttgtcatttgctttttacatattgttgtttgcttcgaaataaagcttttcgagacatcaaatttcaatgagattgtttttgtttagatttg

SEQ ID NO: 86843 - protein, 238 aa, Arabidopsis thaliana; identical to SEQ ID NO: 28758
  peptide (1)..(238): Ceres Seq. ID no. 12694174

SEQ ID NO: 86844 - protein, 168 aa, Arabidopsis thaliana; identical to SEQ ID NO: 28759
  peptide (1)..(168): Ceres Seq. ID no. 12694175

SEQ ID NO: 86845 - protein, 155 aa, Arabidopsis thaliana; identical to SEQ ID NO: 28760
  peptide (1)..(155): Ceres Seq. ID no. 12694176

SEQ ID NO: 86846 - DNA, 996 bp, Arabidopsis thaliana
  misc_feature (1)..(996): Ceres Seq. ID no. 12694177
  misc_feature (1)..(996): Ortholog of  Ceres SEQ ID NO 12610607 as cited in SEQ ID NO 56214
  misc_feature (1)..(996): Ortholog of  Ceres SEQ ID NO 13664294 as cited in SEQ ID NO 61328
  misc_feature (1)..(996): Ortholog of  Ceres SEQ ID NO 13596425 as cited in SEQ ID NO 62039
gctctcgacaaagcagctgagcgacttttgcacatttctagggttccaatcaaaatctatctgcaacaaaaatggctaatcgtttcagatcagggatctccttcttcaagaccatcgccgtaacagattctgtctcctccgttagatccaagtcgcttttcccagttgagaacttatgcaactgcttctgctcaaacaaccgctaatgttaaggtgcctattgctttagttggtgaaaatgggaactttgcttcatggctatacattgcagctgtgaaaatgaattccttggaaaagattgagacggatctttctgagatgattgaggcaatgaagacagctcctatttttgctcagtttacaaaggatccctctgttcctagagggacaagattggctgctattagggatgcttgtgatcaagcaaagtttgccgaacccactaagaacttcctctctttgttagctgagaatggaaagctgaagaacctagatgccattgtgaagaaatttatgcagctgacaaacgcacataggggagatgtcaaagttttggttaccacagtcattccgcttccccctgctgaggagaaagaactgactgagacgcttcaggagatcattggagcagggaagaaaatcactgtggaacaaaagattgatccaagtatctacggtggactaatcgtagagttccaacaaaaggtgttggacatgtcaatcaggacaagggcacaacagatggagaggctcctccgtgaacctgttgacttcaacaacctctgaaaatcttgagagaaatttcccccaagaaaacatgcttgtgatgaatgccaccaattgacaaataaatatggaccctcctgggaaacaatataatagctggccacttctctccctttgaattttgtcatttgctttttacatattgttgtttgcttcgaaataaagcttttcgagacatcaaatttcaatgagattgtttttgtttagatt

SEQ ID NO: 86847 - protein, 168 aa, Arabidopsis thaliana; identical to SEQ ID NO: 28759
  peptide (1)..(168): Ceres Seq. ID no. 12694178

SEQ ID NO: 86848 - protein, 155 aa, Arabidopsis thaliana; identical to SEQ ID NO: 28760
  peptide (1)..(155): Ceres Seq. ID no. 12694179

SEQ ID NO: 86849 - protein, 151 aa, Arabidopsis thaliana
  peptide (1)..(151): Ceres Seq. ID no. 12694180
MKTAPIFAQFTKDPSVPRGTRLAAIRDACDQAKFAEPTKNFLSLLAENGKLKNLDAIVKKFMQLTNAHRGDVKVLVTTVIPLPPAEEKELTETLQEIIGAGKKITVEQKIDPSIYGGLIVEFQQKVLDMSIRTRAQQMERLLREPVDFNNL

SEQ ID NO: 86850 - DNA, 1253 bp, Arabidopsis thaliana
  misc_feature (1)..(1253): Ceres Seq. ID no. 12694209
  misc_feature (1)..(1253): Ortholog of  Ceres SEQ ID NO 13495070 as cited in SEQ ID NO 53216
  misc_feature (1)..(1253): Ortholog of  Ceres SEQ ID NO 13656228 as cited in SEQ ID NO 65648
  misc_feature (1)..(1253): Ortholog of  Ceres SEQ ID NO 15179618 as cited in SEQ ID NO 0
atctcgtccgttgttgcataagtgctatggatctcgcgtcgaatcttggtgggaagatcgataaatccgatgttctcaccgccgtcgaaaagtatgagcaatatcatgtcttccatggaggaaacgaggaagagagaaaagccaattatactgacatggttaataagtactatgaccttgctactagcttttatgagtacggatggggagaatccttccattttgcacaaagatggaaaggagaatcgcttcgagagagtattaagcgacacgagcactttcttgctcttcagcttggcatccaaccaggacaaaaggtactggatgtaggatgtggaattggtggaccgttgagggaaattgcaagattcagcaattcagttgttaccgggctcaacaataacgaataccagatcaccagaggcaaggaactaaaccgacttgcaggtgtcgacaagacatgtaactttgtcaaggctgacttcatgaagatgccattcccggaaaacagtttcgatgcagtttatgcaatagaagcaacttgccatgcacctgatgcgtatggatgctacaaagagatctacagagtgctaaagcctgggcaatgttttgctgcctatgagtggtgtatgactgatgcatttgaccctgataacgccgaacatcagaaaataaagggagagatagagattggagatggtcttcctgacattaggctgactacaaaatgcctcgaagctctgaagcaggccggttttgaagtgatatgggaaaaggatctggccaaggactcgccggtcccatggtacttacctcttgacaaaaatcatttctcactcagtagcttccgccttacagctgttggacgattcataaccaaaaacatggtcaagatccttgaatacataagacttgcacctcaaggaagccaaagggtctcaaatttcctggagcaggctgcggaaggattagtcgacggtggaaggagagagattttcacgccaatgtatttcttcttggcccggaagccagagtaagcggatgagagatggcgatggtcatcgtaggtcgaatgaagtgacaaaatttctcaatttgcagtcttattttctatgtttatcggatttgttgcagagtttcttattcaccaactatattttggatgttcgtaacatgtcacgtgttgttcatgtgcactctgcctgaaatctgaatcatgtgcacatgcccaaaatatcttggaatctttcttt

SEQ ID NO: 86851 - protein, 344 aa, Arabidopsis thaliana
  peptide (1)..(344): Ceres Seq. ID no. 12694210
LVRCCISAMDLASNLGGKIDKSDVLTAVEKYEQYHVFHGGNEEERKANYTDMVNKYYDLATSFYEYGWGESFHFAQRWKGESLRESIKRHEHFLALQLGIQPGQKVLDVGCGIGGPLREIARFSNSVVTGLNNNEYQITRGKELNRLAGVDKTCNFVKADFMKMPFPENSFDAVYAIEATCHAPDAYGCYKEIYRVLKPGQCFAAYEWCMTDAFDPDNAEHQKIKGEIEIGDGLPDIRLTTKCLEALKQAGFEVIWEKDLAKDSPVPWYLPLDKNHFSLSSFRLTAVGRFITKNMVKILEYIRLAPQGSQRVSNFLEQAAEGLVDGGRREIFTPMYFFLARKPE

SEQ ID NO: 86852 - protein, 336 aa, Arabidopsis thaliana; identical to SEQ ID NO: 26651
  peptide (1)..(336): Ceres Seq. ID no. 12694211

SEQ ID NO: 86853 - protein, 293 aa, Arabidopsis thaliana; identical to SEQ ID NO: 26652
  peptide (1)..(293): Ceres Seq. ID no. 12694212

SEQ ID NO: 86854 - DNA, 3507 bp, Arabidopsis thaliana
  misc_feature (1)..(3507): Ceres Seq. ID no. 12694273
  misc_feature (1)..(3507): Ortholog of  Ceres SEQ ID NO 14310206 as cited in SEQ ID NO 20650
atgaccgttggtgccggaatcagcgtcaccgactcagatttggtggtgctaggtcaccgtgttcttcacggcgttccggagaatgtcttagttaccccagcttcgggaaacgccttaatcgacggcgcgttcatcggcgtcacgtcagatcaaaccggaagccaccgtgtcttctcccttggcaaactcgaagacctaaggtttatgtgtgtcttccggtttaaattatggtggatgactcaaagaatggggactaatgggaaagagattccttgtgagactcagtttctaatcgtagaagcaaaccaaggttctgatttaggaggaagagatcaatcttcttcgtacgttgtattcttacctatacttgaaggagattttagagctgttcttcaagggaacgaggctaatgagctagagatttgtcttgaaagtggtgatccaaccgttgaccaattcgaagggagtcatttggtttttgtggctgctggctccgacccttttgatgtcattaccaaagctgtcaagtatgtaatgtttctcaagtctcaacttaagacttctttatgtccaaatttttttaggatgccagatatgttgaattggtttggttggtgcacttgggatgcattctataccaatgtcacagccaaagacgtcaagcaaggacttgagagtaactgtgacttaaccaaacctgcactgattctctgtagcctcaaagctggtggggttaccccaaagtttgtcataattgatgatggatggcaatctgttggcatggatgagaccagtgtagaattcaacgctgataatgctgccaattttgcaaaccggttaactcacatcaaggagaatcataagtttcaaaaggatggcaaagaaggccaccgggtggatgacccttcattgagtcttggacatgttatcacagacattaagagtaataattcgctcaagtatgtttatgtttggcatgcgataacaggatattggggaggagtcaaaccaggtgtttctggtatggaacactacgaatccaaggttgcgtatccagtttcttcaccaggagttatgtccagtgagaattgtggatgtttagaaagcataactaagaatggacttggtttggtgaatcctgagaaagtctttagcttctataatgatcttcactcataccttgcatccgttggggtcgatggtgtcaaagtagacgtccaaaacattcttgaaactcttggagctggacatggtggtcgtgtcaaacttgcaaagaagtatcaccaggctttggaagcttctatttcaagaaacttccctgacaatggtattatctcttgcatgagtcataacacagatggtctctacagcgcaaaaaagactgctgttataagagcatcagacgatttctggcctagagaccccgcttcacacacgatccacattgcttctgttgcatataacacacttttccttggagagtttatgcagccggactgggacatgtttcatagtttgcatccgatggctgaatatcatgctgcagctcgcgcggttggaggatgtgccatatatgtcagcgacaaaccgggacaacatgacttcaaccttttaagaaagctagtacttcgagacggttccatactcagagcaaagcttcccggaagaccaaccagagagttagtgtatctcccaaaagatacatctttaccagtgacattgatgccacgtgaatacgaagttttcacggtggttccggtgaaggaattttccgatggaagtaaatttgcaccggtggggcttatggagatgtttaattctggaggagccattgtgagtttaagatacgatgacgaggggactaaatttgtcgttaggatgaaacttcgaggcagtggtttggttggtgtttactcgtccgttcgacgaccacgaagtgttacggtggattcagacgacgtggagtaccgttctgtattgatttgttggttaatctgtatgggttatcgaccagaccaatacaaatcaaacagattggtccgtgttcgttttgatataataatacaaaaaaaaaatgcccaggtagaaatggggttggttaatgatgttgagcacaaaagcctttttagacgagatactgattccccagaaagaaaagcagcttccttgatggaacaaggatcactttctgcaagttttcgagaatgctcaactaaaacacctaataacagtgtgctccagagcttcaagattgtgattttatcgaataaacttaatcttttgttgccttttggtcctctggcaatactactccattacttgacagataataaggtgagcagttgtactttttgggtactattcatagcagtttcatttcttcctgttatttcccaagaaatgattcttcttgtggctcagggatggatcttcttattgagcttagtaggcatcacaccattagctgaacgtctcggatatgccaccgagcaattagcttgttacactggttcaactgttggaggtctcctaaacgctacatttggaaacgtgacagagctgatcatatcgattttcgctcttaaaagtggaatgatacgtgttgtacagctgacattgctcggctcgatactttctaacatgttacttgtacttggctgcgccttcttttgtggcgggcttgtattttcccagaaagagcaagtctttgacaaaggtaatgctgttgtgaattcgggattgcttttgatggctgtcatgggactactcttccccgcagttcttcattacacgcacagtgaggttcatgctgggtcatcagagcttgctctctcaagattcagcagttgcataatgctcgttgcctatgctgcttacctctttttccagttaaagagccagccgagctcttatacccctctcaccgaggaaactaaccagaacgaagaaacttcagacgatgatgaagatcctgagatctccaagtgggaagctattatctggctttcaatcttgacggcttgggtctctcttctttccggctatcttgttgatgccatagagggtgcttcagtctcatggaagataccaatctcttttatcagtgtcatcttacttcctatagttgggaatgcggccgagcatgcaggtgccatcatgtttgccatgaaagacaagctggatctgtctttgggagtggctattggatcctccattcagatttctatgttcgcggttcctttttgcgtggttatcggatggatgatgggtgcccaaatggacctaaatttccagctatttgagacggctactctgttcataactgttattgttgtagctttctttctccaggtaaatcttgaagctaattacgaaaccaatctcgagtatatctctctcttcaaagttgttaaatgtctttgtgtgtggtgtttttatgcaggaaggaacatcgaattacttcaaaggattgatgctcattctttgctatttgatagtcgccgctag

SEQ ID NO: 86855 - protein, 1168 aa, Arabidopsis thaliana
  peptide (1)..(1168): Ceres Seq. ID no. 12694274
MTVGAGISVTDSDLVVLGHRVLHGVPENVLVTPASGNALIDGAFIGVTSDQTGSHRVFSLGKLEDLRFMCVFRFKLWWMTQRMGTNGKEIPCETQFLIVEANQGSDLGGRDQSSSYVVFLPILEGDFRAVLQGNEANELEICLESGDPTVDQFEGSHLVFVAAGSDPFDVITKAVKYVMFLKSQLKTSLCPNFFRMPDMLNWFGWCTWDAFYTNVTAKDVKQGLESNCDLTKPALILCSLKAGGVTPKFVIIDDGWQSVGMDETSVEFNADNAANFANRLTHIKENHKFQKDGKEGHRVDDPSLSLGHVITDIKSNNSLKYVYVWHAITGYWGGVKPGVSGMEHYESKVAYPVSSPGVMSSENCGCLESITKNGLGLVNPEKVFSFYNDLHSYLASVGVDGVKVDVQNILETLGAGHGGRVKLAKKYHQALEASISRNFPDNGIISCMSHNTDGLYSAKKTAVIRASDDFWPRDPASHTIHIASVAYNTLFLGEFMQPDWDMFHSLHPMAEYHAAARAVGGCAIYVSDKPGQHDFNLLRKLVLRDGSILRAKLPGRPTRELVYLPKDTSLPVTLMPREYEVFTVVPVKEFSDGSKFAPVGLMEMFNSGGAIVSLRYDDEGTKFVVRMKLRGSGLVGVYSSVRRPRSVTVDSDDVEYRSVLICWLICMGYRPDQYKSNRLVRVRFDIIIQKKNAQVEMGLVNDVEHKSLFRRDTDSPERKAASLMEQGSLSASFRECSTKTPNNSVLQSFKIVILSNKLNLLLPFGPLAILLHYLTDNKVSSCTFWVLFIAVSFLPVISQEMILLVAQGWIFLLSLVGITPLAERLGYATEQLACYTGSTVGGLLNATFGNVTELIISIFALKSGMIRVVQLTLLGSILSNMLLVLGCAFFCGGLVFSQKEQVFDKGNAVVNSGLLLMAVMGLLFPAVLHYTHSEVHAGSSELALSRFSSCIMLVAYAAYLFFQLKSQPSSYTPLTEETNQNEETSDDDEDPEISKWEAIIWLSILTAWVSLLSGYLVDAIEGASVSWKIPISFISVILLPIVGNAAEHAGAIMFAMKDKLDLSLGVAIGSSIQISMFAVPFCVVIGWMMGAQMDLNFQLFETATLFITVIVVAFFLQVNLEANYETNLEYISLFKVVKCLCVWCFYAGRNIELLQRIDAHSLLFDSRR

SEQ ID NO: 86856 - protein, 1100 aa, Arabidopsis thaliana
  peptide (1)..(1100): Ceres Seq. ID no. 12694275
MCVFRFKLWWMTQRMGTNGKEIPCETQFLIVEANQGSDLGGRDQSSSYVVFLPILEGDFRAVLQGNEANELEICLESGDPTVDQFEGSHLVFVAAGSDPFDVITKAVKYVMFLKSQLKTSLCPNFFRMPDMLNWFGWCTWDAFYTNVTAKDVKQGLESNCDLTKPALILCSLKAGGVTPKFVIIDDGWQSVGMDETSVEFNADNAANFANRLTHIKENHKFQKDGKEGHRVDDPSLSLGHVITDIKSNNSLKYVYVWHAITGYWGGVKPGVSGMEHYESKVAYPVSSPGVMSSENCGCLESITKNGLGLVNPEKVFSFYNDLHSYLASVGVDGVKVDVQNILETLGAGHGGRVKLAKKYHQALEASISRNFPDNGIISCMSHNTDGLYSAKKTAVIRASDDFWPRDPASHTIHIASVAYNTLFLGEFMQPDWDMFHSLHPMAEYHAAARAVGGCAIYVSDKPGQHDFNLLRKLVLRDGSILRAKLPGRPTRELVYLPKDTSLPVTLMPREYEVFTVVPVKEFSDGSKFAPVGLMEMFNSGGAIVSLRYDDEGTKFVVRMKLRGSGLVGVYSSVRRPRSVTVDSDDVEYRSVLICWLICMGYRPDQYKSNRLVRVRFDIIIQKKNAQVEMGLVNDVEHKSLFRRDTDSPERKAASLMEQGSLSASFRECSTKTPNNSVLQSFKIVILSNKLNLLLPFGPLAILLHYLTDNKVSSCTFWVLFIAVSFLPVISQEMILLVAQGWIFLLSLVGITPLAERLGYATEQLACYTGSTVGGLLNATFGNVTELIISIFALKSGMIRVVQLTLLGSILSNMLLVLGCAFFCGGLVFSQKEQVFDKGNAVVNSGLLLMAVMGLLFPAVLHYTHSEVHAGSSELALSRFSSCIMLVAYAAYLFFQLKSQPSSYTPLTEETNQNEETSDDDEDPEISKWEAIIWLSILTAWVSLLSGYLVDAIEGASVSWKIPISFISVILLPIVGNAAEHAGAIMFAMKDKLDLSLGVAIGSSIQISMFAVPFCVVIGWMMGAQMDLNFQLFETATLFITVIVVAFFLQVNLEANYETNLEYISLFKVVKCLCVWCFYAGRNIELLQRIDAHSLLFDSRR

SEQ ID NO: 86857 - protein, 1090 aa, Arabidopsis thaliana
  peptide (1)..(1090): Ceres Seq. ID no. 12694276
MTQRMGTNGKEIPCETQFLIVEANQGSDLGGRDQSSSYVVFLPILEGDFRAVLQGNEANELEICLESGDPTVDQFEGSHLVFVAAGSDPFDVITKAVKYVMFLKSQLKTSLCPNFFRMPDMLNWFGWCTWDAFYTNVTAKDVKQGLESNCDLTKPALILCSLKAGGVTPKFVIIDDGWQSVGMDETSVEFNADNAANFANRLTHIKENHKFQKDGKEGHRVDDPSLSLGHVITDIKSNNSLKYVYVWHAITGYWGGVKPGVSGMEHYESKVAYPVSSPGVMSSENCGCLESITKNGLGLVNPEKVFSFYNDLHSYLASVGVDGVKVDVQNILETLGAGHGGRVKLAKKYHQALEASISRNFPDNGIISCMSHNTDGLYSAKKTAVIRASDDFWPRDPASHTIHIASVAYNTLFLGEFMQPDWDMFHSLHPMAEYHAAARAVGGCAIYVSDKPGQHDFNLLRKLVLRDGSILRAKLPGRPTRELVYLPKDTSLPVTLMPREYEVFTVVPVKEFSDGSKFAPVGLMEMFNSGGAIVSLRYDDEGTKFVVRMKLRGSGLVGVYSSVRRPRSVTVDSDDVEYRSVLICWLICMGYRPDQYKSNRLVRVRFDIIIQKKNAQVEMGLVNDVEHKSLFRRDTDSPERKAASLMEQGSLSASFRECSTKTPNNSVLQSFKIVILSNKLNLLLPFGPLAILLHYLTDNKVSSCTFWVLFIAVSFLPVISQEMILLVAQGWIFLLSLVGITPLAERLGYATEQLACYTGSTVGGLLNATFGNVTELIISIFALKSGMIRVVQLTLLGSILSNMLLVLGCAFFCGGLVFSQKEQVFDKGNAVVNSGLLLMAVMGLLFPAVLHYTHSEVHAGSSELALSRFSSCIMLVAYAAYLFFQLKSQPSSYTPLTEETNQNEETSDDDEDPEISKWEAIIWLSILTAWVSLLSGYLVDAIEGASVSWKIPISFISVILLPIVGNAAEHAGAIMFAMKDKLDLSLGVAIGSSIQISMFAVPFCVVIGWMMGAQMDLNFQLFETATLFITVIVVAFFLQVNLEANYETNLEYISLFKVVKCLCVWCFYAGRNIELLQRIDAHSLLFDSRR

SEQ ID NO: 86858 - DNA, 1092 bp, Arabidopsis thaliana
  misc_feature (1)..(1092): Ceres Seq. ID no. 12694314
  misc_feature (1)..(1092): Ortholog of  Ceres SEQ ID NO 14309703 as cited in SEQ ID NO 55427
atgactagacgaaaatggcgcgtcaagcttctctctgaattctgcccaacaaatccaaggcttttgggggtgaatgtaaatagaggcgtgcaagtgaaattgaggcttaggagggtaaaccatgatttagatttcttatcgtatcatgaaattctcgacaccatgctccacgagctttgccacaacgctcatggtcctcataacgcaagtttctataagctttgggatgaacttcgaaaggaatgcgaggagttgatgtcaaagggtattacagggacgggacagggatttgatatgcctggtaagcgtttgggtggactttctcgtcagccttctctatcatttctcagagcaactgcagctacagcagcagaaaaaagagtgcgtgcgggaactcttttaccttcaggacctcaacgtcttggtggtgatagcagcattatgtcagatcttagtccaattcaggctgctgcaatggctgcagaaaggcgtttacttgatgatatttggtgtggttcccaatccacagatgctttagaagatgaagagaatgatagtgacacatataaggaacctgtttccatcagggaaacttgtacgagcgtgaatggaaagtcagtaaaacgatgtaatagctggtccaatgcccattcttgtcctccatcttccagtcatcaacagggatcagatgtcattgatttgactgaagaatcttttgaaataagatgtactaaaagaaatcgcagcccaggtgatcagggtccttcttgtgccaaagatgtaccgaacgctggtgtcatgaagtcatcgattcctttgccatcgacgagttacaatgcaaaccaaagcagagaagaatccacaatgtgggagtgtgcagaatgcaccttattgaacccgtcattggctccaatatgtgagctatgcactgccgcaaagccaaaggaaagggagatgaagcacaaagtctggtcttgcaaattctgcacgcttgaaaatgaggtgaagttagagaaatgtgaggcttgtggtcagtggaggtactcgtatggagcaccattgtcaactggtgctcctaatgtcggcacttga

SEQ ID NO: 86859 - protein, 363 aa, Arabidopsis thaliana; identical to SEQ ID NO: 80098
  peptide (1)..(363): Ceres Seq. ID no. 12694315

SEQ ID NO: 86860 - protein, 309 aa, Arabidopsis thaliana
  peptide (1)..(309): Ceres Seq. ID no. 12694316
MLHELCHNAHGPHNASFYKLWDELRKECEELMSKGITGTGQGFDMPGKRLGGLSRQPSLSFLRATAATAAEKRVRAGTLLPSGPQRLGGDSSIMSDLSPIQAAAMAAERRLLDDIWCGSQSTDALEDEENDSDTYKEPVSIRETCTSVNGKSVKRCNSWSNAHSCPPSSSHQQGSDVIDLTEESFEIRCTKRNRSPGDQGPSCAKDVPNAGVMKSSIPLPSTSYNANQSREESTMWECAECTLLNPSLAPICELCTAAKPKEREMKHKVWSCKFCTLENEVKLEKCEACGQWRYSYGAPLSTGAPNVGT

SEQ ID NO: 86861 - protein, 278 aa, Arabidopsis thaliana
  peptide (1)..(278): Ceres Seq. ID no. 12694317
MSKGITGTGQGFDMPGKRLGGLSRQPSLSFLRATAATAAEKRVRAGTLLPSGPQRLGGDSSIMSDLSPIQAAAMAAERRLLDDIWCGSQSTDALEDEENDSDTYKEPVSIRETCTSVNGKSVKRCNSWSNAHSCPPSSSHQQGSDVIDLTEESFEIRCTKRNRSPGDQGPSCAKDVPNAGVMKSSIPLPSTSYNANQSREESTMWECAECTLLNPSLAPICELCTAAKPKEREMKHKVWSCKFCTLENEVKLEKCEACGQWRYSYGAPLSTGAPNVGT

SEQ ID NO: 86862 - DNA, 3108 bp, Arabidopsis thaliana
  misc_feature (1)..(3108): Ceres Seq. ID no. 12694370
  misc_feature (1)..(3108): Ortholog of  Ceres SEQ ID NO 15174879 as cited in SEQ ID NO 53786
atgctcaggctacgtagatctctgtttctgctcctaaccgtttggttcttgtgttgttccggtttggttcacgtgatggttcgagcccaaaaccgaaccagacccactactcatcccgacgatgcgcgagctttgaactccatcttcgcggcttggaagattcgggcgccgagggaatggaacatcagcggcgaactttgctccggcgtcgccatcgacgccagtgtactcgactcaaaccatgcctacaatcctctcatcaaatgcgactgtagtttccaaaactccacaatctgccgcataaataacataaaggtttatgcgatagatgttgtaggacctatacctccagagctctggaccttaacatacctcaccaatctgtatagttccatacaacccacttacccactttttatattcacaagctcactgtctcctgctattgggaatttgactcggatgcagtggatgacttttggaatcaacgcgttgtctggccctattcctaaggaaatcggtttgcttacggatttaagattacttggtattagttcaaataacttttccggttccttaccagctgagattgggagttgtacaaaactacagcaaatgtacatcgatagttctggactcagcggaggaatacctttatcatttgctaattttgtggagttggaagtcgcttggattatggatgtggaacttacaggtcggataccagactttataggattctggaccaaacttactaccttgaggatcctcggaactggtttgagcggcccaataccgtcgtcattttccaacttaattgctttgacagaactgaggcttggtgatatatccaatggaagctcttctcttgatttcatcaaagacatgaaatctctaagtgtattagtattgaggaacaacaatctcactgggacaataccgtctactattggaggatacacaagtttgcaacaagttgatttgagcttcaacaaattacatggaccaattccggcttcacttttcaacttaagtcgacttactcacttgtttctgggaaacaacacgttgaatggatccttgcccactctaaaggggcagtctctgagcaatttagatgtgtcgtacaatgatttgtctggaagtcttccttcatgggtcagcttaccagatttgaagctcaatctagttgctaacaacttcacactggaaggtcttgacaacagggttttatcaggactacattgcctgcagaagaacttcccctgcaatcgaggcgaaggaatctattataacttttcgatcaactgcggaggcccagagataaggtctgttagtggagcactatttgaaaaggaggacgcggatcttggaccagcttcgtttgttgtgagtgctgcaaagagatgggcagccagtagtgtaggaaattttgctggcagtagcaacaatatatacatagctacttcactagcacaatttatcaacactatggactcagagctttttcagtcagcacgactttctgcatcttccctaaggtattatgggttggggctagaaaatggagggtacaccgtaacacttcagtttgctgaagtacaaattgaaggttctaactcttggaaaggtattggaagacgacgttttaacatttatgtccagggaagacttgttgaaaaggattttgatatacgcagaacagctggtggctcttcggttcgagcagttcagagagaatataaaacaaatgtatcagaaaatcatctcgaagtccatcttttctgggctggaaaaggaacatgttgtattcctatccaaggggcttatgggccattaatagcggccgtcagtgcgacaccagatttcacaccaactgtggctaataggccaccatcaaagggaaagagcaggactggtactattgtgggtgtcattgttggtgttggacttttgagcatctttgcgggtgtggttatcctcgtcattcgaaaaagaagaaaaccgtacacagatgatgaagagatacttagtatggacgtaaagccttacacctttacttactcggaacttaagaatgcaacacaagattttgatctctcaaacaagcttggagagggagggtttggggctgtttataagggaaacctcaatgatggaagagaggtggcggtgaagcagttgtcaattggatcacggcaagggaagggacaatttgttgcagaaattattgcaatttcttcagttctacatcgcaacctagtaaaactttacgggtgctgctttgaaggagatcatcgtttgctcgtatatgagtatctccctaatggaagtctcgatcaggcattatttggggataagagtttgcatcttgattggtcaacccgttatgagatatgtctgggagtagccagaggtctagtttatctccacgaggaagcaagtgttcgcataatacacagagatgtgaaggccagcaacattttactggactctgaactggtcccaaaagtttctgattttgggcttgcaaaactatatgatgacaagaaaacccatattagtaccagagtggcagggacgattgggtatcttgcgccagagtatgccatgcgtggacatctaacagagaaaacagatgtgtatgcctttggtgttgtggctcttgagctagtgagtggaaggaaaaactctgatgagaacctggaagagggaaaaaaatatcttcttgaatgggcatggaatctacacgagaaaaaccgtgacgttgaactaatagatgatgagctaagtgaatacaacatggaagaagtgaaacgcatgattggcattgctctgctttgcactcagtcatcttatgcgttgagaccaccaatgtcacgagtagtagccatgttgtcaggagatgctgaggtcaatgatgccacctctaagccaggctacctaaccgactgtacatttgatgacaccacaagctcctcattcagcaactttcaaacgaaagacactagcttctcgacgagctttatagcgcctggcccggagatgccacttagagacggcgaatcgaagccaatggttggattcaagatcaaggagggaagatga

SEQ ID NO: 86863 - protein, 1035 aa, Arabidopsis thaliana
  peptide (1)..(1035): Ceres Seq. ID no. 12694371
MLRLRRSLFLLLTVWFLCCSGLVHVMVRAQNRTRPTTHPDDARALNSIFAAWKIRAPREWNISGELCSGVAIDASVLDSNHAYNPLIKCDCSFQNSTICRINNIKVYAIDVVGPIPPELWTLTYLTNLYSSIQPTYPLFIFTSSLSPAIGNLTRMQWMTFGINALSGPIPKEIGLLTDLRLLGISSNNFSGSLPAEIGSCTKLQQMYIDSSGLSGGIPLSFANFVELEVAWIMDVELTGRIPDFIGFWTKLTTLRILGTGLSGPIPSSFSNLIALTELRLGDISNGSSSLDFIKDMKSLSVLVLRNNNLTGTIPSTIGGYTSLQQVDLSFNKLHGPIPASLFNLSRLTHLFLGNNTLNGSLPTLKGQSLSNLDVSYNDLSGSLPSWVSLPDLKLNLVANNFTLEGLDNRVLSGLHCLQKNFPCNRGEGIYYNFSINCGGPEIRSVSGALFEKEDADLGPASFVVSAAKRWAASSVGNFAGSSNNIYIATSLAQFINTMDSELFQSARLSASSLRYYGLGLENGGYTVTLQFAEVQIEGSNSWKGIGRRRFNIYVQGRLVEKDFDIRRTAGGSSVRAVQREYKTNVSENHLEVHLFWAGKGTCCIPIQGAYGPLIAAVSATPDFTPTVANRPPSKGKSRTGTIVGVIVGVGLLSIFAGVVILVIRKRRKPYTDDEEILSMDVKPYTFTYSELKNATQDFDLSNKLGEGGFGAVYKGNLNDGREVAVKQLSIGSRQGKGQFVAEIIAISSVLHRNLVKLYGCCFEGDHRLLVYEYLPNGSLDQALFGDKSLHLDWSTRYEICLGVARGLVYLHEEASVRIIHRDVKASNILLDSELVPKVSDFGLAKLYDDKKTHISTRVAGTIGYLAPEYAMRGHLTEKTDVYAFGVVALELVSGRKNSDENLEEGKKYLLEWAWNLHEKNRDVELIDDELSEYNMEEVKRMIGIALLCTQSSYALRPPMSRVVAMLSGDAEVNDATSKPGYLTDCTFDDTTSSSFSNFQTKDTSFSTSFIAPGPEMPLRDGESKPMVGFKIKEGR

SEQ ID NO: 86864 - protein, 1010 aa, Arabidopsis thaliana
  peptide (1)..(1010): Ceres Seq. ID no. 12694372
MVRAQNRTRPTTHPDDARALNSIFAAWKIRAPREWNISGELCSGVAIDASVLDSNHAYNPLIKCDCSFQNSTICRINNIKVYAIDVVGPIPPELWTLTYLTNLYSSIQPTYPLFIFTSSLSPAIGNLTRMQWMTFGINALSGPIPKEIGLLTDLRLLGISSNNFSGSLPAEIGSCTKLQQMYIDSSGLSGGIPLSFANFVELEVAWIMDVELTGRIPDFIGFWTKLTTLRILGTGLSGPIPSSFSNLIALTELRLGDISNGSSSLDFIKDMKSLSVLVLRNNNLTGTIPSTIGGYTSLQQVDLSFNKLHGPIPASLFNLSRLTHLFLGNNTLNGSLPTLKGQSLSNLDVSYNDLSGSLPSWVSLPDLKLNLVANNFTLEGLDNRVLSGLHCLQKNFPCNRGEGIYYNFSINCGGPEIRSVSGALFEKEDADLGPASFVVSAAKRWAASSVGNFAGSSNNIYIATSLAQFINTMDSELFQSARLSASSLRYYGLGLENGGYTVTLQFAEVQIEGSNSWKGIGRRRFNIYVQGRLVEKDFDIRRTAGGSSVRAVQREYKTNVSENHLEVHLFWAGKGTCCIPIQGAYGPLIAAVSATPDFTPTVANRPPSKGKSRTGTIVGVIVGVGLLSIFAGVVILVIRKRRKPYTDDEEILSMDVKPYTFTYSELKNATQDFDLSNKLGEGGFGAVYKGNLNDGREVAVKQLSIGSRQGKGQFVAEIIAISSVLHRNLVKLYGCCFEGDHRLLVYEYLPNGSLDQALFGDKSLHLDWSTRYEICLGVARGLVYLHEEASVRIIHRDVKASNILLDSELVPKVSDFGLAKLYDDKKTHISTRVAGTIGYLAPEYAMRGHLTEKTDVYAFGVVALELVSGRKNSDENLEEGKKYLLEWAWNLHEKNRDVELIDDELSEYNMEEVKRMIGIALLCTQSSYALRPPMSRVVAMLSGDAEVNDATSKPGYLTDCTFDDTTSSSFSNFQTKDTSFSTSFIAPGPEMPLRDGESKPMVGFKIKEGR

SEQ ID NO: 86865 - protein, 881 aa, Arabidopsis thaliana
  peptide (1)..(881): Ceres Seq. ID no. 12694373
MQWMTFGINALSGPIPKEIGLLTDLRLLGISSNNFSGSLPAEIGSCTKLQQMYIDSSGLSGGIPLSFANFVELEVAWIMDVELTGRIPDFIGFWTKLTTLRILGTGLSGPIPSSFSNLIALTELRLGDISNGSSSLDFIKDMKSLSVLVLRNNNLTGTIPSTIGGYTSLQQVDLSFNKLHGPIPASLFNLSRLTHLFLGNNTLNGSLPTLKGQSLSNLDVSYNDLSGSLPSWVSLPDLKLNLVANNFTLEGLDNRVLSGLHCLQKNFPCNRGEGIYYNFSINCGGPEIRSVSGALFEKEDADLGPASFVVSAAKRWAASSVGNFAGSSNNIYIATSLAQFINTMDSELFQSARLSASSLRYYGLGLENGGYTVTLQFAEVQIEGSNSWKGIGRRRFNIYVQGRLVEKDFDIRRTAGGSSVRAVQREYKTNVSENHLEVHLFWAGKGTCCIPIQGAYGPLIAAVSATPDFTPTVANRPPSKGKSRTGTIVGVIVGVGLLSIFAGVVILVIRKRRKPYTDDEEILSMDVKPYTFTYSELKNATQDFDLSNKLGEGGFGAVYKGNLNDGREVAVKQLSIGSRQGKGQFVAEIIAISSVLHRNLVKLYGCCFEGDHRLLVYEYLPNGSLDQALFGDKSLHLDWSTRYEICLGVARGLVYLHEEASVRIIHRDVKASNILLDSELVPKVSDFGLAKLYDDKKTHISTRVAGTIGYLAPEYAMRGHLTEKTDVYAFGVVALELVSGRKNSDENLEEGKKYLLEWAWNLHEKNRDVELIDDELSEYNMEEVKRMIGIALLCTQSSYALRPPMSRVVAMLSGDAEVNDATSKPGYLTDCTFDDTTSSSFSNFQTKDTSFSTSFIAPGPEMPLRDGESKPMVGFKIKEGR

SEQ ID NO: 86866 - DNA, 1275 bp, Arabidopsis thaliana
  misc_feature (1)..(1275): Ceres Seq. ID no. 12694399
  misc_feature (1)..(1275): Ortholog of  Ceres SEQ ID NO 15176433 as cited in SEQ ID NO 59539
atgaagaatctggtcatatttgccttcttgttcttaagcatcactactgtaatcaatggtggaataacaagtaaatttgtccgccaagctttaccatcgatcgaaatgtctctcgacactttcccttctcctggtggctacaacactcctgaacaggttcatctgactcaaggagaccatgatggacgtggcatgattgtctcgtgggtcacaccgttgaatctcgctggttctaacgttgttacctactggatcgctactaatggtagtgacgtaaagccagcgaaaaagagagctcatgcctccactaaatcttacagattctatgactatagttcaggatttctccatcacgccacaattaagggactcgagacttatgcttctaatgagacattgtatcattacatgtcaaaccctaaaggccaagctgttctctttgctggagacttgtcatatgcagacgaccacccgaatcatgaccagagaaagtgggatacttggggaagatttatggagccttgtgctgcttaccagcccttcatctttgctgccgggaatcatgaaattgattttgttccaaacattggtgagcctcacgcattcaagccctacactcaccgttaccctaacgcctacaaagcttcacaaagcacttctcctctttggtactcagtgagacgtgcttctgctcacatcatcgtcctctcttcttactcggcctacggaaaatacacgcctcaatacatttggcttgagcaagagctaaagaatgtgaacagagaagagactccatggttgattgtcattgttcactctccgtggtacaacagtaataactatcattacatggaaggtgagagcatgagagttatgtttgagtcgtggctcgttaacagcaaggttgatttggttttgtctggtcatgtccatgcctatgagagatctgaacgtatctccaatattaagtacaacatcaccaatggcttgagctctcctgtgaaagatcctaatgctcctatttacattactatcggagatggaggaaacattgaaggaattgcaaacagtttcgtggatccacaaccgagttactcagcatatagagaggcgagttttggccatgcggttttagagattatgaataggactcacgcgcagtacacatggcataggaaccaagacaacgagcctgtcgccgctgactctattatgttgcataacagacacttctttccggtggaggaaatagtttccagcaacattagggcctaa

SEQ ID NO: 86867 - protein, 424 aa, Arabidopsis thaliana
  peptide (1)..(424): Ceres Seq. ID no. 12694400
MKNLVIFAFLFLSITTVINGGITSKFVRQALPSIEMSLDTFPSPGGYNTPEQVHLTQGDHDGRGMIVSWVTPLNLAGSNVVTYWIATNGSDVKPAKKRAHASTKSYRFYDYSSGFLHHATIKGLETYASNETLYHYMSNPKGQAVLFAGDLSYADDHPNHDQRKWDTWGRFMEPCAAYQPFIFAAGNHEIDFVPNIGEPHAFKPYTHRYPNAYKASQSTSPLWYSVRRASAHIIVLSSYSAYGKYTPQYIWLEQELKNVNREETPWLIVIVHSPWYNSNNYHYMEGESMRVMFESWLVNSKVDLVLSGHVHAYERSERISNIKYNITNGLSSPVKDPNAPIYITIGDGGNIEGIANSFVDPQPSYSAYREASFGHAVLEIMNRTHAQYTWHRNQDNEPVAADSIMLHNRHFFPVEEIVSSNIRA

SEQ ID NO: 86868 - protein, 389 aa, Arabidopsis thaliana
  peptide (1)..(389): Ceres Seq. ID no. 12694401
MSLDTFPSPGGYNTPEQVHLTQGDHDGRGMIVSWVTPLNLAGSNVVTYWIATNGSDVKPAKKRAHASTKSYRFYDYSSGFLHHATIKGLETYASNETLYHYMSNPKGQAVLFAGDLSYADDHPNHDQRKWDTWGRFMEPCAAYQPFIFAAGNHEIDFVPNIGEPHAFKPYTHRYPNAYKASQSTSPLWYSVRRASAHIIVLSSYSAYGKYTPQYIWLEQELKNVNREETPWLIVIVHSPWYNSNNYHYMEGESMRVMFESWLVNSKVDLVLSGHVHAYERSERISNIKYNITNGLSSPVKDPNAPIYITIGDGGNIEGIANSFVDPQPSYSAYREASFGHAVLEIMNRTHAQYTWHRNQDNEPVAADSIMLHNRHFFPVEEIVSSNIRA

SEQ ID NO: 86869 - protein, 360 aa, Arabidopsis thaliana
  peptide (1)..(360): Ceres Seq. ID no. 12694402
MIVSWVTPLNLAGSNVVTYWIATNGSDVKPAKKRAHASTKSYRFYDYSSGFLHHATIKGLETYASNETLYHYMSNPKGQAVLFAGDLSYADDHPNHDQRKWDTWGRFMEPCAAYQPFIFAAGNHEIDFVPNIGEPHAFKPYTHRYPNAYKASQSTSPLWYSVRRASAHIIVLSSYSAYGKYTPQYIWLEQELKNVNREETPWLIVIVHSPWYNSNNYHYMEGESMRVMFESWLVNSKVDLVLSGHVHAYERSERISNIKYNITNGLSSPVKDPNAPIYITIGDGGNIEGIANSFVDPQPSYSAYREASFGHAVLEIMNRTHAQYTWHRNQDNEPVAADSIMLHNRHFFPVEEIVSSNIRA

SEQ ID NO: 86870 - DNA, 1050 bp, Arabidopsis thaliana
  misc_feature (1)..(1050): Ceres Seq. ID no. 12694461
  misc_feature (1)..(1050): Ortholog of  Ceres SEQ ID NO 14316404 as cited in SEQ ID NO 57641
  misc_feature (1)..(1050): Ortholog of  Ceres SEQ ID NO 15180029 as cited in SEQ ID NO 0
atgaagagacattcttgttgttacaaacaaaagctgagaaaaggtctttggtctcctgaagaagatgagaaacttctcaattacattaccaaacatggccatggttgctggagttctgtccctaaactcgcaggtctcgagagatgtggaaagagctgtagactcagatggatcaattacttaagacctgatttaaagagaggagctttctcttcagaggaacagaatctcattgtcgagcttcatgctgttcttggaaacagatggtcgcaaattgctgcgaggcttcccgggagaaccgacaacgagataaagaacttgtggaattcgtgcattaagaagaagctgatgaagaaaggcattgaccctattacacataaacccctctccgaggttggtaaagaaacaaacagaagcgacaataacaattccacaagtttttcctcagaaactaatcaagacttgtttgtcaagaaaacgtctgattttgccgagtattctgcgtttcagaaagaagaatccaactctgtttcactcagaaattcgctctcttccatgatcccaacgcaattcaacatcgacgatggttctgtctcaaatgcgggttttgatacacaagtatgcgtgaaaccctcgattattcttcttcctcctccaaacaacacttcaagcactgtctctggacaggatcatgtaaacgtgtcagagcctaattgggaatcaaacagtggaaccacaagccacctcaacaatcccggtatggaagaaatgaaatggtccgaggagtacctaaacgaatcgttattctctacccaagtttacgtgaaatcagagacggatttcaactccaacattgcctttccttggagccaaagccaagcttgtgacgtattccccaaggatcttcagagaatggccttctcttttggtggtcagaccctttagtttctttttcttatcagatttagacatattgatacgtgtaatgaatggatcaaatgttctatttggccatacgttaaaaaaataaaaaagcacaatcctttcctg

SEQ ID NO: 86871 - protein, 314 aa, Arabidopsis thaliana
  peptide (1)..(314): Ceres Seq. ID no. 12694462
MKRHSCCYKQKLRKGLWSPEEDEKLLNYITKHGHGCWSSVPKLAGLERCGKSCRLRWINYLRPDLKRGAFSSEEQNLIVELHAVLGNRWSQIAARLPGRTDNEIKNLWNSCIKKKLMKKGIDPITHKPLSEVGKETNRSDNNNSTSFSSETNQDLFVKKTSDFAEYSAFQKEESNSVSLRNSLSSMIPTQFNIDDGSVSNAGFDTQVCVKPSIILLPPPNNTSSTVSGQDHVNVSEPNWESNSGTTSHLNNPGMEEMKWSEEYLNESLFSTQVYVKSETDFNSNIAFPWSQSQACDVFPKDLQRMAFSFGGQTL

SEQ ID NO: 86872 - protein, 198 aa, Arabidopsis thaliana
  peptide (1)..(198): Ceres Seq. ID no. 12694463
MKKGIDPITHKPLSEVGKETNRSDNNNSTSFSSETNQDLFVKKTSDFAEYSAFQKEESNSVSLRNSLSSMIPTQFNIDDGSVSNAGFDTQVCVKPSIILLPPPNNTSSTVSGQDHVNVSEPNWESNSGTTSHLNNPGMEEMKWSEEYLNESLFSTQVYVKSETDFNSNIAFPWSQSQACDVFPKDLQRMAFSFGGQTL

SEQ ID NO: 86873 - DNA, 2079 bp, Arabidopsis thaliana
  misc_feature (1)..(2079): Ceres Seq. ID no. 12694485
  misc_feature (1)..(2079): Ortholog of  Ceres SEQ ID NO 13663060 as cited in SEQ ID NO 60964
  misc_feature (1)..(2079): Ortholog of  Ceres SEQ ID NO 13598532 as cited in SEQ ID NO 65204
  misc_feature (1)..(2079): Ortholog of  Ceres SEQ ID NO 13656849 as cited in SEQ ID NO 65764
  misc_feature (1)..(2079): Ortholog of  Ceres SEQ ID NO 13656501 as cited in SEQ ID NO 69206
atgggttgtatttgctcaaaaggagtacgtactaatgatgattacatagagacgaatcatgtaagtattggtaaagagaatcctaaagcttctaagaaacaatctgattcagaggaaactagtgttaatggaaacgaagctacattgaggttaatacctgatgatgtcaaggacactttctctgatgaggaagtggaggagctggaggagaagaaagagagtagctttgagatgaaatcttgtgaatctgtgttgcaaaaaggaaatgttttggagatagttgataatgtaggaccgttgcagcctaggatgagtaggattggtagtgttagtaatggagatagagcagctaaagttattgctggttggccttcatggttagtttcagttgctggtgaagctattaatggatggattcctcgtagtgctgattcgttcgagaagttggagatgattgggcaggggacgtatagtagtgtgtacagagctcgtgatctcgaaacaaaccagattgttgcacttaagaaggttcggtttgctaatatggatcctgagagtgtgaggtttatggcaagagaaattatcattctacgtaggcttaaccatccaaacgttatgaaactcgaagggctgatcatttcaaaagcttcgggaagtatgtatcttatatttgaatatatggatcatgatctcgcaggccttgcttcgacccctgggattaagttctctcaggcacagattaaatgttatatgaagcaattgttgcttgggttagaacattgccatagttgtggtgtgttgcaccgtgacatcaagtgctcaaatcttctgcttgatcgtaacaataatctcaagattggtgattttggtctttctaatttttaccggggccaacgaaagcagcctctgactagccgtgttgtgacattgtggtaccgcccacctgaacttctgcttgggtcaactgactatggagttacggttgatctatggagcacaggatgcatacttgctgaactctttactggaaagcctcttctacccggaagaaccgaggtagaacaaatgcacaagatctttaaactctgcggatcaccttctgaggagtattggagaagatcacggttgcggcatgcaaccatctttaaacctcaacatccctacaagcgatgtgtagctgatacatttaaggatcttccttcttcagctttggccctccttgaggttcttctagctgtagaaccagatgcacgtggaaccgcatcttcggcccttcaaagcgagttctttacgacaaaaccttttccaagtgagccatcaagtttaccgagatatcagccaaggaaagaatttgatgccaagcttcgagaagaggaagcaagacgacggaaaggttcgagcagtaaacagaatgaacagaagcggttggctagagagtccaaagctgtaccggctcctagtgccaatgccgagttactggcatcaatacagaaacgtctaggggagactaaccggacaagcattagtgagaagtttaatcctgagggagattctggcaatggcttccggatcgaaccactgaagggcaataccgcacaaaatccctacccaatctacacaaacggagacaaccatcctaacggatcaagccaactgagaacacaaaggtcctatgtccaacgcgggtctggccaattgtcaagattctcaaactcaatggcacctactagagatggatcacagtttggaagtatgagagacgctatagtgaaccaacgctggcttgaagatggttcagagaatttcaatttgtcccaaagattgttggagaaacctaatggtattaggaaagatgacccttcatcctctagcaaagagtcaataatgggctatgatggtgagaagagagggaggattcagtactcaggaccattgattccaggagaaggaaacttggatgaaatgttgaaagaacatgaaagacagatcttgttggctgtacgacgagctcaagccgataaggctaagagagacgataaccgacaggctcaaaccttgtttccagctaatggaaggtga

SEQ ID NO: 86874 - protein, 692 aa, Arabidopsis thaliana
  peptide (1)..(692): Ceres Seq. ID no. 12694486
MGCICSKGVRTNDDYIETNHVSIGKENPKASKKQSDSEETSVNGNEATLRLIPDDVKDTFSDEEVEELEEKKESSFEMKSCESVLQKGNVLEIVDNVGPLQPRMSRIGSVSNGDRAAKVIAGWPSWLVSVAGEAINGWIPRSADSFEKLEMIGQGTYSSVYRARDLETNQIVALKKVRFANMDPESVRFMAREIIILRRLNHPNVMKLEGLIISKASGSMYLIFEYMDHDLAGLASTPGIKFSQAQIKCYMKQLLLGLEHCHSCGVLHRDIKCSNLLLDRNNNLKIGDFGLSNFYRGQRKQPLTSRVVTLWYRPPELLLGSTDYGVTVDLWSTGCILAELFTGKPLLPGRTEVEQMHKIFKLCGSPSEEYWRRSRLRHATIFKPQHPYKRCVADTFKDLPSSALALLEVLLAVEPDARGTASSALQSEFFTTKPFPSEPSSLPRYQPRKEFDAKLREEEARRRKGSSSKQNEQKRLARESKAVPAPSANAELLASIQKRLGETNRTSISEKFNPEGDSGNGFRIEPLKGNTAQNPYPIYTNGDNHPNGSSQLRTQRSYVQRGSGQLSRFSNSMAPTRDGSQFGSMRDAIVNQRWLEDGSENFNLSQRLLEKPNGIRKDDPSSSSKESIMGYDGEKRGRIQYSGPLIPGEGNLDEMLKEHERQILLAVRRAQADKAKRDDNRQAQTLFPANGR

SEQ ID NO: 86875 - protein, 615 aa, Arabidopsis thaliana
  peptide (1)..(615): Ceres Seq. ID no. 12694487
MKSCESVLQKGNVLEIVDNVGPLQPRMSRIGSVSNGDRAAKVIAGWPSWLVSVAGEAINGWIPRSADSFEKLEMIGQGTYSSVYRARDLETNQIVALKKVRFANMDPESVRFMAREIIILRRLNHPNVMKLEGLIISKASGSMYLIFEYMDHDLAGLASTPGIKFSQAQIKCYMKQLLLGLEHCHSCGVLHRDIKCSNLLLDRNNNLKIGDFGLSNFYRGQRKQPLTSRVVTLWYRPPELLLGSTDYGVTVDLWSTGCILAELFTGKPLLPGRTEVEQMHKIFKLCGSPSEEYWRRSRLRHATIFKPQHPYKRCVADTFKDLPSSALALLEVLLAVEPDARGTASSALQSEFFTTKPFPSEPSSLPRYQPRKEFDAKLREEEARRRKGSSSKQNEQKRLARESKAVPAPSANAELLASIQKRLGETNRTSISEKFNPEGDSGNGFRIEPLKGNTAQNPYPIYTNGDNHPNGSSQLRTQRSYVQRGSGQLSRFSNSMAPTRDGSQFGSMRDAIVNQRWLEDGSENFNLSQRLLEKPNGIRKDDPSSSSKESIMGYDGEKRGRIQYSGPLIPGEGNLDEMLKEHERQILLAVRRAQADKAKRDDNRQAQTLFPANGR

SEQ ID NO: 86876 - protein, 589 aa, Arabidopsis thaliana
  peptide (1)..(589): Ceres Seq. ID no. 12694488
MSRIGSVSNGDRAAKVIAGWPSWLVSVAGEAINGWIPRSADSFEKLEMIGQGTYSSVYRARDLETNQIVALKKVRFANMDPESVRFMAREIIILRRLNHPNVMKLEGLIISKASGSMYLIFEYMDHDLAGLASTPGIKFSQAQIKCYMKQLLLGLEHCHSCGVLHRDIKCSNLLLDRNNNLKIGDFGLSNFYRGQRKQPLTSRVVTLWYRPPELLLGSTDYGVTVDLWSTGCILAELFTGKPLLPGRTEVEQMHKIFKLCGSPSEEYWRRSRLRHATIFKPQHPYKRCVADTFKDLPSSALALLEVLLAVEPDARGTASSALQSEFFTTKPFPSEPSSLPRYQPRKEFDAKLREEEARRRKGSSSKQNEQKRLARESKAVPAPSANAELLASIQKRLGETNRTSISEKFNPEGDSGNGFRIEPLKGNTAQNPYPIYTNGDNHPNGSSQLRTQRSYVQRGSGQLSRFSNSMAPTRDGSQFGSMRDAIVNQRWLEDGSENFNLSQRLLEKPNGIRKDDPSSSSKESIMGYDGEKRGRIQYSGPLIPGEGNLDEMLKEHERQILLAVRRAQADKAKRDDNRQAQTLFPANGR

SEQ ID NO: 86877 - DNA, 1261 bp, Arabidopsis thaliana
  misc_feature (1)..(1261): Ceres Seq. ID no. 12694555
  misc_feature (1)..(1261): Ortholog of  Ceres SEQ ID NO 13590307 as cited in SEQ ID NO 67154
acgctctctcactgatcattcacaatctctctctttttttcaccggcgataattttccgatctcgattataagatggcgaaggaaccagttcgtgttcttgttaccggagctgcaggacaaatcggatatgctcttgttcctatgattgcaagggggataatgcttggtgctgatcagcctgtgatcctccacatgcttgacatcccttttgcagcagaagctttgaacggtgtgaagatggaattggtcgatgctgctttccctcttctaaagggtgtggtggctacaactgatgctgttgaagcgtgtaccggtgttaatgttgctgtcatggttggtggtttcccgaggaaggaaggaatggagaggaaggatgttatgtccaagaacgtttccatttacaagtctcaagcttctgccttggagaagcatgctgcaccaaactgcaaggttctggttgttgcaaaccctgcaaacaccaatgcattgatcctgaaggaatttgcaccatcgatcccagagaagaacattacttgcttgaccaggcttgaccacaacagggcattgggacaagtgtctgagaggttaagcgtaccagtgtctgatgtgaagaacgtgattatctggggaaaccactcatcaacccaatacccagatgtcaaccacgctaccgttaagacttccgttggagagaagccagtgcgtgagctagtcaagaatgacgagtggttgaatggagagttcatctctaccgttcaacaacgtggtgctgccattatcaaggccaggaagctgtctagtgcactttctgcagctagctcagcttgtgaccatatccgtgattgggttgttggaacacctgagggcacatttgtttcaatgggagtatactcagatggatcctacaatgttccagctggacttatctactccttccccgtaacctgccgtaatggagagtggaccattgttcaaggtttaccgattgatgacgcatcgaggaagaagatggatttgacagcagaggagttgaaggaagagaaggacctcgcttactcatgcctctcttaaaccggtcttttctcagctggtttaatcagtgaaagctttgtttcgaataaagaagttttgttataaaatgaacttttaataacctcatgagcttgaggtttagttttcctaatgtgcccatgatgtgtcggtactgatttgctgaccagatataaacaatcattttgataattgacctcttttggtttc

SEQ ID NO: 86878 - protein, 332 aa, Arabidopsis thaliana; identical to SEQ ID NO: 28515
  peptide (1)..(332): Ceres Seq. ID no. 12694556

SEQ ID NO: 86879 - protein, 309 aa, Arabidopsis thaliana; identical to SEQ ID NO: 28516
  peptide (1)..(309): Ceres Seq. ID no. 12694557

SEQ ID NO: 86880 - protein, 303 aa, Arabidopsis thaliana; identical to SEQ ID NO: 28517
  peptide (1)..(303): Ceres Seq. ID no. 12694558

SEQ ID NO: 86881 - DNA, 1575 bp, Arabidopsis thaliana
  misc_feature (1)..(1575): Ceres Seq. ID no. 12694561
  misc_feature (1)..(1575): Ortholog of  Ceres SEQ ID NO 15173087 as cited in SEQ ID NO 67193
atggctgaacaacaactaggagtgctaaaggcactcgatgttgcgaagacgcaactttatcatttcacggcgattgtcatcgccggtatgggtttctttaccgatgcgtacgatcttttttgcgtgtccttggtaacaaagctccttggccgcatctactacttcaatccggagtcagcgaagcctggctcacttccccctcatgttgcggccgctgtcaatggtgtggccctttgtggaaccctttctggtcaactcttcttcggttggctcggtgacaaactcggacggaaaaaagtgtacggtcttactttgatcatgatgatcttatgctctgtcgcttctggcctctcttttggcaacgaagccaagggtgtcatgaccaccctttgcttcttcaggttttggttgggatttggtattggaggtgactacccactttctgccaccatcatgtctgaatacgcaaacaagaagacccgtggggctttcatcgcagctgtcttcgccatgcaaggtgtcggtatcttggctggaggtttcgtggcactcgcagtatcttctatattcgacaaaaagttcccagctccaacatatgcagtaaacagggccctctcaacgcctcctcaagttgattacatttggcgaatcatcgtcatgtttggtgctttacccgcagctttgacttactactggcgtatgaagatgcctgaaactgcccgttacaccgctttggttgccaagaacatcaaacaagccacagccgacatgtccaaggtcttacaaacagatatcgagcttgaggaaagggtggaggatgacgtcaaagaccccagacaaaactatggcttgttctccaaggaattccttagacgccatggacttcatctccttggaactacctccacttggtttttgcttgacattgccttctacagccaaaacttgttccagaaggatattttctcggccatcggatggatcccaaaggcagccaccatgaacgccacccatgaggttttcaggattgctagggctcagactcttatcgccctttgcagtacagtcccaggctactggttcacagttgcgtttattgataccattggaaggtttaagatccaactaaatggatttttcatgatgaccgtgtttatgtttgccattgccttcccttacaaccactggatcaaaccagaaaaccgtatcggatttgtggttatgtactctcttactttcttcttcgccaattttggtccaaatgcaaccacttttattgtccctgctgagatattcccggccaggctaaggtcaacatgtcatggaatatcagccgcggctggtaaggctggagccatcattggagccttcgggttcttatatgcggctcaaaatcaagacaaggctaaggtggatgcaggatacccaccaggtatcggagttaagaactcattgatcgtgcttggtgttcttaacttcatcggtatgctcttcaccttccttgtcccagagcccaagggcaagtccctcgaagaactctctggtgaagctgaagttagccatgacgagaaataa

SEQ ID NO: 86882 - protein, 524 aa, Arabidopsis thaliana
  peptide (1)..(524): Ceres Seq. ID no. 12694562
MAEQQLGVLKALDVAKTQLYHFTAIVIAGMGFFTDAYDLFCVSLVTKLLGRIYYFNPESAKPGSLPPHVAAAVNGVALCGTLSGQLFFGWLGDKLGRKKVYGLTLIMMILCSVASGLSFGNEAKGVMTTLCFFRFWLGFGIGGDYPLSATIMSEYANKKTRGAFIAAVFAMQGVGILAGGFVALAVSSIFDKKFPAPTYAVNRALSTPPQVDYIWRIIVMFGALPAALTYYWRMKMPETARYTALVAKNIKQATADMSKVLQTDIELEERVEDDVKDPRQNYGLFSKEFLRRHGLHLLGTTSTWFLLDIAFYSQNLFQKDIFSAIGWIPKAATMNATHEVFRIARAQTLIALCSTVPGYWFTVAFIDTIGRFKIQLNGFFMMTVFMFAIAFPYNHWIKPENRIGFVVMYSLTFFFANFGPNATTFIVPAEIFPARLRSTCHGISAAAGKAGAIIGAFGFLYAAQNQDKAKVDAGYPPGIGVKNSLIVLGVLNFIGMLFTFLVPEPKGKSLEELSGEAEVSHDEK

SEQ ID NO: 86883 - protein, 495 aa, Arabidopsis thaliana
  peptide (1)..(495): Ceres Seq. ID no. 12694563
MGFFTDAYDLFCVSLVTKLLGRIYYFNPESAKPGSLPPHVAAAVNGVALCGTLSGQLFFGWLGDKLGRKKVYGLTLIMMILCSVASGLSFGNEAKGVMTTLCFFRFWLGFGIGGDYPLSATIMSEYANKKTRGAFIAAVFAMQGVGILAGGFVALAVSSIFDKKFPAPTYAVNRALSTPPQVDYIWRIIVMFGALPAALTYYWRMKMPETARYTALVAKNIKQATADMSKVLQTDIELEERVEDDVKDPRQNYGLFSKEFLRRHGLHLLGTTSTWFLLDIAFYSQNLFQKDIFSAIGWIPKAATMNATHEVFRIARAQTLIALCSTVPGYWFTVAFIDTIGRFKIQLNGFFMMTVFMFAIAFPYNHWIKPENRIGFVVMYSLTFFFANFGPNATTFIVPAEIFPARLRSTCHGISAAAGKAGAIIGAFGFLYAAQNQDKAKVDAGYPPGIGVKNSLIVLGVLNFIGMLFTFLVPEPKGKSLEELSGEAEVSHDEK

SEQ ID NO: 86884 - protein, 418 aa, Arabidopsis thaliana
  peptide (1)..(418): Ceres Seq. ID no. 12694564
MMILCSVASGLSFGNEAKGVMTTLCFFRFWLGFGIGGDYPLSATIMSEYANKKTRGAFIAAVFAMQGVGILAGGFVALAVSSIFDKKFPAPTYAVNRALSTPPQVDYIWRIIVMFGALPAALTYYWRMKMPETARYTALVAKNIKQATADMSKVLQTDIELEERVEDDVKDPRQNYGLFSKEFLRRHGLHLLGTTSTWFLLDIAFYSQNLFQKDIFSAIGWIPKAATMNATHEVFRIARAQTLIALCSTVPGYWFTVAFIDTIGRFKIQLNGFFMMTVFMFAIAFPYNHWIKPENRIGFVVMYSLTFFFANFGPNATTFIVPAEIFPARLRSTCHGISAAAGKAGAIIGAFGFLYAAQNQDKAKVDAGYPPGIGVKNSLIVLGVLNFIGMLFTFLVPEPKGKSLEELSGEAEVSHDEK

SEQ ID NO: 86885 - DNA, 2334 bp, Arabidopsis thaliana
  misc_feature (1)..(2334): Ceres Seq. ID no. 12694610
  misc_feature (1)..(2334): Ortholog of  Ceres SEQ ID NO 15169274 as cited in SEQ ID NO 55176
atgggagatggagatgagcaaagtaaagagttaggaggagtttcgtcttcgagtcgtcgttgttcttccggtactgctggtgctgcaaatgcagaagcaagaatgaagtttgctgctgttgatgctataacagaattagtgtggtctcctagcaacggtctaagcttaagatgtgcagatatcagtttcacgggaaaggcaaaattactctctcctaacttctttgatataggactaactaacatggcgattcactcaaatagcacaagtattgaagaccaagaagatcacgtagatgtcgaattgagaaaccgagatcaagtgaaccaagcaatgattggtggttctgttgaggatatgaaacctgaaatggttgaggataaggttgaaaccaatgatgatataaagaatgaagaagcaggatgttccaaaagatcttcagcatgtgaaggtaaaggggactatttgccggagggtgaggctggacctagtggttcctacaggcgtcgtgagaaagcaaaagggaaagagaaagctttatctgatgaaaactttggtggtgatggtgaagatgaggatgaggagagttttggtagtgtagaaagttgcaatagtgcgggtttgctctcaaggggaaagaaaagaccaggctttgaggagcagctgatttttggaagcaaacggctcaaaacgttaaatcaagaatgtttggggtcaacttcaaagctcaagcaagatagttccttcatgaattggatatcaaatatgactaaaggaatctggaaaggtaatgaagaagacaattctccttttgtagctcttaccaccacctcaaatgctaatggtcatggccaagtcaatgccatcgttgaccaacaacaattgagtccatgctgtgtgaaggaaaatagtggatgcagaaacaccggtttccagtcttttttccagtctatatattgtccgaagaaacaaagtcaagatgtcgtcgacatggatttcccgaatgatgttaatgctgctcctttgcaggaacttccctggattcctgaacattgcgacatttccaaaggggatgacttgtcttcatctggtaatgagattggtccagtggctgaacccaacatttcatcaggaaaagttgtatttaatcagacaagcaaaacacagtcttcagagaacaaacgtgaggacaaagagccaaacatctcgttgatgtctcttagtaagtctaagccaaatgaagagccaaaaacatgcggtgaagctgatggaaaggttagtccatgtttaaccaacagaaactctggtcttaaaagtttgtggattagtcggttttcttctaaaggttcgttccctcagaaaaaggcaagtgaaacggctaaagaggccaatgcttcagcctcagacgcagctaaaacccgtgattcacggaaaatgctggcagacaagaatgttataagacccagtatcagctcggtagatgggcccgataaaccggacactgtccttcctatagtttcgtcaatgagaatagagtcttcagaagcaatggcttctttgtttgctagaagattagaagcaatgaaaagcatcatgccctcaggttctttagctgagaatgcagaggaggaacagagggatctaatttgtttctactgcggtaaaaagggtcattgtttacgggattgtttggaagtaactgatactgagctcagagatctagtacagaacataagtgtgcggaatggaagagaagaagcgtcaagtctatgcattagatgttttcagcttagtcactgggctgcaacatgcccgaatgctcccctgtatggttcaggagctgaaggtagagctatgaagaacgctttagcttctacctctggcatgaagctgcccataagtggtttcacagacgtaccaagggcggtctttgatgctgttcaagtgcttcgcctgagccgcacagacgttctcaaatggataaacaccaagaagtctgtatcgggtctcgaagggttcttcttgcggttaaggctcgggaaatgggaagaagggcttggaggaacagggtattatgtagctcgcatagatggggacacagagggacaaagctcaaggagacattcagagaaaagcttaatttcagttaaggttaaaggtgtgacttgccttgttgagtctcagtttatctcaaaccaagactttcttgaggaggagttaaaggcctggtggcagagcgcggggaaaagtgccagaacaagcggctacgacggcatcccgtcggcggaggaacttagtcggaaaattcagcagagaaaaatgttaggcttttag

SEQ ID NO: 86886 - protein, 777 aa, Arabidopsis thaliana
  peptide (1)..(777): Ceres Seq. ID no. 12694611
MGDGDEQSKELGGVSSSSRRCSSGTAGAANAEARMKFAAVDAITELVWSPSNGLSLRCADISFTGKAKLLSPNFFDIGLTNMAIHSNSTSIEDQEDHVDVELRNRDQVNQAMIGGSVEDMKPEMVEDKVETNDDIKNEEAGCSKRSSACEGKGDYLPEGEAGPSGSYRRREKAKGKEKALSDENFGGDGEDEDEESFGSVESCNSAGLLSRGKKRPGFEEQLIFGSKRLKTLNQECLGSTSKLKQDSSFMNWISNMTKGIWKGNEEDNSPFVALTTTSNANGHGQVNAIVDQQQLSPCCVKENSGCRNTGFQSFFQSIYCPKKQSQDVVDMDFPNDVNAAPLQELPWIPEHCDISKGDDLSSSGNEIGPVAEPNISSGKVVFNQTSKTQSSENKREDKEPNISLMSLSKSKPNEEPKTCGEADGKVSPCLTNRNSGLKSLWISRFSSKGSFPQKKASETAKEANASASDAAKTRDSRKMLADKNVIRPSISSVDGPDKPDTVLPIVSSMRIESSEAMASLFARRLEAMKSIMPSGSLAENAEEEQRDLICFYCGKKGHCLRDCLEVTDTELRDLVQNISVRNGREEASSLCIRCFQLSHWAATCPNAPLYGSGAEGRAMKNALASTSGMKLPISGFTDVPRAVFDAVQVLRLSRTDVLKWINTKKSVSGLEGFFLRLRLGKWEEGLGGTGYYVARIDGDTEGQSSRRHSEKSLISVKVKGVTCLVESQFISNQDFLEEELKAWWQSAGKSARTSGYDGIPSAEELSRKIQQRKMLGF

SEQ ID NO: 86887 - protein, 743 aa, Arabidopsis thaliana
  peptide (1)..(743): Ceres Seq. ID no. 12694612
MKFAAVDAITELVWSPSNGLSLRCADISFTGKAKLLSPNFFDIGLTNMAIHSNSTSIEDQEDHVDVELRNRDQVNQAMIGGSVEDMKPEMVEDKVETNDDIKNEEAGCSKRSSACEGKGDYLPEGEAGPSGSYRRREKAKGKEKALSDENFGGDGEDEDEESFGSVESCNSAGLLSRGKKRPGFEEQLIFGSKRLKTLNQECLGSTSKLKQDSSFMNWISNMTKGIWKGNEEDNSPFVALTTTSNANGHGQVNAIVDQQQLSPCCVKENSGCRNTGFQSFFQSIYCPKKQSQDVVDMDFPNDVNAAPLQELPWIPEHCDISKGDDLSSSGNEIGPVAEPNISSGKVVFNQTSKTQSSENKREDKEPNISLMSLSKSKPNEEPKTCGEADGKVSPCLTNRNSGLKSLWISRFSSKGSFPQKKASETAKEANASASDAAKTRDSRKMLADKNVIRPSISSVDGPDKPDTVLPIVSSMRIESSEAMASLFARRLEAMKSIMPSGSLAENAEEEQRDLICFYCGKKGHCLRDCLEVTDTELRDLVQNISVRNGREEASSLCIRCFQLSHWAATCPNAPLYGSGAEGRAMKNALASTSGMKLPISGFTDVPRAVFDAVQVLRLSRTDVLKWINTKKSVSGLEGFFLRLRLGKWEEGLGGTGYYVARIDGDTEGQSSRRHSEKSLISVKVKGVTCLVESQFISNQDFLEEELKAWWQSAGKSARTSGYDGIPSAEELSRKIQQRKMLGF

SEQ ID NO: 86888 - protein, 696 aa, Arabidopsis thaliana
  peptide (1)..(696): Ceres Seq. ID no. 12694613
MAIHSNSTSIEDQEDHVDVELRNRDQVNQAMIGGSVEDMKPEMVEDKVETNDDIKNEEAGCSKRSSACEGKGDYLPEGEAGPSGSYRRREKAKGKEKALSDENFGGDGEDEDEESFGSVESCNSAGLLSRGKKRPGFEEQLIFGSKRLKTLNQECLGSTSKLKQDSSFMNWISNMTKGIWKGNEEDNSPFVALTTTSNANGHGQVNAIVDQQQLSPCCVKENSGCRNTGFQSFFQSIYCPKKQSQDVVDMDFPNDVNAAPLQELPWIPEHCDISKGDDLSSSGNEIGPVAEPNISSGKVVFNQTSKTQSSENKREDKEPNISLMSLSKSKPNEEPKTCGEADGKVSPCLTNRNSGLKSLWISRFSSKGSFPQKKASETAKEANASASDAAKTRDSRKMLADKNVIRPSISSVDGPDKPDTVLPIVSSMRIESSEAMASLFARRLEAMKSIMPSGSLAENAEEEQRDLICFYCGKKGHCLRDCLEVTDTELRDLVQNISVRNGREEASSLCIRCFQLSHWAATCPNAPLYGSGAEGRAMKNALASTSGMKLPISGFTDVPRAVFDAVQVLRLSRTDVLKWINTKKSVSGLEGFFLRLRLGKWEEGLGGTGYYVARIDGDTEGQSSRRHSEKSLISVKVKGVTCLVESQFISNQDFLEEELKAWWQSAGKSARTSGYDGIPSAEELSRKIQQRKMLGF

SEQ ID NO: 86889 - DNA, 1086 bp, Arabidopsis thaliana
  misc_feature (1)..(1086): Ceres Seq. ID no. 12694662
  misc_feature (1)..(1086): Ortholog of  Ceres SEQ ID NO 14314442 as cited in SEQ ID NO 52358
  misc_feature (1)..(1086): Ortholog of  Ceres SEQ ID NO 12610442 as cited in SEQ ID NO 56281
  misc_feature (1)..(1086): Ortholog of  Ceres SEQ ID NO 12610713 as cited in SEQ ID NO 56591
  misc_feature (1)..(1086): Ortholog of  Ceres SEQ ID NO 12587345 as cited in SEQ ID NO 62844
  misc_feature (1)..(1086): Ortholog of  Ceres SEQ ID NO 13597357 as cited in SEQ ID NO 68961
  misc_feature (1)..(1086): Ortholog of  Ceres SEQ ID NO 13587656 as cited in SEQ ID NO 0
  misc_feature (1)..(1086): Ortholog of  Ceres SEQ ID NO 14309353 as cited in SEQ ID NO 0
  misc_feature (1)..(1086): Ortholog of  Ceres SEQ ID NO 15177686 as cited in SEQ ID NO 0
ctcatcattttctcgtttgctccatttttttcttctttctgcaaattttattttcccgagaaaatcatcactgagaaaaatgctcgctgtgtttgagaagacggtggcgaatagccctgaagctttacagagtccacactcgtctgagtctgctttcgcgttgaaagatggatctctcgctactcatttcgcttccgtgaatcccaactccgtcacgcttaacttcggatcttctggatttgttgcttactctcttgataatcctgatcctcgtgttcctagattatttgctgtggtggatgatattttctgtctcttccaaggacacattgagaacctaccgtttctgaagcagcagtatggactgaacaaaatcacaaacgaggccatcattgtgattgaggcttacaggacactacgtgatcgaggtccttaccctgtggacaaagttgttagagatttccatggaaagtttgcgtttatactcttcgatagcgtcaagaaaactgtctttgctgctgctgacgccgatgggagtgtgccgttcttctggggaaccgatgctgaagggcaccttgtgttttctgataacaccgagatggtgaagaaaggttgcgccaaatcttatggtcctttccctaaaggttgtttctttacgtcgtcgggtggattgaggagctttgagcacccaaagaacgagttgaagccagtgccgagagtggacagctcaggtgacgtgtgtggtgcaaccttcaaggttgacgctgagactaagagagagggtaccaaaatgcctagagtcgatagctcccaaaattgggccggtcatatctaaaccggaaatcatacacaaatcacaagctcagcatcttctccctcttgtcttgtcccctctctttcgttacatgtttgagttacattgagaaaataatttcaaaccacaatgttctaaacgcgtttatgtacatgtttgaggtgggatttggaaaggatgtcgagttttgtgaaactttggaattacgagactactagacttttgtttctctgtttacgtttcttaaatcaataaataaataagtttttatt

SEQ ID NO: 86890 - protein, 277 aa, Arabidopsis thaliana; identical to SEQ ID NO: 28949
  peptide (1)..(277): Ceres Seq. ID no. 12694663

SEQ ID NO: 86891 - protein, 251 aa, Arabidopsis thaliana; identical to SEQ ID NO: 28950
  peptide (1)..(251): Ceres Seq. ID no. 12694664

SEQ ID NO: 86892 - DNA, 758 bp, Arabidopsis thaliana
  misc_feature (1)..(758): Ceres Seq. ID no. 12694665
  misc_feature (1)..(758): Ortholog of  Ceres SEQ ID NO 13661767 as cited in SEQ ID NO 61423
gaaatcaaaaaagcatttacacaacgaagatcattaatggctctcgaggcatggtttatggatgatagcaatgaggaccagagacttcctcatcatcgtaacccgaaagaactcgtctcgttggattacttggcagagttgggagtgttgtactggaagttgaaccctgagaactacgagaatgattctgaacttagcaagattagagaagacaggggttacgattacatggatttgctggatctgtgtcccgagaaagtcagcaactacgaagaaaagctgaagaactttttcacagaacacattcacaaggacgaagagattcggtactgcctagcaggaagtggctactttgatgttagggacaaggatgatcgttggatccgtatctggatgcaacctggcgatctcattgtccttcctgccggaatctaccaccggttcacactcgacgccagcaactacatcaagctaatgaggctgttcgtgggggaaccggtttggacaccatataaccggccacaggaagaacatcctgttaggaaaaagtatatccacggcttaacctacaagtttggagaaaccgttaaagcacattaacaatattaatatatgcttgttgtgtaatttgtatgtattgtttactctttagtcttaagcagtaaaataaaaacagcggctccttctggatagttgttcttgtaacatacttttgcgatgtatgcttttatacataaaaaaaatagtgtgtatttatc

SEQ ID NO: 86893 - protein, 199 aa, Arabidopsis thaliana
  peptide (1)..(199): Ceres Seq. ID no. 12694666
EIKKAFTQRRSLMALEAWFMDDSNEDQRLPHHRNPKELVSLDYLAELGVLYWKLNPENYENDSELSKIREDRGYDYMDLLDLCPEKVSNYEEKLKNFFTEHIHKDEEIRYCLAGSGYFDVRDKDDRWIRIWMQPGDLIVLPAGIYHRFTLDASNYIKLMRLFVGEPVWTPYNRPQEEHPVRKKYIHGLTYKFGETVKAH

SEQ ID NO: 86894 - protein, 187 aa, Arabidopsis thaliana; identical to SEQ ID NO: 36180
  peptide (1)..(187): Ceres Seq. ID no. 12694667

SEQ ID NO: 86895 - protein, 180 aa, Arabidopsis thaliana; identical to SEQ ID NO: 36181
  peptide (1)..(180): Ceres Seq. ID no. 12694668

SEQ ID NO: 86896 - DNA, 1524 bp, Arabidopsis thaliana
  misc_feature (1)..(1524): Ceres Seq. ID no. 12694792
  misc_feature (1)..(1524): Ortholog of  Ceres SEQ ID NO 13600220 as cited in SEQ ID NO 0
atgagaactaaatatttttctttgctagtgtttattattgtcttggcttctaatgaagttatagccaagaaacactcttcaacacctaaattaagaagaagtgattttccaaaagattttatttttggagctgcaacgtcagcttaccaagtcgaaggagctgctcatgaagatggtagaggtccaagtatttgggatacattctctgaaaaatatccggagaagataaaagatggtaccaatggatctattgcaagtgattcttaccatctttacaaggaagatgtgggtttactacatcaaattggtttcggtgcctatagattctctatctcgtggtcgaggatcttgccacgtgggaatctaaaaggaggtatcaaccaagctggtattgactattacaacaacttgatcaatgagcttttgtctaaaggaattaagccattcgccaccatttttcattgggacacaccgcaaagccttgaagatgcttacggaggattctttggcgcggagattgtgaatgacttccgcgattatgcggatatttgcttcaagaattttggagatcgagtgaagcattggatgacattgaacgaaccattaacagttgtgcaacaaggatatgttgctggtgtaatggctcctggaaggtgttcaaaattcacaaaccctaattgcaccgcgggaaatggagctaccgagccttatattgttggtcacaacctcattcttgctcatggagaagcagtcaaagtatatagagaaaaatataaggcatctcaaaaaggtcaagttggtatcgctttgaacgcgggttggaacttgccttataccgaatcagctgaagatagattagctgcggcacgagccatggccttcacattcgactatttcatggagccgcttgtaaccggtaaatatccggttgacatggtcaacaacgtaaaagacggtcgcttacctacatttactgcaaaacaatctaagatgttgaaaggatcatatgatttcattggcatcaattattactcatcttcttacgctaaggatgttccttgctcaagcgaaaacgttacattattctctgatccttgtgctagcgtcacaggtgaaagagaaggagtgcctatcggtccaaaggcagcatcagattggcttttgatatatccaaaaggaattcgtgatctccttctctatgcaaaatacaagttcaaggatcctgtcatgtatataacagagaatggtagagatgaagctagtaccggtaaaatcgaccttaaagatagtgagaggatcgattactacgctcaacatttgaagatggttcaagacgctatatcaattggagccaatgttaaaggattctttgcgtggtctttgctagataattttgaatgggcaacgggctactcagtccgatttggactagtttacgtggatttcaacgatggacgtaagagatatccaaagaaatcggcaaaatggttcagaaagttattgagcgaaaagaaaaggaattga

SEQ ID NO: 86897 - protein, 507 aa, Arabidopsis thaliana
  peptide (1)..(507): Ceres Seq. ID no. 12694793
MRTKYFSLLVFIIVLASNEVIAKKHSSTPKLRRSDFPKDFIFGAATSAYQVEGAAHEDGRGPSIWDTFSEKYPEKIKDGTNGSIASDSYHLYKEDVGLLHQIGFGAYRFSISWSRILPRGNLKGGINQAGIDYYNNLINELLSKGIKPFATIFHWDTPQSLEDAYGGFFGAEIVNDFRDYADICFKNFGDRVKHWMTLNEPLTVVQQGYVAGVMAPGRCSKFTNPNCTAGNGATEPYIVGHNLILAHGEAVKVYREKYKASQKGQVGIALNAGWNLPYTESAEDRLAAARAMAFTFDYFMEPLVTGKYPVDMVNNVKDGRLPTFTAKQSKMLKGSYDFIGINYYSSSYAKDVPCSSENVTLFSDPCASVTGEREGVPIGPKAASDWLLIYPKGIRDLLLYAKYKFKDPVMYITENGRDEASTGKIDLKDSERIDYYAQHLKMVQDAISIGANVKGFFAWSLLDNFEWATGYSVRFGLVYVDFNDGRKRYPKKSAKWFRKLLSEKKRN

SEQ ID NO: 86898 - protein, 312 aa, Arabidopsis thaliana
  peptide (1)..(312): Ceres Seq. ID no. 12694794
MTLNEPLTVVQQGYVAGVMAPGRCSKFTNPNCTAGNGATEPYIVGHNLILAHGEAVKVYREKYKASQKGQVGIALNAGWNLPYTESAEDRLAAARAMAFTFDYFMEPLVTGKYPVDMVNNVKDGRLPTFTAKQSKMLKGSYDFIGINYYSSSYAKDVPCSSENVTLFSDPCASVTGEREGVPIGPKAASDWLLIYPKGIRDLLLYAKYKFKDPVMYITENGRDEASTGKIDLKDSERIDYYAQHLKMVQDAISIGANVKGFFAWSLLDNFEWATGYSVRFGLVYVDFNDGRKRYPKKSAKWFRKLLSEKKRN

SEQ ID NO: 86899 - protein, 294 aa, Arabidopsis thaliana
  peptide (1)..(294): Ceres Seq. ID no. 12694795
MAPGRCSKFTNPNCTAGNGATEPYIVGHNLILAHGEAVKVYREKYKASQKGQVGIALNAGWNLPYTESAEDRLAAARAMAFTFDYFMEPLVTGKYPVDMVNNVKDGRLPTFTAKQSKMLKGSYDFIGINYYSSSYAKDVPCSSENVTLFSDPCASVTGEREGVPIGPKAASDWLLIYPKGIRDLLLYAKYKFKDPVMYITENGRDEASTGKIDLKDSERIDYYAQHLKMVQDAISIGANVKGFFAWSLLDNFEWATGYSVRFGLVYVDFNDGRKRYPKKSAKWFRKLLSEKKRN

SEQ ID NO: 86900 - DNA, 953 bp, Arabidopsis thaliana
  misc_feature (1)..(953): Ceres Seq. ID no. 12694812
  misc_feature (1)..(953): Ortholog of  Ceres SEQ ID NO 13598761 as cited in SEQ ID NO 63673
  misc_feature (1)..(953): Ortholog of  Ceres SEQ ID NO 14305455 as cited in SEQ ID NO 0
aagcaaacacaagataagaagaaacaaacaatggcgatttctttcatttagatattttcctcgattcttagcttctggattttggtgaaaggatttgaaatggcggtgtcgcttttatcgaaactacggtgtataacagtagatgttactggtacacttatagcttacaaaggagagcttggtgattactattgtatggctgctaaagccattggtttgccttgtcctgattataaacgagttcatgaaggttttaaactagcttatacagatatggcacaaaagtatccttgtttcggtttccatgccaaaatgccaaacattgtttggtggaaaacttgtgtgagagattcatttgtcaaggcaggatatgagtatgatgaggagacatttgagaagatatttaggagaatctattcgacgtttggttctgctgcaccttactctgtgtttcaagattctcaaccgtttttaagatgggcacgcaggaaaggtcttatagtcggacttgttagcaatgcggaataccgatatcaagaagttattttaccttccttcggtttgagcaaggcagagtgggattttggtgtattctctggaattgaagggatagagaaaccagatccgaggatttttacgctcgcgctagagagagccgggaataatattgcgcctgaagaggttttgcatattggagacagcatgcgcaaagattatgttccagcaaagagtattgggatgcatgctttgttggttgataggtttaagacggaagctgctaaagactggatagaagctggagccattgtgcttccagatttggttgctgttcaacaacttttggagtctgataagttgaaatgttaaaatgcagacctctctttaagtatgaaatctaatgtattgtagtattgcacatttgagtaaaataagtttcaacggcttctttggtt

SEQ ID NO: 86901 - protein, 255 aa, Arabidopsis thaliana; identical to SEQ ID NO: 24852
  peptide (1)..(255): Ceres Seq. ID no. 12694813

SEQ ID NO: 86902 - protein, 223 aa, Arabidopsis thaliana; identical to SEQ ID NO: 24853
  peptide (1)..(223): Ceres Seq. ID no. 12694814

SEQ ID NO: 86903 - protein, 197 aa, Arabidopsis thaliana; identical to SEQ ID NO: 24854
  peptide (1)..(197): Ceres Seq. ID no. 12694815

SEQ ID NO: 86904 - DNA, 657 bp, Arabidopsis thaliana
  misc_feature (1)..(657): Ceres Seq. ID no. 12694991
  misc_feature (1)..(657): Ortholog of  Ceres SEQ ID NO 15178931 as cited in SEQ ID NO 1125
  misc_feature (1)..(657): Ortholog of  Ceres SEQ ID NO 13596648 as cited in SEQ ID NO 63080
atggtggcgcaaaacagtcggcgggagcttctagcagcttccctgatcctaactttagctctaattcgtctaacggaagcaaactccgaaggggacgctcttcacgcgcttcgccggagcttatcagatccagacaatgttgttcagagttgggatccaactcttgttaatccttgtacttggtttcatgtcacttgtaatcaacaccatcaagtcactcgtctggatttggggaattcaaacttatctggacatctagtacctgaacttgggaagcttgaacatttacaatatcttgaactctacaaaaacgagattcaaggaactataccttctgagcttggaaatctgaagagtctaatcagtttggatctgtacaacaacaatctcaccgggaaaatcccatcttctttgggaaaattgaagtcacttgtttttttgcggcttaacgaaaaccgattgaccggtcctattcctagagaactcacagttatttcaagccttaaagttgttgatgtctcagggaatgatttgtgtggaacaattccagtagaaggaccttttgaacacattcctatgcaaaactttgagaacaacctgagattggagggaccagaactactaggtcttgcgagctatgacaccaattgcacttaa

SEQ ID NO: 86905 - protein, 218 aa, Arabidopsis thaliana
  peptide (1)..(218): Ceres Seq. ID no. 12694992
MVAQNSRRELLAASLILTLALIRLTEANSEGDALHALRRSLSDPDNVVQSWDPTLVNPCTWFHVTCNQHHQVTRLDLGNSNLSGHLVPELGKLEHLQYLELYKNEIQGTIPSELGNLKSLISLDLYNNNLTGKIPSSLGKLKSLVFLRLNENRLTGPIPRELTVISSLKVVDVSGNDLCGTIPVEGPFEHIPMQNFENNLRLEGPELLGLASYDTNCT

SEQ ID NO: 86906 - DNA, 1638 bp, Arabidopsis thaliana
  misc_feature (1)..(1638): Ceres Seq. ID no. 12695078
  misc_feature (1)..(1638): Ortholog of  Ceres SEQ ID NO 15176403 as cited in SEQ ID NO 52988
atggagatcgaatccgtcgcagctggttcttgttccaaggagaatcaaatgatctacaaggaatggttcgaattctccgattcagacggcgatggccgtattactggtaacgatgcgatcaagttcttcactatgtcgaatttgcctcgtccggaattgaagcagatctgggctattgcagattcaaagagacaagggtatcttggtttcaaagagtttattgttgccatgcagcttgtttcgttggctcaaactggacatgaaatatcgcatgaagttcttattagcgatgttgatttcaaaaatatcaatcctcctaccatggaaggtctgggtgtattaatggcgaaaaagaagcattcatcaaagtcgagtgatcctaatatgaatggtagccctgccgcagacacctcacttacagctcactggttctcttcaaaatcttcaaaaaagatttctctgtcctccgtaacatctatagtggatggcctgaagaggttgtacattcagaagctgaagccacttgaagtagcatatcggtttaacgattttgtatcccctttgttgactaacagtgatttcgatgcaaaacctatggtaatgcttctgggtcaatactccacaggaaaaacaacattcattaagcatttgcttaaatctacttatccaggagctcatattggaccagagccgactactgacagatttgttgttgtcatgtctggacctgatgaaagaagcattccggggaacacagtagcagttcaagcagatatgccattcagtggtcttacaacttttgggactgcctttttgtcaaagtttgaatgctctcagatgcctcaccctctgctggagcatgtaacatttgtcgacacccctggagttttatcaggggaaaaacaaagaacacagcgagcatatgatttcactggtgttacatcatggtttgcctctaagtgtgatcttatcctcctcctatttgacccacacaagctggatgtaagtgatgagttcaagcgtgtaatttcatctttacgcggtcatgatgacaagatccgcgttgttctgaataaggctgaccaagtggacactcagcagctaatgagggtatatggagctctcatgtggtcacttgggaaagttctcaatactcctgaggtctctcgtgtctacattggttccttcagtgataaacccataaacgaagctgcaactggtccaattgggagagagttgtttgaaaaggagcaagatgaccttcttgctgatttgaaagacattcctaagaaagcttgtgatcgtcgaataaatgagtttgtgaaacgggcaagagcagcaaagatacatgcgtacatcatcagccatttgaagaaggagatgccagcgataatggggaaagccaaagctcaacagaaactgatagataacttggaagacgagtttggaaaggtacaaagagagcatcacttacctaaaggagatttcccaaatgtggatcatttcagggaggtgctaagtggttacaacatcgacaagtttgagaagctaaagccgaaaatgttgcagactgttgatgatatgttggggtatgacatcccagagctcttgaaaaatttcaaaaacccttatgattaa

SEQ ID NO: 86907 - protein, 545 aa, Arabidopsis thaliana; identical to SEQ ID NO: 36226
  peptide (1)..(545): Ceres Seq. ID no. 12695079

SEQ ID NO: 86908 - protein, 529 aa, Arabidopsis thaliana; identical to SEQ ID NO: 36227
  peptide (1)..(529): Ceres Seq. ID no. 12695080

SEQ ID NO: 86909 - protein, 501 aa, Arabidopsis thaliana; identical to SEQ ID NO: 36228
  peptide (1)..(501): Ceres Seq. ID no. 12695081

SEQ ID NO: 86910 - DNA, 2022 bp, Arabidopsis thaliana
  misc_feature (1)..(2022): Ceres Seq. ID no. 12695096
  misc_feature (1)..(2022): Ortholog of  Ceres SEQ ID NO 14307827 as cited in SEQ ID NO 54367
atgaagttcaccggaaaatcaaatttgacggctacattacccgcaactgtcccaaatatcagggatattcatagaaggagagcgcgaaaaccgagcttcactcgtcaacgaagatctggcgtgtctgtcaggaggctaagcaggccggagactcctcaattgaaatcgaaggtggaggatcaaaacattgagcgatgcggcggggttgaagatggtgataacgaggatgatgattgtaataagatgcgttgtcaggaacggagtaggagtgtacggcctgatactgttaggaaacttgctgccggagtgtggcgattgcgagtcccggatgcggtttctagcggcggagataagaggagcaaggatcggttacggtttcaggaaactgctggtcctgctggaaacttgggtcctctgttttattatcaccaccatgatgacaaacattctggctttcaaagcaacaattcaagaaacaagcatagtagattcttgtgtaagcatgagccttcagttccatttccccactgcgcgatggagggagcaacaaaatgggatcccatctgcttggatacaagggatgatgtacaccaaatctataccaacgtgaagtggaataatcaacaagtgaatgatgtttcattagcttcttctattgaattgaaacttcaggaagctcgtgcttgcattaaggatcttgagagtgagaagcgatctcagaaaaagaagcttgagcagttcctgaagaaagttagcgaggagagggcagcttggcggagcagagagcatgagaaggtccgagcaattattgatgacatgaaagctgacatgaaccaggaaaagaagactcgtcagagattagaaatcgtcaattcaaaattagtcaatgagcttgcagattcaaagttagcagtaaagcgttacatgcatgattaccaacaggaaaggaaggcaagagaattgatcgaagaagtttgtgatgaactggcaaaggaaatagaagaagataaagctgagattgaagcattgaagagcgaatccatgaatctcagagaggaagtagacgatgaaagaagaatgctgcagatggctgaggtttggcgtgaggaacgtgtccagatgaagcttattgatgccaaagtaacactcgaggaaaagtattcacaaatgaacaaactcgtaggagatatggaagccttcctcagttcaagaaatactacaggtgtgaaagaggtgagagttgcggaattgttaagagaaactgctgcatcagttgataatatccaagaaatcaaggaatttacgtatgaacccgcaaagccggacgatatcctcatgttgtttgaacaaatgaacatgggtgaaaaccaggatagagaaagcgagcaatatgttgcctacagtccggtcagccacgcttcaaaagctcacacggtaagtccagatgtcaatttgattaacaaagggagacactcgaatgctttcactgatcagaatggtgaatttgaagaagatgacagtggctgggaaactgtgagccattctgaagaacacggatccagttactctccagatgagagcatccctaatattagcaacactcatcaccgtaacagcaatgtatcgatgaatggaacagagtatgaaaagactctattgagagaaataaaagaagtgtgctcggttccaagacgacaatccaaaaagttaccgtcaatggcaaagctctggagttcattagaaggtatgaatggaagggtttcaaacgcgagaaaatcaaccgtggagatggtttcaccagaaacaggctcaaacaaaggcggattcaacacattggacctggttggtcaatggagctcatcaccagactcggctaatgctaatttaaatcgaggagggaggaaagggtgcatagagtggccaagaggggcacataagaacagcttgaagacaaagctcatagaagcacaaatcgagagccaaaaggttcagctgaagcatgtccttgagcataagatctag

SEQ ID NO: 86911 - protein, 673 aa, Arabidopsis thaliana
  peptide (1)..(673): Ceres Seq. ID no. 12695097
MKFTGKSNLTATLPATVPNIRDIHRRRARKPSFTRQRRSGVSVRRLSRPETPQLKSKVEDQNIERCGGVEDGDNEDDDCNKMRCQERSRSVRPDTVRKLAAGVWRLRVPDAVSSGGDKRSKDRLRFQETAGPAGNLGPLFYYHHHDDKHSGFQSNNSRNKHSRFLCKHEPSVPFPHCAMEGATKWDPICLDTRDDVHQIYTNVKWNNQQVNDVSLASSIELKLQEARACIKDLESEKRSQKKKLEQFLKKVSEERAAWRSREHEKVRAIIDDMKADMNQEKKTRQRLEIVNSKLVNELADSKLAVKRYMHDYQQERKARELIEEVCDELAKEIEEDKAEIEALKSESMNLREEVDDERRMLQMAEVWREERVQMKLIDAKVTLEEKYSQMNKLVGDMEAFLSSRNTTGVKEVRVAELLRETAASVDNIQEIKEFTYEPAKPDDILMLFEQMNMGENQDRESEQYVAYSPVSHASKAHTVSPDVNLINKGRHSNAFTDQNGEFEEDDSGWETVSHSEEHGSSYSPDESIPNISNTHHRNSNVSMNGTEYEKTLLREIKEVCSVPRRQSKKLPSMAKLWSSLEGMNGRVSNARKSTVEMVSPETGSNKGGFNTLDLVGQWSSSPDSANANLNRGGRKGCIEWPRGAHKNSLKTKLIEAQIESQKVQLKHVLEHKI

SEQ ID NO: 86912 - protein, 592 aa, Arabidopsis thaliana
  peptide (1)..(592): Ceres Seq. ID no. 12695098
MRCQERSRSVRPDTVRKLAAGVWRLRVPDAVSSGGDKRSKDRLRFQETAGPAGNLGPLFYYHHHDDKHSGFQSNNSRNKHSRFLCKHEPSVPFPHCAMEGATKWDPICLDTRDDVHQIYTNVKWNNQQVNDVSLASSIELKLQEARACIKDLESEKRSQKKKLEQFLKKVSEERAAWRSREHEKVRAIIDDMKADMNQEKKTRQRLEIVNSKLVNELADSKLAVKRYMHDYQQERKARELIEEVCDELAKEIEEDKAEIEALKSESMNLREEVDDERRMLQMAEVWREERVQMKLIDAKVTLEEKYSQMNKLVGDMEAFLSSRNTTGVKEVRVAELLRETAASVDNIQEIKEFTYEPAKPDDILMLFEQMNMGENQDRESEQYVAYSPVSHASKAHTVSPDVNLINKGRHSNAFTDQNGEFEEDDSGWETVSHSEEHGSSYSPDESIPNISNTHHRNSNVSMNGTEYEKTLLREIKEVCSVPRRQSKKLPSMAKLWSSLEGMNGRVSNARKSTVEMVSPETGSNKGGFNTLDLVGQWSSSPDSANANLNRGGRKGCIEWPRGAHKNSLKTKLIEAQIESQKVQLKHVLEHKI

SEQ ID NO: 86913 - protein, 495 aa, Arabidopsis thaliana
  peptide (1)..(495): Ceres Seq. ID no. 12695099
MEGATKWDPICLDTRDDVHQIYTNVKWNNQQVNDVSLASSIELKLQEARACIKDLESEKRSQKKKLEQFLKKVSEERAAWRSREHEKVRAIIDDMKADMNQEKKTRQRLEIVNSKLVNELADSKLAVKRYMHDYQQERKARELIEEVCDELAKEIEEDKAEIEALKSESMNLREEVDDERRMLQMAEVWREERVQMKLIDAKVTLEEKYSQMNKLVGDMEAFLSSRNTTGVKEVRVAELLRETAASVDNIQEIKEFTYEPAKPDDILMLFEQMNMGENQDRESEQYVAYSPVSHASKAHTVSPDVNLINKGRHSNAFTDQNGEFEEDDSGWETVSHSEEHGSSYSPDESIPNISNTHHRNSNVSMNGTEYEKTLLREIKEVCSVPRRQSKKLPSMAKLWSSLEGMNGRVSNARKSTVEMVSPETGSNKGGFNTLDLVGQWSSSPDSANANLNRGGRKGCIEWPRGAHKNSLKTKLIEAQIESQKVQLKHVLEHKI

SEQ ID NO: 86914 - DNA, 1469 bp, Arabidopsis thaliana
  misc_feature (1)..(1469): Ceres Seq. ID no. 12695185
  misc_feature (1)..(1469): Ortholog of  Ceres SEQ ID NO 13596090 as cited in SEQ ID NO 68377
  misc_feature (1)..(1469): Ortholog of  Ceres SEQ ID NO 14303557 as cited in SEQ ID NO 68595
accatttcaaagtgccactttttcttcctaaatcctctctctctctctccgttcccgagacaagcaaaagcttcaatctcaaatctttcagcagctacaaaaatgttcttcatctaaaagagactgtgaagcagagagagagagagagagagagagagagagagatgggaggtgtgacgtcatcagttgcggcgaagttcgctttcttcccgccgagtccgtcgtcttacaagctggtttacgatgaactgaccggacttcttctgatgaacccatttcctcaccgtgaaaacgttgaaatccttaagcttccgacacgtagaggaacagagatcgtggctatgtacgtcagacatccgatggctacctctactctgctttattcccatggaaacgccgccgatctgggccagatgtatgagctcttcatcgaattgagcatccatcttaaggttaatctcatggggtacgattactccgggtatggacaatctactggaaagccaagtgagcaccatacatatgctgatatcgaagctgcttataaatgtcttgaggaaacctatggagcaaaacaggaagacataatcctttatggccaatccgttggaagtggacctacattagatcttgctgctcggttgcctcaattaagagctgctgttctccatagcccgattctttctggtctaagagtaatgtatccagtgaagaagacatactggttcgacatcttcaagaatatcgacaaaatacctcttgtgaattgcccggttctcgtcattcacggaacttgtgatgaagttgttgactgttctcatggaaaacaactatgggaactctctaaagagaaatatgaaccgctttggctcgaaggcggtaaccactgtgatctagaacactatcctgaatacattaaacaccttaagaagttcatcacaaccgtagagagagatctctcctcgagggcgagcacggcccaattagagaaacagagcagcgatttggaaatgccgaggcagagcgtagatagaagagagaagccgaggcaaagcgttgataaaagggagaaagagaaacctccaaagggtccttcaaagaagagtaagctgagaatcacgttcgagcagcacttagatcggactaggagaagcgttgacttccacgaaaaggcaaggaagagcgttgaccatcatcagcatcatcagaatcatcatcagattgagagaggaaggaagagtgttgatagattggatagagtacggtctgagtaaaccggagaaaatctaccacacgtacataagttgttacagaacaagaacatttgatcttgatcttgattggccattctaatgtttatggttttttgttttgatttgtgagttattctctagttttatttgggtgtgtcatttcttgaatggtgaagcttaaatcttaagcaaacaaatgagagaaattaggtcttt

SEQ ID NO: 86915 - protein, 423 aa, Arabidopsis thaliana
  peptide (1)..(423): Ceres Seq. ID no. 12695186
HFKVPLFLPKSSLSLSVPETSKSFNLKSFSSYKNVLHLKETVKQREREREREREMGGVTSSVAAKFAFFPPSPSSYKLVYDELTGLLLMNPFPHRENVEILKLPTRRGTEIVAMYVRHPMATSTLLYSHGNAADLGQMYELFIELSIHLKVNLMGYDYSGYGQSTGKPSEHHTYADIEAAYKCLEETYGAKQEDIILYGQSVGSGPTLDLAARLPQLRAAVLHSPILSGLRVMYPVKKTYWFDIFKNIDKIPLVNCPVLVIHGTCDEVVDCSHGKQLWELSKEKYEPLWLEGGNHCDLEHYPEYIKHLKKFITTVERDLSSRASTAQLEKQSSDLEMPRQSVDRREKPRQSVDKREKEKPPKGPSKKSKLRITFEQHLDRTRRSVDFHEKARKSVDHHQHHQNHHQIERGRKSVDRLDRVRSE

SEQ ID NO: 86916 - protein, 369 aa, Arabidopsis thaliana; identical to SEQ ID NO: 41674
  peptide (1)..(369): Ceres Seq. ID no. 12695187

SEQ ID NO: 86917 - protein, 335 aa, Arabidopsis thaliana; identical to SEQ ID NO: 41675
  peptide (1)..(335): Ceres Seq. ID no. 12695188

SEQ ID NO: 86918 - DNA, 2771 bp, Arabidopsis thaliana
  misc_feature (1)..(2771): Ceres Seq. ID no. 12695189
  misc_feature (1)..(2771): Ortholog of  Ceres SEQ ID NO 15171224 as cited in SEQ ID NO 52348
agacgacagaaaagctaaccacaagaggaggagagaaactcgataacaaacaagagaaagagaaagcgagattctaaaatctaatctcgtgcttccaattcaaataattttgtctccttagcggatcgatcgtagattataaagctccgccgtcgcctccgccgcaatcgacggcggtgtctacgtcgctttcgtttcgtgcgtaacaggaggagcagcagcaaaataagtcagcttaagtaacgccgtctttgatttgacttgagataagtattttggtgatatggcattgatgatgtttccgcatttgctcgacgttgacgaaaagtaaaatgctggcgaattggaagaaaccacatacagattgatgctctcttcagtcgacctcttttgtaaatttgttgaaacttacggggtcgaaggtgtgtagcatatatgctataagaagattataaagtaaaaattatggaatcgggttcagagaaaaagttccctctcaatgcaaaagactacaagttatatgaagaaattggagatggtgtcagtgcgactgtgcatagagctttgtgtataccgcttaatgtggtagttgctatcaaggttcttgatctggaaaagtgcaacaacgatctggatgggatccggagagaggtgcaaacaatgagtctgatcaaccatccaaatgtgttgcaagctcattgctcatttaccaccggacaccagctttgggttgtgatgccttacatggctggaggatcttgtctccatataattaagtcttcctatccagatggatttgaggaacctgttatcgctactttacttcgtgagactctgaaagctcttgtatatcttcatgctcatgggcatatccacagggatgtgaaggctggaaacattttattggattccaatggtgccgttaagttagcagactttggagtatcagcttgcatgtttgatacgggagatagacaacgttccagaaatacatttgttgggactccatgctggatggctcctgaagtcatgcagcaactacatggatatgatttcaaagcagatgtatggtcatttggaataacagcacttgaattggcacatggtcatgccccattttccaaatatccgccaatgaaggttttgctgatgaccttacaaaatgcacctcctggacttgactacgagagagacaaaagattctcgaaagccttcaaggaaatggtgggtacatgcctggtgaaggacccaaagaagcgtccaacttcagaaaagcttttgaaacaccctttcttcaaacatgcacgtccagctgattacctggttaaaacaattctaaatggtcttcctccattaggtgatcgctatagacaaataaagtcgaaggaagctgatctcctaatgcaaaacaaatctgaatatgaagcgcacttatcacagcaagagtatataaggggaataagcgcttggaatttcaatctcgaggacctaaaaactcaagctgcccttatttcagatgatgatacttcacatgctgaagagcccgatttcaaccaaaagcaatgtgaaagacaggatgaatctgctctttcccctgaaagggctagcagctcagcaacagctcctagtcaagatgacgaactgaatgatattcatgatttagagagttctttcgcctcatttccaatcaaacctcttcaagcactaaaaggctgctttgatatcagtgaggacgaggataatgcaactactcctgattggaaagatgctaatgtaaattctggacaacagcttttaacaaaggcttccattggatctttggccgaaaccacgaaagaagaggacactgcagcacaaaacacttctttaccacgtcatgtcatttctgaacagaaaaaatatttgagcggttcaattataccagagagtactttctctccaaaaagaatcacatctgatgctgatagggagtttcaacagcgtagatatcaaacagagcggagctacagcggatcattataccgcaccaagagagattccgtggacgagacgtcagaagtcccgcatgtggagcacaagggacggtttaaggtcacatcagcagatctgagtcccaagggatctacaaactctacattcacaccatttagtggtggtacaagcagccctagttgcctcaatgctacaaccgcctcaatcctcccatcaattcagtcgattttgcagcaaaatgctatgcaacgggaagagattttgagactaatcaaatacttggagcaaacctctgccaagcaacctggatcgcctgagacgaacgtcgatgacctattgcagacgcctcctgcaacctcacgagagagagaacttcagtctcaagtcatgctactacaacaaagcttttccagcctaacagaagaactaaagaaacagaagcagaaaaatgggcagttggagaatcagttgaacgcattaacacacagaaatgattgagtctcaaaagccatcgagacaaggctgagagatacaactggggatcttgagttaaaaaaacacaaaattccctttcaaggcaaaaagaagaaatagagaagatttgtgtgctttatatttctattgggtgtaatttgtttgacaggtttatattatgtgacaactactacagtgattttcttatttttggggaagttttccccacttttcttttttacttatttgtgttttatgatatgctatgtaaacaaaatactattgtttaattatgtttctgtgtg

SEQ ID NO: 86919 - protein, 674 aa, Arabidopsis thaliana
  peptide (1)..(674): Ceres Seq. ID no. 12695190
MESGSEKKFPLNAKDYKLYEEIGDGVSATVHRALCIPLNVVVAIKVLDLEKCNNDLDGIRREVQTMSLINHPNVLQAHCSFTTGHQLWVVMPYMAGGSCLHIIKSSYPDGFEEPVIATLLRETLKALVYLHAHGHIHRDVKAGNILLDSNGAVKLADFGVSACMFDTGDRQRSRNTFVGTPCWMAPEVMQQLHGYDFKADVWSFGITALELAHGHAPFSKYPPMKVLLMTLQNAPPGLDYERDKRFSKAFKEMVGTCLVKDPKKRPTSEKLLKHPFFKHARPADYLVKTILNGLPPLGDRYRQIKSKEADLLMQNKSEYEAHLSQQEYIRGISAWNFNLEDLKTQAALISDDDTSHAEEPDFNQKQCERQDESALSPERASSSATAPSQDDELNDIHDLESSFASFPIKPLQALKGCFDISEDEDNATTPDWKDANVNSGQQLLTKASIGSLAETTKEEDTAAQNTSLPRHVISEQKKYLSGSIIPESTFSPKRITSDADREFQQRRYQTERSYSGSLYRTKRDSVDETSEVPHVEHKGRFKVTSADLSPKGSTNSTFTPFSGGTSSPSCLNATTASILPSIQSILQQNAMQREEILRLIKYLEQTSAKQPGSPETNVDDLLQTPPATSRERELQSQVMLLQQSFSSLTEELKKQKQKNGQLENQLNALTHRND

SEQ ID NO: 86920 - protein, 609 aa, Arabidopsis thaliana
  peptide (1)..(609): Ceres Seq. ID no. 12695191
MSLINHPNVLQAHCSFTTGHQLWVVMPYMAGGSCLHIIKSSYPDGFEEPVIATLLRETLKALVYLHAHGHIHRDVKAGNILLDSNGAVKLADFGVSACMFDTGDRQRSRNTFVGTPCWMAPEVMQQLHGYDFKADVWSFGITALELAHGHAPFSKYPPMKVLLMTLQNAPPGLDYERDKRFSKAFKEMVGTCLVKDPKKRPTSEKLLKHPFFKHARPADYLVKTILNGLPPLGDRYRQIKSKEADLLMQNKSEYEAHLSQQEYIRGISAWNFNLEDLKTQAALISDDDTSHAEEPDFNQKQCERQDESALSPERASSSATAPSQDDELNDIHDLESSFASFPIKPLQALKGCFDISEDEDNATTPDWKDANVNSGQQLLTKASIGSLAETTKEEDTAAQNTSLPRHVISEQKKYLSGSIIPESTFSPKRITSDADREFQQRRYQTERSYSGSLYRTKRDSVDETSEVPHVEHKGRFKVTSADLSPKGSTNSTFTPFSGGTSSPSCLNATTASILPSIQSILQQNAMQREEILRLIKYLEQTSAKQPGSPETNVDDLLQTPPATSRERELQSQVMLLQQSFSSLTEELKKQKQKNGQLENQLNALTHRND

SEQ ID NO: 86921 - protein, 584 aa, Arabidopsis thaliana
  peptide (1)..(584): Ceres Seq. ID no. 12695192
MPYMAGGSCLHIIKSSYPDGFEEPVIATLLRETLKALVYLHAHGHIHRDVKAGNILLDSNGAVKLADFGVSACMFDTGDRQRSRNTFVGTPCWMAPEVMQQLHGYDFKADVWSFGITALELAHGHAPFSKYPPMKVLLMTLQNAPPGLDYERDKRFSKAFKEMVGTCLVKDPKKRPTSEKLLKHPFFKHARPADYLVKTILNGLPPLGDRYRQIKSKEADLLMQNKSEYEAHLSQQEYIRGISAWNFNLEDLKTQAALISDDDTSHAEEPDFNQKQCERQDESALSPERASSSATAPSQDDELNDIHDLESSFASFPIKPLQALKGCFDISEDEDNATTPDWKDANVNSGQQLLTKASIGSLAETTKEEDTAAQNTSLPRHVISEQKKYLSGSIIPESTFSPKRITSDADREFQQRRYQTERSYSGSLYRTKRDSVDETSEVPHVEHKGRFKVTSADLSPKGSTNSTFTPFSGGTSSPSCLNATTASILPSIQSILQQNAMQREEILRLIKYLEQTSAKQPGSPETNVDDLLQTPPATSRERELQSQVMLLQQSFSSLTEELKKQKQKNGQLENQLNALTHRND

SEQ ID NO: 86922 - DNA, 1565 bp, Arabidopsis thaliana
  misc_feature (1)..(1565): Ceres Seq. ID no. 12695205
  misc_feature (1)..(1565): Ortholog of  Ceres SEQ ID NO 15177022 as cited in SEQ ID NO 57405
  misc_feature (1)..(1565): Ortholog of  Ceres SEQ ID NO 13597427 as cited in SEQ ID NO 64038
gcatcgcctgtttttataatttctcgtcttgtacaaaataaaagactctctctctcttaaaatttctctttcgattctctcgcatttcaaaatttcatttccttatatagactcttaaggccggcgatttctgtgagtccatagattttcgctactccgccgtcagtttttctcaactccggaggctgtgtttttgccaccgctttgattcgccggtaagttcacgtatggccagtaatactttgaaagagatgaatagtcttcatgtaactgagaagataagtgactgtaaagctagcttgaccaagccatgtgttggtaaaatgaatggaaaatctgaagatagaccattaccaaactctgcctccttggattccagtgattctaaagttgtagaagcagagaaacccgagccagagatagctattgtggaagttgaatatattgaatctgaaaacttggataatgtagacgatgctgatgcagttctgaagtctgttttagctggactagagtccaaggactggatttcactctgtgatgctcttaataacgttcgccgactttcgatattccacaaggaagaaatgatgcatatgcttgaaaaagtgataccacttgtcgtgaaatcactgaaaaatccaagaagtgcggtgtgtaaaacggcatgcatgacatctgcagatatcttcagtgcatataataatcatataacagatctgttggagcctctgcttactcaactactcctcaagtcttcccaagacaaacggtttgtttgcgaggcagcagagaaagctttaacagcaatgaccaaatatgtttccccaaccttgctgttaccaaagctgcaaccttgtctcaaaaacaggaatcctcggatccgtgccaaagcatcattatgcttttctcgaagtgttcctcgactgggcgttgaagggattaaagaatatggaatcgacaaattagttcaagcagccgcatctcagcttagcgatcagctccctgaatcccgtgaggctgcacggactgtcctactagaacttcagagcgtatatgaaaaagctcatcctctcatcaaccctgagacatcatcaccagaagaacagcaaatcccggaggtagagccaattacttgggaaactttctgcaagtcaaaactgtcggctcttagcgcacaagccgtgcttcgtgtcaccaatgttgtcactgttactgctcgggagggtttggttactacaggttcatcatcttcatcccagttataaacattttctactacaaattttttaaaaaccgtttgctacgagtcatacggtttacatggtattctccggcatggcggcatgatctaccaaattggcaaattatggaccgataaaaagagtgaacgttcgtgtatgaaaaatcttggcttctttctgggttattttctttttgtggattctcatctgtcttcactaccagtacttgtttctttttcttatgtgtatatattctataccaagatttggtaagatagtcatgagtcttttggttatatgcaaaattggtcggattctttg

SEQ ID NO: 86923 - protein, 346 aa, Arabidopsis thaliana; identical to SEQ ID NO: 38495
  peptide (1)..(346): Ceres Seq. ID no. 12695206

SEQ ID NO: 86924 - protein, 338 aa, Arabidopsis thaliana; identical to SEQ ID NO: 38496
  peptide (1)..(338): Ceres Seq. ID no. 12695207

SEQ ID NO: 86925 - protein, 314 aa, Arabidopsis thaliana; identical to SEQ ID NO: 38497
  peptide (1)..(314): Ceres Seq. ID no. 12695208

SEQ ID NO: 86926 - DNA, 1464 bp, Arabidopsis thaliana
  misc_feature (1)..(1464): Ceres Seq. ID no. 12695209
  misc_feature (1)..(1464): Ortholog of  Ceres SEQ ID NO 13597559 as cited in SEQ ID NO 65274
aaaaatcgaccaaagagtaaccaaattgatatttatctcttctcaaccatggcgatgagacaagccgctaaggcaacgatcagggcctgttcttcctcttcttcttcgggttacttcgctcgacgtcagtttaatgcatcttctggtgatagcaaaaagattgtaggagttttctacaaggccaacgaatacgctaccaagaaccctaacttccttggctgcgtcgagaatgccttaggaatccgtgactggcttgaatcccaaggacatcagtacatcgtcactgatgacaaggaaggccctgattgcgaacttgagaaacatatcccggatcttcacgtcctaatctccactcccttccacccggcgtatgtaactgctgaaagaatcaagaaagccaaaaacttgaagcttctcctcacagctggtattggctcggatcatattgatctccaggcagctgcagctgctggcctgacggttgctgaagtcacgggaagcaacgtggtctcagtggcagaagatgagctcatgagaatcttaatcctcatgcgcaacttcgtaccagggtacaaccaggtcgtcaaaggcgagtggaacgtcgcgggcattgcgtacagagcttatgatcttgaagggaagacgataggaaccgtgggagctggaagaatcggaaagcttttgctgcagcggttgaaaccattcgggtgtaacttgttgtaccatgacaggcttcagatggcaccagagctggagaaagagactggagctaagttcgttgaggatctgaatgaaatgctccctaaatgtgacgttatagtcatcaacatgcctctcacggagaagacaagaggaatgttcaacaaagagttgatagggaaattgaagaaaggcgttttgatagtgaacaacgcaagaggagccatcatggagaggcaagcagtggtggatgcggtggagagtggacacattggagggtacagcggagacgtttgggacccacagccagctcctaaggaccatccatggcgttacatgcctaaccaggctatgacccctcatacctccggcaccaccattgacgctcagctacggtatgcggcggggacgaaagacatgttggagagatacttcaagggagaagacttccctactgagaattacatcgtcaaggacggtgaacttgctcctcagtaccggtaagcttttgaggaggtgacattgggaagatgatgagaaacgaccccaacgttcaagaaaacaaataaagaagtatttggactttgctaagtcgaatgacttgagtcatcttttggtttagtttttgttattatataagcacaataataataggagggcacttcccctgttctgagagtttgtgaacatattactcagtggtttaaatcacacatatgtatttgtttccccaatcgtaggaactcaatggtttcaaatctcatt

SEQ ID NO: 86927 - protein, 400 aa, Arabidopsis thaliana
  peptide (1)..(400): Ceres Seq. ID no. 12695210
KNRPKSNQIDIYLFSTMAMRQAAKATIRACSSSSSSGYFARRQFNASSGDSKKIVGVFYKANEYATKNPNFLGCVENALGIRDWLESQGHQYIVTDDKEGPDCELEKHIPDLHVLISTPFHPAYVTAERIKKAKNLKLLLTAGIGSDHIDLQAAAAAGLTVAEVTGSNVVSVAEDELMRILILMRNFVPGYNQVVKGEWNVAGIAYRAYDLEGKTIGTVGAGRIGKLLLQRLKPFGCNLLYHDRLQMAPELEKETGAKFVEDLNEMLPKCDVIVINMPLTEKTRGMFNKELIGKLKKGVLIVNNARGAIMERQAVVDAVESGHIGGYSGDVWDPQPAPKDHPWRYMPNQAMTPHTSGTTIDAQLRYAAGTKDMLERYFKGEDFPTENYIVKDGELAPQYR

SEQ ID NO: 86928 - protein, 384 aa, Arabidopsis thaliana; identical to SEQ ID NO: 76128
  peptide (1)..(384): Ceres Seq. ID no. 12695211

SEQ ID NO: 86929 - protein, 382 aa, Arabidopsis thaliana; identical to SEQ ID NO: 76129
  peptide (1)..(382): Ceres Seq. ID no. 12695212

SEQ ID NO: 86930 - DNA, 1251 bp, Arabidopsis thaliana
  misc_feature (1)..(1251): Ceres Seq. ID no. 12695226
  misc_feature (1)..(1251): Ortholog of  Ceres SEQ ID NO 15224625 as cited in SEQ ID NO 1390
gctctcgcgcttttctctctctctctcgcgttcgttcttatccacgagctctgcaccgtcgcaatctccgtcttctccatttagatccaacacagagccttttctacatgaaattcggcaaagagtttcgtactcacctcgaagaaactttaccagagtggagagacaagttcctttgctataaacctttaaaaaagcttctcaaatattatccttattactccgccgattttggacccgccaattccgatcacaacgattcgcgtccagtatttgctgatactactaacatctcttccgccgccgacgacggcggtgtggttcccggcgtcaggccatcggaagatctccagggttcgtttgtgaggatacttaacgatgaacttgagaagtttaacgatttttacgttgataaggaagaagatttcgttatcagattacaggagctcaaggaaagaatcgagcaagttaaagaaaagaatggggaatttgcatcagaaagtgagttcagcgaagaaatgatggatattcggagagaccttgttaccattcatggcgagatggtgctcctgaaaaactacagctcccttaattttgcaggacttgtcaagattttgaagaagtacgataaaagaacaggtggacttttacgtttgcctttcacacagcttgttctccatcaacccttctttactacagagccacttactaggttagtccgtgaatgtgaggccaatcttgagcttctttttccttcagaagcggaagttgtagagtcttctagcgcagtgcaagcacactcaagctcacatcagcacaactccccaagaatctcagctgagacttcctcaactctcggcaatgaaaatcttgatatatataagagtacactcgctgcaatgagagctataagagggttacaaaaggctagctcgacgtacaaccctttatcattctcatcgcttcttcagaacgaggatgatgagacggtaacagctgaaaactctccaaactctgggaacaaagatgattcagagaaggaagatactggaccttcccactgatcagaagagaatgatgctctttttgatcaagattttgagaatttgcttcttgatttcaccctaacttttcataaaattaacacattttactttacttcttcaccttttgcaggacacaacttctgtatgcatttgaattgtagtacagtcgtttatagattttcaatgaaattttcctccattgtct

SEQ ID NO: 86931 - protein, 353 aa, Arabidopsis thaliana
  peptide (1)..(353): Ceres Seq. ID no. 12695227
SRAFLSLSRVRSYPRALHRRNLRLLHLDPTQSLFYMKFGKEFRTHLEETLPEWRDKFLCYKPLKKLLKYYPYYSADFGPANSDHNDSRPVFADTTNISSAADDGGVVPGVRPSEDLQGSFVRILNDELEKFNDFYVDKEEDFVIRLQELKERIEQVKEKNGEFASESEFSEEMMDIRRDLVTIHGEMVLLKNYSSLNFAGLVKILKKYDKRTGGLLRLPFTQLVLHQPFFTTEPLTRLVRECEANLELLFPSEAEVVESSSAVQAHSSSHQHNSPRISAETSSTLGNENLDIYKSTLAAMRAIRGLQKASSTYNPLSFSSLLQNEDDETVTAENSPNSGNKDDSEKEDTGPSH

SEQ ID NO: 86932 - protein, 318 aa, Arabidopsis thaliana; identical to SEQ ID NO: 41480
  peptide (1)..(318): Ceres Seq. ID no. 12695228

SEQ ID NO: 86933 - protein, 181 aa, Arabidopsis thaliana; identical to SEQ ID NO: 42980
  peptide (1)..(181): Ceres Seq. ID no. 12695229

SEQ ID NO: 86934 - DNA, 1290 bp, Arabidopsis thaliana
  misc_feature (1)..(1290): Ceres Seq. ID no. 12695472
  misc_feature (1)..(1290): Ortholog of  Ceres SEQ ID NO 14311001 as cited in SEQ ID NO 53717
  misc_feature (1)..(1290): Ortholog of  Ceres SEQ ID NO 13595833 as cited in SEQ ID NO 59877
  misc_feature (1)..(1290): Ortholog of  Ceres SEQ ID NO 13654452 as cited in SEQ ID NO 65792
  misc_feature (1)..(1290): Ortholog of  Ceres SEQ ID NO 13573778 as cited in SEQ ID NO 0
gtactttcacatttctctgtaataaactcggtaggtttgcgaaaacctcgccgccgggaaaaaaaaaaatcaatggaaggaggaggaagaggaccaaatcaaacgattctcagtgaaatagaacatatgcctgaagctccacgtcaacgtatctctcatcaccgtcgagctcgctctgaaaccttcttctccggcgaatcaatcgacgatctcctcttattcgatccttccgatatcgatttctcttctctagacttcctcaacgctccaccaccaccacaacaatcacaacaacaaccgcaagcttctcccatgtccgttgattcggaagaaacctcatcgaacggtgttgttcctcctaattctcttcctccaaaacccgaagctagattcggtcgccatgttcgtagcttctcggttgattccgatttcttcgatgatttgggtgttactgaggagaagtttatagctacaagttcaggagagaagaagaaagggaatcatcatcatagcaggagtaattctatggatggagagatgagttcggcgtcgtttaatatcgaatcgattttagcttctgtgagtggtaaagatagtgggaagaagaatatgggtatgggtggtgatagacttgctgagcttgctttgcttgatcctaaaagagctaaaaggattttagcgaatagacaatctgcggcgaggtcgaaagagaggaagattaggtatactggtgagttagagaggaaggttcagacacttcagaatgaagctactacattgtctgctcaagtcactatgttacagagaggaacatcagagctgaacactgaaaataaacacctcaaaatgcggcttcaagctttagagcaacaagctgaacttagggatgctttgaatgaagcgctgcgggatgaactgaaccgacttaaggtggtagctggagaaattcctcaggggaatggaaattcttacaaccgtgctcaattctcatctcagcaatcggcaatgaatcagtttgggaacaaaacgaaccaacagatgagtacaaacgggcagccatcgctcccaagctacatggatttcaccaagagaggctgagttcgtgtcacctatatatgtttgctgagttataaatacgttatattcatttcgggctgcaatatttgatgtatgtaaaaagtatgtatgtatccatgtataatggcttttgtgttgttagcgtctatgcagatatgttcatggcgacatcggtctatctttacaagtagtatccattgtaatatactaccc

SEQ ID NO: 86935 - protein, 365 aa, Arabidopsis thaliana; identical to SEQ ID NO: 30754
  peptide (1)..(365): Ceres Seq. ID no. 12695473

SEQ ID NO: 86936 - protein, 341 aa, Arabidopsis thaliana; identical to SEQ ID NO: 30755
  peptide (1)..(341): Ceres Seq. ID no. 12695474

SEQ ID NO: 86937 - protein, 323 aa, Arabidopsis thaliana; identical to SEQ ID NO: 30756
  peptide (1)..(323): Ceres Seq. ID no. 12695475

SEQ ID NO: 86938 - DNA, 1230 bp, Arabidopsis thaliana
  misc_feature (1)..(1230): Ceres Seq. ID no. 12695537
  misc_feature (1)..(1230): Ortholog of  Ceres SEQ ID NO 13596034 as cited in SEQ ID NO 62066
atggctagctccaagggatcacagagtgttagaaacttgatgtacccgggaaagcatgctttgctcccaccaaaaataccgtttcctagtgtatcagcatcgtattccgagtatattcctactggtttgattggttcaagacatggtcagaagcttagtaatgagaaaacacatcaccagcgaacttcctccgagagccatttggtagaagagcttcccttttggcttgatgatcttctcaatgagcagccggaaagccctgctcgaaaatgtggtcatcggcgttcatcaagtgactcttacgcttatctagatgtggctaatgctacaaacataagtttgactctccaaaatgatttcagttataggaatactgttttatccactcaaagaggagtccaagagcttgaccggaataaaaatgctcaggatgctgccttctactctggtgctagttttctgaaacagaagagtcgtcagcgggattctttggtggcaactggggcttgtccttcttggttacctttcgctcgtgagaacggtggcggaaaaaacttgggagctttatatatgtctcaagatgcaacagtaatatcgtcagaaagaaagaactatgctgaacctttttctcatgacccaaagatgttatcttctgaggaaaacaactccaatccttcgcctgtgacttatgaagctgacaacacaaaacgagccaaacagcaatttgcacaaagatcacgggtccgtaagctccagtacatatctgagctagaaagaaatgtacagacattgcaggcagaaggctccaaagtttcagctgaacttgattttctcaaccagaggaatcttattctgagtatggaaaataaagctctcaagaagcgtctcgaaagtatagctcaggagaagcttatcaaacaatctagttatcaagattcaacagttcttaagattgtatacctcatgagttctgtctattatccagtggaacaagaagtgttggaaaaggagattgggagactacgagcgttgtatcagcaacaacaacaaactcaaaaaccatcagccagtcgcggacgtgctactagcaaagatctcgactctcagttctccagtctttcactgaacaccaaagattccaactgtaggcgtgactctgtatctgtgatggggcctggcgactcaacaagatcagacccttatctaccgcctcaccacagacgtttttaa

SEQ ID NO: 86939 - protein, 409 aa, Arabidopsis thaliana
  peptide (1)..(409): Ceres Seq. ID no. 12695538
MASSKGSQSVRNLMYPGKHALLPPKIPFPSVSASYSEYIPTGLIGSRHGQKLSNEKTHHQRTSSESHLVEELPFWLDDLLNEQPESPARKCGHRRSSSDSYAYLDVANATNISLTLQNDFSYRNTVLSTQRGVQELDRNKNAQDAAFYSGASFLKQKSRQRDSLVATGACPSWLPFARENGGGKNLGALYMSQDATVISSERKNYAEPFSHDPKMLSSEENNSNPSPVTYEADNTKRAKQQFAQRSRVRKLQYISELERNVQTLQAEGSKVSAELDFLNQRNLILSMENKALKKRLESIAQEKLIKQSSYQDSTVLKIVYLMSSVYYPVEQEVLEKEIGRLRALYQQQQQTQKPSASRGRATSKDLDSQFSSLSLNTKDSNCRRDSVSVMGPGDSTRSDPYLPPHHRRF

SEQ ID NO: 86940 - protein, 396 aa, Arabidopsis thaliana
  peptide (1)..(396): Ceres Seq. ID no. 12695539
MYPGKHALLPPKIPFPSVSASYSEYIPTGLIGSRHGQKLSNEKTHHQRTSSESHLVEELPFWLDDLLNEQPESPARKCGHRRSSSDSYAYLDVANATNISLTLQNDFSYRNTVLSTQRGVQELDRNKNAQDAAFYSGASFLKQKSRQRDSLVATGACPSWLPFARENGGGKNLGALYMSQDATVISSERKNYAEPFSHDPKMLSSEENNSNPSPVTYEADNTKRAKQQFAQRSRVRKLQYISELERNVQTLQAEGSKVSAELDFLNQRNLILSMENKALKKRLESIAQEKLIKQSSYQDSTVLKIVYLMSSVYYPVEQEVLEKEIGRLRALYQQQQQTQKPSASRGRATSKDLDSQFSSLSLNTKDSNCRRDSVSVMGPGDSTRSDPYLPPHHRRF

SEQ ID NO: 86941 - protein, 219 aa, Arabidopsis thaliana
  peptide (1)..(219): Ceres Seq. ID no. 12695540
MSQDATVISSERKNYAEPFSHDPKMLSSEENNSNPSPVTYEADNTKRAKQQFAQRSRVRKLQYISELERNVQTLQAEGSKVSAELDFLNQRNLILSMENKALKKRLESIAQEKLIKQSSYQDSTVLKIVYLMSSVYYPVEQEVLEKEIGRLRALYQQQQQTQKPSASRGRATSKDLDSQFSSLSLNTKDSNCRRDSVSVMGPGDSTRSDPYLPPHHRRF

SEQ ID NO: 86942 - DNA, 1518 bp, Arabidopsis thaliana
  misc_feature (1)..(1518): Ceres Seq. ID no. 12695649
  misc_feature (1)..(1518): Ortholog of  Ceres SEQ ID NO 14315626 as cited in SEQ ID NO 52943
  misc_feature (1)..(1518): Ortholog of  Ceres SEQ ID NO 13584616 as cited in SEQ ID NO 65234
  misc_feature (1)..(1518): Ortholog of  Ceres SEQ ID NO 14302742 as cited in SEQ ID NO 66899
  misc_feature (1)..(1518): Ortholog of  Ceres SEQ ID NO 14313536 as cited in SEQ ID NO 67925
atgcagacaccaaacaacaacggttcaacagattcagtgttaccaccaacatcagccggaacaacaccaccaccaccgttgcagcaatcaacaccaccaccgcagcagcaacaacaacaacagtggcaacaacaacaacaatggatggctgcgatgcagcaataccctgcagctgctatggctatgatgcaacaacaacagatgatgatgtatcctcaccctcaatacgctccttacaatcaagctgcttatcaacagcatcctcagtttcaatacgctgcttatcaacagcagcagcagcaacatcaccagagtcagcagcagccacgcggtggatctggtggtgatgatgtcaagactctttgggttggtgatcttcttcattggatggatgagacttatctccatacctgtttctctcacaccaatgaggtttcttctgtgaaagttatacgcaacaagcaaacttgtcaatctgaaggatatgggtttgttgagtttctttcacgttcagcagctgaggaagctcttcagagctttagcggtgttacaatgccgaacgcggaacagcctttccgtttaaactgggcatctttcagtactggtgagaaaagagcatcagagaatggtcctgacctatccatatttgttggagatttggctccagatgtgagtgatgctgtcttgcttgagacttttgctggtagatatccatctgtcaaaggtgctaaagttgtgattgattccaacactgggcgttccaaaggttacgggtttgttaggtttggtgatgagaatgagcgatcaagagctatgacagaaatgaatggtgctttctgttcaagcaggcaaatgcgtgttggtatcgcaaccccgaaaagggctgctgcttacggccaacaaaatggttcacaaggtttaataacttgtcttgatgcgttaaacatagcatctgaagtgaattgtaatgttttcattggattagctcttacacttgctggtggacatggagggaatggttcaatgtctgatggagaatcaaataactcaacaatatttgttggcggtcttgatgctgatgttactgaagaagacctcatgcaacctttttccgattttggggaggttgtttcagtgaagatcccagtagggaaaggatgtggctttgtccaatttgctaacaggcaaagtgctgaggaagccatcgggaacttgaacgggacagtcattgggaagaacactgtccgcctttcatggggaagaagccccaacaaacagtggagaagtgactctggcaaccaatggaatggaggatattcaagaggtcaaggatacaacaatggatatgccaatcaggactcaaacatcggctgcagtcccgggagcttcttgaaagtgttggtatgtctctatcatcagaaaccctgtgagtcctggacttacgggtattgggataaaaacaaaccgttgggtgatcaaagtgatccatccgatgatagttgttggttcagaggttag

SEQ ID NO: 86943 - protein, 505 aa, Arabidopsis thaliana
  peptide (1)..(505): Ceres Seq. ID no. 12695650
MQTPNNNGSTDSVLPPTSAGTTPPPPLQQSTPPPQQQQQQQWQQQQQWMAAMQQYPAAAMAMMQQQQMMMYPHPQYAPYNQAAYQQHPQFQYAAYQQQQQQHHQSQQQPRGGSGGDDVKTLWVGDLLHWMDETYLHTCFSHTNEVSSVKVIRNKQTCQSEGYGFVEFLSRSAAEEALQSFSGVTMPNAEQPFRLNWASFSTGEKRASENGPDLSIFVGDLAPDVSDAVLLETFAGRYPSVKGAKVVIDSNTGRSKGYGFVRFGDENERSRAMTEMNGAFCSSRQMRVGIATPKRAAAYGQQNGSQGLITCLDALNIASEVNCNVFIGLALTLAGGHGGNGSMSDGESNNSTIFVGGLDADVTEEDLMQPFSDFGEVVSVKIPVGKGCGFVQFANRQSAEEAIGNLNGTVIGKNTVRLSWGRSPNKQWRSDSGNQWNGGYSRGQGYNNGYANQDSNIGCSPGSFLKVLVCLYHQKPCESWTYGYWDKNKPLGDQSDPSDDSCWFRG

SEQ ID NO: 86944 - protein, 457 aa, Arabidopsis thaliana
  peptide (1)..(457): Ceres Seq. ID no. 12695651
MAAMQQYPAAAMAMMQQQQMMMYPHPQYAPYNQAAYQQHPQFQYAAYQQQQQQHHQSQQQPRGGSGGDDVKTLWVGDLLHWMDETYLHTCFSHTNEVSSVKVIRNKQTCQSEGYGFVEFLSRSAAEEALQSFSGVTMPNAEQPFRLNWASFSTGEKRASENGPDLSIFVGDLAPDVSDAVLLETFAGRYPSVKGAKVVIDSNTGRSKGYGFVRFGDENERSRAMTEMNGAFCSSRQMRVGIATPKRAAAYGQQNGSQGLITCLDALNIASEVNCNVFIGLALTLAGGHGGNGSMSDGESNNSTIFVGGLDADVTEEDLMQPFSDFGEVVSVKIPVGKGCGFVQFANRQSAEEAIGNLNGTVIGKNTVRLSWGRSPNKQWRSDSGNQWNGGYSRGQGYNNGYANQDSNIGCSPGSFLKVLVCLYHQKPCESWTYGYWDKNKPLGDQSDPSDDSCWFRG

SEQ ID NO: 86945 - protein, 454 aa, Arabidopsis thaliana
  peptide (1)..(454): Ceres Seq. ID no. 12695652
MQQYPAAAMAMMQQQQMMMYPHPQYAPYNQAAYQQHPQFQYAAYQQQQQQHHQSQQQPRGGSGGDDVKTLWVGDLLHWMDETYLHTCFSHTNEVSSVKVIRNKQTCQSEGYGFVEFLSRSAAEEALQSFSGVTMPNAEQPFRLNWASFSTGEKRASENGPDLSIFVGDLAPDVSDAVLLETFAGRYPSVKGAKVVIDSNTGRSKGYGFVRFGDENERSRAMTEMNGAFCSSRQMRVGIATPKRAAAYGQQNGSQGLITCLDALNIASEVNCNVFIGLALTLAGGHGGNGSMSDGESNNSTIFVGGLDADVTEEDLMQPFSDFGEVVSVKIPVGKGCGFVQFANRQSAEEAIGNLNGTVIGKNTVRLSWGRSPNKQWRSDSGNQWNGGYSRGQGYNNGYANQDSNIGCSPGSFLKVLVCLYHQKPCESWTYGYWDKNKPLGDQSDPSDDSCWFRG

SEQ ID NO: 86946 - DNA, 1959 bp, Arabidopsis thaliana
  misc_feature (1)..(1959): Ceres Seq. ID no. 12695661
  misc_feature (1)..(1959): Ortholog of  Ceres SEQ ID NO 13654989 as cited in SEQ ID NO 63117
  misc_feature (1)..(1959): Ortholog of  Ceres SEQ ID NO 13584744 as cited in SEQ ID NO 69137
atggctgcagattgtccattagatttcagtggatcaaatttcactctagtagctactgtgtgctccaacataaccaacagaggcaaatgttgccgctacatgaacgcttttgttgcggtgtccgtggctcgttacgcgaacttgtcaactaatcttggagtcacatcagatttatctgaaacctgcattgcttccatctctagagccatggagggctacggagtctcgagaaacgccactagtttctgcggtttgggaaccaagatccttgttaagtatgactgtgacggtcgaaccactgttacacaaatgcatcagtctccgggatttggacatgtttcaagaaactgcagactcccattttcgccgggacaccaatgcagaaagtgtttgaactctggcatcacttaccttcgtaatctcataggtgcagagactaataacattactctgtgtacttgtcgtgatgcgacttatgctacattagcaagccgaatagacgatacatcagctcttgaactccttagttgtttctttcaagtgacagagcttaacattccttcagagtcattttcaccagtggcaagtccagaaccttctccaagcacggttggtggtattagcccaagcaacagtgattctcaaatgactacaagtagaagcaccaatccatatcacttaacaatggttccaaccattgggattgttgttacagctgttgctcttacgatgcttgtagtcttggtaattcttatccgtagaaagaaccgggaactggatgaatctgagagcttggatagaaagtcaacaaaatcagttccttcttcccttcctgtattcaagattcatgaagatgattcttcctcagctttcagaaagttcagctacaaggaaatgacaaatgcaacaaatgatttcaacacggttatcggtcagggaggttttggtactgtttacaaagccgagttcaacgatggtctgattgcagcggtaaaaaagatgaacaaagtctctgaacaagctgaacaagatttttgtagagagatagggcttttagctaagctgcatcaccgtaacctcgttgctttgaaaggcttttgcatcaacaagaaagaaaggttcttggtctacgactatatgaaaaatggcagcttaaaagatcacttacatgccattggaaagcctccacctagttggggaacaagaatgaaaattgcaattgatgtggcaaatgctttggtaaatattccaaagtctttcatctacattttctctgaatatcttcatttctactgtgatcctcctctctgtcatagagatattaaatcaagcaatatattactcgatgagaacttcgtcgctaagctttcagattttggccttgcacattcgtctagagatggctctgtttgctttgagcctgtgaataccgatatccgtggaactccaggttatgtagatccggaatatgtagtaacgcaagagttgacagagaagagtgatgtgtacagctacggagttgtgttgctggagctcataaccgggagaagagcagttgatgaaggtaggaaccttgtggaaatgtctcagcggtttttgttggcgaaatcaaaacacctcgagttggtagacccgagaatcaaagactctattaatgatgctggaggaaaacaacttgatgcagttgtgacggttgtgagattgtgtaccgagaaagaaggccggtctaggccatcaattaagcaagtcttgaggctgttgtgtgaaagctgtgatccggtgcatagcgcatttgctaaagcggttgaagaagagataggctgggatagtaggaagagaagcaatttgagaattcaaagaggtgattcccggatctttggtccatcgtctagtactacttccaggtcacattacagccggagtttacctcactctccaattaacggattttctttctga

SEQ ID NO: 86947 - protein, 652 aa, Arabidopsis thaliana
  peptide (1)..(652): Ceres Seq. ID no. 12695662
MAADCPLDFSGSNFTLVATVCSNITNRGKCCRYMNAFVAVSVARYANLSTNLGVTSDLSETCIASISRAMEGYGVSRNATSFCGLGTKILVKYDCDGRTTVTQMHQSPGFGHVSRNCRLPFSPGHQCRKCLNSGITYLRNLIGAETNNITLCTCRDATYATLASRIDDTSALELLSCFFQVTELNIPSESFSPVASPEPSPSTVGGISPSNSDSQMTTSRSTNPYHLTMVPTIGIVVTAVALTMLVVLVILIRRKNRELDESESLDRKSTKSVPSSLPVFKIHEDDSSSAFRKFSYKEMTNATNDFNTVIGQGGFGTVYKAEFNDGLIAAVKKMNKVSEQAEQDFCREIGLLAKLHHRNLVALKGFCINKKERFLVYDYMKNGSLKDHLHAIGKPPPSWGTRMKIAIDVANALVNIPKSFIYIFSEYLHFYCDPPLCHRDIKSSNILLDENFVAKLSDFGLAHSSRDGSVCFEPVNTDIRGTPGYVDPEYVVTQELTEKSDVYSYGVVLLELITGRRAVDEGRNLVEMSQRFLLAKSKHLELVDPRIKDSINDAGGKQLDAVVTVVRLCTEKEGRSRPSIKQVLRLLCESCDPVHSAFAKAVEEEIGWDSRKRSNLRIQRGDSRIFGPSSSTTSRSHYSRSLPHSPINGFSF

SEQ ID NO: 86948 - protein, 619 aa, Arabidopsis thaliana
  peptide (1)..(619): Ceres Seq. ID no. 12695663
MNAFVAVSVARYANLSTNLGVTSDLSETCIASISRAMEGYGVSRNATSFCGLGTKILVKYDCDGRTTVTQMHQSPGFGHVSRNCRLPFSPGHQCRKCLNSGITYLRNLIGAETNNITLCTCRDATYATLASRIDDTSALELLSCFFQVTELNIPSESFSPVASPEPSPSTVGGISPSNSDSQMTTSRSTNPYHLTMVPTIGIVVTAVALTMLVVLVILIRRKNRELDESESLDRKSTKSVPSSLPVFKIHEDDSSSAFRKFSYKEMTNATNDFNTVIGQGGFGTVYKAEFNDGLIAAVKKMNKVSEQAEQDFCREIGLLAKLHHRNLVALKGFCINKKERFLVYDYMKNGSLKDHLHAIGKPPPSWGTRMKIAIDVANALVNIPKSFIYIFSEYLHFYCDPPLCHRDIKSSNILLDENFVAKLSDFGLAHSSRDGSVCFEPVNTDIRGTPGYVDPEYVVTQELTEKSDVYSYGVVLLELITGRRAVDEGRNLVEMSQRFLLAKSKHLELVDPRIKDSINDAGGKQLDAVVTVVRLCTEKEGRSRPSIKQVLRLLCESCDPVHSAFAKAVEEEIGWDSRKRSNLRIQRGDSRIFGPSSSTTSRSHYSRSLPHSPINGFSF

SEQ ID NO: 86949 - protein, 583 aa, Arabidopsis thaliana
  peptide (1)..(583): Ceres Seq. ID no. 12695664
MEGYGVSRNATSFCGLGTKILVKYDCDGRTTVTQMHQSPGFGHVSRNCRLPFSPGHQCRKCLNSGITYLRNLIGAETNNITLCTCRDATYATLASRIDDTSALELLSCFFQVTELNIPSESFSPVASPEPSPSTVGGISPSNSDSQMTTSRSTNPYHLTMVPTIGIVVTAVALTMLVVLVILIRRKNRELDESESLDRKSTKSVPSSLPVFKIHEDDSSSAFRKFSYKEMTNATNDFNTVIGQGGFGTVYKAEFNDGLIAAVKKMNKVSEQAEQDFCREIGLLAKLHHRNLVALKGFCINKKERFLVYDYMKNGSLKDHLHAIGKPPPSWGTRMKIAIDVANALVNIPKSFIYIFSEYLHFYCDPPLCHRDIKSSNILLDENFVAKLSDFGLAHSSRDGSVCFEPVNTDIRGTPGYVDPEYVVTQELTEKSDVYSYGVVLLELITGRRAVDEGRNLVEMSQRFLLAKSKHLELVDPRIKDSINDAGGKQLDAVVTVVRLCTEKEGRSRPSIKQVLRLLCESCDPVHSAFAKAVEEEIGWDSRKRSNLRIQRGDSRIFGPSSSTTSRSHYSRSLPHSPINGFSF

SEQ ID NO: 86950 - DNA, 1305 bp, Arabidopsis thaliana
  misc_feature (1)..(1305): Ceres Seq. ID no. 12695669
  misc_feature (1)..(1305): Ortholog of  Ceres SEQ ID NO 15177963 as cited in SEQ ID NO 59105
atggcttcaattctctcaattcttcttctcattctttcactttcaaatctccacttcacttcaaccaccggaaacaaccacattaacgacagaaaatccttagaaatcattatcggtggtggtaacgacaacaatcctccaccgtcaccttcaccggaaccagaaccagaacctgcagattgccctcctccccctcctcctcctccatttctccaaagatttaaggatctagtcgcagatgataaacttaagtcttgggaaggccccgacatttgcaacaaatacctcggactcaaatgcgccattttcccgaaaacaaagcatctcgcactcgcgagcgtccagtttaatgggttaaacttgagaggcaagataggcaagatcctcaagttagataacttcctcgacaagttagaagaagtcaccatcttccacgcaaactccaacggtttcacaggctctgtgcctgatttcagcaatttgaaattcttatacgagctcgatctaagcaacaacaaactcacaggagatttcccaactagtgtcttgaaaggaaacaatctcacgtttcttgatctcaggttcaattctttctcaggctctgttcctcctcaggtctttaatctcgacctcgacgtcttgttcatcaacaacaacaatcttgttcagaagcttccactcaatcttggatccatcactgctctttacctcaccttcgccaacaacaggttcacgggtccaattcccgaaagcataggcaacatcaagtacctacaagaagtccttttcctgaataacaagttaaccggatgcttaccgtaccaaatcggaaacctaacccgagccactgttttcgatgttgggttcaaccaattaaccggtccaataccgtactctttcggttgcttagaaacgatggaacaactcaatttagccggaaacaagttctatggaaccataccggagattgtatgcgagattgcttgtctccaaaacgtttctctctcgaataattacttcactcaggttggtccgaaatgtagaaaactcatcaagagaaaaattatggacgttagtatgaattgtatacttgatcttccaaaccagaaaacgccatcggagtgtgctaagttcttcatgcggaaacagacttgtcctaattccaagtctttgtttactgtcccttgtgataagaatccaaaccggggtaaaccggatcaagaacgattggaggaggaaaaagctcaagtttctcatccggtaacttacaacacacttaacccggaccggcttcggaatctataa

SEQ ID NO: 86951 - protein, 434 aa, Arabidopsis thaliana
  peptide (1)..(434): Ceres Seq. ID no. 12695670
MASILSILLLILSLSNLHFTSTTGNNHINDRKSLEIIIGGGNDNNPPPSPSPEPEPEPADCPPPPPPPPFLQRFKDLVADDKLKSWEGPDICNKYLGLKCAIFPKTKHLALASVQFNGLNLRGKIGKILKLDNFLDKLEEVTIFHANSNGFTGSVPDFSNLKFLYELDLSNNKLTGDFPTSVLKGNNLTFLDLRFNSFSGSVPPQVFNLDLDVLFINNNNLVQKLPLNLGSITALYLTFANNRFTGPIPESIGNIKYLQEVLFLNNKLTGCLPYQIGNLTRATVFDVGFNQLTGPIPYSFGCLETMEQLNLAGNKFYGTIPEIVCEIACLQNVSLSNNYFTQVGPKCRKLIKRKIMDVSMNCILDLPNQKTPSECAKFFMRKQTCPNSKSLFTVPCDKNPNRGKPDQERLEEEKAQVSHPVTYNTLNPDRLRNL

SEQ ID NO: 86952 - DNA, 889 bp, Arabidopsis thaliana
  misc_feature (1)..(889): Ceres Seq. ID no. 12695794
  misc_feature (1)..(889): Ortholog of  Ceres SEQ ID NO 14304132 as cited in SEQ ID NO 56475
  misc_feature (1)..(889): Ortholog of  Ceres SEQ ID NO 13661994 as cited in SEQ ID NO 60568
  misc_feature (1)..(889): Ortholog of  Ceres SEQ ID NO 13664228 as cited in SEQ ID NO 61166
  misc_feature (1)..(889): Ortholog of  Ceres SEQ ID NO 15179439 as cited in SEQ ID NO 0
gatctctctgtctctcgcatcggaagtacgaagaaggatctttgttttcttcctcttctccttcttctactttcgaacactcgtgaatctgattctactctagtctaattgggtgctttcgatttctgaataaaaattcgattttggtctgacgattaagaaagcgaaagtgatggccgccgtaaatggatatcagggaaatactccggcagatcctccggcgtctaatggatcaaaacaacctgcggctccgaccaagactgttgacagccaatctgttctcaaaagactgcaatctgaattgatgggcttgatgatgggcggtggtccaggaatatcggctttccctgaggaagacaacatattctgctggaaagggacaataacaggaagcaaagatactgtgtttgaaggaactgagtacagactctcactctctttctccaatgactatcctttcaagcctccaaaggttaagtttgagacatgttgcttccaccccaatgttgatgtctatggcaatatctgcttagacattcttcaggataagtggtcatctgcttacgatgtgaggacgatactactatcgattcagagcctcctgggagaaccgaacatcagttcaccattgaacactcaagcagctcagctttggagtaaccaagaagagtacaggaagatggttgagaagctttacaagcctccaagtgcatgatttctgcaagctgttctgattcataaatctccaatgcctctgatgatttcacataaaacgatttttcagaagaaaacactgtcattcatttgctttattctttgtttttgaacatcagaagttctatctgtaacgttaccttgagttcaaataatgagtagtatttcagagatt

SEQ ID NO: 86953 - protein, 180 aa, Arabidopsis thaliana; identical to SEQ ID NO: 76733
  peptide (1)..(180): Ceres Seq. ID no. 12695795

SEQ ID NO: 86954 - protein, 136 aa, Arabidopsis thaliana; identical to SEQ ID NO: 76734
  peptide (1)..(136): Ceres Seq. ID no. 12695796

SEQ ID NO: 86955 - protein, 133 aa, Arabidopsis thaliana; identical to SEQ ID NO: 76735
  peptide (1)..(133): Ceres Seq. ID no. 12695797

SEQ ID NO: 86956 - DNA, 2925 bp, Arabidopsis thaliana
  misc_feature (1)..(2925): Ceres Seq. ID no. 12695839
  misc_feature (1)..(2925): Ortholog of  Ceres SEQ ID NO 15170741 as cited in SEQ ID NO 58530
atggaaggtggtcgtggtggtggagatggcaatttcttaccaaactctaactttggtgtattctctgactccgctatggatatggatttcatggatgaactcttgtttgatggatgttggcttgagacaactgatggtaagagcttgaagcagaccatgggacaacaagtatccgattctactaccatgaatgacaacaacaacaactcgtacctttacggttatcaatatgctgagaacctttcacaagatcatatctccaacgaagaaacagggagaaagtttcctccaataccaccgggctttctcaagatcgaggatctctccaatcaagtaccttttgaccagtctgcagttatgagttctgcacaagcagagaagtttctccttgaagaatctgagggaggaagaagatattggattgctccaagaacaagccaaggtccttcttcatcagtgaaagagagattagtacaagctatagagggtcttaacgaggaggtgcaagataaagacttcctcatacagatatggctaccaattcaacaagaaggcaagaactttctcacaacttcggagcagccacacttcttcaacccgaaatactcgagtcttaaaagatatagagatgtttcagtggcttataatttcctggctgatgaggattctaaagagtctgttggtctccccggtcgtgtttttcttaagaaactacctgagtggacacctgatgtgcggttctttagaagcgaagagtatccgcggatcaaagaagcagagcaatgtgatgttcgtggatcattagcccttcctgtgtttgaaagaggtagtggaacttgtttgggtgttgttgagattgttacaacaactcagaagatgaattacaggccagagcttgataatatctgtaaagctctcgagtctgttaatctaaggagttcaagaagcttgaatcccccaagcagagaggtgtgtaaaaatggtctcctaaatcaaacccttacttcatcaatacatagaaacaatgaattttggttgctaaatgtcatatgccctttttgtttcagtttctgcagagtatatgacctgcctctggctttaacgtgggcaccgtgtgctcggcaaggcaaagttggatcccgccattctgatgagaacttctctgagtgtgtttcaactgttgatgatgcttgcattgtccctgaccatcagagtcgtcattttctagaggcatgttctgaacaccatctgcttcaaggggaaggcattgtaggaaaagcattcaacgcaaccaaactgtttttcgtgcccgaagtaaccacttttagcaagaccaactaccctcttgcacaccatgctaagatctctggtctacatgctgctttagcagtcccattgaaaaacaaattcaatagttcggttgagtttgtgttggagtttttctttccaaaagcttgccttgacaccgaagcacaacaagatatgctcaagtctctgtctgcgacccttcagcaggatttcaggagcttaaatcttttcattgataaagagcttgagctagaagttgtatttcccgttagagaggaagttgtttttgcagagaacccacttatcaacgcaggaaccggagaggatatgaaaccattgcctttggaagaaatttctcaggaagattcttcatggatctcacacatgataaaggcaaatgagaaaggtaaaggcgtgtcactttcttgggagtaccaaaaagaagagccaaaagaagagtttatgcttacatctggatgggataacaatcagattggatcaggccacaataactttctttcagaagctgagcagtttcaaaaggtgacaaattcaggactcagaatcgacatggatccaagttttgaatcagcttcctttggtgttgggcagacattactaggcagtagaagaccaggtgagaagagaagaacaaaaacagaaaagacaattggtttagaagttcttcgacaatactttgcaggaagcctcaaagatgcagccaagagcattggtgtttgtccaactaccttgaaaagaatatgcagacaacacgggataacacgatggccttcccggaagatcaagaaagtggggcattcattaaagaaactccaacttgttatagactctgttcaaggtgttcaaggttctattcaacttgattcattctatacaagtttcccagaattaagctccccacatatgtctggtactggcacttccttcaagaatccaaatgctcaaacggagaacggtgtttcagcacagggaactgctgcagctccaaagtcaccaccatcatcttcttgtagccacagctctggttcaagcacctgttgttcaactggagctaatcaaagtaccaatactgggactacctcaaatactgtaaccactctgatggctgaaaatgctagcgcgatcttgaagagagctcgtagcgaagtgagacttcataccatgaatcaggatgaaacaaagtccctctctagaaccctgagccacaaaacattcagtgagcatcctcttttcgaaaatccacctcggttaccggagaatagtagcaggaagttgaaagctggaggggcctcaaaagtgaaagccacatttggtgaagccaaagtacggtttactttgcttcctacttggggcttcagagagttgcagcatgagattgctaggcgttttaacatagataatattgcaccctttgatcttaagtacctggatgatgacaaggaatgggttcttctgacatgtgaagcggatctcgaggaatgtatcgacatttatagatcatcacagagccgcacgatcaagataagtgttcatgaagcttctcaagtcaagctgggaggttcttttggtagcatcggtcttggtccctcgttataa

SEQ ID NO: 86957 - protein, 974 aa, Arabidopsis thaliana
  peptide (1)..(974): Ceres Seq. ID no. 12695840
MEGGRGGGDGNFLPNSNFGVFSDSAMDMDFMDELLFDGCWLETTDGKSLKQTMGQQVSDSTTMNDNNNNSYLYGYQYAENLSQDHISNEETGRKFPPIPPGFLKIEDLSNQVPFDQSAVMSSAQAEKFLLEESEGGRRYWIAPRTSQGPSSSVKERLVQAIEGLNEEVQDKDFLIQIWLPIQQEGKNFLTTSEQPHFFNPKYSSLKRYRDVSVAYNFLADEDSKESVGLPGRVFLKKLPEWTPDVRFFRSEEYPRIKEAEQCDVRGSLALPVFERGSGTCLGVVEIVTTTQKMNYRPELDNICKALESVNLRSSRSLNPPSREVCKNGLLNQTLTSSIHRNNEFWLLNVICPFCFSFCRVYDLPLALTWAPCARQGKVGSRHSDENFSECVSTVDDACIVPDHQSRHFLEACSEHHLLQGEGIVGKAFNATKLFFVPEVTTFSKTNYPLAHHAKISGLHAALAVPLKNKFNSSVEFVLEFFFPKACLDTEAQQDMLKSLSATLQQDFRSLNLFIDKELELEVVFPVREEVVFAENPLINAGTGEDMKPLPLEEISQEDSSWISHMIKANEKGKGVSLSWEYQKEEPKEEFMLTSGWDNNQIGSGHNNFLSEAEQFQKVTNSGLRIDMDPSFESASFGVGQTLLGSRRPGEKRRTKTEKTIGLEVLRQYFAGSLKDAAKSIGVCPTTLKRICRQHGITRWPSRKIKKVGHSLKKLQLVIDSVQGVQGSIQLDSFYTSFPELSSPHMSGTGTSFKNPNAQTENGVSAQGTAAAPKSPPSSSCSHSSGSSTCCSTGANQSTNTGTTSNTVTTLMAENASAILKRARSEVRLHTMNQDETKSLSRTLSHKTFSEHPLFENPPRLPENSSRKLKAGGASKVKATFGEAKVRFTLLPTWGFRELQHEIARRFNIDNIAPFDLKYLDDDKEWVLLTCEADLEECIDIYRSSQSRTIKISVHEASQVKLGGSFGSIGLGPSL

SEQ ID NO: 86958 - protein, 949 aa, Arabidopsis thaliana
  peptide (1)..(949): Ceres Seq. ID no. 12695841
MDMDFMDELLFDGCWLETTDGKSLKQTMGQQVSDSTTMNDNNNNSYLYGYQYAENLSQDHISNEETGRKFPPIPPGFLKIEDLSNQVPFDQSAVMSSAQAEKFLLEESEGGRRYWIAPRTSQGPSSSVKERLVQAIEGLNEEVQDKDFLIQIWLPIQQEGKNFLTTSEQPHFFNPKYSSLKRYRDVSVAYNFLADEDSKESVGLPGRVFLKKLPEWTPDVRFFRSEEYPRIKEAEQCDVRGSLALPVFERGSGTCLGVVEIVTTTQKMNYRPELDNICKALESVNLRSSRSLNPPSREVCKNGLLNQTLTSSIHRNNEFWLLNVICPFCFSFCRVYDLPLALTWAPCARQGKVGSRHSDENFSECVSTVDDACIVPDHQSRHFLEACSEHHLLQGEGIVGKAFNATKLFFVPEVTTFSKTNYPLAHHAKISGLHAALAVPLKNKFNSSVEFVLEFFFPKACLDTEAQQDMLKSLSATLQQDFRSLNLFIDKELELEVVFPVREEVVFAENPLINAGTGEDMKPLPLEEISQEDSSWISHMIKANEKGKGVSLSWEYQKEEPKEEFMLTSGWDNNQIGSGHNNFLSEAEQFQKVTNSGLRIDMDPSFESASFGVGQTLLGSRRPGEKRRTKTEKTIGLEVLRQYFAGSLKDAAKSIGVCPTTLKRICRQHGITRWPSRKIKKVGHSLKKLQLVIDSVQGVQGSIQLDSFYTSFPELSSPHMSGTGTSFKNPNAQTENGVSAQGTAAAPKSPPSSSCSHSSGSSTCCSTGANQSTNTGTTSNTVTTLMAENASAILKRARSEVRLHTMNQDETKSLSRTLSHKTFSEHPLFENPPRLPENSSRKLKAGGASKVKATFGEAKVRFTLLPTWGFRELQHEIARRFNIDNIAPFDLKYLDDDKEWVLLTCEADLEECIDIYRSSQSRTIKISVHEASQVKLGGSFGSIGLGPSL

SEQ ID NO: 86959 - protein, 947 aa, Arabidopsis thaliana
  peptide (1)..(947): Ceres Seq. ID no. 12695842
MDFMDELLFDGCWLETTDGKSLKQTMGQQVSDSTTMNDNNNNSYLYGYQYAENLSQDHISNEETGRKFPPIPPGFLKIEDLSNQVPFDQSAVMSSAQAEKFLLEESEGGRRYWIAPRTSQGPSSSVKERLVQAIEGLNEEVQDKDFLIQIWLPIQQEGKNFLTTSEQPHFFNPKYSSLKRYRDVSVAYNFLADEDSKESVGLPGRVFLKKLPEWTPDVRFFRSEEYPRIKEAEQCDVRGSLALPVFERGSGTCLGVVEIVTTTQKMNYRPELDNICKALESVNLRSSRSLNPPSREVCKNGLLNQTLTSSIHRNNEFWLLNVICPFCFSFCRVYDLPLALTWAPCARQGKVGSRHSDENFSECVSTVDDACIVPDHQSRHFLEACSEHHLLQGEGIVGKAFNATKLFFVPEVTTFSKTNYPLAHHAKISGLHAALAVPLKNKFNSSVEFVLEFFFPKACLDTEAQQDMLKSLSATLQQDFRSLNLFIDKELELEVVFPVREEVVFAENPLINAGTGEDMKPLPLEEISQEDSSWISHMIKANEKGKGVSLSWEYQKEEPKEEFMLTSGWDNNQIGSGHNNFLSEAEQFQKVTNSGLRIDMDPSFESASFGVGQTLLGSRRPGEKRRTKTEKTIGLEVLRQYFAGSLKDAAKSIGVCPTTLKRICRQHGITRWPSRKIKKVGHSLKKLQLVIDSVQGVQGSIQLDSFYTSFPELSSPHMSGTGTSFKNPNAQTENGVSAQGTAAAPKSPPSSSCSHSSGSSTCCSTGANQSTNTGTTSNTVTTLMAENASAILKRARSEVRLHTMNQDETKSLSRTLSHKTFSEHPLFENPPRLPENSSRKLKAGGASKVKATFGEAKVRFTLLPTWGFRELQHEIARRFNIDNIAPFDLKYLDDDKEWVLLTCEADLEECIDIYRSSQSRTIKISVHEASQVKLGGSFGSIGLGPSL

SEQ ID NO: 86960 - DNA, 872 bp, Arabidopsis thaliana
  misc_feature (1)..(872): Ceres Seq. ID no. 12695866
  misc_feature (1)..(872): Ortholog of  Ceres SEQ ID NO 14306406 as cited in SEQ ID NO 1412
  misc_feature (1)..(872): Ortholog of  Ceres SEQ ID NO 15178824 as cited in SEQ ID NO 0
attataacttggatcagattcttcttctcctctaaacaacaacaaagtctctcttccttctgtctttcacatttcctcttcccctaaaaacagaactcaaaaccaaaacaaaatgactcgctcctctagattccttggtacggcgtcgcctccaccaccggaagaaatcctcgccgccgaaaccgacatggttgtgattctctcagcacttctctgcgctctcgtatgcgtagccggtttagccgccgtagctcgctgcgcttggctccgccgtctcaccggagttaatcccgccgccgtcggagaagctccaccgcctaacaaaggcctcaagaaaaaagcacttcaagctctccctaaatcaacttacaccgcctctgcctctaccgccgccgccgctgacgatctaccgtgctcttcagtcggagacggagattcatccaccgagtgtgcaatatgcataacggaattttcggagggcgaagaaatcagaatcttaccgctgtgtagtcacgccttccacgtggcgtgtatagacaagtggttgacttcacggtcgtcgtgtccgtcttgtcgtcggatactggtgccggtgaagtgtgataggtgtgggcaccatgcttcgacggcggagactcaggtcaaagatcaacctcctcatcaccaacatccttcacagttcacttccgccattattcctgcttttcttccttgaaatgttttcactttattaaatttttataatttgctaaaaatatcggcatgattaaaagtaaagtattaattaattaggaattagtgatctttagttaagtacttttatatttctcctctgtaatcctctgttctgaattaatcagatgaaatttcga

SEQ ID NO: 86961 - protein, 200 aa, Arabidopsis thaliana; identical to SEQ ID NO: 21756
  peptide (1)..(200): Ceres Seq. ID no. 12695867

SEQ ID NO: 86962 - protein, 175 aa, Arabidopsis thaliana; identical to SEQ ID NO: 21757
  peptide (1)..(175): Ceres Seq. ID no. 12695868

SEQ ID NO: 86963 - DNA, 1109 bp, Arabidopsis thaliana
  misc_feature (1)..(1109): Ceres Seq. ID no. 12695877
  misc_feature (1)..(1109): Ortholog of  Ceres SEQ ID NO 13595655 as cited in SEQ ID NO 56768
gccgtcttttatctctttaccggtaagagaagccggtttcagatttgatcaattcgaagaattgtggctttcgttcgttgggtgaatccttgcttcgtcctttttgatagattgctactgtgttttcgaggaagttgtgtggagatagttagagagatttatgagatttcaagaggggttattataacgcacgcatggtgttcgacggaaagccgcagagaagttttgttgctatccgatttgactgagactcaaagtttgaaaattgttacttgggtattgagaaagctaaccttgggcaggttcgtatatgagttgggagtaaaacgacggtgatacatttgactgtttttcaactaaactagctttgaaatggtgagcttgtctgtttcgaataagagatacacttacatacacgaaagtggaagtaagtcaactagagaagccattgatattcaccatgtgattatcaacggaagcagcggaactggttatgcccgtcgttgggggcttggtttcttccttgtgtttctggcgagttctatgtactttttgcttggaaaggacaatccagctagaactctttcttggggctgccttttaagtggtttcttggttatgctacatagtcgcaagttcgtcaagaaagaatctgtgataatcttgccaaccttcgggatccaacttgaaactcaatatttaagtggaaaaactgtctccaggtttatccctattgacaagattttgaagcctgtgttggtcgaatgtgtcactcccattacgtgttactggagtctctctttatttcttcgtggtgaagaacaacttacattggtgtttaaggaactgcgtcctccattgaagatgttggttcccatttggaaagcattgtgtgctgctatcggtacagaccaccaaagtgaaacgatagctgaagaagaacatgatgtatctagttaactgcagttgtgattagagaacttgtagatttgttacttgttgttggcagttttgtttggaagatgatcacacaatatgttctgtaatgggagaattgacttgacacaaaaaaagaaaaaagaaaaaaactctttgagtggtgaacattt

SEQ ID NO: 86964 - protein, 195 aa, Arabidopsis thaliana; identical to SEQ ID NO: 42550
  peptide (1)..(195): Ceres Seq. ID no. 12695878

SEQ ID NO: 86965 - protein, 138 aa, Arabidopsis thaliana; identical to SEQ ID NO: 42551
  peptide (1)..(138): Ceres Seq. ID no. 12695879

SEQ ID NO: 86966 - protein, 113 aa, Arabidopsis thaliana; identical to SEQ ID NO: 42552
  peptide (1)..(113): Ceres Seq. ID no. 12695880

SEQ ID NO: 86967 - DNA, 1107 bp, Arabidopsis thaliana
  misc_feature (1)..(1107): Ceres Seq. ID no. 12695895
  misc_feature (1)..(1107): Ortholog of  Ceres SEQ ID NO 14313264 as cited in SEQ ID NO 67300
  misc_feature (1)..(1107): Ortholog of  Ceres SEQ ID NO 14302824 as cited in SEQ ID NO 67794
atggcgagaagatccgtttcgatatttaatcgccttctggcgaatcctccttctccattcacatcactgtcccgatccatcacctacatgcctagacccggagatggagctccacgaaccgtaaccctaattcccggcgacggaatcggacctttggtgaccggtgcggtggaacaggtcatggaagcgatgcacgcgccagtgcatttcgagagatacgaggttctaggaaacatgagaaaagtccctgaagaagtgatcgagtctgtgaagagaaacaaggtttgtctcaaaggtggattagcgactcctgttggtgggggtgtcagttctttgaatatgcaattgaggaaagaactcgatatcttcgcttctcttgtcaattgcatcaatgtccctggattagtgacgcgacacgaaaatgttgatatcgttgtgataagagagaacactgaaggagagtactcaggtctcgagcatgaggttgttcctggtgttgtcgagagccttaaggtgataacaaagttttgttctgagagaatagcgagatatgcatttgagtatgcgtatctaaacaataggaagaaagtgactgctgttcataaagctaacattatgaagcttgcggatgggctcttccttgaatcttgtagagaggttgctaaacattattcggggattacttacaatgaaataatcgtagacaattgctgtatgcagcttgtcgccaagcctgagcaatttgatgtcatggtgacacctaatttgtatggtaaccttatagcaaacacggcggctggaatagccggtggcactggagtgatgccaggagggaatgttggtgcagaacatgcgatattcgagcaaggtgcatcagcagggaatgtggggaatgataagatggtggaacagaagaaagcgaatccggtggctctacttctctcgtcggctatgatgctaagacatctccggtttcctacttttgctgatcggcttgaaacagcagtgaaacaagtgattaaagaaggaaaatatagaacaaaagatcttggaggagattgtaccacgcaggaagttgttgatgctgtcatagcagctcttgagtga

SEQ ID NO: 86968 - protein, 368 aa, Arabidopsis thaliana
  peptide (1)..(368): Ceres Seq. ID no. 12695896
MARRSVSIFNRLLANPPSPFTSLSRSITYMPRPGDGAPRTVTLIPGDGIGPLVTGAVEQVMEAMHAPVHFERYEVLGNMRKVPEEVIESVKRNKVCLKGGLATPVGGGVSSLNMQLRKELDIFASLVNCINVPGLVTRHENVDIVVIRENTEGEYSGLEHEVVPGVVESLKVITKFCSERIARYAFEYAYLNNRKKVTAVHKANIMKLADGLFLESCREVAKHYSGITYNEIIVDNCCMQLVAKPEQFDVMVTPNLYGNLIANTAAGIAGGTGVMPGGNVGAEHAIFEQGASAGNVGNDKMVEQKKANPVALLLSSAMMLRHLRFPTFADRLETAVKQVIKEGKYRTKDLGGDCTTQEVVDAVIAALE

SEQ ID NO: 86969 - protein, 339 aa, Arabidopsis thaliana
  peptide (1)..(339): Ceres Seq. ID no. 12695897
MPRPGDGAPRTVTLIPGDGIGPLVTGAVEQVMEAMHAPVHFERYEVLGNMRKVPEEVIESVKRNKVCLKGGLATPVGGGVSSLNMQLRKELDIFASLVNCINVPGLVTRHENVDIVVIRENTEGEYSGLEHEVVPGVVESLKVITKFCSERIARYAFEYAYLNNRKKVTAVHKANIMKLADGLFLESCREVAKHYSGITYNEIIVDNCCMQLVAKPEQFDVMVTPNLYGNLIANTAAGIAGGTGVMPGGNVGAEHAIFEQGASAGNVGNDKMVEQKKANPVALLLSSAMMLRHLRFPTFADRLETAVKQVIKEGKYRTKDLGGDCTTQEVVDAVIAALE

SEQ ID NO: 86970 - protein, 308 aa, Arabidopsis thaliana
  peptide (1)..(308): Ceres Seq. ID no. 12695898
MEAMHAPVHFERYEVLGNMRKVPEEVIESVKRNKVCLKGGLATPVGGGVSSLNMQLRKELDIFASLVNCINVPGLVTRHENVDIVVIRENTEGEYSGLEHEVVPGVVESLKVITKFCSERIARYAFEYAYLNNRKKVTAVHKANIMKLADGLFLESCREVAKHYSGITYNEIIVDNCCMQLVAKPEQFDVMVTPNLYGNLIANTAAGIAGGTGVMPGGNVGAEHAIFEQGASAGNVGNDKMVEQKKANPVALLLSSAMMLRHLRFPTFADRLETAVKQVIKEGKYRTKDLGGDCTTQEVVDAVIAALE

SEQ ID NO: 86971 - DNA, 1780 bp, Arabidopsis thaliana
  misc_feature (1)..(1780): Ceres Seq. ID no. 12695923
  misc_feature (1)..(1780): Ortholog of  Ceres SEQ ID NO 15170095 as cited in SEQ ID NO 68852
gtttcagacaaagtagtgacatttttctaacaattaaaccaatatcgccgtagtcaaccaccgcataacgttttggcgccgcctgaggctgacctggggctgctaaagattttatcgcgacgactctctttctctctcaaactgtttcagctgcttgcgaattggaaatggcttgtaattcctcaggctgtgagtcaggttgctatgaccgtgagaaagataatggaagtaagatagtggatgatgcagtatctggtggcggtaatcatgagagtgtctgcgtcaagtgtaaatgcaatgcgcctatgacatttggtgacggtggcttcgacgatggaagattctgcgcagattgttttaggaacaatgtctttgggaaattccgtcttgctgttacttctcatgctatgatcactccttcagataacgtccttgttgctttctctggcggatcatcttccagggtttctcttcaatttgtgcacgagttgcaaatcaaggctttgaagaattacgaggcgagtcgagatagatctttacctgtgtttggtgttggtgttgcttttgtggatgaaactgcagcttttcctgctctttccactgaaatgattgatgcaattgagtgggttcgatatactgtctcgtgtttgtctccacctgctaaggatctccatgttgttccagtcgaaagcatatttggttcagactctcttgacgcacgggatagacttctgaagctattagattctgttcctgacgatactggaaaagaagaccttctgctgcatctgaaaatgttatctttgcaaaaggttgccgctgaaaatgggtacaatagattagtgttgggatcatgcacgtcgagaattgcttcccatgttcttacggctactgtcaagggacgaggttattcactatcagcagatattcagcatgttgatgctagatggaaggttcccattgtacttccacttcgagattgtgttcgactggaaataactagactctgccttttggatggacttaagactgtggagttggcttgtcgttctcaatgcggaatcaatgatttggtgtcttcatttgtcgctctgttgcaggaagaaaatccttcccgggaatgcacaattgtacggacagctgcgaagctgactccattttacttcaataaaattccggaaacagacgactctaatgtacctatggccactcagaggcgcctaaagagattcaatctcaaatatgatggatcaatgactactgaagctttctgtcctatctgcaatggcccgctaaatagatcagactcatcagagttggatacttttgaagaaggccaggaatctgatgtcctctatgctgcttgctgttcaagttgccggtttcaaatacttccacaggatggatcatctcttgagcaattcagttcatttctaccagatcacatgatttcccaagtgaaacatcaaaaagttgatagtcaagcttatctgagggagaaaattaaagactgtctgctcttggacgatgaagaggttgtctaaatctgcattcggatgcttgcacaaggtatgagaggaagtttaaatcctgtcatgcttatcaaggattattcctagaaacctaagatcatcttagtttaatgtcgatctgatatcatcgtagatgttaaaagtgtttttactcattcgttacaatgattgtctcaatgtgaagcaaaatcactgagcaattgaatgaagcatctacagttttacacatataatacaagaatcatggg

SEQ ID NO: 86972 - protein, 458 aa, Arabidopsis thaliana
  peptide (1)..(458): Ceres Seq. ID no. 12695924
MACNSSGCESGCYDREKDNGSKIVDDAVSGGGNHESVCVKCKCNAPMTFGDGGFDDGRFCADCFRNNVFGKFRLAVTSHAMITPSDNVLVAFSGGSSSRVSLQFVHELQIKALKNYEASRDRSLPVFGVGVAFVDETAAFPALSTEMIDAIEWVRYTVSCLSPPAKDLHVVPVESIFGSDSLDARDRLLKLLDSVPDDTGKEDLLLHLKMLSLQKVAAENGYNRLVLGSCTSRIASHVLTATVKGRGYSLSADIQHVDARWKVPIVLPLRDCVRLEITRLCLLDGLKTVELACRSQCGINDLVSSFVALLQEENPSRECTIVRTAAKLTPFYFNKIPETDDSNVPMATQRRLKRFNLKYDGSMTTEAFCPICNGPLNRSDSSELDTFEEGQESDVLYAACCSSCRFQILPQDGSSLEQFSSFLPDHMISQVKHQKVDSQAYLREKIKDCLLLDDEEVV

SEQ ID NO: 86973 - protein, 412 aa, Arabidopsis thaliana
  peptide (1)..(412): Ceres Seq. ID no. 12695925
MTFGDGGFDDGRFCADCFRNNVFGKFRLAVTSHAMITPSDNVLVAFSGGSSSRVSLQFVHELQIKALKNYEASRDRSLPVFGVGVAFVDETAAFPALSTEMIDAIEWVRYTVSCLSPPAKDLHVVPVESIFGSDSLDARDRLLKLLDSVPDDTGKEDLLLHLKMLSLQKVAAENGYNRLVLGSCTSRIASHVLTATVKGRGYSLSADIQHVDARWKVPIVLPLRDCVRLEITRLCLLDGLKTVELACRSQCGINDLVSSFVALLQEENPSRECTIVRTAAKLTPFYFNKIPETDDSNVPMATQRRLKRFNLKYDGSMTTEAFCPICNGPLNRSDSSELDTFEEGQESDVLYAACCSSCRFQILPQDGSSLEQFSSFLPDHMISQVKHQKVDSQAYLREKIKDCLLLDDEEVV

SEQ ID NO: 86974 - protein, 378 aa, Arabidopsis thaliana
  peptide (1)..(378): Ceres Seq. ID no. 12695926
MITPSDNVLVAFSGGSSSRVSLQFVHELQIKALKNYEASRDRSLPVFGVGVAFVDETAAFPALSTEMIDAIEWVRYTVSCLSPPAKDLHVVPVESIFGSDSLDARDRLLKLLDSVPDDTGKEDLLLHLKMLSLQKVAAENGYNRLVLGSCTSRIASHVLTATVKGRGYSLSADIQHVDARWKVPIVLPLRDCVRLEITRLCLLDGLKTVELACRSQCGINDLVSSFVALLQEENPSRECTIVRTAAKLTPFYFNKIPETDDSNVPMATQRRLKRFNLKYDGSMTTEAFCPICNGPLNRSDSSELDTFEEGQESDVLYAACCSSCRFQILPQDGSSLEQFSSFLPDHMISQVKHQKVDSQAYLREKIKDCLLLDDEEVV

SEQ ID NO: 86975 - DNA, 1452 bp, Arabidopsis thaliana
  misc_feature (1)..(1452): Ceres Seq. ID no. 12695978
  misc_feature (1)..(1452): Ortholog of  Ceres SEQ ID NO 14302935 as cited in SEQ ID NO 20442
atggaagctatgaaggagactgtggaggagagcttgagagagatgagagagacgtttgcgagtgggaggacgaggagtctgaagtggaggaaggcacagatcggagctatatacgagatggttaaagacaacgaagacaagatctgcaatgctctgtttcaagatttgggcaaacacagtactgaagcttttagagatgagcttggtgttgtcttgcgaacagctactgttgcaatcaactgtcttgataaatgggccgtccccaaacatagcaaacttcctctgttgttctacccagcaaaagggaaagtcatatcggaaccctatgggacggttcttgttctgtctagctggaattttcctatatctttgtctctggatccattgattggggcaatagcagcaggaaataccgtgcttctcaagtcatctgaactaagccctaacgcatctgccttccttgccaagacaattccagcttatctcgatactaaagccatcaaagttatcgaaggaggacctgatgtcgctactatcctcttgcagcatcaatgggacaagatcttcttcaccgggagtcccaagattggaaggatcataatggctgcagcagcacagcatctgactcctgtgacattggagcttggtggaaaatgtcccaccattgttgatcatcacaccatttcaaagaacatcaagtcggttgtcaagaggattgctggaggaaaatggggatcttgcaatggacaagcttgtatctctgtagattacgttcttatcgaaaagagtttcgcgcctactctgattgatatgttgaagcctacgataaagtctttctttggcgaaaatcctaaagaatctggatgtctctcaaggattgcaaacaagcaccacgttcagagactgtctcgtcttcttagcgatcctcgtgtccaagcttccatcgtctatggtggttctatagacgaagataagtatgttgagccaacgatcttgttggaccctcctcttgattctgagatcatgaatgaagagatctttggtccaattctcccgattatcacggtacgtgacatccaagaaagcatagggatcattaatacaaaaccgaagccacttgccatttatgcattcacaaatgacgagaaccttaaaactagaattttgtcagaaacatcctcaggaagtgttaccttcaatgacgtcatgatccagtatatgtgtgatgcgttaccttttggaggagtgggagaaagtggaatagggaggtatcacgggaaatactcatttgattgtttcagtcacgagaaagcaataatggaaggaagcttaggtatggatcttgaagctcgataccctccatggaacaacttcaagctcaccttcatcagactcgcatttcgtgaagcttacttcaagcttatcctccttatgcttggtcttaaaagataa

SEQ ID NO: 86976 - protein, 483 aa, Arabidopsis thaliana
  peptide (1)..(483): Ceres Seq. ID no. 12695979
MEAMKETVEESLREMRETFASGRTRSLKWRKAQIGAIYEMVKDNEDKICNALFQDLGKHSTEAFRDELGVVLRTATVAINCLDKWAVPKHSKLPLLFYPAKGKVISEPYGTVLVLSSWNFPISLSLDPLIGAIAAGNTVLLKSSELSPNASAFLAKTIPAYLDTKAIKVIEGGPDVATILLQHQWDKIFFTGSPKIGRIIMAAAAQHLTPVTLELGGKCPTIVDHHTISKNIKSVVKRIAGGKWGSCNGQACISVDYVLIEKSFAPTLIDMLKPTIKSFFGENPKESGCLSRIANKHHVQRLSRLLSDPRVQASIVYGGSIDEDKYVEPTILLDPPLDSEIMNEEIFGPILPIITVRDIQESIGIINTKPKPLAIYAFTNDENLKTRILSETSSGSVTFNDVMIQYMCDALPFGGVGESGIGRYHGKYSFDCFSHEKAIMEGSLGMDLEARYPPWNNFKLTFIRLAFREAYFKLILLMLGLKR

SEQ ID NO: 86977 - protein, 480 aa, Arabidopsis thaliana
  peptide (1)..(480): Ceres Seq. ID no. 12695980
MKETVEESLREMRETFASGRTRSLKWRKAQIGAIYEMVKDNEDKICNALFQDLGKHSTEAFRDELGVVLRTATVAINCLDKWAVPKHSKLPLLFYPAKGKVISEPYGTVLVLSSWNFPISLSLDPLIGAIAAGNTVLLKSSELSPNASAFLAKTIPAYLDTKAIKVIEGGPDVATILLQHQWDKIFFTGSPKIGRIIMAAAAQHLTPVTLELGGKCPTIVDHHTISKNIKSVVKRIAGGKWGSCNGQACISVDYVLIEKSFAPTLIDMLKPTIKSFFGENPKESGCLSRIANKHHVQRLSRLLSDPRVQASIVYGGSIDEDKYVEPTILLDPPLDSEIMNEEIFGPILPIITVRDIQESIGIINTKPKPLAIYAFTNDENLKTRILSETSSGSVTFNDVMIQYMCDALPFGGVGESGIGRYHGKYSFDCFSHEKAIMEGSLGMDLEARYPPWNNFKLTFIRLAFREAYFKLILLMLGLKR

SEQ ID NO: 86978 - protein, 469 aa, Arabidopsis thaliana
  peptide (1)..(469): Ceres Seq. ID no. 12695981
MRETFASGRTRSLKWRKAQIGAIYEMVKDNEDKICNALFQDLGKHSTEAFRDELGVVLRTATVAINCLDKWAVPKHSKLPLLFYPAKGKVISEPYGTVLVLSSWNFPISLSLDPLIGAIAAGNTVLLKSSELSPNASAFLAKTIPAYLDTKAIKVIEGGPDVATILLQHQWDKIFFTGSPKIGRIIMAAAAQHLTPVTLELGGKCPTIVDHHTISKNIKSVVKRIAGGKWGSCNGQACISVDYVLIEKSFAPTLIDMLKPTIKSFFGENPKESGCLSRIANKHHVQRLSRLLSDPRVQASIVYGGSIDEDKYVEPTILLDPPLDSEIMNEEIFGPILPIITVRDIQESIGIINTKPKPLAIYAFTNDENLKTRILSETSSGSVTFNDVMIQYMCDALPFGGVGESGIGRYHGKYSFDCFSHEKAIMEGSLGMDLEARYPPWNNFKLTFIRLAFREAYFKLILLMLGLKR

SEQ ID NO: 86979 - DNA, 1326 bp, Arabidopsis thaliana
  misc_feature (1)..(1326): Ceres Seq. ID no. 12695988
  misc_feature (1)..(1326): Ortholog of  Ceres SEQ ID NO 15176433 as cited in SEQ ID NO 59539
atgaggatgaacaaaattttacttgtttttgtgtttctaagcattgccactgtaatcaatagtggaacaacaagcaactttgtccgcacagctcaaccatcaactgagatgtctctcgaaacttttccatctccggctggtcataatgctccggaacaggttcatatcgtccaaggagattacaatggacgtggtataatcatatcgtgggtgacccccttaaacctagctggttcaaacgtggttacttattggaaggcagttgatggtgatgtgaaaccgaaaaagaagagaggtcatgcctctacctcgtcttaccgattttatgactatacttctggttttcttcatcacgccacaattaaaggactcgaggttggacctgacgttccatacactttcggcattattggtgatcttggacaaactttagcttctaacgagacattatatcattacatgtcaaaccctaaaggccaagctgttctcttccctggagacttatcttacgcagatgaccatccaaaccatgatcagagaaagtgggattcgtggggaagattcgtggagccttgtgctgcttaccaaaccttcatctatgctgccgggaatcacgaaattgattttgtcccaaacattggggagcctcatgccttcaagccctacattcaccgttatcataacgcctacaaggcctcgaagagcatatctcctctttggtactctattagacgtgcatctgctcacatcatcgtcctctcctcttattctgcctacggaaaatacacacctcaatacgtgtggctcgagcaagagttgaagaaggtgaacagagaagagactccatggcttattgtcatggttcactcgccgtggtacaacagtaataactaccattacatggaaggtgagagcatgagagcaatgtttgagtcgtggttcgttaacagcaaggttgatttggttttgtctggtcacgtccattcctatgagagatccgaacgtgtctccaatattaaatacaacatcaccaatggcttgagctatcctgtgaaagacccttctgctccaatctacatcactatcggagatggaggaaacattgaaggaatcgcaaatagttttactgatccgcaaccgagctattcggcgtatagagaagctagttttggtcatgcagttttggagatttacaatagaactcacgcatactacacatggcataggaaccaagacaatgaacctgttgccgctgattcaattatgttgcataacagatatttctttccagtagaggaattagaatctggcaacactagggcctaa

SEQ ID NO: 86980 - protein, 441 aa, Arabidopsis thaliana
  peptide (1)..(441): Ceres Seq. ID no. 12695989
MRMNKILLVFVFLSIATVINSGTTSNFVRTAQPSTEMSLETFPSPAGHNAPEQVHIVQGDYNGRGIIISWVTPLNLAGSNVVTYWKAVDGDVKPKKKRGHASTSSYRFYDYTSGFLHHATIKGLEVGPDVPYTFGIIGDLGQTLASNETLYHYMSNPKGQAVLFPGDLSYADDHPNHDQRKWDSWGRFVEPCAAYQTFIYAAGNHEIDFVPNIGEPHAFKPYIHRYHNAYKASKSISPLWYSIRRASAHIIVLSSYSAYGKYTPQYVWLEQELKKVNREETPWLIVMVHSPWYNSNNYHYMEGESMRAMFESWFVNSKVDLVLSGHVHSYERSERVSNIKYNITNGLSYPVKDPSAPIYITIGDGGNIEGIANSFTDPQPSYSAYREASFGHAVLEIYNRTHAYYTWHRNQDNEPVAADSIMLHNRYFFPVEELESGNTRA

SEQ ID NO: 86981 - protein, 439 aa, Arabidopsis thaliana
  peptide (1)..(439): Ceres Seq. ID no. 12695990
MNKILLVFVFLSIATVINSGTTSNFVRTAQPSTEMSLETFPSPAGHNAPEQVHIVQGDYNGRGIIISWVTPLNLAGSNVVTYWKAVDGDVKPKKKRGHASTSSYRFYDYTSGFLHHATIKGLEVGPDVPYTFGIIGDLGQTLASNETLYHYMSNPKGQAVLFPGDLSYADDHPNHDQRKWDSWGRFVEPCAAYQTFIYAAGNHEIDFVPNIGEPHAFKPYIHRYHNAYKASKSISPLWYSIRRASAHIIVLSSYSAYGKYTPQYVWLEQELKKVNREETPWLIVMVHSPWYNSNNYHYMEGESMRAMFESWFVNSKVDLVLSGHVHSYERSERVSNIKYNITNGLSYPVKDPSAPIYITIGDGGNIEGIANSFTDPQPSYSAYREASFGHAVLEIYNRTHAYYTWHRNQDNEPVAADSIMLHNRYFFPVEELESGNTRA

SEQ ID NO: 86982 - protein, 405 aa, Arabidopsis thaliana
  peptide (1)..(405): Ceres Seq. ID no. 12695991
MSLETFPSPAGHNAPEQVHIVQGDYNGRGIIISWVTPLNLAGSNVVTYWKAVDGDVKPKKKRGHASTSSYRFYDYTSGFLHHATIKGLEVGPDVPYTFGIIGDLGQTLASNETLYHYMSNPKGQAVLFPGDLSYADDHPNHDQRKWDSWGRFVEPCAAYQTFIYAAGNHEIDFVPNIGEPHAFKPYIHRYHNAYKASKSISPLWYSIRRASAHIIVLSSYSAYGKYTPQYVWLEQELKKVNREETPWLIVMVHSPWYNSNNYHYMEGESMRAMFESWFVNSKVDLVLSGHVHSYERSERVSNIKYNITNGLSYPVKDPSAPIYITIGDGGNIEGIANSFTDPQPSYSAYREASFGHAVLEIYNRTHAYYTWHRNQDNEPVAADSIMLHNRYFFPVEELESGNTRA

SEQ ID NO: 86983 - DNA, 546 bp, Arabidopsis thaliana
  misc_feature (1)..(546): Ceres Seq. ID no. 12696036
  misc_feature (1)..(546): Ortholog of  Ceres SEQ ID NO 14307654 as cited in SEQ ID NO 54606
  misc_feature (1)..(546): Ortholog of  Ceres SEQ ID NO 15168370 as cited in SEQ ID NO 55687
  misc_feature (1)..(546): Ortholog of  Ceres SEQ ID NO 12620302 as cited in SEQ ID NO 65999
atgaaggaggacgatgcattgccgacgacgacgacgactggtacggcgacgggaacagctatggcgaattcgaagaaggaaagctctgactcggtcttgtttggaagaggtcgatataagttctgggcgtttgctgcgattttgcttttggctttttggtcgatgtttactggcaccgtcactctccggttatctaccgggaatctgaaccggttatcggaagatctagggattccgaactacgataatctcgacgttctggaaatggaggagagagagaaagtggtgaagcatatgtgggatgtgtatactaatagtcgtcggatcaaattgcctagattttggcaagaggcttttgttgctgcttatgaagaactcactagtgatgtgcctggggttagagaagctgctattggtgaaatcgccaagatgtcggcgcggtcgatcactcttgatccacctccttctagatcaagtttgatgagtgcaagggatttgggaagaaacttgaagagaattctacacaagccagcagctagtagctga

SEQ ID NO: 86984 - protein, 181 aa, Arabidopsis thaliana
  peptide (1)..(181): Ceres Seq. ID no. 12696037
MKEDDALPTTTTTGTATGTAMANSKKESSDSVLFGRGRYKFWAFAAILLLAFWSMFTGTVTLRLSTGNLNRLSEDLGIPNYDNLDVLEMEEREKVVKHMWDVYTNSRRIKLPRFWQEAFVAAYEELTSDVPGVREAAIGEIAKMSARSITLDPPPSRSSLMSARDLGRNLKRILHKPAASS

SEQ ID NO: 86985 - protein, 161 aa, Arabidopsis thaliana
  peptide (1)..(161): Ceres Seq. ID no. 12696038
MANSKKESSDSVLFGRGRYKFWAFAAILLLAFWSMFTGTVTLRLSTGNLNRLSEDLGIPNYDNLDVLEMEEREKVVKHMWDVYTNSRRIKLPRFWQEAFVAAYEELTSDVPGVREAAIGEIAKMSARSITLDPPPSRSSLMSARDLGRNLKRILHKPAASS

SEQ ID NO: 86986 - protein, 127 aa, Arabidopsis thaliana
  peptide (1)..(127): Ceres Seq. ID no. 12696039
MFTGTVTLRLSTGNLNRLSEDLGIPNYDNLDVLEMEEREKVVKHMWDVYTNSRRIKLPRFWQEAFVAAYEELTSDVPGVREAAIGEIAKMSARSITLDPPPSRSSLMSARDLGRNLKRILHKPAASS

SEQ ID NO: 86987 - DNA, 1298 bp, Arabidopsis thaliana
  misc_feature (1)..(1298): Ceres Seq. ID no. 12696066
  misc_feature (1)..(1298): Ortholog of  Ceres SEQ ID NO 13495628 as cited in SEQ ID NO 60727
cctcacccatcaagtcccaattcccaacactgtcactcaaaaagaatcttcaaacaatgaatctcaacgtcgtcgttttactcctactccttctaatctcatccgccacgtgttgtccgccgtcagaccgccgtgcacttctagctttccgatcagctcttcacgagccttacctcggcattttcaactcatggacaggccaagactgttgccacaactggtacggtattagctgcgactcgctcactcaccgagtcgccgacataaatctccgcggcgagtcagaagatccaatcttcgaacgagctcaccgaaccggttacatgaccggacacatctccgcctcgatatgtgagctcactcgtctctccgccattacaatcgccgattggaaaggtatctccggcgaaatccctaaatgtatcactcgtcttccttttctccgtacactcgacttaatcggaaaccaaatctccggtgggattccatacgacatcggaagattaaaccggttagctgttttaaacgtagccgataaccgaatctccggttcaattccaaaatcattaaccaatctctctagcttaatgcatttagatctccgtaacaacttaatctccggtgtaatcccgtcggacgtcggaagattaaaaatgctcagccgtgcgttattatccggtaaccgaataaccggtcggatcccagaatcattaaccaatatctaccggttagctgacgtggatctctccggtaaccaactctacggtacaatcccaccgtctctaggacgtatgtcggtactagccacacttaacctcgacggaaacaaaatctccggcgagatacctcaaactctgatgacgtcgtcggtgatgaatctgaatttgagccggaacttgctacaagggaagatacctgaagggtttggaccaaggtcttacttcacagttcttgatttgtcgtataataatctgaaaggaccaataccgagatcgatctcaggtgcgtcgtttattggtcatttggatcttagccataaccatctctgtgggaggattccggtaggttcaccgtttgatcatcttgaagcggcgtcgtttatgtttaacgactgtctttgtggtaaacctttaagagcttgcttgaaaaattgatttttatatgtaatttgagttttttcattagagacattattatatttatggttatgcattttataaaaaaaagatttaaaattgtatgctacgtttagttgaattatgggatgattaacaaaatatataaacttccagtttcat

SEQ ID NO: 86988 - protein, 383 aa, Arabidopsis thaliana; identical to SEQ ID NO: 39969
  peptide (1)..(383): Ceres Seq. ID no. 12696067

SEQ ID NO: 86989 - protein, 365 aa, Arabidopsis thaliana; identical to SEQ ID NO: 39970
  peptide (1)..(365): Ceres Seq. ID no. 12696068

SEQ ID NO: 86990 - protein, 276 aa, Arabidopsis thaliana; identical to SEQ ID NO: 39971
  peptide (1)..(276): Ceres Seq. ID no. 12696069

SEQ ID NO: 86991 - DNA, 1920 bp, Arabidopsis thaliana
  misc_feature (1)..(1920): Ceres Seq. ID no. 12696098
  misc_feature (1)..(1920): Ortholog of  Ceres SEQ ID NO 13502874 as cited in SEQ ID NO 66298
  misc_feature (1)..(1920): Ortholog of  Ceres SEQ ID NO 12614124 as cited in SEQ ID NO 68392
atggcagcaatgatcacctttgactttcaaaacagcttcatcttcatcctcttttttctcttctctctcctttgttactctctcttcttcaggaaaccaaagggctcacgagctggccgtgatcttcctccgagccctccttcttttcctgtaattggtcatcttcaccttcttctctctgctcttgttcacaagtcttttcaaaacatctcctctaagtatggacctcttctccatctccgcgtcttccacattcccatagtcctcgcctcctcggcctcagtggcctacgagatcttcaaggcccaagatgtgaatgtctcctctcgcggtcacgctccagtcggggagtctctctggtttggatcgtctagcttcttcttcgctccctatggagattactttaaatttatgaggaagctcatagccacaaagcttcttggaccacaggcactcgagcgttcacgaaaaatccgtgcagatgagctagatcggttttacaaaaccttgcttgacaaggcgatgaagaaggagagtgttgagatcggtgaggaagcagcgaagctcaataacaatatcatctgcaagatgatcatggggaggagttgttcagaggagaatggtgaggcggagaaattcagacacttggtgatcgagtcgatggctttgacaaagcaaatcttctttggtatgatctttcacaaaccgcttaaaaagctcgggatctcactgttccaaaaggatatactaagtctttcccgcaagttcgacgagttgctggagaagattctttttgaacacgaagagaaaaaggcggagcacaatcaagctaatgacatgatggattttttgttggaagcttatggagacgaaaatgcagagtataaaatcacaagaaaccatatcaagtccttgttcgtggatcttgtcattgcagggactgacacctcggtgcaagcaacacagtggacaatgggggagctcattaacaaccctaagattcttcagagattgagagaagaaatcgaatcggttgtagggaacacaagattaattcaagaaaatgatttaccaaacctcccttacttgcaagcggtagtcaaagaagggctaagattgcatccgccggggtctatctcggtaaggatgtttcaagaaaggtgtgaactcaaagggttctacataccggagaagacattacttgttgttaatacttatgctataatgagagatcctaatttctgggaagatcctgaggagtttaaacctgagaggtttatagcatcttcaagatcagagcaagaggacgaggtaagagaggaagtcttgaaatacattcctttctccgcgggaaggagaggctgtcctggatcaaatctagcttatatctctctaggaatcgtgattggggtaatggtgcagtgctttgattggagaattgaaggagagaaagtaaacatgaatgaggctgctgaaacaactgcgttgtccatggctcagcctcttaagtgcactcctgtttctcgaaccaaaaaccctttgccatcaaattttagctttgccttttgttgtttttgtctcatgattgcgcgtgattcctgtttactggttacctttggtttaaattgcttcttcaataaactgtgttgttcttgtgtgccttgtgtgttacatacaacaagattatgtctttcacaacatattggcattttacactctacaaaaccagaaaacttacactttaacttccccatcatccttgtttcctcggcctcagtggccggcgagatcttcagggcccacgacatgaacgtatcctctcgcggtgctgctgcgatagatgagtccctcgtgtttggatcttctggtgtcgtctacgctccctatggagataacttgaagttcgtgaagaagaaataa

SEQ ID NO: 86992 - protein, 639 aa, Arabidopsis thaliana
  peptide (1)..(639): Ceres Seq. ID no. 12696099
MAAMITFDFQNSFIFILFFLFSLLCYSLFFRKPKGSRAGRDLPPSPPSFPVIGHLHLLLSALVHKSFQNISSKYGPLLHLRVFHIPIVLASSASVAYEIFKAQDVNVSSRGHAPVGESLWFGSSSFFFAPYGDYFKFMRKLIATKLLGPQALERSRKIRADELDRFYKTLLDKAMKKESVEIGEEAAKLNNNIICKMIMGRSCSEENGEAEKFRHLVIESMALTKQIFFGMIFHKPLKKLGISLFQKDILSLSRKFDELLEKILFEHEEKKAEHNQANDMMDFLLEAYGDENAEYKITRNHIKSLFVDLVIAGTDTSVQATQWTMGELINNPKILQRLREEIESVVGNTRLIQENDLPNLPYLQAVVKEGLRLHPPGSISVRMFQERCELKGFYIPEKTLLVVNTYAIMRDPNFWEDPEEFKPERFIASSRSEQEDEVREEVLKYIPFSAGRRGCPGSNLAYISLGIVIGVMVQCFDWRIEGEKVNMNEAAETTALSMAQPLKCTPVSRTKNPLPSNFSFAFCCFCLMIARDSCLLVTFGLNCFFNKLCCSCVPCVLHTTRLCLSQHIGILHSTKPENLHFNFPIILVSSASVAGEIFRAHDMNVSSRGAAAIDESLVFGSSGVVYAPYGDNLKFVKKK

SEQ ID NO: 86993 - protein, 636 aa, Arabidopsis thaliana
  peptide (1)..(636): Ceres Seq. ID no. 12696100
MITFDFQNSFIFILFFLFSLLCYSLFFRKPKGSRAGRDLPPSPPSFPVIGHLHLLLSALVHKSFQNISSKYGPLLHLRVFHIPIVLASSASVAYEIFKAQDVNVSSRGHAPVGESLWFGSSSFFFAPYGDYFKFMRKLIATKLLGPQALERSRKIRADELDRFYKTLLDKAMKKESVEIGEEAAKLNNNIICKMIMGRSCSEENGEAEKFRHLVIESMALTKQIFFGMIFHKPLKKLGISLFQKDILSLSRKFDELLEKILFEHEEKKAEHNQANDMMDFLLEAYGDENAEYKITRNHIKSLFVDLVIAGTDTSVQATQWTMGELINNPKILQRLREEIESVVGNTRLIQENDLPNLPYLQAVVKEGLRLHPPGSISVRMFQERCELKGFYIPEKTLLVVNTYAIMRDPNFWEDPEEFKPERFIASSRSEQEDEVREEVLKYIPFSAGRRGCPGSNLAYISLGIVIGVMVQCFDWRIEGEKVNMNEAAETTALSMAQPLKCTPVSRTKNPLPSNFSFAFCCFCLMIARDSCLLVTFGLNCFFNKLCCSCVPCVLHTTRLCLSQHIGILHSTKPENLHFNFPIILVSSASVAGEIFRAHDMNVSSRGAAAIDESLVFGSSGVVYAPYGDNLKFVKKK

SEQ ID NO: 86994 - protein, 502 aa, Arabidopsis thaliana
  peptide (1)..(502): Ceres Seq. ID no. 12696101
MRKLIATKLLGPQALERSRKIRADELDRFYKTLLDKAMKKESVEIGEEAAKLNNNIICKMIMGRSCSEENGEAEKFRHLVIESMALTKQIFFGMIFHKPLKKLGISLFQKDILSLSRKFDELLEKILFEHEEKKAEHNQANDMMDFLLEAYGDENAEYKITRNHIKSLFVDLVIAGTDTSVQATQWTMGELINNPKILQRLREEIESVVGNTRLIQENDLPNLPYLQAVVKEGLRLHPPGSISVRMFQERCELKGFYIPEKTLLVVNTYAIMRDPNFWEDPEEFKPERFIASSRSEQEDEVREEVLKYIPFSAGRRGCPGSNLAYISLGIVIGVMVQCFDWRIEGEKVNMNEAAETTALSMAQPLKCTPVSRTKNPLPSNFSFAFCCFCLMIARDSCLLVTFGLNCFFNKLCCSCVPCVLHTTRLCLSQHIGILHSTKPENLHFNFPIILVSSASVAGEIFRAHDMNVSSRGAAAIDESLVFGSSGVVYAPYGDNLKFVKKK

SEQ ID NO: 86995 - DNA, 1285 bp, Arabidopsis thaliana
  misc_feature (1)..(1285): Ceres Seq. ID no. 12696133
  misc_feature (1)..(1285): Ortholog of  Ceres SEQ ID NO 14313955 as cited in SEQ ID NO 54407
atcaaaggagcttccttttttcgctctcgtctccgtttacccttttgggatttttccctaaacctttttctctctttgtataatcaaatcctctttatctttcattgtttcgcgtgaattagctctgcaaaggctcttcattcttctcgcttggattcctctgcacaaaagaaaaaagaccatggatgatcttcatggaagaaatggtcgaatgcacattggtgtagcgcaaaatccaatgcatgtgcagtatgaagatcacggtttgcaccatatcgacaatgaaaacagtatgatggatgaccatgctgatggtgggatggatgaaggagtggagacagacattccttctcaccctggaaactcagctgataatcgtggtgaagttgtagaccgtggaattgaaaatggagatcaattgacattgtccttccagggacaagtttatgtttttgaccgtgtctcgcctgagaaggttcaagctgtgcttttgttacttggtggaagggaagtaccacatacactcccaacaaccctaggatcacctcatcagaacaatagggtactgggtctatctggtactcctcaacggcttagcgttccgcagcggttagcttctttgctcaggtttagggagaaacgaaaagggaggaactttgataagactattcgctatacagtcaggaaagaagtagccttgagaatgcagcgtaagaaaggtcagttcacgtcggctaaatcaagcaatgatgattctggatccactggatcggattgggggtcaaaccagagctgggccgtagaagggactgagactcagaagccagaggttttatgtcgacactgtggaacaagtgagaagtcaactccaatgatgcgacgtggacctgatgggccaagaacactttgtaatgcgtgtggactgatgtgggcaaacaaggggactcttagagacctatccaaagtccctcctccgcaaacacctcagcatctatctctgaataagaatgaggacgcaaatcttgaggctgatcaaatgatggaagtaactggtgacattagcaacacacagtgagaactgagaaaccattggaagcaagaaaggatctcaaacaaaaacagttgttatcatttcatttgatgatggaatcgaatctgagttgtgtttagggtttctctgggttaatctcagtctatgtgggcacattttagtcttctacaaattataagacactcttcacttatttagaagctcactcatcagaaaagaaaaaaaaaactttgc

SEQ ID NO: 86996 - protein, 297 aa, Arabidopsis thaliana
  peptide (1)..(297): Ceres Seq. ID no. 12696134
MDDLHGRNGRMHIGVAQNPMHVQYEDHGLHHIDNENSMMDDHADGGMDEGVETDIPSHPGNSADNRGEVVDRGIENGDQLTLSFQGQVYVFDRVSPEKVQAVLLLLGGREVPHTLPTTLGSPHQNNRVLGLSGTPQRLSVPQRLASLLRFREKRKGRNFDKTIRYTVRKEVALRMQRKKGQFTSAKSSNDDSGSTGSDWGSNQSWAVEGTETQKPEVLCRHCGTSEKSTPMMRRGPDGPRTLCNACGLMWANKGTLRDLSKVPPPQTPQHLSLNKNEDANLEADQMMEVTGDISNTQ

SEQ ID NO: 86997 - protein, 287 aa, Arabidopsis thaliana
  peptide (1)..(287): Ceres Seq. ID no. 12696135
MHIGVAQNPMHVQYEDHGLHHIDNENSMMDDHADGGMDEGVETDIPSHPGNSADNRGEVVDRGIENGDQLTLSFQGQVYVFDRVSPEKVQAVLLLLGGREVPHTLPTTLGSPHQNNRVLGLSGTPQRLSVPQRLASLLRFREKRKGRNFDKTIRYTVRKEVALRMQRKKGQFTSAKSSNDDSGSTGSDWGSNQSWAVEGTETQKPEVLCRHCGTSEKSTPMMRRGPDGPRTLCNACGLMWANKGTLRDLSKVPPPQTPQHLSLNKNEDANLEADQMMEVTGDISNTQ

SEQ ID NO: 86998 - protein, 278 aa, Arabidopsis thaliana
  peptide (1)..(278): Ceres Seq. ID no. 12696136
MHVQYEDHGLHHIDNENSMMDDHADGGMDEGVETDIPSHPGNSADNRGEVVDRGIENGDQLTLSFQGQVYVFDRVSPEKVQAVLLLLGGREVPHTLPTTLGSPHQNNRVLGLSGTPQRLSVPQRLASLLRFREKRKGRNFDKTIRYTVRKEVALRMQRKKGQFTSAKSSNDDSGSTGSDWGSNQSWAVEGTETQKPEVLCRHCGTSEKSTPMMRRGPDGPRTLCNACGLMWANKGTLRDLSKVPPPQTPQHLSLNKNEDANLEADQMMEVTGDISNTQ

SEQ ID NO: 86999 - DNA, 2844 bp, Arabidopsis thaliana
  misc_feature (1)..(2844): Ceres Seq. ID no. 12696179
  misc_feature (1)..(2844): Ortholog of  Ceres SEQ ID NO 14307510 as cited in SEQ ID NO 54687
atgcctcgtgctgttggaaaaaggactcctagaattcctatctcatacacccttgagaaggatactagggaaagatatttatcacctgttaagagaggtttaaatcagaagggggatgatactgatgatgatatggaacatgagatagcattagcattggctgaggcttcacaacgaggtggctctacaaagaactcccacacaccaaatagaaaagcaaagatgtacccccctgataaaaagggtgaaagaatgcgtgccgatattgacttggcgattgccaagcttcatgccactgatatggaagatgtccgctgtgaaccaagcttaggaagcactgaagctgataatgcggattattctggaggtagaaatgacttgacacatggagaaggttctagtgccgtggaaaagcagcaaaaaggaagaacatactataggaggagagtaggcattaaagaagaagatgcaaaagaagcctgcagtggtacagatgaagcaccaagcttaggcgctcccgatgagaaatttgaacaagaaagggaagggaaggctttgaaattcacatataaagtttcaaggagaaaaagtaaaaaaagtctttttactgcagatgaagacacagcatgtgatgctctccatacgctggcagatctatcgctgatgatgcctgaaactgccactgatactgagtcatcagttcaagctgaggaaaagaaagctggagaagcttatgtttcagattttaaagggactgatccggcatccatgtctaaaagtagttctcttagaaactccaaacagagaagatacggcagcaatgacctttgtaaccctgaactcgagagaaaaagtccaagtagttctttaatccaaaagagacggcagaaagcattaccagctaaagttcttaaagatgagcttgctgcaagctcacaagtcatagagccttgtaatagcaagggaataggtgaggaatataagcctgttgggagaggtaaacggtccgcaagtattcgaaactcacatgaaaagaaatctgccaaatctcatgatcatacttcgtcaagtaacaacatagtagaagaagatgagtcagctccatcaaatgcagtcattaaaaaacaagttaacttgccaactaaagttaggagcagaagaaagatagtaactgagaaacctctaactattgatgacgggaaaatttctgagactatagagaagttttcgcattgcatttctagtttccgagcacggagatggtgtatttttgagtggttctacagtgcaattgactatccatggtttgccagacaagagtttgttgagtatttggatcatgtagggttgggtcatgttcctagattaactcgcgttgaatggggtgtcataaggagttctcttgggaaaccaaggcgattttctgaacagtttttgaaggaggaaaaagaaaagctatacctatacagggactctgtaagaaaacattatgatgaactaaacacgggcatgagggaaggacttccaatggatttggcccggcctctaaatgtttcacagagagtcatttgcctgcatccaaagtcaagagagattcatgacggcaatgtcctaactgttgatcactgtaggtaccggattcagtttgacaaccctgaattaggggtagaatttgttaaggatactgaatgcatgccactgaatcctctagaaaacatgccagcatcgctggcaaggcactatgctttctcaaattatcacattcagaatcccattgaggagaaaatgcatgaacgggcaaaggaaagcatgctggaaggatatcccaaactttcgtgtgagacaggccatctcttgtcctctccaaattataacattagcaattcactaaagcaggaaaaggtagatatctcaagttcaaatccacaagctcaagacggagttgatgaggctcttgctttacaattgtttaattctcagccctcaagtattggacaaatccaggcaagagaagctgatgtccaagctctttctgaactaacgcgtgcgcttgacaagaaggagctagttttgagggagctaaaatgcatgaacgacgaggttgtggaaagtcagaaagatggacataataatgccctaaaggattctgaatcttttaagaaacaatatgcagcactaagcgaaatcaatgagcaggtttcattggcacttcttggcttgaggcaacgaaatacttaccaggagaatgtaccatattcatcaataagacgcatgagtaaatcaggggaacctgatggtcagttgacatacgaagacaataatgcatcagacactaatggattccatgtgtctgagatcgtcgaaagttctagaataaaagcacggaaaatggtatacagagctgtacaggcattggagttactgagaaaagacgaaaataataatgtaaatatggaagaagccattgattttgtaaataatcagctctcaatagatcaaacagaaggatcatcagtccagcaaacacaaggtggccaggatcagcgtcttccctctacaccaaatccacctagctcaactcctgccaatgattcccacctaaaccaacccgatcaaaatgacctgcaagtcccgtccgatcttgtgtcccgatgtatcgctacattgcttatgattcagaaatgtacagagaggcaattcccaccaagtgaagtagcccaggttctagactcggcagtggcgagtttacagccttgctgctcgcagaaccttccgatctatacagagattcagaagtgcatgggaatcataagaaaccagattctagccctcgtaccctcctaa

SEQ ID NO: 87000 - protein, 947 aa, Arabidopsis thaliana
  peptide (1)..(947): Ceres Seq. ID no. 12696180
MPRAVGKRTPRIPISYTLEKDTRERYLSPVKRGLNQKGDDTDDDMEHEIALALAEASQRGGSTKNSHTPNRKAKMYPPDKKGERMRADIDLAIAKLHATDMEDVRCEPSLGSTEADNADYSGGRNDLTHGEGSSAVEKQQKGRTYYRRRVGIKEEDAKEACSGTDEAPSLGAPDEKFEQEREGKALKFTYKVSRRKSKKSLFTADEDTACDALHTLADLSLMMPETATDTESSVQAEEKKAGEAYVSDFKGTDPASMSKSSSLRNSKQRRYGSNDLCNPELERKSPSSSLIQKRRQKALPAKVLKDELAASSQVIEPCNSKGIGEEYKPVGRGKRSASIRNSHEKKSAKSHDHTSSSNNIVEEDESAPSNAVIKKQVNLPTKVRSRRKIVTEKPLTIDDGKISETIEKFSHCISSFRARRWCIFEWFYSAIDYPWFARQEFVEYLDHVGLGHVPRLTRVEWGVIRSSLGKPRRFSEQFLKEEKEKLYLYRDSVRKHYDELNTGMREGLPMDLARPLNVSQRVICLHPKSREIHDGNVLTVDHCRYRIQFDNPELGVEFVKDTECMPLNPLENMPASLARHYAFSNYHIQNPIEEKMHERAKESMLEGYPKLSCETGHLLSSPNYNISNSLKQEKVDISSSNPQAQDGVDEALALQLFNSQPSSIGQIQAREADVQALSELTRALDKKELVLRELKCMNDEVVESQKDGHNNALKDSESFKKQYAALSEINEQVSLALLGLRQRNTYQENVPYSSIRRMSKSGEPDGQLTYEDNNASDTNGFHVSEIVESSRIKARKMVYRAVQALELLRKDENNNVNMEEAIDFVNNQLSIDQTEGSSVQQTQGGQDQRLPSTPNPPSSTPANDSHLNQPDQNDLQVPSDLVSRCIATLLMIQKCTERQFPPSEVAQVLDSAVASLQPCCSQNLPIYTEIQKCMGIIRNQILALVPS

SEQ ID NO: 87001 - protein, 903 aa, Arabidopsis thaliana
  peptide (1)..(903): Ceres Seq. ID no. 12696181
MEHEIALALAEASQRGGSTKNSHTPNRKAKMYPPDKKGERMRADIDLAIAKLHATDMEDVRCEPSLGSTEADNADYSGGRNDLTHGEGSSAVEKQQKGRTYYRRRVGIKEEDAKEACSGTDEAPSLGAPDEKFEQEREGKALKFTYKVSRRKSKKSLFTADEDTACDALHTLADLSLMMPETATDTESSVQAEEKKAGEAYVSDFKGTDPASMSKSSSLRNSKQRRYGSNDLCNPELERKSPSSSLIQKRRQKALPAKVLKDELAASSQVIEPCNSKGIGEEYKPVGRGKRSASIRNSHEKKSAKSHDHTSSSNNIVEEDESAPSNAVIKKQVNLPTKVRSRRKIVTEKPLTIDDGKISETIEKFSHCISSFRARRWCIFEWFYSAIDYPWFARQEFVEYLDHVGLGHVPRLTRVEWGVIRSSLGKPRRFSEQFLKEEKEKLYLYRDSVRKHYDELNTGMREGLPMDLARPLNVSQRVICLHPKSREIHDGNVLTVDHCRYRIQFDNPELGVEFVKDTECMPLNPLENMPASLARHYAFSNYHIQNPIEEKMHERAKESMLEGYPKLSCETGHLLSSPNYNISNSLKQEKVDISSSNPQAQDGVDEALALQLFNSQPSSIGQIQAREADVQALSELTRALDKKELVLRELKCMNDEVVESQKDGHNNALKDSESFKKQYAALSEINEQVSLALLGLRQRNTYQENVPYSSIRRMSKSGEPDGQLTYEDNNASDTNGFHVSEIVESSRIKARKMVYRAVQALELLRKDENNNVNMEEAIDFVNNQLSIDQTEGSSVQQTQGGQDQRLPSTPNPPSSTPANDSHLNQPDQNDLQVPSDLVSRCIATLLMIQKCTERQFPPSEVAQVLDSAVASLQPCCSQNLPIYTEIQKCMGIIRNQILALVPS

SEQ ID NO: 87002 - protein, 873 aa, Arabidopsis thaliana
  peptide (1)..(873): Ceres Seq. ID no. 12696182
MYPPDKKGERMRADIDLAIAKLHATDMEDVRCEPSLGSTEADNADYSGGRNDLTHGEGSSAVEKQQKGRTYYRRRVGIKEEDAKEACSGTDEAPSLGAPDEKFEQEREGKALKFTYKVSRRKSKKSLFTADEDTACDALHTLADLSLMMPETATDTESSVQAEEKKAGEAYVSDFKGTDPASMSKSSSLRNSKQRRYGSNDLCNPELERKSPSSSLIQKRRQKALPAKVLKDELAASSQVIEPCNSKGIGEEYKPVGRGKRSASIRNSHEKKSAKSHDHTSSSNNIVEEDESAPSNAVIKKQVNLPTKVRSRRKIVTEKPLTIDDGKISETIEKFSHCISSFRARRWCIFEWFYSAIDYPWFARQEFVEYLDHVGLGHVPRLTRVEWGVIRSSLGKPRRFSEQFLKEEKEKLYLYRDSVRKHYDELNTGMREGLPMDLARPLNVSQRVICLHPKSREIHDGNVLTVDHCRYRIQFDNPELGVEFVKDTECMPLNPLENMPASLARHYAFSNYHIQNPIEEKMHERAKESMLEGYPKLSCETGHLLSSPNYNISNSLKQEKVDISSSNPQAQDGVDEALALQLFNSQPSSIGQIQAREADVQALSELTRALDKKELVLRELKCMNDEVVESQKDGHNNALKDSESFKKQYAALSEINEQVSLALLGLRQRNTYQENVPYSSIRRMSKSGEPDGQLTYEDNNASDTNGFHVSEIVESSRIKARKMVYRAVQALELLRKDENNNVNMEEAIDFVNNQLSIDQTEGSSVQQTQGGQDQRLPSTPNPPSSTPANDSHLNQPDQNDLQVPSDLVSRCIATLLMIQKCTERQFPPSEVAQVLDSAVASLQPCCSQNLPIYTEIQKCMGIIRNQILALVPS

SEQ ID NO: 87003 - DNA, 879 bp, Arabidopsis thaliana
  misc_feature (1)..(879): Ceres Seq. ID no. 12696231
  misc_feature (1)..(879): Ortholog of  Ceres SEQ ID NO 14314550 as cited in SEQ ID NO 52321
atggctcaatcgtgtcttaaaattgttcgaatcaacaatctaaggaacagagtgaatcgtcggattttgattctccgacgattcacacggttgttatggagtagaatcgttgcttgtactcctggcaaatctcggagatatctcttgctttctcgcgctcttccgtctccgactgtttctcgtccttctccttctccgatccccgccgtcgatgtcgtcgtcggtggtggtggtggtggtggtgagtttgttcgtcgttcgtcggttgtttacgataatgataacagtcatcggagatcggattctgatttggtttctttgaagattagtctcttaggagatccagaaatcggaaaaactagcttcctggcgaaatatgttggagaagagaaagaagtagaaatgagagaattggagaaaggtataaattgtacggacaagacgttatacatgggaggtgctcgcatttcatatagtatctgggaattagaaggagctgagagatcacgagatcaaatccctgtggcttgcaaggactctgttgccattctctttatgtttgatttaaccagtcgttgcacgcttaatagtgtcattagctggtatcaacaagctaggaagtctaatcagacggcgataccagttatggtaggaaccaagtttgatgagtttattcagcttcctattgatctgcaatggacaattgctagccaggcgagaacatatgcgaaggctttaaacgcgacgctcttcttctcgagtgcttcatacaacataaacgtgaataagatctttaagtttgtgacggcgaagctcttcgacttaccatggacggtggagcgcaatctcacaatcggagaaccaatcatcgacttctag

SEQ ID NO: 87004 - protein, 292 aa, Arabidopsis thaliana
  peptide (1)..(292): Ceres Seq. ID no. 12696232
MAQSCLKIVRINNLRNRVNRRILILRRFTRLLWSRIVACTPGKSRRYLLLSRALPSPTVSRPSPSPIPAVDVVVGGGGGGGEFVRRSSVVYDNDNSHRRSDSDLVSLKISLLGDPEIGKTSFLAKYVGEEKEVEMRELEKGINCTDKTLYMGGARISYSIWELEGAERSRDQIPVACKDSVAILFMFDLTSRCTLNSVISWYQQARKSNQTAIPVMVGTKFDEFIQLPIDLQWTIASQARTYAKALNATLFFSSASYNINVNKIFKFVTAKLFDLPWTVERNLTIGEPIIDF

SEQ ID NO: 87005 - protein, 158 aa, Arabidopsis thaliana
  peptide (1)..(158): Ceres Seq. ID no. 12696233
MRELEKGINCTDKTLYMGGARISYSIWELEGAERSRDQIPVACKDSVAILFMFDLTSRCTLNSVISWYQQARKSNQTAIPVMVGTKFDEFIQLPIDLQWTIASQARTYAKALNATLFFSSASYNINVNKIFKFVTAKLFDLPWTVERNLTIGEPIIDF

SEQ ID NO: 87006 - DNA, 1208 bp, Arabidopsis thaliana
  misc_feature (1)..(1208): Ceres Seq. ID no. 12696240
  misc_feature (1)..(1208): Ortholog of  Ceres SEQ ID NO 14316365 as cited in SEQ ID NO 60135
aggaggctcgagaacagtgccccatatctgaaagctgaagctaagaatctggacgttcgtgtttaaaccgacgacgtatttgaaattggctttgaaggaaaggtgaaattaatggcggaatcgtcgtcgccgtcgcctactgaagagatcgttcggttgattaagcgtttaagcgcttacgttgctttcaaaatgtcaagccttttctccactacatcgattcgaaatctggattcaagatcaattggtgcgattgcggggcttgcgattgcggtgatatttacgtggagggcgataagaacgcccggagagcaacgtcagagaaggcagccgaagcgtaggattcacaatgctgaaacgtctagtgctgctgctgctgcttctcagtcgaatctagcttcttcggttgctccggaagtttcttcgcctcgtgaggataatgcggtgcaagatgttgttgatcagttctttcaacctgttaaacctactttggggcaaatagttagacagaagcttagtgaaggaaggaaggtaacatgccgtcttcttggagtaattcttgaggaaacaagtccagaagaactccaaaaacaagccacagtgaggtcatctgttttggaagttctactagagattacaaagtatagtgatttgtatcttatggaaagagttcttgacgatgaaagcgaggccaaagttttacaggctttagagaatgcaggagtttttacatctggtggtttagtcaaagataaggtgctcttttgtagtacagagataggaagaacttcctttgtcagacagctagaacctgactggcatattgatacaaacccggaaatcagcacacaactagctaggttcatcaaatatcagcttcatgtcgctacggtgaaacccgagcgaacagctccaaatgtgttcacctcgcagtcaatagaacagttctttggaagtgtttaatatcaacaaaaaaagagaggtgaaagatattacgttgtcctgacttaagcatcgttgatcgagtgtctcttaggctgaaacttgaaacttgtttttcatttttctttgattgtgtctaaattaaagtttgatatacatttggagttagatattactgcgagtgcctctgtgaaagtatccaagtttgtaatttttgtattagcaacttagcaaaattctttaagaaataaacaaatgtccgttgt

SEQ ID NO: 87007 - protein, 283 aa, Arabidopsis thaliana; identical to SEQ ID NO: 36533
  peptide (1)..(283): Ceres Seq. ID no. 12696241

SEQ ID NO: 87008 - protein, 256 aa, Arabidopsis thaliana; identical to SEQ ID NO: 36534
  peptide (1)..(256): Ceres Seq. ID no. 12696242

SEQ ID NO: 87009 - DNA, 1791 bp, Arabidopsis thaliana
  misc_feature (1)..(1791): Ceres Seq. ID no. 12696261
  misc_feature (1)..(1791): Ortholog of  Ceres SEQ ID NO 13598865 as cited in SEQ ID NO 0
atggaggaaaccgttgaggccgcagaatcaatcatcaagaaatgggatccgaactcaccatcctacacaaagatcatctctctgtttagtcatagcagaagagaggccaaagaattcatcagatgcatccgtgacttacgcagagccatgcactttcttatctctcagcactcaaaatctgccaagctagttcttgcacagcacctgatgcagattgctatggccaggctcgaaaaagagttcttccagattctgtcttcaaaccgagaccaacttgatcctgaatctgtctctggtcactcctccatttcaagcaattcagaatttgaagatgttatgcaatcttctgatgatgaagaagaagatgagctgaagaaggctggtgaaacgatcactaaggtcgaaaaagctgcagcacttgtgatgtcagacctcaaggtcatagcagagactatgatcagctgtggatatggtaaagagtgcataaagagctataagttgatcagaaagtcaattgtagatgaagggctacacttacttggtatcgaaaagtgcaagatctcccggttcaacagaatggactgggacgtgctcgagcatatgatcaagaactggatcaaagctgcaaagattggtgtcataacactcctccgcggagagaaacttctatgtgatcatgtcttctctgcttcaagtacaataagagagtcttgcttttacgagatagtgaacgaagcaggaatcaatcttttcaagttcccagaactcgttgcggagaaaaaaccatcgccagagaggatcttcaggctgatggatctctatgcagcaatctctgaccttagaccagacatagaactgatattccactttgactcagtagctgctgttaaaactctggtcctctcatcgctgaagaaactcaaggactcaatctacacaagtctcatggaatttgagtcaacaatacaaaaggattcttctaaagcactaactgcaggaggagggattcacaagctgactagatcaaccatgagtttcatatcatctctttctgaatacagccgtgtgttatcagagattcttgcagagcatccacttaagaaaaacacacgtatgctagaatcttatttcacagctccaatcttagaagatgaacacaacaaccacgcagtctcggtccatctagcttggctcatcttgattttcctatgcaaactagacatcaaagcagagagttacaaggatgtttccctctcttacctcttcctagtgaacaacattcagtttgtggttgataccgttcgttcaacacacctcaggaacctcctcggagacgactggctcacaaagcacgaagcaaaactcagaagctacgctgcaaactatgagatcgcagcgtgggccaatgtatacatatctttaccagagaaaacaagtagcagactatcaccagaggaagccaaaacacatttcaagaggtttcacgcggtattcgaagaagcttatatgaaacaatcatcatgtgtgataacagatgcaaaacttaggaacgagctaaaagtttccatagcaaagaaaatagtaccggaatacagagagttttacggtaagtacttgccaacgctgagtaaggagagaaacatagagatgctggtgagctttaagcctgataacttggagaactatctctcggatttgttccatggaacaccaatacttagtggctcttcttcttcttcttcctctttgtcttcttcatcttgtatctcacttggatgtgtaagaaactaa

SEQ ID NO: 87010 - protein, 596 aa, Arabidopsis thaliana; identical to SEQ ID NO: 69860
  peptide (1)..(596): Ceres Seq. ID no. 12696262

SEQ ID NO: 87011 - protein, 547 aa, Arabidopsis thaliana
  peptide (1)..(547): Ceres Seq. ID no. 12696263
MHFLISQHSKSAKLVLAQHLMQIAMARLEKEFFQILSSNRDQLDPESVSGHSSISSNSEFEDVMQSSDDEEEDELKKAGETITKVEKAAALVMSDLKVIAETMISCGYGKECIKSYKLIRKSIVDEGLHLLGIEKCKISRFNRMDWDVLEHMIKNWIKAAKIGVITLLRGEKLLCDHVFSASSTIRESCFYEIVNEAGINLFKFPELVAEKKPSPERIFRLMDLYAAISDLRPDIELIFHFDSVAAVKTLVLSSLKKLKDSIYTSLMEFESTIQKDSSKALTAGGGIHKLTRSTMSFISSLSEYSRVLSEILAEHPLKKNTRMLESYFTAPILEDEHNNHAVSVHLAWLILIFLCKLDIKAESYKDVSLSYLFLVNNIQFVVDTVRSTHLRNLLGDDWLTKHEAKLRSYAANYEIAAWANVYISLPEKTSSRLSPEEAKTHFKRFHAVFEEAYMKQSSCVITDAKLRNELKVSIAKKIVPEYREFYGKYLPTLSKERNIEMLVSFKPDNLENYLSDLFHGTPILSGSSSSSSSLSSSSCISLGCVRN

SEQ ID NO: 87012 - protein, 527 aa, Arabidopsis thaliana
  peptide (1)..(527): Ceres Seq. ID no. 12696264
MQIAMARLEKEFFQILSSNRDQLDPESVSGHSSISSNSEFEDVMQSSDDEEEDELKKAGETITKVEKAAALVMSDLKVIAETMISCGYGKECIKSYKLIRKSIVDEGLHLLGIEKCKISRFNRMDWDVLEHMIKNWIKAAKIGVITLLRGEKLLCDHVFSASSTIRESCFYEIVNEAGINLFKFPELVAEKKPSPERIFRLMDLYAAISDLRPDIELIFHFDSVAAVKTLVLSSLKKLKDSIYTSLMEFESTIQKDSSKALTAGGGIHKLTRSTMSFISSLSEYSRVLSEILAEHPLKKNTRMLESYFTAPILEDEHNNHAVSVHLAWLILIFLCKLDIKAESYKDVSLSYLFLVNNIQFVVDTVRSTHLRNLLGDDWLTKHEAKLRSYAANYEIAAWANVYISLPEKTSSRLSPEEAKTHFKRFHAVFEEAYMKQSSCVITDAKLRNELKVSIAKKIVPEYREFYGKYLPTLSKERNIEMLVSFKPDNLENYLSDLFHGTPILSGSSSSSSSLSSSSCISLGCVRN

SEQ ID NO: 87013 - DNA, 2874 bp, Arabidopsis thaliana
  misc_feature (1)..(2874): Ceres Seq. ID no. 12696288
  misc_feature (1)..(2874): Ortholog of  Ceres SEQ ID NO 13660894 as cited in SEQ ID NO 67475
atgccaattaactacactaacctcctccttatgctccgggaatgtaagaacttccggtgtcttcttcaagttcacggcagcttgatagtctcaggtcttaaacctcataaccagctcataaacgcttattctctctttcaaagacaggacctttctcgcgtcatctttgattcagttcgagatccaggtgttgtcttgtggaattcaatgatcagaggatacacgagagccggtttgcacagagaagctctcggattcttcgggtatatgtcggaggagaaaggtattgatccagacaagtacagtttcacttttgctttgaaggcttgtgccggatctatggactttaagaagggtttacggatacatgatttgattgctgagatgggtcttgagtctgatgtttatataggaactgcgttagttgaaatgtattgtaaagctcgtgacttggtttctgcaagacaagtgttcgataaaatgcatgtgaaggatgttgttacttggaacactatggtttccgggttggctcaaaatggatgttctagtgcagctttgctgttgtttcatgatatgcgttcgtgttgtgttgacattgatcatgttagtttatataatctgatccctgcggtttcgaagctagagaagagtgatgtctgtagatgtcttcacggacttgtgattaagaaaggttttatctttgctttctctagtgggctgattgacatgtattgcaactgcgcggatttatatgctgctgaatctgtttttgaagaagtgtggaggaaggatgagtcttcatggggtacaatgatggcagcttatgcacataatgggttctttgaggaggtattggagttgtttgaccttatgagaaactatgatgttagaatgaataaggtagctgcagcaagtgctcttcaagctgctgcatatgtaggggatttagtgaaggggattgcaattcatgattacgcagtgcaacaaggattgatcggtgatgtctcagttgctacttctcttatgagtatgtattccaaatgtggtgagttggagatagccgaacaactgttcattaatattgaagatagagatgttgtttcttggtctgccatgattgcgtcgtatgagcaagcagggcaacacgatgaggctatctctttgtttagagatatgatgagaatacatatcaagcctaatgctgtaactttgactagtgtgctacaagggtgtgcaggagtagccgcctctagattgggtaagagcatacattgttatgctataaaggctgatattgagtctgagttggaaactgccacagctgttatttcaatgtacgctaaatgtggtcgattttctcccgcgctcaaagcctttgaaagactgccaattaaagatgctgtggcattcaacgctctagcgcaagggtatactcagattggtgatgccaataaagcatttgatgtgtacaagaacatgaagttacatggtgtatgcccagactcaagaactatggttggtatgcttcaaacttgtgccttctgtagtgactatgctcgaggttcttgtgtttatggacaaattataaagcatgggttcgattcagaatgtcacgtggcacatgctcttatcaatatgttcaccaaatgtgatgccctcgctgcagcgatagttttgtttgacaagtgtggattcgagaaaagtactgtatcttggaatataatgatgaacgggtacttactccatggccaggctgaagaagctgttgccacttttcgtcagatgaaggttgagaaatttcagccaaatgcagtcacttttgttaacatagtacgcgcagcagcagaattatcagccttgagagtaggaatgtcggttcattccagtctcattcagtgtggattttgttcccaaacaccagtaggaaacagccttgttgacatgtatgcgaaatgtggaatgatagaatcttccgagaaatgctttattgagataagcaacaaatacatagtttcatggaacactatgctatccgcttacgcagcccacggtctagcaagctgtgcggtctcacttttcttgtccatgcaagaaaacgaactcaaaccagactctgtttcctttctcagtgttctttcagcttgtagacacgcagggttagtcgaagaaggaaaacgaattttcgaggaaatgggagagagacacaagatcgaagcagaagttgaacattacgcgtgtatggtagatctattagggaaggctggtttgtttggtgaagctgtggaaatgatgagaagaatgagagtgaaaacaagtgtaggagtatggggagctttattaaattcttcaagaatgcattgtaatttgtggttaagcaatgctgcattgtgtcagcttgttaaacttgagccactaaatccttctcattatagtcaagatcggagattaggagagttgaaattgaaatcggcagaggcgataatggtgagggctagcgtcttaaacgattgtctcaagagcatgagtaatgcagagaaacaagggaaacgccaagtcatgataagaccatcttccaaagtgatcattaagtttctcactgtgatgcaaaagcatggttacattgcagagtttgaatatgtggatgatcacagatccgggaagattgtggttgagcttaatggaaggcttaacaactgcggtgttattagtcctcgatatgaccttggcgtcaaggaaattgaaggttggactgctaaattgctcccttcaagacagtttgggtacattgtcctgacaacatcagctggaatcatggaccatgaagaggctaggaagaaaaatgttgggggcaaagtgcttggttttttctactag

SEQ ID NO: 87014 - protein, 957 aa, Arabidopsis thaliana
  peptide (1)..(957): Ceres Seq. ID no. 12696289
MPINYTNLLLMLRECKNFRCLLQVHGSLIVSGLKPHNQLINAYSLFQRQDLSRVIFDSVRDPGVVLWNSMIRGYTRAGLHREALGFFGYMSEEKGIDPDKYSFTFALKACAGSMDFKKGLRIHDLIAEMGLESDVYIGTALVEMYCKARDLVSARQVFDKMHVKDVVTWNTMVSGLAQNGCSSAALLLFHDMRSCCVDIDHVSLYNLIPAVSKLEKSDVCRCLHGLVIKKGFIFAFSSGLIDMYCNCADLYAAESVFEEVWRKDESSWGTMMAAYAHNGFFEEVLELFDLMRNYDVRMNKVAAASALQAAAYVGDLVKGIAIHDYAVQQGLIGDVSVATSLMSMYSKCGELEIAEQLFINIEDRDVVSWSAMIASYEQAGQHDEAISLFRDMMRIHIKPNAVTLTSVLQGCAGVAASRLGKSIHCYAIKADIESELETATAVISMYAKCGRFSPALKAFERLPIKDAVAFNALAQGYTQIGDANKAFDVYKNMKLHGVCPDSRTMVGMLQTCAFCSDYARGSCVYGQIIKHGFDSECHVAHALINMFTKCDALAAAIVLFDKCGFEKSTVSWNIMMNGYLLHGQAEEAVATFRQMKVEKFQPNAVTFVNIVRAAAELSALRVGMSVHSSLIQCGFCSQTPVGNSLVDMYAKCGMIESSEKCFIEISNKYIVSWNTMLSAYAAHGLASCAVSLFLSMQENELKPDSVSFLSVLSACRHAGLVEEGKRIFEEMGERHKIEAEVEHYACMVDLLGKAGLFGEAVEMMRRMRVKTSVGVWGALLNSSRMHCNLWLSNAALCQLVKLEPLNPSHYSQDRRLGELKLKSAEAIMVRASVLNDCLKSMSNAEKQGKRQVMIRPSSKVIIKFLTVMQKHGYIAEFEYVDDHRSGKIVVELNGRLNNCGVISPRYDLGVKEIEGWTAKLLPSRQFGYIVLTTSAGIMDHEEARKKNVGGKVLGFFY

SEQ ID NO: 87015 - protein, 947 aa, Arabidopsis thaliana
  peptide (1)..(947): Ceres Seq. ID no. 12696290
MLRECKNFRCLLQVHGSLIVSGLKPHNQLINAYSLFQRQDLSRVIFDSVRDPGVVLWNSMIRGYTRAGLHREALGFFGYMSEEKGIDPDKYSFTFALKACAGSMDFKKGLRIHDLIAEMGLESDVYIGTALVEMYCKARDLVSARQVFDKMHVKDVVTWNTMVSGLAQNGCSSAALLLFHDMRSCCVDIDHVSLYNLIPAVSKLEKSDVCRCLHGLVIKKGFIFAFSSGLIDMYCNCADLYAAESVFEEVWRKDESSWGTMMAAYAHNGFFEEVLELFDLMRNYDVRMNKVAAASALQAAAYVGDLVKGIAIHDYAVQQGLIGDVSVATSLMSMYSKCGELEIAEQLFINIEDRDVVSWSAMIASYEQAGQHDEAISLFRDMMRIHIKPNAVTLTSVLQGCAGVAASRLGKSIHCYAIKADIESELETATAVISMYAKCGRFSPALKAFERLPIKDAVAFNALAQGYTQIGDANKAFDVYKNMKLHGVCPDSRTMVGMLQTCAFCSDYARGSCVYGQIIKHGFDSECHVAHALINMFTKCDALAAAIVLFDKCGFEKSTVSWNIMMNGYLLHGQAEEAVATFRQMKVEKFQPNAVTFVNIVRAAAELSALRVGMSVHSSLIQCGFCSQTPVGNSLVDMYAKCGMIESSEKCFIEISNKYIVSWNTMLSAYAAHGLASCAVSLFLSMQENELKPDSVSFLSVLSACRHAGLVEEGKRIFEEMGERHKIEAEVEHYACMVDLLGKAGLFGEAVEMMRRMRVKTSVGVWGALLNSSRMHCNLWLSNAALCQLVKLEPLNPSHYSQDRRLGELKLKSAEAIMVRASVLNDCLKSMSNAEKQGKRQVMIRPSSKVIIKFLTVMQKHGYIAEFEYVDDHRSGKIVVELNGRLNNCGVISPRYDLGVKEIEGWTAKLLPSRQFGYIVLTTSAGIMDHEEARKKNVGGKVLGFFY

SEQ ID NO: 87016 - protein, 888 aa, Arabidopsis thaliana
  peptide (1)..(888): Ceres Seq. ID no. 12696291
MIRGYTRAGLHREALGFFGYMSEEKGIDPDKYSFTFALKACAGSMDFKKGLRIHDLIAEMGLESDVYIGTALVEMYCKARDLVSARQVFDKMHVKDVVTWNTMVSGLAQNGCSSAALLLFHDMRSCCVDIDHVSLYNLIPAVSKLEKSDVCRCLHGLVIKKGFIFAFSSGLIDMYCNCADLYAAESVFEEVWRKDESSWGTMMAAYAHNGFFEEVLELFDLMRNYDVRMNKVAAASALQAAAYVGDLVKGIAIHDYAVQQGLIGDVSVATSLMSMYSKCGELEIAEQLFINIEDRDVVSWSAMIASYEQAGQHDEAISLFRDMMRIHIKPNAVTLTSVLQGCAGVAASRLGKSIHCYAIKADIESELETATAVISMYAKCGRFSPALKAFERLPIKDAVAFNALAQGYTQIGDANKAFDVYKNMKLHGVCPDSRTMVGMLQTCAFCSDYARGSCVYGQIIKHGFDSECHVAHALINMFTKCDALAAAIVLFDKCGFEKSTVSWNIMMNGYLLHGQAEEAVATFRQMKVEKFQPNAVTFVNIVRAAAELSALRVGMSVHSSLIQCGFCSQTPVGNSLVDMYAKCGMIESSEKCFIEISNKYIVSWNTMLSAYAAHGLASCAVSLFLSMQENELKPDSVSFLSVLSACRHAGLVEEGKRIFEEMGERHKIEAEVEHYACMVDLLGKAGLFGEAVEMMRRMRVKTSVGVWGALLNSSRMHCNLWLSNAALCQLVKLEPLNPSHYSQDRRLGELKLKSAEAIMVRASVLNDCLKSMSNAEKQGKRQVMIRPSSKVIIKFLTVMQKHGYIAEFEYVDDHRSGKIVVELNGRLNNCGVISPRYDLGVKEIEGWTAKLLPSRQFGYIVLTTSAGIMDHEEARKKNVGGKVLGFFY

SEQ ID NO: 87017 - DNA, 1533 bp, Arabidopsis thaliana
  misc_feature (1)..(1533): Ceres Seq. ID no. 12696296
  misc_feature (1)..(1533): Ortholog of  Ceres SEQ ID NO 12607856 as cited in SEQ ID NO 55419
atgaaatgtcatcgaatggacccgtttccttcttcttatgtttctctgaaactcatgaaatttgaggaactactcatggaagattcatcacagctacatagtaacaagagacatgacttagaggaaggagtgatgcatcttaaagagagactagaggaagaagaagcagtgactagaactttacgagttgcttttgatggctctattgtttctctcccaagtctctcctcattgtttcttccacctcaggcaataccaataaacataacctcacataatatgaccgagcagaagaggacattggcaagacagagccatgtgagacagagtactctgccactaagacatgatcttcatcaacgatctttgtctcattgttaccaacgttctacactagacactgcctcaactactcattcaagactctcattctcttacgctcctgatttcttggatgccacttcttcaggtggcttcacagacgaatttgatggagtcacgaggatgcagatgggtagagtaagaaaagggcttcgacttgttgaagcaaagaccaaagacgacccaaacgaagtatcagaacaactcatcaactgtcttataggcatttacttggaactcaatcatgtttcatcaaagaccaaaggggatgtctcgctctcaagaaggccatcttcttgtagccggaaatcaaacacatatagttattatcaaaatgcaatgaatcttgatccttatcacgtattgccagactcgagcggaggagtcaccagagacattggcccttacaagaacttcatccacatttcaagaagttccatcgatgtgacacatttcacccattattgttcaccggctgttccacgcttgagcgttttgatggagaaattatcggaggtagatttgagttttttgacctacaagcaaaaactagccttctggatcaatatctacaacgcatgtatcatgcatgcatttcttgagtatgggttaccatcgtcacacaatagactacttaccttgatgaacaaggcttcactcaacgtaggtggcatagtcctcaacgctttggcgattgaacatttcgtcttgcggcatccttgtgaaccagaagatgactcgcttgacgagaaagaaacgctccttcgtcacacttacggtttaggatattcagagcccaatgtgacatttgcactttgccgtggaagttggtcttcaccagcactaagagtctatacagcagatgaagtggtgaatgatttaggaagagcaagagtggaatatctagaagcttctgtgggtgtttcaagcaagaaaaagattgtggttccacagcttctgcaatggcacatgaaagattttgcagatgatattgaatctcttttggaatggatctatagccagttgcctcgatcagggaacctaaagggcatgattatggaatgtctaaagagaaaagcaaaagttcctttagctaaaattgtagagattcaaacatatggacacgaatttcgttacttgttgtcattgtaa

SEQ ID NO: 87018 - protein, 510 aa, Arabidopsis thaliana
  peptide (1)..(510): Ceres Seq. ID no. 12696297
MKCHRMDPFPSSYVSLKLMKFEELLMEDSSQLHSNKRHDLEEGVMHLKERLEEEEAVTRTLRVAFDGSIVSLPSLSSLFLPPQAIPINITSHNMTEQKRTLARQSHVRQSTLPLRHDLHQRSLSHCYQRSTLDTASTTHSRLSFSYAPDFLDATSSGGFTDEFDGVTRMQMGRVRKGLRLVEAKTKDDPNEVSEQLINCLIGIYLELNHVSSKTKGDVSLSRRPSSCSRKSNTYSYYQNAMNLDPYHVLPDSSGGVTRDIGPYKNFIHISRSSIDVTHFTHYCSPAVPRLSVLMEKLSEVDLSFLTYKQKLAFWINIYNACIMHAFLEYGLPSSHNRLLTLMNKASLNVGGIVLNALAIEHFVLRHPCEPEDDSLDEKETLLRHTYGLGYSEPNVTFALCRGSWSSPALRVYTADEVVNDLGRARVEYLEASVGVSSKKKIVVPQLLQWHMKDFADDIESLLEWIYSQLPRSGNLKGMIMECLKRKAKVPLAKIVEIQTYGHEFRYLLSL

SEQ ID NO: 87019 - protein, 505 aa, Arabidopsis thaliana
  peptide (1)..(505): Ceres Seq. ID no. 12696298
MDPFPSSYVSLKLMKFEELLMEDSSQLHSNKRHDLEEGVMHLKERLEEEEAVTRTLRVAFDGSIVSLPSLSSLFLPPQAIPINITSHNMTEQKRTLARQSHVRQSTLPLRHDLHQRSLSHCYQRSTLDTASTTHSRLSFSYAPDFLDATSSGGFTDEFDGVTRMQMGRVRKGLRLVEAKTKDDPNEVSEQLINCLIGIYLELNHVSSKTKGDVSLSRRPSSCSRKSNTYSYYQNAMNLDPYHVLPDSSGGVTRDIGPYKNFIHISRSSIDVTHFTHYCSPAVPRLSVLMEKLSEVDLSFLTYKQKLAFWINIYNACIMHAFLEYGLPSSHNRLLTLMNKASLNVGGIVLNALAIEHFVLRHPCEPEDDSLDEKETLLRHTYGLGYSEPNVTFALCRGSWSSPALRVYTADEVVNDLGRARVEYLEASVGVSSKKKIVVPQLLQWHMKDFADDIESLLEWIYSQLPRSGNLKGMIMECLKRKAKVPLAKIVEIQTYGHEFRYLLSL

SEQ ID NO: 87020 - protein, 492 aa, Arabidopsis thaliana
  peptide (1)..(492): Ceres Seq. ID no. 12696299
MKFEELLMEDSSQLHSNKRHDLEEGVMHLKERLEEEEAVTRTLRVAFDGSIVSLPSLSSLFLPPQAIPINITSHNMTEQKRTLARQSHVRQSTLPLRHDLHQRSLSHCYQRSTLDTASTTHSRLSFSYAPDFLDATSSGGFTDEFDGVTRMQMGRVRKGLRLVEAKTKDDPNEVSEQLINCLIGIYLELNHVSSKTKGDVSLSRRPSSCSRKSNTYSYYQNAMNLDPYHVLPDSSGGVTRDIGPYKNFIHISRSSIDVTHFTHYCSPAVPRLSVLMEKLSEVDLSFLTYKQKLAFWINIYNACIMHAFLEYGLPSSHNRLLTLMNKASLNVGGIVLNALAIEHFVLRHPCEPEDDSLDEKETLLRHTYGLGYSEPNVTFALCRGSWSSPALRVYTADEVVNDLGRARVEYLEASVGVSSKKKIVVPQLLQWHMKDFADDIESLLEWIYSQLPRSGNLKGMIMECLKRKAKVPLAKIVEIQTYGHEFRYLLSL

SEQ ID NO: 87021 - DNA, 924 bp, Arabidopsis thaliana
  misc_feature (1)..(924): Ceres Seq. ID no. 12696315
  misc_feature (1)..(924): Ortholog of  Ceres SEQ ID NO 14316300 as cited in SEQ ID NO 59995
  misc_feature (1)..(924): Ortholog of  Ceres SEQ ID NO 13662758 as cited in SEQ ID NO 64912
  misc_feature (1)..(924): Ortholog of  Ceres SEQ ID NO 13595881 as cited in SEQ ID NO 67709
  misc_feature (1)..(924): Ortholog of  Ceres SEQ ID NO 12614145 as cited in SEQ ID NO 67937
actcacagaagaagagagaatcaatcaaatcaaatcaccatggctttagcttggtgcgttgtacgcaggtcagcatctaagtttgcttccgtttatggtggccgagtccgatctatctccgccgttgcgaaccgcgcctctctagctcgcaacccatcttcaattcgtccattcgtctctcgcgccttaaattactcgacggctattgatcgaattagctccgagcaaacgcttatccgagttattgactccgaaatcaactctgctttgcaatccgataatatcgattcggatgaagagatgactccaggaagctttccttttagaattgaagacaaacctggaaatcagaatgttacattgactagagactacaatggggaacatattaaagttgttgtaagcatgcctagtcttgtttcagatgaaaatgatgatgatgatgatgatgatgaaggtcctagtaatgaatcgagtattccactagttgtgactgttactaagaagagtggactcactctagagtttagctgtatggcttttcctgatgagattgctatagatgctttatctgtgaaacatcctggggactctttggaggatcaactggctaatgaagggcctgattttgaagacttggacgagaatctgaagaagacgttctacaagtttttggagatcagaggagtgaaagctagcacgacgaatttcctgcacgagtacatgacgaggaaagtgaaccgagagtactttttatggttgaagaatgttaaggagttcatggaacagtgaaacgttaggttgatagctaagtacctaagaatgagattgtgaggttcttttcttgtgttcattgttagctttcaaatgtagcacaatctttgagaatttatggttaagagtttccagttctgattcaacttg

SEQ ID NO: 87022 - protein, 263 aa, Arabidopsis thaliana; identical to SEQ ID NO: 24864
  peptide (1)..(263): Ceres Seq. ID no. 12696316

SEQ ID NO: 87023 - protein, 250 aa, Arabidopsis thaliana; identical to SEQ ID NO: 24865
  peptide (1)..(250): Ceres Seq. ID no. 12696317

SEQ ID NO: 87024 - protein, 163 aa, Arabidopsis thaliana; identical to SEQ ID NO: 24866
  peptide (1)..(163): Ceres Seq. ID no. 12696318

SEQ ID NO: 87025 - DNA, 1464 bp, Arabidopsis thaliana
  misc_feature (1)..(1464): Ceres Seq. ID no. 12696422
  misc_feature (1)..(1464): Ortholog of  Ceres SEQ ID NO 14302935 as cited in SEQ ID NO 20442
atggctgcgaagaaggtttttggatcggcggaagcgagtaatttggtgacggagcttcgtcggagttttgatgatggtgtgacacgtggttatgaatggagagtgactcagcttaagaaactgatgattatttgtgataatcatgagcctgagatcgtcgcggctcttcgcgatgatcttggtaagcctgagcttgaatcttctgtttatgagagagtactagtatctctactgagaaactctatcaagttggctcttaagcagctaaagaactggatggctccggagaaggcaaagacttctctaacaacgtttcctgcatccgcggagattgtgtctgagcctcttggtgttgtgctagtgatctcggcttggaactatccttttctgttgtctattgatcctgttattggtgcaatttctgctgggaatgctgttgttttaaagccatcagaattggctccagcttcgtcagctctgctcactaagttactggaacagtatcttgatccttctgcggtgcgagttgtcgaaggagctgttaccgaaacaagtgctctgctagagcagaagtgggacaagatattctacacaggtagttcaaaaatcggacgtgtcataatggcggcagctgcgaagcatctcacaccggttgttctagagcttggaggaaaatctcctgtcgttgtagactcggataccgatttgaaagttaccgtcaggcggataatcgtaggcaaatggggttgtaacaacggacaggcgtgcgtttcgccggactatatcttgacgacaaaagaatatgctcctaaattgattgatgccatgaagcttgaattggagaaattttatgggaagaaccctatagagtcgaaagatatgtcacgtatcgtaaactcgaatcactttgatcgcttgtctaagttgttagacgagaaggaagtttctgacaaaattgtctatggtggtgaaaaggacagagaaaacttgaaaattgctccgacaatcttgctcgatgtaccattagattctctgatcatgagtgaagaaatatttggccctctccttccaatcctcacgcttaacaacttggaagagagctttgacgtgattcgttctcgacctaagccacttgcggcatacttgtttacacataacaagaagttgaaagagagattcgcagcgacagtctccgctggaggcatagtagtcaatgacatagctgttcatcttgcacttcacacattgccattcggaggagttggtgaaagtggaatgggtgcttaccatggtaaattctcatttgatgcttttagtcacaagaaggcggttctctacagaagccttttcggtgattcagccgtcaggtatccgccatactcgagaggaaagcttagattgttaaaagcccttgtcgacagcaatatattcgatttattcaaagtccttctcggtttagcttaa

SEQ ID NO: 87026 - protein, 487 aa, Arabidopsis thaliana
  peptide (1)..(487): Ceres Seq. ID no. 12696423
MAAKKVFGSAEASNLVTELRRSFDDGVTRGYEWRVTQLKKLMIICDNHEPEIVAALRDDLGKPELESSVYERVLVSLLRNSIKLALKQLKNWMAPEKAKTSLTTFPASAEIVSEPLGVVLVISAWNYPFLLSIDPVIGAISAGNAVVLKPSELAPASSALLTKLLEQYLDPSAVRVVEGAVTETSALLEQKWDKIFYTGSSKIGRVIMAAAAKHLTPVVLELGGKSPVVVDSDTDLKVTVRRIIVGKWGCNNGQACVSPDYILTTKEYAPKLIDAMKLELEKFYGKNPIESKDMSRIVNSNHFDRLSKLLDEKEVSDKIVYGGEKDRENLKIAPTILLDVPLDSLIMSEEIFGPLLPILTLNNLEESFDVIRSRPKPLAAYLFTHNKKLKERFAATVSAGGIVVNDIAVHLALHTLPFGGVGESGMGAYHGKFSFDAFSHKKAVLYRSLFGDSAVRYPPYSRGKLRLLKALVDSNIFDLFKVLLGLA

SEQ ID NO: 87027 - protein, 446 aa, Arabidopsis thaliana
  peptide (1)..(446): Ceres Seq. ID no. 12696424
MIICDNHEPEIVAALRDDLGKPELESSVYERVLVSLLRNSIKLALKQLKNWMAPEKAKTSLTTFPASAEIVSEPLGVVLVISAWNYPFLLSIDPVIGAISAGNAVVLKPSELAPASSALLTKLLEQYLDPSAVRVVEGAVTETSALLEQKWDKIFYTGSSKIGRVIMAAAAKHLTPVVLELGGKSPVVVDSDTDLKVTVRRIIVGKWGCNNGQACVSPDYILTTKEYAPKLIDAMKLELEKFYGKNPIESKDMSRIVNSNHFDRLSKLLDEKEVSDKIVYGGEKDRENLKIAPTILLDVPLDSLIMSEEIFGPLLPILTLNNLEESFDVIRSRPKPLAAYLFTHNKKLKERFAATVSAGGIVVNDIAVHLALHTLPFGGVGESGMGAYHGKFSFDAFSHKKAVLYRSLFGDSAVRYPPYSRGKLRLLKALVDSNIFDLFKVLLGLA

SEQ ID NO: 87028 - protein, 395 aa, Arabidopsis thaliana; identical to SEQ ID NO: 74729
  peptide (1)..(395): Ceres Seq. ID no. 12696425

SEQ ID NO: 87029 - DNA, 1863 bp, Arabidopsis thaliana
  misc_feature (1)..(1863): Ceres Seq. ID no. 12696488
  misc_feature (1)..(1863): Ortholog of  Ceres SEQ ID NO 14310369 as cited in SEQ ID NO 54765
  misc_feature (1)..(1863): Ortholog of  Ceres SEQ ID NO 13596474 as cited in SEQ ID NO 62169
  misc_feature (1)..(1863): Ortholog of  Ceres SEQ ID NO 13598714 as cited in SEQ ID NO 62656
  misc_feature (1)..(1863): Ortholog of  Ceres SEQ ID NO 13596969 as cited in SEQ ID NO 63375
  misc_feature (1)..(1863): Ortholog of  Ceres SEQ ID NO 13584480 as cited in SEQ ID NO 64751
  misc_feature (1)..(1863): Ortholog of  Ceres SEQ ID NO 13597519 as cited in SEQ ID NO 64759
  misc_feature (1)..(1863): Ortholog of  Ceres SEQ ID NO 13587054 as cited in SEQ ID NO 0
atgaagaaatggttagcaatcgcagcgacggtggcgataattgcaataatcgttagacaaggcacgacacaatacggatggaacaaagaggcggcgttggaaaagctaaaggaatggtcagatcggctggggatttgggcgattccaacgtatgtagcggttcacacaataaccttagctctttgtctccctcacgccgtcttctttgaagctggtgcttctatgctctttggtttccttcctgctcttctctgtgttttctctgctaaagttctcgccgcttctttctccttctggatcggcaggtttgtttttaagagttccaccagagctacagggtgggcgcatagcaacaagtacttcaatattctctcaagaggagttgagcgcgatggttggaagtttgttcttcttgcaaggttctcgcccattccttcctatgtcataaactacgctttggcagctactgaagtccggtttgtagctgattttctgttccccacggttattggctgcctcccgatgatcctgcagaacgcatcagtcggtagcctcgctggtatggctgtggcttcagtagctggaaaacagaaaagtcaggtctggggttatgttttcccagtacttgggatactgtcaagtgttctgatttcattgaggatcaaaaagtactcagctggaattacagaggcatcatcagatacctctgctaacaactctagtttagcttcatctgaaactgcgaatcccgcttatggaaccgatggatccaagaaaagtgagcacatggattcgttcttggagttggtacaaggacttctaaaagacaacaatgagcttattcctactcttgtgctctttgttttgttctcttttgatgttagtgttgctcatccaggtctaggatttggatggggaagtaatagtcccattggaggatctttttactcaaatctttacccacaattttaccagttctcttgtccacaagctgatgagattgttatgacggtgctcgaaaaagccatagctaaagaaccaagaatggcagcatctttactcagacttcacttccacgactgcttcgttcagggctgtgatgcatcaatcttgttggatgatagtgcaaccataagaagtgaaaagaatgctggaccaaacaagaactccgttagagggtttcaagtaatcgacgagatcaaagccaaacttgagcaagcttgtcctcaaactgtctcctgcgccgacattctagctctagctgctcgtggctcaactatactgagtggtggaccatcatgggagcttccactagggaggagagactcgaggaccgctagccttaatggcgcaaacacgaacattcctgcacctaactcaactattcaaaatctcttaaccatgttccaacgtaaaggtttgaacgaagaagaccttgtttccctatcaggaggacatacgattggagtagcgaggtgcacaacgtttaaacaaagactatacaatcaaaacggtaataaccaaccagacgagacgctagagaggtcttactactatggtctcaggtcaatttgtccaccaacaggcggtgacaacaatatttcacctctagacttagcctctcctgcaagattcgacaacacatacttcaagctccttctatggggcaaaggcttattgacatcagatgaagtgcttctcactggcaatgtaggcaagactggtgcattagtgaaagcttatgccgaagacgagagacttttcttccaacaattcgcaaagtcgatggttaacatgggaaacattcagcctcttactggttttaatggtgagatcaggaagagttgtcatgtgattaactaa

SEQ ID NO: 87030 - protein, 620 aa, Arabidopsis thaliana
  peptide (1)..(620): Ceres Seq. ID no. 12696489
MKKWLAIAATVAIIAIIVRQGTTQYGWNKEAALEKLKEWSDRLGIWAIPTYVAVHTITLALCLPHAVFFEAGASMLFGFLPALLCVFSAKVLAASFSFWIGRFVFKSSTRATGWAHSNKYFNILSRGVERDGWKFVLLARFSPIPSYVINYALAATEVRFVADFLFPTVIGCLPMILQNASVGSLAGMAVASVAGKQKSQVWGYVFPVLGILSSVLISLRIKKYSAGITEASSDTSANNSSLASSETANPAYGTDGSKKSEHMDSFLELVQGLLKDNNELIPTLVLFVLFSFDVSVAHPGLGFGWGSNSPIGGSFYSNLYPQFYQFSCPQADEIVMTVLEKAIAKEPRMAASLLRLHFHDCFVQGCDASILLDDSATIRSEKNAGPNKNSVRGFQVIDEIKAKLEQACPQTVSCADILALAARGSTILSGGPSWELPLGRRDSRTASLNGANTNIPAPNSTIQNLLTMFQRKGLNEEDLVSLSGGHTIGVARCTTFKQRLYNQNGNNQPDETLERSYYYGLRSICPPTGGDNNISPLDLASPARFDNTYFKLLLWGKGLLTSDEVLLTGNVGKTGALVKAYAEDERLFFQQFAKSMVNMGNIQPLTGFNGEIRKSCHVIN

SEQ ID NO: 87031 - protein, 546 aa, Arabidopsis thaliana
  peptide (1)..(546): Ceres Seq. ID no. 12696490
MLFGFLPALLCVFSAKVLAASFSFWIGRFVFKSSTRATGWAHSNKYFNILSRGVERDGWKFVLLARFSPIPSYVINYALAATEVRFVADFLFPTVIGCLPMILQNASVGSLAGMAVASVAGKQKSQVWGYVFPVLGILSSVLISLRIKKYSAGITEASSDTSANNSSLASSETANPAYGTDGSKKSEHMDSFLELVQGLLKDNNELIPTLVLFVLFSFDVSVAHPGLGFGWGSNSPIGGSFYSNLYPQFYQFSCPQADEIVMTVLEKAIAKEPRMAASLLRLHFHDCFVQGCDASILLDDSATIRSEKNAGPNKNSVRGFQVIDEIKAKLEQACPQTVSCADILALAARGSTILSGGPSWELPLGRRDSRTASLNGANTNIPAPNSTIQNLLTMFQRKGLNEEDLVSLSGGHTIGVARCTTFKQRLYNQNGNNQPDETLERSYYYGLRSICPPTGGDNNISPLDLASPARFDNTYFKLLLWGKGLLTSDEVLLTGNVGKTGALVKAYAEDERLFFQQFAKSMVNMGNIQPLTGFNGEIRKSCHVIN

SEQ ID NO: 87032 - protein, 446 aa, Arabidopsis thaliana
  peptide (1)..(446): Ceres Seq. ID no. 12696491
MILQNASVGSLAGMAVASVAGKQKSQVWGYVFPVLGILSSVLISLRIKKYSAGITEASSDTSANNSSLASSETANPAYGTDGSKKSEHMDSFLELVQGLLKDNNELIPTLVLFVLFSFDVSVAHPGLGFGWGSNSPIGGSFYSNLYPQFYQFSCPQADEIVMTVLEKAIAKEPRMAASLLRLHFHDCFVQGCDASILLDDSATIRSEKNAGPNKNSVRGFQVIDEIKAKLEQACPQTVSCADILALAARGSTILSGGPSWELPLGRRDSRTASLNGANTNIPAPNSTIQNLLTMFQRKGLNEEDLVSLSGGHTIGVARCTTFKQRLYNQNGNNQPDETLERSYYYGLRSICPPTGGDNNISPLDLASPARFDNTYFKLLLWGKGLLTSDEVLLTGNVGKTGALVKAYAEDERLFFQQFAKSMVNMGNIQPLTGFNGEIRKSCHVIN

SEQ ID NO: 87033 - DNA, 1254 bp, Arabidopsis thaliana
  misc_feature (1)..(1254): Ceres Seq. ID no. 12696492
  misc_feature (1)..(1254): Ortholog of  Ceres SEQ ID NO 13595870 as cited in SEQ ID NO 62101
  misc_feature (1)..(1254): Ortholog of  Ceres SEQ ID NO 13590241 as cited in SEQ ID NO 63878
  misc_feature (1)..(1254): Ortholog of  Ceres SEQ ID NO 13657939 as cited in SEQ ID NO 66349
  misc_feature (1)..(1254): Ortholog of  Ceres SEQ ID NO 13660597 as cited in SEQ ID NO 67655
atgagcgacggagacgacgctgctagacgccgtaccgcggcggtgactgattaccggaagaagctccttcatcacaaggagctcgaatcccgtgtccgaacagctagggagaatttaagagcagctaagaaggaattcaacaaaactgaggatgatttgaagtctcttcaaagcgttggccagattattggagaagtactacgtcctcttgataacgagcgattgattgttaaggcaagtagtggccctcgttatgtggtgggttgtcgtagcaaggtggacaaggaaaagcttacttctggaactcgagttgtcctggatatgactacgctgacaattatgcgagcccttcctcgtgaagttgatcctgttgtttataacatgttgcatgaagatccaggcaacattagttactcagctgtgggtggtttaggtgatcagatcagagaacttagggaatctattgagctgcctctcatgaatcctgaacttttccttagagttgggattaaacctcctaagggtgtccttctgtatggacctccgggtactggaaaaactctactagctagggctattgccagcaatatcgacgccaacttcttgaaggttgtatctagtgcaatcatagacaaatacattggagaaagtgctaggttgattcgagaaatgtttaactatgctcgtgaacatcagccttgtatcattttcatggatgaaatcgatgctattggtggacgccgttttagtgaaggaactagtgctgatcgtgaaattcaaagaacacttatggagttacttaaccagcttgatgggtttgaccaacttggaaaggtgaaaatgataatggccaccaacaggccggatgttcttgatccagcacttctccgtccgggtaggttagatagaaagatcgagatcccgttgccaaatgaacaatcaagaatggaaatcctcaagatccacgcatctggcattgccaagcatggagaaatagactatgaggctatcgtgaaacttggagagggtttcaatggtgccgatctgcgtaacatatgcactgaagctggaatgttcgcaatcagagcagagcgtgactatgtaatacatgaagacttcatgaaggctgtgagaaagctgagcgaggccaagaagcttgagtcgagctctcactataacgcggattttgggaaagagtaagaaaagaataagctcagagaagaagagagggcctaaagggcagtgaaaaactct

SEQ ID NO: 87034 - protein, 399 aa, Arabidopsis thaliana; identical to SEQ ID NO: 23999
  peptide (1)..(399): Ceres Seq. ID no. 12696493

SEQ ID NO: 87035 - protein, 292 aa, Arabidopsis thaliana; identical to SEQ ID NO: 24000
  peptide (1)..(292): Ceres Seq. ID no. 12696494

SEQ ID NO: 87036 - protein, 286 aa, Arabidopsis thaliana; identical to SEQ ID NO: 24001
  peptide (1)..(286): Ceres Seq. ID no. 12696495

SEQ ID NO: 87037 - DNA, 725 bp, Arabidopsis thaliana
  misc_feature (1)..(725): Ceres Seq. ID no. 12696498
  misc_feature (1)..(725): Ortholog of  Ceres SEQ ID NO 12780822 as cited in SEQ ID NO 67471
atggaggaagaacaagtaagagcaattaagataatagtatttggagtcatctcatggggtgtggccttcattctcacccggagaatcttctcaagctactcattcagcttcagcaaccgtcttctctccacggctcacgcgactatcgctgtcactttagcaacactctctgttcaagatttgtcttgccctgtttgtccccttgcttctaagccatctcataaacagatggacgtgatggcgttttcgttgtcgtacatgatctacgatctaatatgttgtcatttcgatcaagtgtttagcattgataacgcggttcatcatttcgttagcattcttggttttatagctggacttgcataccaaaagtctggatctgagatcgtggctacactgtgggtagcagagatatcaagtccttttttccaccttagggagattctcaaagagattggatacaaagacaccaaactcaatctagctgccgatgtgtgttttgccactatattcacattggcgagaattgtgtgtggacctttcctcgtttacgtcagtctatcagctgataatcccatcttcatcaaggcaatgggatcaggattacaactcgtgagcatcttttggttctataaaattttcgggatgatgagatataaactttttaagaagccaaagtcaaacaaaaagtctacttagcttagttagagatatacaaaagctgattc

SEQ ID NO: 87038 - protein, 231 aa, Arabidopsis thaliana; identical to SEQ ID NO: 34728
  peptide (1)..(231): Ceres Seq. ID no. 12696499

SEQ ID NO: 87039 - protein, 155 aa, Arabidopsis thaliana; identical to SEQ ID NO: 34729
  peptide (1)..(155): Ceres Seq. ID no. 12696500

SEQ ID NO: 87040 - protein, 152 aa, Arabidopsis thaliana
  peptide (1)..(152): Ceres Seq. ID no. 12696501
MAFSLSYMIYDLICCHFDQVFSIDNAVHHFVSILGFIAGLAYQKSGSEIVATLWVAEISSPFFHLREILKEIGYKDTKLNLAADVCFATIFTLARIVCGPFLVYVSLSADNPIFIKAMGSGLQLVSIFWFYKIFGMMRYKLFKKPKSNKKST

SEQ ID NO: 87041 - DNA, 955 bp, Arabidopsis thaliana
  misc_feature (1)..(955): Ceres Seq. ID no. 12696530
  misc_feature (1)..(955): Ortholog of  Ceres SEQ ID NO 12618740 as cited in SEQ ID NO 65846
  misc_feature (1)..(955): Ortholog of  Ceres SEQ ID NO 12635446 as cited in SEQ ID NO 0
ttttttttaaagatttagagaaaaaagtgagttattaagagattccaatcaaaatgagcggagacaacggcggtggtgagaggcgcaaaggctccgtcaagtggtttgatacccagaagggtttcggcttcatcactcctgacgacggtggcgacgatctcttcgttcaccagtcctccatcagatctgagggtttccgtagcctcgctgccgaagaagccgtagagttcgaggttgagatcgacaacaacaaccgtcccaaggccatcgatgtttctggacccgacggcgctcccgtccaaggaaacagcggtggtggttcatctggcggacgcggcggtttcggtggaggaagaggaggtggacgcggatctggaggtggatacggcggtggcggtggtggatacggaggaagaggaggtggtggtcgaggaggcagcgactgctacaagtgtggtgagcccggtcacatggcgagagactgttctgaaggcggtggaggttacggaggaggcggcggtggctacggaggtggaggcggatacggcggaggaggtggtggttacggaggtggtggccgtggaggtggtggcggcgggggaagctgctacagctgtggcgagtcgggacatttcgccagggattgcaccagcggtggacgttaaaaccaacgccggttacgcggtggagaagagtgagttggttatctcacaagtgatcggttctttctcccgccgccttctatctctctattatccactttttgcttattatgatggatctctatctttgttagttggttttttcttgatggtttcggattaggactcttcttttggttttgctacttatggttggttttatttatggtacttgtgatatgggtgaaatgctctacttgttgctctgtttcaagtgttcataatatgcgaacaaatattctgggttttgtttc

SEQ ID NO: 87042 - protein, 203 aa, Arabidopsis thaliana; identical to SEQ ID NO: 26302
  peptide (1)..(203): Ceres Seq. ID no. 12696531

SEQ ID NO: 87043 - protein, 184 aa, Arabidopsis thaliana; identical to SEQ ID NO: 26303
  peptide (1)..(184): Ceres Seq. ID no. 12696532

SEQ ID NO: 87044 - DNA, 1579 bp, Arabidopsis thaliana
  misc_feature (1)..(1579): Ceres Seq. ID no. 12696537
  misc_feature (1)..(1579): Ortholog of  Ceres SEQ ID NO 14313288 as cited in SEQ ID NO 67419
aataggttcagtgtttctgacatattgttccctctctgaatgaaactctcccaaatagagaatggcctaaccacctatccaaccgcatcaaggcacttggtttcatccccttgatttctctctttttttcttttcctatcgcaggattttgtgttcttgttttgaatatgaaatgttcgtcgatgtgttgtttgatcctcttggccctttctctcctcaccgccttcactcttgcttcttcgtcaaatggtatagatggacctttctacgactctactgcctacacagagtgtagagccgaagcagagaagccactatacaatggaggaatgctgaaggaccaaaagccttccgtcccaggcaaagactctctcacaggcattggtgctcattacacaccaacttacatattgcacaatctcacacagaacaccatctattgcttctccatatgggtgaagatagaggctggtgctgcatcagctcatgtaagagcaaggctgagagcagacaacgccacattaaactgcgtcggttctgtaactgccaaacatggttgctggtctttcctcaaaggaggattccttcttgattctccttgtaaacaatccatcctcttctttgagacatcagaggacgatggtaagatccaattacaagtgacgagtgcctctcttcagccattcacgcaggagcaatggaggaacaaccaagattacttcataaataccgcgagaaaacgagcagtgacaattcacgtgtcaaaagaaaacggagagagcgttgaaggagcagaggtgacagtagagcagatctctaaagacttctccattggatctgccatctccaaaactatccttggaaacattccttaccaagaatggttcgtcaagagattcgacgccacggtattcgagaacgagctgaaatggtacgcgacggagcccgatcaaggcaaactcaactacacattggctgataagatgatgaatttcgtcagagccaacagaatcatcgctcgcggtcacaacatattctgggaggatcccaaatacaatcccgattgggttcgtaatctaaccggcgaagatctccggtcggcggttaaccggcgaatcaagagtctgatgactcggtacagaggagagttcgtgcattgggacgtgagcaacgagatgcttcactttgacttctacgagactcgactggggaagaacgcgtcgtacggattcttcgccgcggctcgtgagattgactcattggcgactctgttcttcaatgatttcaacgtggtggagacttgcagcgacgagaagtcaacggttgacgaatacatcgcgagggtgagggaactccaacggtacgacggcgtaaggatggacggaataggtctcgagggtcacttcacgacgccaaacgtagcgctgatgagagccatcctcgataaactcgctacgctccagctcccaatctggctcaccgagattgatatcagcagcagcctcgaccaccgctctcaggcgatttatttggagcaagtgttacgtgaaggattctcgcacccatcggtaaacggtat

SEQ ID NO: 87045 - protein, 470 aa, Arabidopsis thaliana
  peptide (1)..(470): Ceres Seq. ID no. 12696538
MKCSSMCCLILLALSLLTAFTLASSSNGIDGPFYDSTAYTECRAEAEKPLYNGGMLKDQKPSVPGKDSLTGIGAHYTPTYILHNLTQNTIYCFSIWVKIEAGAASAHVRARLRADNATLNCVGSVTAKHGCWSFLKGGFLLDSPCKQSILFFETSEDDGKIQLQVTSASLQPFTQEQWRNNQDYFINTARKRAVTIHVSKENGESVEGAEVTVEQISKDFSIGSAISKTILGNIPYQEWFVKRFDATVFENELKWYATEPDQGKLNYTLADKMMNFVRANRIIARGHNIFWEDPKYNPDWVRNLTGEDLRSAVNRRIKSLMTRYRGEFVHWDVSNEMLHFDFYETRLGKNASYGFFAAAREIDSLATLFFNDFNVVETCSDEKSTVDEYIARVRELQRYDGVRMDGIGLEGHFTTPNVALMRAILDKLATLQLPIWLTEIDISSSLDHRSQAIYLEQVLREGFSHPSVNG

SEQ ID NO: 87046 - protein, 465 aa, Arabidopsis thaliana
  peptide (1)..(465): Ceres Seq. ID no. 12696539
MCCLILLALSLLTAFTLASSSNGIDGPFYDSTAYTECRAEAEKPLYNGGMLKDQKPSVPGKDSLTGIGAHYTPTYILHNLTQNTIYCFSIWVKIEAGAASAHVRARLRADNATLNCVGSVTAKHGCWSFLKGGFLLDSPCKQSILFFETSEDDGKIQLQVTSASLQPFTQEQWRNNQDYFINTARKRAVTIHVSKENGESVEGAEVTVEQISKDFSIGSAISKTILGNIPYQEWFVKRFDATVFENELKWYATEPDQGKLNYTLADKMMNFVRANRIIARGHNIFWEDPKYNPDWVRNLTGEDLRSAVNRRIKSLMTRYRGEFVHWDVSNEMLHFDFYETRLGKNASYGFFAAAREIDSLATLFFNDFNVVETCSDEKSTVDEYIARVRELQRYDGVRMDGIGLEGHFTTPNVALMRAILDKLATLQLPIWLTEIDISSSLDHRSQAIYLEQVLREGFSHPSVNG

SEQ ID NO: 87047 - protein, 416 aa, Arabidopsis thaliana
  peptide (1)..(416): Ceres Seq. ID no. 12696540
MLKDQKPSVPGKDSLTGIGAHYTPTYILHNLTQNTIYCFSIWVKIEAGAASAHVRARLRADNATLNCVGSVTAKHGCWSFLKGGFLLDSPCKQSILFFETSEDDGKIQLQVTSASLQPFTQEQWRNNQDYFINTARKRAVTIHVSKENGESVEGAEVTVEQISKDFSIGSAISKTILGNIPYQEWFVKRFDATVFENELKWYATEPDQGKLNYTLADKMMNFVRANRIIARGHNIFWEDPKYNPDWVRNLTGEDLRSAVNRRIKSLMTRYRGEFVHWDVSNEMLHFDFYETRLGKNASYGFFAAAREIDSLATLFFNDFNVVETCSDEKSTVDEYIARVRELQRYDGVRMDGIGLEGHFTTPNVALMRAILDKLATLQLPIWLTEIDISSSLDHRSQAIYLEQVLREGFSHPSVNG

SEQ ID NO: 87048 - DNA, 2684 bp, Arabidopsis thaliana
  misc_feature (1)..(2684): Ceres Seq. ID no. 12696549
  misc_feature (1)..(2684): Ortholog of  Ceres SEQ ID NO 13600595 as cited in SEQ ID NO 629
  misc_feature (1)..(2684): Ortholog of  Ceres SEQ ID NO 13593379 as cited in SEQ ID NO 20573
atgagcaaatcaagtagaattaggatgaagtcgagaacacgatacttgatagcgattctacttgtaatttcgctctgttccaaggcaagcagccatgatgatgagaaaaagaagaaaggagtaacatacgacggttctgagcggaacttcattgatcataaatggaaaaagagagcttcttttctctggttctgttcattaccctcgaagcacacctcacatgtggcccagtatcattgacaaagctagaattgggggacttaacaccatccaaacttatgttttctggaatgtccatgagcctgaacaaggcaagtatgatttcaaggggagatttgacttggtgaaattcatcaaactaatccacgagaaaggtctctatgtcactctcagactcggaccctttatccaagccgaatggaaccacggagggttgccgtactggctacgcgaggtcccagatgtttacttccgtacaaataatgaaccttttaaggaacatacagagagatatgtgaggaaaatacttgggatgatgaaggaagagaagctgttcgcttcacaaggaggtcccatcatcttgggacagatagagaatgagtacaacgcggttcagctagcctacaaggagaatggagagaagtatataaaatgggcagcaaatttggtggagtcaatgaatctgggaatcccctgggttatgtgcaaacaaaacgatgctcctggcaatctgattaatgcttgtaatggaaggcattgcggagatactttcccaggaccaaacagacacgataagccctccttatggaccgagaattggactactcagtttcgagtttttggggatcctccaacacagagaacagtcgaagatattgcattctcagtcgctagatacttctctaagaacggatcccatgtcaactactacatgtaccatggcggaacaaacttcggacgcacgtctgctcatttcgttaccactcgttactatgacgatgcgccacttgacgaatttggtttggagaaagctccaaaatacggtcacctaaaacatgtgcacagagcacttagattgtgcaagaaggcacttttttggggtcaacttcgcgcccagacacttggtcccgataccgaggttaggtactacgagcagccagggacaaaagtgtgtgcggctttcttatcgaacaataacacaagagatactaatacgattaaattcaaaggtcaagattacgttttaccgtctcgttctatcagcatcttaccggattgtaaaacagtcgtttacaatactgcacagattgtagcccaacacagttggagagattttgtcaagtcagagaagacaagcaaaggtctcaaatttgagatgtttagtgaaaatattccttccttacttgacggtgattctttgattccgggggagctttattacttaactaaagacaaaacagattatgcttggtataccacaagcgtaaagattgacgaagatgactttccagaccaaaaaggtctgaagactatactgagagtagcgagtcttggtcacgcactgatcgtttacgttaacggagagtacgcagggaaagcacatggacgccatgaaatgaagagtttcgagtttgcaaaaccagtgaactttaaaaccggagataatcgcatttcaattttgggtgtactaaccggattaccagacagtggatcatacatggaacacaggtttgctggtccacgtgctatttcaatcatcggtttaaagtcaggaacgcgagatttgaccgagaacaatgaatggggacacttggccggtttggaaggtgaaaagaaagaggtgtacacagaggaaggatctaagaaggtgaaatgggagaaagatggtaaacgtaagcctcttacgtggtacaagacctactttgagacaccagagggagtgaacgcggtcgcgattaggatgaaagcaatggggaagggattgatttgggttaatggaattggcgtagggagatattggatgtctttcctttctccactgggagagccaactcaaacggagtaccatataccgagatctttcatgaagggggagaagaagaagaacatgctggtgattctcgaggaagaaccaggggtgaagttagagtctattgatttcgtgttggtgaatagagacacaatctgtagtaatgtcggggaggattacccagtatcggtgaaatcgtggaagagagaagggccaaagatagtttcgagaagcaaagatatgaggctaaaggcagtgatgaggtgtccaccggagaaacaaatggtggaagtacaatttgcaagcttcggagatccgacaggaacttgtggtaacttcacaatggggaagtgctctgcatctaagtcaaaggaggtggtcgagaaggagtgtttgggtaggaattattgttccatagtagtagcgagggagacttttggggacaaagggtgtccggagatagtgaagacattggcagtgcaagtcaagtgtgagaagaaagaaggaaaacaagatgagaagaagaagaaagaagataaagacgaagaggaagaggacgatgaagatgatgatgaagaagaagaagaagaagacaaagagaacaaagatacaaaggatatggagaacaaaaatcaagatatgtaaacaagactac

SEQ ID NO: 87049 - protein, 817 aa, Arabidopsis thaliana
  peptide (1)..(817): Ceres Seq. ID no. 12696550
MWPSIIDKARIGGLNTIQTYVFWNVHEPEQGKYDFKGRFDLVKFIKLIHEKGLYVTLRLGPFIQAEWNHGGLPYWLREVPDVYFRTNNEPFKEHTERYVRKILGMMKEEKLFASQGGPIILGQIENEYNAVQLAYKENGEKYIKWAANLVESMNLGIPWVMCKQNDAPGNLINACNGRHCGDTFPGPNRHDKPSLWTENWTTQFRVFGDPPTQRTVEDIAFSVARYFSKNGSHVNYYMYHGGTNFGRTSAHFVTTRYYDDAPLDEFGLEKAPKYGHLKHVHRALRLCKKALFWGQLRAQTLGPDTEVRYYEQPGTKVCAAFLSNNNTRDTNTIKFKGQDYVLPSRSISILPDCKTVVYNTAQIVAQHSWRDFVKSEKTSKGLKFEMFSENIPSLLDGDSLIPGELYYLTKDKTDYAWYTTSVKIDEDDFPDQKGLKTILRVASLGHALIVYVNGEYAGKAHGRHEMKSFEFAKPVNFKTGDNRISILGVLTGLPDSGSYMEHRFAGPRAISIIGLKSGTRDLTENNEWGHLAGLEGEKKEVYTEEGSKKVKWEKDGKRKPLTWYKTYFETPEGVNAVAIRMKAMGKGLIWVNGIGVGRYWMSFLSPLGEPTQTEYHIPRSFMKGEKKKNMLVILEEEPGVKLESIDFVLVNRDTICSNVGEDYPVSVKSWKREGPKIVSRSKDMRLKAVMRCPPEKQMVEVQFASFGDPTGTCGNFTMGKCSASKSKEVVEKECLGRNYCSIVVARETFGDKGCPEIVKTLAVQVKCEKKEGKQDEKKKKEDKDEEEEDDEDDDEEEEEEDKENKDTKDMENKNQDM

SEQ ID NO: 87050 - protein, 713 aa, Arabidopsis thaliana
  peptide (1)..(713): Ceres Seq. ID no. 12696551
MMKEEKLFASQGGPIILGQIENEYNAVQLAYKENGEKYIKWAANLVESMNLGIPWVMCKQNDAPGNLINACNGRHCGDTFPGPNRHDKPSLWTENWTTQFRVFGDPPTQRTVEDIAFSVARYFSKNGSHVNYYMYHGGTNFGRTSAHFVTTRYYDDAPLDEFGLEKAPKYGHLKHVHRALRLCKKALFWGQLRAQTLGPDTEVRYYEQPGTKVCAAFLSNNNTRDTNTIKFKGQDYVLPSRSISILPDCKTVVYNTAQIVAQHSWRDFVKSEKTSKGLKFEMFSENIPSLLDGDSLIPGELYYLTKDKTDYAWYTTSVKIDEDDFPDQKGLKTILRVASLGHALIVYVNGEYAGKAHGRHEMKSFEFAKPVNFKTGDNRISILGVLTGLPDSGSYMEHRFAGPRAISIIGLKSGTRDLTENNEWGHLAGLEGEKKEVYTEEGSKKVKWEKDGKRKPLTWYKTYFETPEGVNAVAIRMKAMGKGLIWVNGIGVGRYWMSFLSPLGEPTQTEYHIPRSFMKGEKKKNMLVILEEEPGVKLESIDFVLVNRDTICSNVGEDYPVSVKSWKREGPKIVSRSKDMRLKAVMRCPPEKQMVEVQFASFGDPTGTCGNFTMGKCSASKSKEVVEKECLGRNYCSIVVARETFGDKGCPEIVKTLAVQVKCEKKEGKQDEKKKKEDKDEEEEDDEDDDEEEEEEDKENKDTKDMENKNQDM

SEQ ID NO: 87051 - protein, 712 aa, Arabidopsis thaliana
  peptide (1)..(712): Ceres Seq. ID no. 12696552
MKEEKLFASQGGPIILGQIENEYNAVQLAYKENGEKYIKWAANLVESMNLGIPWVMCKQNDAPGNLINACNGRHCGDTFPGPNRHDKPSLWTENWTTQFRVFGDPPTQRTVEDIAFSVARYFSKNGSHVNYYMYHGGTNFGRTSAHFVTTRYYDDAPLDEFGLEKAPKYGHLKHVHRALRLCKKALFWGQLRAQTLGPDTEVRYYEQPGTKVCAAFLSNNNTRDTNTIKFKGQDYVLPSRSISILPDCKTVVYNTAQIVAQHSWRDFVKSEKTSKGLKFEMFSENIPSLLDGDSLIPGELYYLTKDKTDYAWYTTSVKIDEDDFPDQKGLKTILRVASLGHALIVYVNGEYAGKAHGRHEMKSFEFAKPVNFKTGDNRISILGVLTGLPDSGSYMEHRFAGPRAISIIGLKSGTRDLTENNEWGHLAGLEGEKKEVYTEEGSKKVKWEKDGKRKPLTWYKTYFETPEGVNAVAIRMKAMGKGLIWVNGIGVGRYWMSFLSPLGEPTQTEYHIPRSFMKGEKKKNMLVILEEEPGVKLESIDFVLVNRDTICSNVGEDYPVSVKSWKREGPKIVSRSKDMRLKAVMRCPPEKQMVEVQFASFGDPTGTCGNFTMGKCSASKSKEVVEKECLGRNYCSIVVARETFGDKGCPEIVKTLAVQVKCEKKEGKQDEKKKKEDKDEEEEDDEDDDEEEEEEDKENKDTKDMENKNQDM

SEQ ID NO: 87052 - DNA, 1090 bp, Arabidopsis thaliana
  misc_feature (1)..(1090): Ceres Seq. ID no. 12696553
  misc_feature (1)..(1090): Ortholog of  Ceres SEQ ID NO 13656486 as cited in SEQ ID NO 69202
acttttgccgagaaaatcagagacagaagaagaagaaaagcgaaaaaaagcaaaacatgaaggcgacgacgaagactccgatccacgtggtgtggtcatgggttaggagacaacctccgaaggtgaaggcttttctcgccgtggtcactggcatggcggctttggttcttctcagattcattgttcacgatcacgacaatctcttcgttgccgctgaggctgttcattccatcgggatctgtgtgctcatctacaaactcatgaaggagaagacctgtgccggattgtcactgaaatctcaggagcttacggcgatatttttagctgttaggctgtattgtagcattgtaatggaatatgatatacataccattcttgacttggctactttgggaacaactctctgggttatatttatgattcgtttcaagttaagagctagttacatggaggacaaagacaactttcctctctattatgtgcttgcgccctgtgttgcattagctgtgttcatccatccatcgacctctcataacataataaacagaatttcatgggctttatgtgtataccttgaagctgtttcagtactacctcagctacgagtgatgcagaacacaaagattgttgaaccgttcacggctcattatgtttttgcacttggagtagcaaggttcctcagctgtgcccactgggttttacaggttgtggacacgcggggacggttgcttgtagcattgggttatggattgtggccatcaatggttctgatctcagaaattgttcaaactttcatcttggcagatttctgttactactacgtcaaaagcgttttcggaggccagcttgttctccggctaccgtctggagtagtataagttcaaaagatagaaataccccaacgatgtcctgcgatgagcttgacggaaattctaattgggaaagatagctcaatttttctttacctctgatttcatcgtttatgtgtcttgaggtttcaccaagtgtctcggttacgaattaattttacagtgttgtatattttgcctatcaagggatttaacgtctttcaggtcgataagttatcttt

SEQ ID NO: 87053 - protein, 291 aa, Arabidopsis thaliana
  peptide (1)..(291): Ceres Seq. ID no. 12696554
FCRENQRQKKKKSEKKQNMKATTKTPIHVVWSWVRRQPPKVKAFLAVVTGMAALVLLRFIVHDHDNLFVAAEAVHSIGICVLIYKLMKEKTCAGLSLKSQELTAIFLAVRLYCSIVMEYDIHTILDLATLGTTLWVIFMIRFKLRASYMEDKDNFPLYYVLAPCVALAVFIHPSTSHNIINRISWALCVYLEAVSVLPQLRVMQNTKIVEPFTAHYVFALGVARFLSCAHWVLQVVDTRGRLLVALGYGLWPSMVLISEIVQTFILADFCYYYVKSVFGGQLVLRLPSGVV

SEQ ID NO: 87054 - protein, 273 aa, Arabidopsis thaliana; identical to SEQ ID NO: 24275
  peptide (1)..(273): Ceres Seq. ID no. 12696555

SEQ ID NO: 87055 - protein, 241 aa, Arabidopsis thaliana; identical to SEQ ID NO: 24276
  peptide (1)..(241): Ceres Seq. ID no. 12696556

SEQ ID NO: 87056 - DNA, 3693 bp, Arabidopsis thaliana
  misc_feature (1)..(3693): Ceres Seq. ID no. 12696575
  misc_feature (1)..(3693): Ortholog of  Ceres SEQ ID NO 13600310 as cited in SEQ ID NO 5086
aaaatctgaaatttctcagcctcctcgtttcttcacccagaggagagagaaatctgaggaattcgatcttcgcttaaagaagacgaaacaatctctctctctttctctcttcaatggtctcaccatctctgtctaccatctcctagccaaagaagaagacgagaagaagaagagagggtcacaacaatgctttattcttcttatgtctccagccatgtgagctcccactgacacattctctgcatcttcggaagttttgttttggtttgattcttctcaccgattcctgcgaccgagtttgaccctcgagtttcgaggttagtggatggcttcatcctcatcgagaactagaagcagtagacctccaagtcccgcttcttccacttcttcttctcatctcagcaaccgtctcattcctcgttctaactctacctctgcttcctcattgattacctccgccgccggaatcgcctcccgatctatgacgcctagtcgcaccttctccgactcgggccttatcggctccggcagctttggaattggatcgcctgttccctacccgtcagaggagcttctcggtgaccctatggacgatactattagctctgagcgggatagtatctccgtcaccgttcgttttcgtccgttgagtgatagagagtatcaaagaggagatgaagttgcttggtaccctgatggtgatacattggttaggcacgagtataacccactcacagcttacgcatttgataaagtttttggaccacaggcaactactattgacgtttatgatgtagctgcgagaccagtagtcaaggcagcaatggaaggtgttaacggaaccgtttttgcttacggtgttactagcagtggaaagacacatacaatgcatggtgatcaagaatctcctgggatcataccgctagcaataaaagacgtgttcagtatcatccaggatactccaggaagggagttcctgctccgtgtttcatatcttgaaatatacaatgaggtgataaatgatttactggatccaacaggccaaaacttacgtgttagagaggattcccagggcacttatgttgagggtatcaaggaagaagttgttttgtctcctggccatgcactatcattcattgcagctggggaagaacatcgtcatgttggttcaaataatttcaatttgttgagcagcagaagtcacactatatttacactgatggttgaaagtagtgctactggagatgaatatgatggagttatcttttctcaactcaatttgattgacttagctggatctgagagttcgaaaactgaaacaactggattgaggaggaaggagggttcatacatcaacaagagtcttctaactcttggaactgtgattggaaaacttagtgagggtaaggcaactcacattccatatcgtgactctaagctaactcgtcttctgcaatcttcattaagtggtcatggacatgtgtcgctcatatgtacaattactcctgcgtccagcagtagtgaggaaactcataacacattgaagtttgccagcagggcaaagagtatagaaatatatgcttcacgcaatcagattatagatgagaagtcattaattaagaaatatcaaagagaaatctcaaccctcaaactagaacttgatcagcttagaaggggtatgcttgttggtgtcagtcatgaagagttaatgagcttaaagcaacagttagaagaagggcaagtgaaaatgcaatcaagattggaggaagaagaagaagccaaagcagctctaatgagcagaatccaaaagcttaccaagctcatactagtctctaccaagaattctattcctggatattcgggtgacatacctactcatcagcgcagtctctctgcgggtaaagatgataaattcgattctctactgttggaaagtgataatctgggatctccatcttcgaccttagctcttctatcagaaggttctttaggttttaaccacaggcgatcttctagcaagttgaatgacgaaaactcgccgggtgcagaatttactcaaggtgtcatgacgccggacgaaatcgaccttctggttgaacaagttaagatgcttgctggtgagatagctttcagtacgagcacactaaagcgtttggtggatcagtccgtaaatgatccggaaaactcacaaactcagatacagaatctggaacgcgagattcacgaaaagcaaaggcaaatgagaggcttggaacagctcataattgagagtggtgaagcttccattgccaacgcatcattagttgagatgcaacagaaagttatgagtctgatgacccagtgcaatgagaagagctttgagctggagatcaaatcagctgataattgcattctccaagaacaactacaggaaaagtgtaccgagaacaaagaactacatgaaaaggtgaatcttctagagcaacgcttgaatgcagtatctagtgagaaatcctctccatcttgttccaataaagcggtatctggagagtatgcagacgaactaaaaaagaaaatacaatcgcaggaaattgagaacgaagagttgaagctagaacacgtgcaaatcgtggaagagaacagtgggttacgagtacaaaatcaaaaactagctgaagaagcttcatatgctaaggagttagcctctgcggctgctgttgagctgaaaaatcttgctagcgaagtaacaaaactctcactacaaaacacaaagctagaaaaagaattagcagctgcaagagacttggctcaaacgcgtaaccccatgaacggagttaatcgcaagtataacgatggggcaaggtcaggaagaaagggaaggatttcctcaagtaggtcaagtggagatgagtttgacgcatggaatctagacccagaagatcttaaaatggagttgcaagtaaggaaacaacgagaagtggctcttgagtctgcattggcagagaaagagtttatagaagatgaatacaggaaaaaagcagaagaggcaaagcgaagagaggaagctttagaaaacgatttggcaaacatgtgggtacttgttgccaagttgaagaaagacaatggtgcattgcctgaacccaatggcactgaccctggaagagaattagagaagagtcaaagccatgcggttctgaaagagagacaagtctcgagtgcaccgagacaacctgaagtagtagtagtagctaaaaccgaagagacaccaaaagaggaaccactcgttgctcgtctcaaggcacgaatgcaagaaatgaaagagaaagagatgaaatcgcaagcgaatggagacgcaaactctcacatttgtaaagtatgtttcgaatctcccactgcggcaattctactcccttgccgtcatttctgcttatgtaaatcctgttcccttgcttgctctgaatgcccaatttgccgcacaaagatctctgatcggctctttgcgtttccgtcttaaccagttgaaaaggtctctaagaactgtgggtgaagcctgttgctaaatattttggggagagaacaggttgggatttttaaaggaattagttttgtatgtaattttatgtccatcagtctatgcttatattttgatatttatcattaaaaatgggggaatcggaaaaatcaaacatatacgtaataccaaacttttctgtt

SEQ ID NO: 87057 - protein, 1055 aa, Arabidopsis thaliana
  peptide (1)..(1055): Ceres Seq. ID no. 12696576
MASSSSRTRSSRPPSPASSTSSSHLSNRLIPRSNSTSASSLITSAAGIASRSMTPSRTFSDSGLIGSGSFGIGSPVPYPSEELLGDPMDDTISSERDSISVTVRFRPLSDREYQRGDEVAWYPDGDTLVRHEYNPLTAYAFDKVFGPQATTIDVYDVAARPVVKAAMEGVNGTVFAYGVTSSGKTHTMHGDQESPGIIPLAIKDVFSIIQDTPGREFLLRVSYLEIYNEVINDLLDPTGQNLRVREDSQGTYVEGIKEEVVLSPGHALSFIAAGEEHRHVGSNNFNLLSSRSHTIFTLMVESSATGDEYDGVIFSQLNLIDLAGSESSKTETTGLRRKEGSYINKSLLTLGTVIGKLSEGKATHIPYRDSKLTRLLQSSLSGHGHVSLICTITPASSSSEETHNTLKFASRAKSIEIYASRNQIIDEKSLIKKYQREISTLKLELDQLRRGMLVGVSHEELMSLKQQLEEGQVKMQSRLEEEEEAKAALMSRIQKLTKLILVSTKNSIPGYSGDIPTHQRSLSAGKDDKFDSLLLESDNLGSPSSTLALLSEGSLGFNHRRSSSKLNDENSPGAEFTQGVMTPDEIDLLVEQVKMLAGEIAFSTSTLKRLVDQSVNDPENSQTQIQNLEREIHEKQRQMRGLEQLIIESGEASIANASLVEMQQKVMSLMTQCNEKSFELEIKSADNCILQEQLQEKCTENKELHEKVNLLEQRLNAVSSEKSSPSCSNKAVSGEYADELKKKIQSQEIENEELKLEHVQIVEENSGLRVQNQKLAEEASYAKELASAAAVELKNLASEVTKLSLQNTKLEKELAAARDLAQTRNPMNGVNRKYNDGARSGRKGRISSSRSSGDEFDAWNLDPEDLKMELQVRKQREVALESALAEKEFIEDEYRKKAEEAKRREEALENDLANMWVLVAKLKKDNGALPEPNGTDPGRELEKSQSHAVLKERQVSSAPRQPEVVVVAKTEETPKEEPLVARLKARMQEMKEKEMKSQANGDANSHICKVCFESPTAAILLPCRHFCLCKSCSLACSECPICRTKISDRLFAFPS

SEQ ID NO: 87058 - protein, 1003 aa, Arabidopsis thaliana
  peptide (1)..(1003): Ceres Seq. ID no. 12696577
MTPSRTFSDSGLIGSGSFGIGSPVPYPSEELLGDPMDDTISSERDSISVTVRFRPLSDREYQRGDEVAWYPDGDTLVRHEYNPLTAYAFDKVFGPQATTIDVYDVAARPVVKAAMEGVNGTVFAYGVTSSGKTHTMHGDQESPGIIPLAIKDVFSIIQDTPGREFLLRVSYLEIYNEVINDLLDPTGQNLRVREDSQGTYVEGIKEEVVLSPGHALSFIAAGEEHRHVGSNNFNLLSSRSHTIFTLMVESSATGDEYDGVIFSQLNLIDLAGSESSKTETTGLRRKEGSYINKSLLTLGTVIGKLSEGKATHIPYRDSKLTRLLQSSLSGHGHVSLICTITPASSSSEETHNTLKFASRAKSIEIYASRNQIIDEKSLIKKYQREISTLKLELDQLRRGMLVGVSHEELMSLKQQLEEGQVKMQSRLEEEEEAKAALMSRIQKLTKLILVSTKNSIPGYSGDIPTHQRSLSAGKDDKFDSLLLESDNLGSPSSTLALLSEGSLGFNHRRSSSKLNDENSPGAEFTQGVMTPDEIDLLVEQVKMLAGEIAFSTSTLKRLVDQSVNDPENSQTQIQNLEREIHEKQRQMRGLEQLIIESGEASIANASLVEMQQKVMSLMTQCNEKSFELEIKSADNCILQEQLQEKCTENKELHEKVNLLEQRLNAVSSEKSSPSCSNKAVSGEYADELKKKIQSQEIENEELKLEHVQIVEENSGLRVQNQKLAEEASYAKELASAAAVELKNLASEVTKLSLQNTKLEKELAAARDLAQTRNPMNGVNRKYNDGARSGRKGRISSSRSSGDEFDAWNLDPEDLKMELQVRKQREVALESALAEKEFIEDEYRKKAEEAKRREEALENDLANMWVLVAKLKKDNGALPEPNGTDPGRELEKSQSHAVLKERQVSSAPRQPEVVVVAKTEETPKEEPLVARLKARMQEMKEKEMKSQANGDANSHICKVCFESPTAAILLPCRHFCLCKSCSLACSECPICRTKISDRLFAFPS

SEQ ID NO: 87059 - protein, 968 aa, Arabidopsis thaliana
  peptide (1)..(968): Ceres Seq. ID no. 12696578
MDDTISSERDSISVTVRFRPLSDREYQRGDEVAWYPDGDTLVRHEYNPLTAYAFDKVFGPQATTIDVYDVAARPVVKAAMEGVNGTVFAYGVTSSGKTHTMHGDQESPGIIPLAIKDVFSIIQDTPGREFLLRVSYLEIYNEVINDLLDPTGQNLRVREDSQGTYVEGIKEEVVLSPGHALSFIAAGEEHRHVGSNNFNLLSSRSHTIFTLMVESSATGDEYDGVIFSQLNLIDLAGSESSKTETTGLRRKEGSYINKSLLTLGTVIGKLSEGKATHIPYRDSKLTRLLQSSLSGHGHVSLICTITPASSSSEETHNTLKFASRAKSIEIYASRNQIIDEKSLIKKYQREISTLKLELDQLRRGMLVGVSHEELMSLKQQLEEGQVKMQSRLEEEEEAKAALMSRIQKLTKLILVSTKNSIPGYSGDIPTHQRSLSAGKDDKFDSLLLESDNLGSPSSTLALLSEGSLGFNHRRSSSKLNDENSPGAEFTQGVMTPDEIDLLVEQVKMLAGEIAFSTSTLKRLVDQSVNDPENSQTQIQNLEREIHEKQRQMRGLEQLIIESGEASIANASLVEMQQKVMSLMTQCNEKSFELEIKSADNCILQEQLQEKCTENKELHEKVNLLEQRLNAVSSEKSSPSCSNKAVSGEYADELKKKIQSQEIENEELKLEHVQIVEENSGLRVQNQKLAEEASYAKELASAAAVELKNLASEVTKLSLQNTKLEKELAAARDLAQTRNPMNGVNRKYNDGARSGRKGRISSSRSSGDEFDAWNLDPEDLKMELQVRKQREVALESALAEKEFIEDEYRKKAEEAKRREEALENDLANMWVLVAKLKKDNGALPEPNGTDPGRELEKSQSHAVLKERQVSSAPRQPEVVVVAKTEETPKEEPLVARLKARMQEMKEKEMKSQANGDANSHICKVCFESPTAAILLPCRHFCLCKSCSLACSECPICRTKISDRLFAFPS

SEQ ID NO: 87060 - DNA, 1145 bp, Arabidopsis thaliana
  misc_feature (1)..(1145): Ceres Seq. ID no. 12696579
  misc_feature (1)..(1145): Ortholog of  Ceres SEQ ID NO 13502952 as cited in SEQ ID NO 62271
  misc_feature (1)..(1145): Ortholog of  Ceres SEQ ID NO 13502973 as cited in SEQ ID NO 68052
  misc_feature (1)..(1145): Ortholog of  Ceres SEQ ID NO 13596000 as cited in SEQ ID NO 68188
aattgcaaatcaaatggatcgtcttaagctttatttctccgttttcgttttgtctttctttatcgtctcggtttcgtcgtctgatgtcaacgacggcgatgatctcgtgatccgtcaggtggttggtggagccgagcctcaggttttgacctcagaggatcacttttctctcttcaagcggaagttcgggaaggtctacgcttccaacgaggagcatgactatagattctcggtctgagttccgtaagaagcacttgggggttagaagtggctttaagcttcctaaagatgccaacaaggctccgattctccctaccgaaaatctccctgaggattttgattggagagatcatggcgccgttactcccgtcaaaaatcagggatcttgcggctcttgctggagtttcagcgccactggagctttggaaggtgctaacttcctcgctaccggcaaactcgtcagcctcagcgaacaacagctcgtcgactgtgatcacgagtgtgatcccgaggaggcagattcctgcgactctggttgcaatggtgggctaatgaacagcgcttttgaatacaccctcaaaaccggagggctcatgaaagaagaagactatccttacaccggaaaggacggcaagacctgcaagctagacaagtccaagatcgttgcctctgtctccaacttcagtgttatctccattgatgaagaacagattgctgcaaaccttgtcaagaacggacctcttgctgtagccatcaacgctggctatatgcagacttacattggaggagtctcatgcccttacatatgcaccaggaggctcaaccacggtgtcttattggttggctatggagcggcaggttacgctccggctaggttcaaggagaagccttactggatcatcaagaactcgtggggagagacttggggtgaaaatggtttctacaaaatctgcaaaggccgtaacatttgtggtgttgacagtatggtctccactgttgcagccaccgtctcaaccaccgcccattaagcatctcgtcaataagttttaattactttggtgatttgtatgagcgagctctctttgcgctgctgactctctctatttatctctgcttcttgcttgtaaataaaatgcgttctattg

SEQ ID NO: 87061 - protein, 270 aa, Arabidopsis thaliana
  peptide (1)..(270): Ceres Seq. ID no. 12696580
MTIDSRSEFRKKHLGVRSGFKLPKDANKAPILPTENLPEDFDWRDHGAVTPVKNQGSCGSCWSFSATGALEGANFLATGKLVSLSEQQLVDCDHECDPEEADSCDSGCNGGLMNSAFEYTLKTGGLMKEEDYPYTGKDGKTCKLDKSKIVASVSNFSVISIDEEQIAANLVKNGPLAVAINAGYMQTYIGGVSCPYICTRRLNHGVLLVGYGAAGYAPARFKEKPYWIIKNSWGETWGENGFYKICKGRNICGVDSMVSTVAATVSTTAH

SEQ ID NO: 87062 - protein, 158 aa, Arabidopsis thaliana; identical to SEQ ID NO: 27260
  peptide (1)..(158): Ceres Seq. ID no. 12696581

SEQ ID NO: 87063 - protein, 144 aa, Arabidopsis thaliana; identical to SEQ ID NO: 27261
  peptide (1)..(144): Ceres Seq. ID no. 12696582

SEQ ID NO: 87064 - DNA, 916 bp, Arabidopsis thaliana
  misc_feature (1)..(916): Ceres Seq. ID no. 12696586
  misc_feature (1)..(916): Ortholog of  Ceres SEQ ID NO 12563124 as cited in SEQ ID NO 57104
  misc_feature (1)..(916): Ortholog of  Ceres SEQ ID NO 13598373 as cited in SEQ ID NO 62185
  misc_feature (1)..(916): Ortholog of  Ceres SEQ ID NO 12584664 as cited in SEQ ID NO 62232
  misc_feature (1)..(916): Ortholog of  Ceres SEQ ID NO 12617639 as cited in SEQ ID NO 65219
  misc_feature (1)..(916): Ortholog of  Ceres SEQ ID NO 15179982 as cited in SEQ ID NO 0
acataagtctctctcttacattttgaaaccctaatttctcttcttttccccaaaaaaaaatgtctgaagttgagtaccggtgctttgtcggcggccttgcctgggccaccaatgatgaagatcttcaaaggacgttctcacagttcggcgacgttatcgattctaaggtctgttacacgagagatcggtctcccggatcgagccgattccgatgattctgatcctcgacggatctgattccgatctgtttctctgttacttgattcgattactgttactatgttctctctcgttctttgttactgttacttaatttgtcccatcgatcattaacgaccgcgagagtggaagatcaaggggattcggattcgtcaccttcaaggacgagaaagccatgagggatgcgattgaagagatgaacggtaaagagctcgatggacgtgtcatcaccgtgaacgaggctcagtcgagaggtagcggcggtggcggaggaggccgtggtggaagcggtggtggttaccgcagcggaggcggtggtggatactcaggaggcggtggcggcggatactcaggaggaggcggtggtggttacgagagacgtagcggaggttacggatctggtggaggcggtggtggccgaggatacggtggtggtggacgccgtgagggaggtggctacggaggcggtgatggtggaagttacggaggcggtggtggcggctggtaatcaaagatagagttgtttgcgtgctgctgctctgtttttggtttagatttggttttgtgtcaccacttctggtttggttatcgttcgtttggtttacttttttgatgaaacagtttcgtttaagtcttctttgtctggaacgaaatgttaattcgcgtgttgtttactaaatttataacgtttcctttt

SEQ ID NO: 87065 - protein, 110 aa, Arabidopsis thaliana; identical to SEQ ID NO: 22060
  peptide (1)..(110): Ceres Seq. ID no. 12696587

SEQ ID NO: 87066 - protein, 103 aa, Arabidopsis thaliana; identical to SEQ ID NO: 22061
  peptide (1)..(103): Ceres Seq. ID no. 12696588

SEQ ID NO: 87067 - DNA, 1278 bp, Arabidopsis thaliana
  misc_feature (1)..(1278): Ceres Seq. ID no. 12696613
  misc_feature (1)..(1278): Ortholog of  Ceres SEQ ID NO 14311727 as cited in SEQ ID NO 51259
aaagatccctctcgcctctcggtgtccttgtatacagtacttcagttttccgatctctttcagattctgttgccaaacttcatataaacttagtgagcggaactggatttggggagaatggcttcttctttagctcaatctagaatctcgaatctccagaatcatctttcacctcttgaagcaaacaacaagctcaggagtctggtcaagatttctccccaagtatctgaagccttgtctaatggacgtgctgttgtcgctcttgagtcaaccattatctcccatgggatgccttaccctcaaaatctgcaaacagcaaaagaggtggagtcaattgtgagagaaaatggagcaatccctgcaacaattgctatccttaatggagtaccttgcataggtctgagcgaggaagaactagaacgtcttgcatctctcggaaaaagtgtccaaaagacagcgggaagggacatagcaaatgttgtggctacaagaggaaacggtgcaactacagtctctgcaacgttgtttttcgcttcaatggttggcatccaagtttttgtgacgggcgggataggtggtgtccatagacatgccaaccattcgatggacatatcatctgatcttactgcacttgggaggactccaatagcagtgatatcagcaggcgttaaatcaatacttgatattccaaagactcttgaatatttggaaactcaagaagtgtatgttgctgcatacaagagcgatgagtttccagcatttttcacagaaaaaagtggctgtaaggcaccttcccgtgtaaatagccctgaagactgtgctagagtaatagatgcaaacatgaagctaaaccgtcaggcggggattctatttgccattccaattccgaaacaccattcagccgctggaaatcttatcgaatcagcaacacagcgtgctcttacagaagcaagggaacaaaacgttactggaaatgcagaaactccattcttacttgcacgggtaaatgagttaaccggaggcacatcacttgcagcaaacattgcgcttgtgaaaaacaatgcccttatcggttctcagattgcagtagccctttctcagctgatgtgagcttccttatcaatcccagactcaagctcaagcgcaagttattcaggttcatgattcaggacagatcaaagatgttttggattggtagttatcaatttatattggttatcaaagatttttctttagctaaagaaactcgttaacttattatcacatgttatatattag

SEQ ID NO: 87068 - protein, 330 aa, Arabidopsis thaliana; identical to SEQ ID NO: 40372
  peptide (1)..(330): Ceres Seq. ID no. 12696614

SEQ ID NO: 87069 - protein, 273 aa, Arabidopsis thaliana; identical to SEQ ID NO: 40373
  peptide (1)..(273): Ceres Seq. ID no. 12696615

SEQ ID NO: 87070 - protein, 190 aa, Arabidopsis thaliana; identical to SEQ ID NO: 40374
  peptide (1)..(190): Ceres Seq. ID no. 12696616

SEQ ID NO: 87071 - DNA, 1524 bp, Arabidopsis thaliana
  misc_feature (1)..(1524): Ceres Seq. ID no. 12696692
  misc_feature (1)..(1524): Ortholog of  Ceres SEQ ID NO 14313228 as cited in SEQ ID NO 67057
atgggttgttgtcaatcgtcattcttgaaaccgtcgtcattgcatgacaagaaaatcacctccgacgatttatccggccgccgtggaaaaggagccaaacgtggtaatcgccaccgtcatgctaacattaatgaaggcaggggatggcatttttccgacgtgccagacttctccgagttctcggcatcggttcttcgtgacgctacaaataatttcaacaaaaacgctgtcgtatcagtttgttctgatcaagaaccaaaccttgtttaccaaggctgcattaggagcgacaaagataaacgtcttattgccgttaaaaaattctccaaaacaacatggcctgatcctaaacaattcgctacagaagctcgggctatcggcagtttgaggcatgtaagactagtgaatttgataggttattgttgtgaaggagatgaaaggttgcttgtatcggagtacatgcctaatgaaagcctaaccaaacatctatttcattgggagaaacaaaccatggaatgggctatgcgattgagagttgcactttatgtagctgaagctttagaatattgtaggcagagtggactcaaattgtaccatgatctcaatacttgtcgggttctctttgatgagaatggaagtcctcggctttcatgttttggatggatgaaaaatagcaaagatggcaagaacttcagcacaaatcttgcttatacaccgcccgaatatcttagaagtggtacgttaattccagagagtgttgtcttcagctttgggacgtttcttttggatcttcttagtgggaaacacattcctccaagtcatgcggttggtacaattcaaaagcaaaacttaaatgtcttgatggattcacatttagaaggaaactatcctgaggaagacgcagccatggtgtttgatttggcttccaaatgccttcacaataaccctaatgaacggccagaaattggagatatcatctcagttatcactacacttcaacaaaaactagatgttccgtcctatactatgcttggaatttcaaaacttgaaaagcttgaaatggaacacccgaaatctttaatttacgatgcatgtcaccaaatggaccttgcagctcttcatcaaattcttgaagcaatggagtacaaagaagatgaagttacttgtgagctctctttccagcaatgggctcaacagataaaagatgtgtgcaacactagacaacaaggcgattcggcttttcggaacaaacatttcgaatctgctattgataaatatactcagttcatagaaataggaatcatgatctctcccactgtttatgcacgaagaagcatgtgctatctcttctgcgaccaaccagatgcagcacttcgagacgcgatgcaagcacaatgtgtctattcggactggccaactgcattttaccttcaggccgtggctctttccaaactgaatatggtcgaagattcagctaccatgctaaaagaagccttgatcttggaagataagagaggctcataa

SEQ ID NO: 87072 - protein, 507 aa, Arabidopsis thaliana
  peptide (1)..(507): Ceres Seq. ID no. 12696693
MGCCQSSFLKPSSLHDKKITSDDLSGRRGKGAKRGNRHRHANINEGRGWHFSDVPDFSEFSASVLRDATNNFNKNAVVSVCSDQEPNLVYQGCIRSDKDKRLIAVKKFSKTTWPDPKQFATEARAIGSLRHVRLVNLIGYCCEGDERLLVSEYMPNESLTKHLFHWEKQTMEWAMRLRVALYVAEALEYCRQSGLKLYHDLNTCRVLFDENGSPRLSCFGWMKNSKDGKNFSTNLAYTPPEYLRSGTLIPESVVFSFGTFLLDLLSGKHIPPSHAVGTIQKQNLNVLMDSHLEGNYPEEDAAMVFDLASKCLHNNPNERPEIGDIISVITTLQQKLDVPSYTMLGISKLEKLEMEHPKSLIYDACHQMDLAALHQILEAMEYKEDEVTCELSFQQWAQQIKDVCNTRQQGDSAFRNKHFESAIDKYTQFIEIGIMISPTVYARRSMCYLFCDQPDAALRDAMQAQCVYSDWPTAFYLQAVALSKLNMVEDSATMLKEALILEDKRGS

SEQ ID NO: 87073 - protein, 354 aa, Arabidopsis thaliana
  peptide (1)..(354): Ceres Seq. ID no. 12696694
MPNESLTKHLFHWEKQTMEWAMRLRVALYVAEALEYCRQSGLKLYHDLNTCRVLFDENGSPRLSCFGWMKNSKDGKNFSTNLAYTPPEYLRSGTLIPESVVFSFGTFLLDLLSGKHIPPSHAVGTIQKQNLNVLMDSHLEGNYPEEDAAMVFDLASKCLHNNPNERPEIGDIISVITTLQQKLDVPSYTMLGISKLEKLEMEHPKSLIYDACHQMDLAALHQILEAMEYKEDEVTCELSFQQWAQQIKDVCNTRQQGDSAFRNKHFESAIDKYTQFIEIGIMISPTVYARRSMCYLFCDQPDAALRDAMQAQCVYSDWPTAFYLQAVALSKLNMVEDSATMLKEALILEDKRGS

SEQ ID NO: 87074 - protein, 337 aa, Arabidopsis thaliana
  peptide (1)..(337): Ceres Seq. ID no. 12696695
MEWAMRLRVALYVAEALEYCRQSGLKLYHDLNTCRVLFDENGSPRLSCFGWMKNSKDGKNFSTNLAYTPPEYLRSGTLIPESVVFSFGTFLLDLLSGKHIPPSHAVGTIQKQNLNVLMDSHLEGNYPEEDAAMVFDLASKCLHNNPNERPEIGDIISVITTLQQKLDVPSYTMLGISKLEKLEMEHPKSLIYDACHQMDLAALHQILEAMEYKEDEVTCELSFQQWAQQIKDVCNTRQQGDSAFRNKHFESAIDKYTQFIEIGIMISPTVYARRSMCYLFCDQPDAALRDAMQAQCVYSDWPTAFYLQAVALSKLNMVEDSATMLKEALILEDKRGS

SEQ ID NO: 87075 - DNA, 558 bp, Arabidopsis thaliana
  misc_feature (1)..(558): Ceres Seq. ID no. 12697144
  misc_feature (1)..(558): Ortholog of  Ceres SEQ ID NO 14311659 as cited in SEQ ID NO 51212
  misc_feature (1)..(558): Ortholog of  Ceres SEQ ID NO 12635180 as cited in SEQ ID NO 0
atgactagccttacctacacactcgatgaaatcgaaggccctttcgaagttgattacgcagcagtgacagtacacaacttcctggtggggagcgtgtaccgttcttgttcacgatcaagcagctcgtggcatcgcagaggatactttggtcccaagtcgatcccttcagcattcacccaaggccacgttggaaataaatctgatcgtaaaacacaacatctgcagattattatcaataaaaattcagaaatcaataaaattcactctgaaaacgcagaaaatctaagcccatctgctcaaatccgaggagtattacaaggtacctctatagaatatcaaggctatgacaatgcggttgcattacctgctagaggaaacaatgaggagctagctaaggagaacaacaagatcacacttagtgtaacaaagagtaatcccgagagcggtgaagtgattggtgctttcgagagtattcaaccttcagacactgatttgggtgctacgactcctaaggatgtcaagattcaaggaatctggtattgccaacttgatgaataa

SEQ ID NO: 87076 - protein, 185 aa, Arabidopsis thaliana
  peptide (1)..(185): Ceres Seq. ID no. 12697145
MTSLTYTLDEIEGPFEVDYAAVTVHNFLVGSVYRSCSRSSSSWHRRGYFGPKSIPSAFTQGHVGNKSDRKTQHLQIIINKNSEINKIHSENAENLSPSAQIRGVLQGTSIEYQGYDNAVALPARGNNEELAKENNKITLSVTKSNPESGEVIGAFESIQPSDTDLGATTPKDVKIQGIWYCQLDE

SEQ ID NO: 87077 - DNA, 1620 bp, Arabidopsis thaliana
  misc_feature (1)..(1620): Ceres Seq. ID no. 12697162
  misc_feature (1)..(1620): Ortholog of  Ceres SEQ ID NO 14306857 as cited in SEQ ID NO 60035
  misc_feature (1)..(1620): Ortholog of  Ceres SEQ ID NO 15227091 as cited in SEQ ID NO 60294
  misc_feature (1)..(1620): Ortholog of  Ceres SEQ ID NO 14307960 as cited in SEQ ID NO 66187
  misc_feature (1)..(1620): Ortholog of  Ceres SEQ ID NO 13502874 as cited in SEQ ID NO 66298
  misc_feature (1)..(1620): Ortholog of  Ceres SEQ ID NO 12614124 as cited in SEQ ID NO 68392
ttcactcaccaaaatagatctaaaacatggaaaccaaaaccctaattttctcaattctcttcgttgttctctctctcatttacttaattggaaaactcaagcgaaagccaaatctacctccgagtccggcatggtcattaccggtgattggtcatctccgccttctcaaaccaccgattcatcgcacattcctctccctctctcaatccctaaacaatgctccgatcttctccctccgactcggtaaccgactcgttttcgtgaactcgtcacactcgatcgccgaggaatgtttcaccaaaaacgacgtcgtactggcgaacagaccaaacttcatcctcgctaaacacgttgcgtacgattacacaaccatgatcgcagcttcctacggtgaccactggcgtaacctccgccgcatcggctccgtcgagatattctccaatcaccgtctcaatagctttttgtctattcgtaaagacgagatccgacgacttgtgtttcgtctttctcggaacttttcacaagagtttgtgaaagtggatatgaaatcaatgttatctgacttaacattcaacaacattttaagaatggtggccggaaaacgttactacggagacggtgttgaggatgatccggaggctaaacgtgtccggcagcttatagcggatgtggtggcttgtgctggtgctggaaacgctgttgattacttaccggttttgcggttggtttcagattacgagacacgggttaagaagttggcgggtaggctcgacgagttcttgcaaggattggttgatgagaaacgagaagctaaggagaaaggaaacactatgatcgatcacttgcttactctgcaagaatcccaaccggattacttcacggatcgtatcattaaaggaaacatgctcgctttgatactagcagggaccgacacatcagcggttacgttagaatgggcattgtcgaacgtgttgaaccatccggatgtattgaacaaggcgagagatgaaatcgatagaaagataggtttagacaggcttatggatgaatcagatatctcaaacctgccttatctccaaaacattgtgtctgaaacgttgcgcctttatcctgcggctcccatgcttcttcctcacgttgcctcggaagattgtaaagttgcaggatacgatatgccgcgtggcacgatactattgaccaatgtgtgggctatacacagagatcctcagctatgggatgatccaatgagcttcaagccagagaggtttgagaaagaaggagaagctcagaagctaatgccgtttgggttaggaagaagggcgtgtcctggttctggactggctcatcggcttataaacctgactcttggatcattgattcagtgtttggaatgggagaagattggagaagaagtggatatgagtgaaggcaaaggtgttacaatgcctaaagccaagcctttggaagccatgtgcagagcacgtccctctgttgttaaaatcttcaacgagtccgtttgacgtttagacttttggtaatggctatgtatacattagataactagttatgtttgtatgttttctttttttttggtgaaaatattatgtttgtatgttaatg

SEQ ID NO: 87078 - protein, 497 aa, Arabidopsis thaliana; identical to SEQ ID NO: 36691
  peptide (1)..(497): Ceres Seq. ID no. 12697163

SEQ ID NO: 87079 - protein, 382 aa, Arabidopsis thaliana; identical to SEQ ID NO: 36692
  peptide (1)..(382): Ceres Seq. ID no. 12697164

SEQ ID NO: 87080 - protein, 325 aa, Arabidopsis thaliana; identical to SEQ ID NO: 36693
  peptide (1)..(325): Ceres Seq. ID no. 12697165

SEQ ID NO: 87081 - DNA, 1506 bp, Arabidopsis thaliana
  misc_feature (1)..(1506): Ceres Seq. ID no. 12697166
  misc_feature (1)..(1506): Ortholog of  Ceres SEQ ID NO 13594209 as cited in SEQ ID NO 59089
  misc_feature (1)..(1506): Ortholog of  Ceres SEQ ID NO 13502874 as cited in SEQ ID NO 66298
  misc_feature (1)..(1506): Ortholog of  Ceres SEQ ID NO 12614124 as cited in SEQ ID NO 68392
atgttttactatgtgattgtccttcctttagctctctttctcttggcttacaaattattcttcacctccaaaacgaagcgtttcaacctccctccctctccaccttactctctcccaatcctaggccaccacaacctcctcaagccgccggtccaccgtctcttccaccgcctctccaaaacacacggcccaatcttctccctccaatttggctcccgccgtgccgtcgtaatctcctcctcctcactcgcaacacaatgcttcacaggccaaaacgacatcattctctcaaaccggccttgtttcctaaccgctaaatacgtcgcttacaactacacaaccgtaggaaccgcgccttatggcgaccactggcgtaacctccgccgcatttgctccctggaaatcctctcctcgaaccgtctcacaaacttcctccacatccgtaaagacgaaatccaccgcatgctcacgagactctcacgcgacgtcaacaaagagatcgagctcgagccgctcttgtccgatctaacgttcaacaacatagtaagaatggttacagggaagagatactacggcgacgaagtccataacgaagaagaggcaaatgttttcaagaaactcgtcgccgatatcaacgactgtagcggcgcgagacatcccggagattacttgcccttcatgaagatgttcggagggagctttgagaagaaagtgaaagctcttgcggaagccatggatgagatcttgcagcgtttgcttgaagaatgcaagagagataaagatggtaacactatggttaatcatttgctctctctgcaacaaaatgaaccagagtattacactgacgtcactatcaaaggcctaatgctgggcatgatgatcgccggaacagacacttccgctgtgacgctggagtgggcgatgtcgagcttgctaaatcatcccgaggctttggaaaaagcaaaactagagattgacgagaaaatcggacaagaacgtttgatcgatgaaccagacatcgcaaacttgccttaccttcaaaacatagtgtcggaaacattccgattatatccagcggcaccgcttctagtaccaagatcaccaacagaggatattaaagtcggaggatacgatgtgccacgtggcacaatggtgatggttaatgcgtgggctatacacagagatccagagctctggaacgaaccggagaagtttaaaccagagaggtttaatggcggagaaggtggaggaagaggagaagacgttcataagctgatgccgtttgggaatggacggagatcgtgtcccggcgccggactagggcagaagatcgtgacattagcgttaggttcgttgatccaatgctttgactggcaaaaagtcaacggcgaagcaatcgatatgacggagactccggggatggcaatgcgtaagaaaatacctctatctgctttgtgtcaatctcggcccattatgagtaagcttcaggcccatttaaaaggttag

SEQ ID NO: 87082 - protein, 501 aa, Arabidopsis thaliana; identical to SEQ ID NO: 74347
  peptide (1)..(501): Ceres Seq. ID no. 12697167

SEQ ID NO: 87083 - protein, 347 aa, Arabidopsis thaliana; identical to SEQ ID NO: 74348
  peptide (1)..(347): Ceres Seq. ID no. 12697168

SEQ ID NO: 87084 - protein, 318 aa, Arabidopsis thaliana
  peptide (1)..(318): Ceres Seq. ID no. 12697169
MVTGKRYYGDEVHNEEEANVFKKLVADINDCSGARHPGDYLPFMKMFGGSFEKKVKALAEAMDEILQRLLEECKRDKDGNTMVNHLLSLQQNEPEYYTDVTIKGLMLGMMIAGTDTSAVTLEWAMSSLLNHPEALEKAKLEIDEKIGQERLIDEPDIANLPYLQNIVSETFRLYPAAPLLVPRSPTEDIKVGGYDVPRGTMVMVNAWAIHRDPELWNEPEKFKPERFNGGEGGGRGEDVHKLMPFGNGRRSCPGAGLGQKIVTLALGSLIQCFDWQKVNGEAIDMTETPGMAMRKKIPLSALCQSRPIMSKLQAHLKG

SEQ ID NO: 87085 - DNA, 600 bp, Arabidopsis thaliana
  misc_feature (1)..(600): Ceres Seq. ID no. 12697178
  misc_feature (1)..(600): Ortholog of  Ceres SEQ ID NO 12614253 as cited in SEQ ID NO 68518
atgttgagtcgacgtttgacgacggtaccaactgtatttcgaagactgaggacaccggaggaatcgaaagcaagaggttttacttggctcgcacgacagcttttgagatgcttcgcgatagaggctacgaagttaatgaagctgagctctctctcactctttctgagtttcgttctgtttttgatccttgttgtgttcatgggaactgaaccaatcaccgtgaagtcagttcgtgctcttcatattcagatttccaacaatgtaggcttgcatgctatgattctggttttacagagcaaaatgaaccactttgcccagaaggcattgactaccttcccttttacagttgaaactttcccgattgaagatttgttggtcaacatcacaaagcacattcagcagccaaagattgagattttaaacaaagaggagaaagaacaactgctgaggaagcatgcacttgaggacaaacagcttccttatttgcaggagaaggacagctttgtgaggtactatgggttaaagaaaaaacaggtggtgaagattacatacagtaaagagcctgttggggattttgtgacataccgatgcatcatctga

SEQ ID NO: 87086 - protein, 199 aa, Arabidopsis thaliana
  peptide (1)..(199): Ceres Seq. ID no. 12697179
MLSRRLTTVPTVFRRLRTPEESKARGFTWLARQLLRCFAIEATKLMKLSSLSLFLSFVLFLILVVFMGTEPITVKSVRALHIQISNNVGLHAMILVLQSKMNHFAQKALTTFPFTVETFPIEDLLVNITKHIQQPKIEILNKEEKEQLLRKHALEDKQLPYLQEKDSFVRYYGLKKKQVVKITYSKEPVGDFVTYRCII

SEQ ID NO: 87087 - protein, 154 aa, Arabidopsis thaliana
  peptide (1)..(154): Ceres Seq. ID no. 12697180
MKLSSLSLFLSFVLFLILVVFMGTEPITVKSVRALHIQISNNVGLHAMILVLQSKMNHFAQKALTTFPFTVETFPIEDLLVNITKHIQQPKIEILNKEEKEQLLRKHALEDKQLPYLQEKDSFVRYYGLKKKQVVKITYSKEPVGDFVTYRCII

SEQ ID NO: 87088 - protein, 133 aa, Arabidopsis thaliana
  peptide (1)..(133): Ceres Seq. ID no. 12697181
MGTEPITVKSVRALHIQISNNVGLHAMILVLQSKMNHFAQKALTTFPFTVETFPIEDLLVNITKHIQQPKIEILNKEEKEQLLRKHALEDKQLPYLQEKDSFVRYYGLKKKQVVKITYSKEPVGDFVTYRCII

SEQ ID NO: 87089 - DNA, 1758 bp, Arabidopsis thaliana
  misc_feature (1)..(1758): Ceres Seq. ID no. 12697208
  misc_feature (1)..(1758): Ortholog of  Ceres SEQ ID NO 12566921 as cited in SEQ ID NO 0
atgcaacctcagccgcatatttctccgaacaccgcaactgccgcgatctcagccgcgcttgaatctcagcgcagtagaaaaaaccgaggaagttacaattgcggtagatgtggtcaacctaagaaaggccatgtctgtcttttaactgctccacctgatattcccactactccgatcgcttctgagccagtgagctgcatctccgccgccgcatcttcttcccgttctactgtcttatctttaacagcggcgccgtcatcgcgacagaccttcactcacttacgccgagctttatcgttcgatgacgtcgatgcgcgtaattcactcgatgaatccgatctggatgctgcatcgatggatctggatctacaattggatacggatattgttcagcctgggaggtttcatgcggtgggtttatgggaggtgcttaagcggctacctccgtctagtttactgatggcggctagggtttgcaaaggatggagagagacatcgaggaagatgtggaaagcggctgaggagcttcggattagggttccggagagagctcagattggatacattggatccttattacaaaaatgtcctcgacttattagactctcacttaaaatcgagagtgattttgacgcgacgactctggcttgcattgcattttcttgtcctaacctggaggttttggagattacaacttcgggtgcagctgtcaataggatttctggggatgagctgagtcggtttgttgctaataaacgaggactaacaagccttaagatggaaggatgttccaatttgggaggattttccctctcttcatcaagcctctccactctttggctctcggatcttcattctctctcaaagatgatcttcaactgtccaaatcttacggaaatatcacttgaattttctcgccaagaagatgattcaactgatcttgtaacaatggttgatggtttgggaaggacttgcactagattgcagaacatccatatagcctctttgaagctttcacatactgttgtactttctcttactgctgtgaatttcaggtatttgagaatgctctcgctagttcttggaataaatatcactgatgcatctgtagctgccatttcctcaggttacaaaaaccttgaactgcttgatctgagtggttccagcattactgatactggcctcgggatgatctgcgatgtcttacctgatacactctcaaaattacttgttgctctttgtcccaacattacatcaagtggcattcaatttgctactgctcaattgccccttcttgagctgatggattgtggcatgactgtctctgatcccaactcagataatccgacctttgtagagaatccaagtccacataaaacaccaggctacaatcaaaagatgtttatcaaacataaacggctgaagaaacttagtttgtggggatgctccagtttggacgctttgttcctaaactgcccagagctcatggacttgaacttgaacttatgcagtaatttgcatccggagagtctggtgctacaatgtccaaagttacaacttgtgtacgcatcaggatgtcaaggcctattgaccggagctatccgaaaacaggtttctgaaaacttctcggctggtgagaaccatatgccacggaaacgcttggctgatgcatctaaaaggattcaaacaagggaagatggtatttatgcagggaagagaaggaagttggagaaagaaatgtgtaccattatacattaa

SEQ ID NO: 87090 - protein, 585 aa, Arabidopsis thaliana
  peptide (1)..(585): Ceres Seq. ID no. 12697209
MQPQPHISPNTATAAISAALESQRSRKNRGSYNCGRCGQPKKGHVCLLTAPPDIPTTPIASEPVSCISAAASSSRSTVLSLTAAPSSRQTFTHLRRALSFDDVDARNSLDESDLDAASMDLDLQLDTDIVQPGRFHAVGLWEVLKRLPPSSLLMAARVCKGWRETSRKMWKAAEELRIRVPERAQIGYIGSLLQKCPRLIRLSLKIESDFDATTLACIAFSCPNLEVLEITTSGAAVNRISGDELSRFVANKRGLTSLKMEGCSNLGGFSLSSSSLSTLWLSDLHSLSKMIFNCPNLTEISLEFSRQEDDSTDLVTMVDGLGRTCTRLQNIHIASLKLSHTVVLSLTAVNFRYLRMLSLVLGINITDASVAAISSGYKNLELLDLSGSSITDTGLGMICDVLPDTLSKLLVALCPNITSSGIQFATAQLPLLELMDCGMTVSDPNSDNPTFVENPSPHKTPGYNQKMFIKHKRLKKLSLWGCSSLDALFLNCPELMDLNLNLCSNLHPESLVLQCPKLQLVYASGCQGLLTGAIRKQVSENFSAGENHMPRKRLADASKRIQTREDGIYAGKRRKLEKEMCTIIH

SEQ ID NO: 87091 - protein, 467 aa, Arabidopsis thaliana
  peptide (1)..(467): Ceres Seq. ID no. 12697210
MDLDLQLDTDIVQPGRFHAVGLWEVLKRLPPSSLLMAARVCKGWRETSRKMWKAAEELRIRVPERAQIGYIGSLLQKCPRLIRLSLKIESDFDATTLACIAFSCPNLEVLEITTSGAAVNRISGDELSRFVANKRGLTSLKMEGCSNLGGFSLSSSSLSTLWLSDLHSLSKMIFNCPNLTEISLEFSRQEDDSTDLVTMVDGLGRTCTRLQNIHIASLKLSHTVVLSLTAVNFRYLRMLSLVLGINITDASVAAISSGYKNLELLDLSGSSITDTGLGMICDVLPDTLSKLLVALCPNITSSGIQFATAQLPLLELMDCGMTVSDPNSDNPTFVENPSPHKTPGYNQKMFIKHKRLKKLSLWGCSSLDALFLNCPELMDLNLNLCSNLHPESLVLQCPKLQLVYASGCQGLLTGAIRKQVSENFSAGENHMPRKRLADASKRIQTREDGIYAGKRRKLEKEMCTIIH

SEQ ID NO: 87092 - protein, 432 aa, Arabidopsis thaliana
  peptide (1)..(432): Ceres Seq. ID no. 12697211
MAARVCKGWRETSRKMWKAAEELRIRVPERAQIGYIGSLLQKCPRLIRLSLKIESDFDATTLACIAFSCPNLEVLEITTSGAAVNRISGDELSRFVANKRGLTSLKMEGCSNLGGFSLSSSSLSTLWLSDLHSLSKMIFNCPNLTEISLEFSRQEDDSTDLVTMVDGLGRTCTRLQNIHIASLKLSHTVVLSLTAVNFRYLRMLSLVLGINITDASVAAISSGYKNLELLDLSGSSITDTGLGMICDVLPDTLSKLLVALCPNITSSGIQFATAQLPLLELMDCGMTVSDPNSDNPTFVENPSPHKTPGYNQKMFIKHKRLKKLSLWGCSSLDALFLNCPELMDLNLNLCSNLHPESLVLQCPKLQLVYASGCQGLLTGAIRKQVSENFSAGENHMPRKRLADASKRIQTREDGIYAGKRRKLEKEMCTIIH

SEQ ID NO: 87093 - DNA, 1107 bp, Arabidopsis thaliana
  misc_feature (1)..(1107): Ceres Seq. ID no. 12697266
  misc_feature (1)..(1107): Ortholog of  Ceres SEQ ID NO 13502952 as cited in SEQ ID NO 62271
  misc_feature (1)..(1107): Ortholog of  Ceres SEQ ID NO 13502973 as cited in SEQ ID NO 68052
  misc_feature (1)..(1107): Ortholog of  Ceres SEQ ID NO 13596000 as cited in SEQ ID NO 68188
atggtggctaaagccttagcacagctgataacatgcatcatcttattctgccacgttgtagcttccgtagaagacctcaccatacgccaagtcacggccgacaatcggcgaattcgcccgaatcttctcgggactcacacagagagtaaattccggcttttcatgtccgattacggcaagaactactccacgagggaggagtacatccaccgcctcggaatatttgccaaaaacgtccttaaggccgcagagcaccagatgatggacccctccgccgtccacggagtcacacagttctctgacctcacggaagaggagttcaagcggatgtacactggagtagccgatgttggcggcagccgtggcggtacggttggagcggaggcacctatggttgaggttgatggattgcctgaagattttgactggagggagaagggtggagttactgaggttaagaatcaaggtgcatgtggatcgtgctgggcttttagcacaacgggagcagctgaaggagcccatttcgtctccaccgggaagctcctcagtcttagcgaacaacaacttgtcgattgtgatcaagcggtcttcgatccaaaggacaagaaagcatgcgacaatggatgtggcgggggactgatgacaaatgcctacgagtatttgatggaggcaggaggattagaagaagaaagatcatatccttacactggtaaacgaggccattgcaagtttgatcctgagaaggttgcggtaagagtactgaacttcacgactataccactggatgagaaccaaatcgcagcaaacttagttcggcatggtcccttagcagtgggattaaacgccgtgttcatgcaaacatatataggaggagtgtcatgtccgcttatatgcagcaagcgaaacgttaaccacggagtacttcttgttgggtacggatcaaaagggttttcgatcttgcggcttagtaataaaccttattggattatcaaaaactcgtgggggaaaaagtggggagagaatggatactacaagctgtgtcgtgggcacgatatatgtgggattaactcgatggtatctgcagtagccacccaagtttcctcgtag

SEQ ID NO: 87094 - protein, 368 aa, Arabidopsis thaliana
  peptide (1)..(368): Ceres Seq. ID no. 12697267
MVAKALAQLITCIILFCHVVASVEDLTIRQVTADNRRIRPNLLGTHTESKFRLFMSDYGKNYSTREEYIHRLGIFAKNVLKAAEHQMMDPSAVHGVTQFSDLTEEEFKRMYTGVADVGGSRGGTVGAEAPMVEVDGLPEDFDWREKGGVTEVKNQGACGSCWAFSTTGAAEGAHFVSTGKLLSLSEQQLVDCDQAVFDPKDKKACDNGCGGGLMTNAYEYLMEAGGLEEERSYPYTGKRGHCKFDPEKVAVRVLNFTTIPLDENQIAANLVRHGPLAVGLNAVFMQTYIGGVSCPLICSKRNVNHGVLLVGYGSKGFSILRLSNKPYWIIKNSWGKKWGENGYYKLCRGHDICGINSMVSAVATQVSS

SEQ ID NO: 87095 - protein, 314 aa, Arabidopsis thaliana
  peptide (1)..(314): Ceres Seq. ID no. 12697268
MSDYGKNYSTREEYIHRLGIFAKNVLKAAEHQMMDPSAVHGVTQFSDLTEEEFKRMYTGVADVGGSRGGTVGAEAPMVEVDGLPEDFDWREKGGVTEVKNQGACGSCWAFSTTGAAEGAHFVSTGKLLSLSEQQLVDCDQAVFDPKDKKACDNGCGGGLMTNAYEYLMEAGGLEEERSYPYTGKRGHCKFDPEKVAVRVLNFTTIPLDENQIAANLVRHGPLAVGLNAVFMQTYIGGVSCPLICSKRNVNHGVLLVGYGSKGFSILRLSNKPYWIIKNSWGKKWGENGYYKLCRGHDICGINSMVSAVATQVSS

SEQ ID NO: 87096 - protein, 282 aa, Arabidopsis thaliana
  peptide (1)..(282): Ceres Seq. ID no. 12697269
MMDPSAVHGVTQFSDLTEEEFKRMYTGVADVGGSRGGTVGAEAPMVEVDGLPEDFDWREKGGVTEVKNQGACGSCWAFSTTGAAEGAHFVSTGKLLSLSEQQLVDCDQAVFDPKDKKACDNGCGGGLMTNAYEYLMEAGGLEEERSYPYTGKRGHCKFDPEKVAVRVLNFTTIPLDENQIAANLVRHGPLAVGLNAVFMQTYIGGVSCPLICSKRNVNHGVLLVGYGSKGFSILRLSNKPYWIIKNSWGKKWGENGYYKLCRGHDICGINSMVSAVATQVSS

SEQ ID NO: 87097 - DNA, 1788 bp, Arabidopsis thaliana
  misc_feature (1)..(1788): Ceres Seq. ID no. 12697302
  misc_feature (1)..(1788): Ortholog of  Ceres SEQ ID NO 13598865 as cited in SEQ ID NO 0
atggaggaaaccgtggagacagcggactccgtcatcagaaaatgggacccgaacacgccttccttcaccaagattgtctctctgttcaaccatagcaggaaggaggctaaagagttcatcagatgtgtccgtgatttgcgcagagcgatgcactttcttgtctctcaagactctcaatctccaaagcttgctctagctcagaccctgatgcagatcgccatggcaaggctcgaaaaagagttcttccagatattatcttcaaacagagacaagcttgatcctgaatcagtttccggtcaatcctcaatctccagcaattctgaatttgaagatgttatgggatctgacgacgacgatgaaagtgacaatgagatgaggaaagctggcgaatcgatcactcaggttgagaaagcttcagctatggtgatgtctgaccttaaggcgatagcagagagtatgataagttgcggatatggtaaggagtgcgtaaagatttataagcgggtcagaaaatctattgtagatgaagggctgagcttgctcgggattgaaatctacaaaggctccagatttcacagaacggactgggtcacgctcgagcatatgatcaagaactggataaaagctgcaaagattggcattgccacgctcttccgtggagagaaacttctttgtgatcatgtcttttctgcttccaattcaacaagggagtcatgcttctacgagattgcaaacgaagcagccactaaccttttcaagttccctgaatttgttgccaaggagaagaaatcgcacgagaggatcttcccgctaatggatctgcaggctgcaatctctgatctctggcaagacatagagatgatattccactttgatgcagtagctggtgtgaaatctcaggcgctcacatcgctgcaaaaactaaaggtctcaatccacagtgctctcacggattttgaatcaatcattcagaaagatacgacgaaagctctaacacctggaggagggattcataaactgacacgatcaacaatgaacttcatctcttccctttctaagtacagcggagtcttgtcggaaatcctagcagaccatccactcccgagaaacactcgcctgctggaatcctatgtcagagctccaatttcggaagatgaacaacacaatcacgcactctctgtccattttgcttggctaatcctggttttgctatgcaaactagacaccaaagcagagcattacaaggatgtttctttgtcttaccttttccttgcaaacaaccttcagatcatcattgaaacggttggttcaactcccctaaggaatctccttggagatgattggctcaataagcacgaagataaactctgcgcttatgctgggaattatgagatagcagcatggtccaatgttttcatgtctttaccagaagaacccacagacctatcaccagaggaagctaaaatatatttcagaagatttcacacggcatttgaggaagcatatatgaaacaatcatcacgagttgtaccaaatgcgaaacttagggacgaactaaaggtttcaatagcaaagaaacttgtaccagaatacagagagttttacaggaagtacttaccaatgctcggccaggagagaaacattgagatcttggtgagattcaagccagataatttggagaattacatctctgatcttttccacggtacaccaattcatgcatcctcttctttttcttcatcttcttcctcttcatcctggaaatcacttgggtgtgtttcaggctga

SEQ ID NO: 87098 - protein, 595 aa, Arabidopsis thaliana
  peptide (1)..(595): Ceres Seq. ID no. 12697303
MEETVETADSVIRKWDPNTPSFTKIVSLFNHSRKEAKEFIRCVRDLRRAMHFLVSQDSQSPKLALAQTLMQIAMARLEKEFFQILSSNRDKLDPESVSGQSSISSNSEFEDVMGSDDDDESDNEMRKAGESITQVEKASAMVMSDLKAIAESMISCGYGKECVKIYKRVRKSIVDEGLSLLGIEIYKGSRFHRTDWVTLEHMIKNWIKAAKIGIATLFRGEKLLCDHVFSASNSTRESCFYEIANEAATNLFKFPEFVAKEKKSHERIFPLMDLQAAISDLWQDIEMIFHFDAVAGVKSQALTSLQKLKVSIHSALTDFESIIQKDTTKALTPGGGIHKLTRSTMNFISSLSKYSGVLSEILADHPLPRNTRLLESYVRAPISEDEQHNHALSVHFAWLILVLLCKLDTKAEHYKDVSLSYLFLANNLQIIIETVGSTPLRNLLGDDWLNKHEDKLCAYAGNYEIAAWSNVFMSLPEEPTDLSPEEAKIYFRRFHTAFEEAYMKQSSRVVPNAKLRDELKVSIAKKLVPEYREFYRKYLPMLGQERNIEILVRFKPDNLENYISDLFHGTPIHASSSFSSSSSSSSWKSLGCVSG

SEQ ID NO: 87099 - protein, 546 aa, Arabidopsis thaliana
  peptide (1)..(546): Ceres Seq. ID no. 12697304
MHFLVSQDSQSPKLALAQTLMQIAMARLEKEFFQILSSNRDKLDPESVSGQSSISSNSEFEDVMGSDDDDESDNEMRKAGESITQVEKASAMVMSDLKAIAESMISCGYGKECVKIYKRVRKSIVDEGLSLLGIEIYKGSRFHRTDWVTLEHMIKNWIKAAKIGIATLFRGEKLLCDHVFSASNSTRESCFYEIANEAATNLFKFPEFVAKEKKSHERIFPLMDLQAAISDLWQDIEMIFHFDAVAGVKSQALTSLQKLKVSIHSALTDFESIIQKDTTKALTPGGGIHKLTRSTMNFISSLSKYSGVLSEILADHPLPRNTRLLESYVRAPISEDEQHNHALSVHFAWLILVLLCKLDTKAEHYKDVSLSYLFLANNLQIIIETVGSTPLRNLLGDDWLNKHEDKLCAYAGNYEIAAWSNVFMSLPEEPTDLSPEEAKIYFRRFHTAFEEAYMKQSSRVVPNAKLRDELKVSIAKKLVPEYREFYRKYLPMLGQERNIEILVRFKPDNLENYISDLFHGTPIHASSSFSSSSSSSSWKSLGCVSG

SEQ ID NO: 87100 - protein, 526 aa, Arabidopsis thaliana
  peptide (1)..(526): Ceres Seq. ID no. 12697305
MQIAMARLEKEFFQILSSNRDKLDPESVSGQSSISSNSEFEDVMGSDDDDESDNEMRKAGESITQVEKASAMVMSDLKAIAESMISCGYGKECVKIYKRVRKSIVDEGLSLLGIEIYKGSRFHRTDWVTLEHMIKNWIKAAKIGIATLFRGEKLLCDHVFSASNSTRESCFYEIANEAATNLFKFPEFVAKEKKSHERIFPLMDLQAAISDLWQDIEMIFHFDAVAGVKSQALTSLQKLKVSIHSALTDFESIIQKDTTKALTPGGGIHKLTRSTMNFISSLSKYSGVLSEILADHPLPRNTRLLESYVRAPISEDEQHNHALSVHFAWLILVLLCKLDTKAEHYKDVSLSYLFLANNLQIIIETVGSTPLRNLLGDDWLNKHEDKLCAYAGNYEIAAWSNVFMSLPEEPTDLSPEEAKIYFRRFHTAFEEAYMKQSSRVVPNAKLRDELKVSIAKKLVPEYREFYRKYLPMLGQERNIEILVRFKPDNLENYISDLFHGTPIHASSSFSSSSSSSSWKSLGCVSG

SEQ ID NO: 87101 - DNA, 933 bp, Arabidopsis thaliana
  misc_feature (1)..(933): Ceres Seq. ID no. 12697331
  misc_feature (1)..(933): Ortholog of  Ceres SEQ ID NO 14316459 as cited in SEQ ID NO 57754
attggccatcgaacacaccacacagagaaaacaatatgagcaatcatcaaactcaggtgttgaagctattggagccatggtgtgaacttaaagacaaagtggttcttgtgacaggagcttcctctggtattggaagagagatctgtcttgatcttgccaaagctggttgccaggttattgcagcagctcgtcgtgttgatcgactcaactctctctgctctgaaatcaacagcttcagttcaactggaatccaagccgcagctcttgagttagacgtttcatcagacgcagccaccattcaaaaagcggtcagggaagcttgggacatctttggaaagatcgatgcattgatcaacaatgctggaatcagaggcaatgtcaagtcgagtttggatttgtcagaggacgaatgggacaacgtcttcaagaccaacttaaagggtccttggttagtatccaaacatgtttgtatgttaatgcgtgacgctaaacgaggtggctcggtgataaacatctcatcgatcgccgggatccggggtatgttgcccggtggacttgcttatgcttgttccaaaggcggtgttgacaccatgtcaaggatgatggcacttgagttaggtgttcataagatcagagtgaactcgatcgcaccggggcttttcaagtcagagatcacacaaggtcttatgcaaaaggagtggctcaagaatgttaccgagaggactgtgccgttaaaggtgcaacagaccgttgatccagggcttacttctctggttcgctatctcattcatgactcttctcaatatatatccgggaatacatacattgttgattccggtgctacattgcccggtgtgcctatcttttcatctctctgaaaatcgaaccttataatatcttatcttgtgcaataataagtgaatacatttactc

SEQ ID NO: 87102 - protein, 291 aa, Arabidopsis thaliana; identical to SEQ ID NO: 21598
  peptide (1)..(291): Ceres Seq. ID no. 12697332

SEQ ID NO: 87103 - protein, 280 aa, Arabidopsis thaliana; identical to SEQ ID NO: 21599
  peptide (1)..(280): Ceres Seq. ID no. 12697333

SEQ ID NO: 87104 - DNA, 1791 bp, Arabidopsis thaliana
  misc_feature (1)..(1791): Ceres Seq. ID no. 12697337
  misc_feature (1)..(1791): Ortholog of  Ceres SEQ ID NO 15170272 as cited in SEQ ID NO 54941
atggtgctgtcgaacaagaagctgaagcagaggattcgacaagatttggctgaatcactatctgtctctgtatccgaaacaaatccacaatctcagtctctgaaattgctccttgattcatctagccacaaacccagattgtcgaagagagagaaacgaagaaattgcgaaactttcgctagagaagacgacgaaatcagagagaatgaagttgggaatggtgggtcaagcgagaagactgatacgaagattaaaaagaagagaaagagagacgatgctgtggaagtcgacgagttagaaggagatgaaggaactaaggaagagcaaaaaccccagaagaagaaaaataagaagaagaagaagaagagaaaggtaaacaaaacgccaaagaaggctgaggaaggcaatgtagaagagaaggtgaaggtagaagagattgaagttaatacagacaataaagaagaagatggggttgttcctaacaagttatatgttgggggtattccttatcagagtacagaagatgagattcgtagctactttagaagctgtggagtcatcattaaagttgattgcaagatgcgtcctgaagatggggctttcagtggtattgccttcatcacttttgacactgaagatggcgcaaaacgtgctttggcttttgatagagctctgggtgatcgatatttgacaatccagcaatacgtgaaaaccaccaccccttccattccaagaaggaaaacatcttctggtttcgctccagaaatggtggatggctataacagggtatacattgggaatttagcctgggacacaacagagcgtgacatacggaagctcttctctgactgcgtaataaactctgtgcggttgggtaaaaacaaagaaacaggagagtttaaagggtatgcgcatgtggatttcaaggatagtgtgtctgtggcgattgcgctgaagctggatcagcaggttatttgcggaagacctgtcaagatatgttgtgcacttaaagacagaccagctactgatcatacacctggtgaaacgaacaatgctggttcgtacaacatggaagatacttatgctgctgctgatccagtaccggctttagctgggcgtagcgaagttgatgacggaaactactttgcaactacggttagcagcagtaaggtcaaaaggagggtctgttatgagtgtggagaaaagggtcatctttctacagcctgtcccataaagcttcaaaaggctgatgatcaggcaaactcaaagctgggtcaagagactgttgatggtagaccggctatgcaaagctatggtcttccaaagaatagtggtgattcttactacatgaatgagacatacgcttctacaaatgaaacttataatggaggatactcagcatctgctgttggcactggtaaggtcaaaaggaggaactgttatgagtgtggagaaaagggtcatctttctacagcctgtcccataaagcttcaaaacacttctcacacaaactcaacgctggatcaccaaactgttgaggcaggaccgactcaggtaacaagctatagtcttcaaaagaaaacaagagacactgaaaacaatggtggttcgttcatggatgagagctatgctactgttccgatatccattgatgtgacaaatggagctaatgatgcaagcttaacatctgcggttagcactggtaagatcaaaaagagaaactgttacgagtgcggagaaaaaggtcatctttcttcagcttgccctaacaagctgcaaaaacaaggctga

SEQ ID NO: 87105 - protein, 596 aa, Arabidopsis thaliana
  peptide (1)..(596): Ceres Seq. ID no. 12697338
MVLSNKKLKQRIRQDLAESLSVSVSETNPQSQSLKLLLDSSSHKPRLSKREKRRNCETFAREDDEIRENEVGNGGSSEKTDTKIKKKRKRDDAVEVDELEGDEGTKEEQKPQKKKNKKKKKKRKVNKTPKKAEEGNVEEKVKVEEIEVNTDNKEEDGVVPNKLYVGGIPYQSTEDEIRSYFRSCGVIIKVDCKMRPEDGAFSGIAFITFDTEDGAKRALAFDRALGDRYLTIQQYVKTTTPSIPRRKTSSGFAPEMVDGYNRVYIGNLAWDTTERDIRKLFSDCVINSVRLGKNKETGEFKGYAHVDFKDSVSVAIALKLDQQVICGRPVKICCALKDRPATDHTPGETNNAGSYNMEDTYAAADPVPALAGRSEVDDGNYFATTVSSSKVKRRVCYECGEKGHLSTACPIKLQKADDQANSKLGQETVDGRPAMQSYGLPKNSGDSYYMNETYASTNETYNGGYSASAVGTGKVKRRNCYECGEKGHLSTACPIKLQNTSHTNSTLDHQTVEAGPTQVTSYSLQKKTRDTENNGGSFMDESYATVPISIDVTNGANDASLTSAVSTGKIKKRNCYECGEKGHLSSACPNKLQKQG

SEQ ID NO: 87106 - protein, 403 aa, Arabidopsis thaliana
  peptide (1)..(403): Ceres Seq. ID no. 12697339
MRPEDGAFSGIAFITFDTEDGAKRALAFDRALGDRYLTIQQYVKTTTPSIPRRKTSSGFAPEMVDGYNRVYIGNLAWDTTERDIRKLFSDCVINSVRLGKNKETGEFKGYAHVDFKDSVSVAIALKLDQQVICGRPVKICCALKDRPATDHTPGETNNAGSYNMEDTYAAADPVPALAGRSEVDDGNYFATTVSSSKVKRRVCYECGEKGHLSTACPIKLQKADDQANSKLGQETVDGRPAMQSYGLPKNSGDSYYMNETYASTNETYNGGYSASAVGTGKVKRRNCYECGEKGHLSTACPIKLQNTSHTNSTLDHQTVEAGPTQVTSYSLQKKTRDTENNGGSFMDESYATVPISIDVTNGANDASLTSAVSTGKIKKRNCYECGEKGHLSSACPNKLQKQG

SEQ ID NO: 87107 - protein, 341 aa, Arabidopsis thaliana
  peptide (1)..(341): Ceres Seq. ID no. 12697340
MVDGYNRVYIGNLAWDTTERDIRKLFSDCVINSVRLGKNKETGEFKGYAHVDFKDSVSVAIALKLDQQVICGRPVKICCALKDRPATDHTPGETNNAGSYNMEDTYAAADPVPALAGRSEVDDGNYFATTVSSSKVKRRVCYECGEKGHLSTACPIKLQKADDQANSKLGQETVDGRPAMQSYGLPKNSGDSYYMNETYASTNETYNGGYSASAVGTGKVKRRNCYECGEKGHLSTACPIKLQNTSHTNSTLDHQTVEAGPTQVTSYSLQKKTRDTENNGGSFMDESYATVPISIDVTNGANDASLTSAVSTGKIKKRNCYECGEKGHLSSACPNKLQKQG

SEQ ID NO: 87108 - DNA, 1192 bp, Arabidopsis thaliana
  misc_feature (1)..(1192): Ceres Seq. ID no. 12697376
  misc_feature (1)..(1192): Ortholog of  Ceres SEQ ID NO 13584646 as cited in SEQ ID NO 60715
attagagaagaaaaaaagaatggcgaatccttggtgggtagggaatgttgcgatcggtggagttgagagtccagtgacgtcatcagctccttctttgcaccacagaaacagtaacaacaacaacccaccgactatgactcgttcggatccaagattggaccatgacttcaccaccaacaacagtggaagccctaatacccagactcagagccaagaagaacagaacagcagagacgagcaaccagctgttgaacccggatccggatccgggtctacgggtcgtcgtcctagaggtagacctcctggttccaagaacaaaccaaagagtccagttgttgttaccaaagaaagccctaactctctccagagccatgttcttgagattgctacgggagctgacgtggcggaaagcttaaacgcctttgctcgtagacgcggccggggcgtttcggtgctgagcggtagtggtttggttactaatgttactctgcgtcagcctgctgcatccggtggagttgttagtttacgtggtcagtttgagatcttgtctatgtgtggggcttttcttcctacgtctggctctcctgctgcagccgctggtttaaccatttacttagctggagctcaaggtcaagttgtgggaggtggagttgctggcccgcttattgcctctggacccgttattgtgatagctgctacgttttgcaatgccacttatgagaggttaccgattgaggaagaacaacagcaagagcagccgcttcaactagaagatgggaagaagcagaaagaagagaatgatgataacgagagtgggaataacggaaacgaaggatcgatgcagccgccgatgtataatatgcctcctaattttatcccaaatggtcatcaaatggctcaacacgacgtgtattggggtggtcctccgcctcgtgctcctccttcgtattgattagttagataggcggtggttggtgcgttctttttactggaatgattatattttccattaggatggttaggcttttgtttattaaagctatcaagtttcttttttttttacggataattcggatgacaattagctagtgtttgtttgtttgttttgtggcggcttttctgacttgactattttgatcgcggatagctttgtatgaaagtgaattgattgtagaatcgtcttttgaatttt

SEQ ID NO: 87109 - protein, 316 aa, Arabidopsis thaliana; identical to SEQ ID NO: 43621
  peptide (1)..(316): Ceres Seq. ID no. 12697377

SEQ ID NO: 87110 - protein, 310 aa, Arabidopsis thaliana; identical to SEQ ID NO: 43622
  peptide (1)..(310): Ceres Seq. ID no. 12697378

SEQ ID NO: 87111 - protein, 272 aa, Arabidopsis thaliana; identical to SEQ ID NO: 43623
  peptide (1)..(272): Ceres Seq. ID no. 12697379

SEQ ID NO: 87112 - DNA, 1644 bp, Arabidopsis thaliana
  misc_feature (1)..(1644): Ceres Seq. ID no. 12697392
  misc_feature (1)..(1644): Ortholog of  Ceres SEQ ID NO 13646221 as cited in SEQ ID NO 20310
  misc_feature (1)..(1644): Ortholog of  Ceres SEQ ID NO 14311423 as cited in SEQ ID NO 53911
  misc_feature (1)..(1644): Ortholog of  Ceres SEQ ID NO 14315261 as cited in SEQ ID NO 58451
atggattcttcttcctcttcctcttcttcttctccttcttcttcctacggtgttgctcgtgtcagccatatctccaatccttgcatcttcggggaagttgggtcgtcatcttcgtcaacgtatagagataagaaatggaagttgatgaaatgggtgagtaaacttttcaagagtggctcgaatggtggtggtagtggtgctcacactaatcatcatcctcctcagtttcaagaagacgagaatatggtctttcctctacctccttcttctttggatgatcggtcaagaggtgcacgggacaaagaagaactcgaccgttcaatttcactttctctagctgacaacacgaagcgcccacatgggtatggttggtctatggataacaaccgagattttccaaggccttttcacggtggcttgaatccatcatctttcattccaccttatgagccttcctatcaatatagacgaagacaaagccatttccaagtgcacattggtaacgtggtttacgtgatttttagcagaatatgtggcggttgcaatagcgatattggatcggggaactatctaggatgcatgggcacattctttcatcctgaatgcttccgttgccattcttgtggttatgctatcactgagcatgagttctctctgtcaggaaccaaaccctatcataagctttgtttcaaagagcttactcatcccaaatgcgaagtttgtcaccattttataccaactaatgatgctggcttgatcgagtatcgatgccatccgttttggaaccaaaagtattgcccgtctcacgaatatgataaaactgctcgttgttgtagctgcgaacgtttggagtcatgggatgtgagatattacacgttagaggatgggagaagtttgtgtttagaatgtatggaaaccgcgataaccgatactggagaatgtcaaccgctttaccacgctataagagactattacgaaggaatgtacatgaaacttgatcaacagattcctatgcttcttgttcaaagagaagctctcaatgatgctatcgtaggagagaaaaacggataccatcacatgcctgagacaagaggtttatgcttgtctgaagaacaaacagttacaagtgttcttagaagaccgagacttggtgctcaccgtcttgttggtatgagaactcagcctcaaaggcttacacgcaaatgtgaagtcacagcgattctagttctttacgggctcccgcgattactgaccggagcaattctcgcccatgagctcatgcatggatggctaaggcttaatggtacatactggtttaggaaccttaaccctgaggtagaggaaggaatctgccaagtcctctcttacatgtggcttgaatctgaagttctctcagatccttcaacaagaaacttgccttcaacatcatcggtggccacatcatcatcatcatccttctcgaacaagaaaggaggaaaatcaaacgtggagaagaaacttggagagttctttaaacatcagatagctcatgatgcgtctccagcttatggaggaggtttcagggcagcaaatgcagcggcttgtaagtacggtcttcgtcgaacactcgatcatatccgcttaactggaacttttcctttgtga

SEQ ID NO: 87113 - protein, 547 aa, Arabidopsis thaliana
  peptide (1)..(547): Ceres Seq. ID no. 12697393
MDSSSSSSSSSPSSSYGVARVSHISNPCIFGEVGSSSSSTYRDKKWKLMKWVSKLFKSGSNGGGSGAHTNHHPPQFQEDENMVFPLPPSSLDDRSRGARDKEELDRSISLSLADNTKRPHGYGWSMDNNRDFPRPFHGGLNPSSFIPPYEPSYQYRRRQSHFQVHIGNVVYVIFSRICGGCNSDIGSGNYLGCMGTFFHPECFRCHSCGYAITEHEFSLSGTKPYHKLCFKELTHPKCEVCHHFIPTNDAGLIEYRCHPFWNQKYCPSHEYDKTARCCSCERLESWDVRYYTLEDGRSLCLECMETAITDTGECQPLYHAIRDYYEGMYMKLDQQIPMLLVQREALNDAIVGEKNGYHHMPETRGLCLSEEQTVTSVLRRPRLGAHRLVGMRTQPQRLTRKCEVTAILVLYGLPRLLTGAILAHELMHGWLRLNGTYWFRNLNPEVEEGICQVLSYMWLESEVLSDPSTRNLPSTSSVATSSSSSFSNKKGGKSNVEKKLGEFFKHQIAHDASPAYGGGFRAANAAACKYGLRRTLDHIRLTGTFPL

SEQ ID NO: 87114 - protein, 499 aa, Arabidopsis thaliana
  peptide (1)..(499): Ceres Seq. ID no. 12697394
MKWVSKLFKSGSNGGGSGAHTNHHPPQFQEDENMVFPLPPSSLDDRSRGARDKEELDRSISLSLADNTKRPHGYGWSMDNNRDFPRPFHGGLNPSSFIPPYEPSYQYRRRQSHFQVHIGNVVYVIFSRICGGCNSDIGSGNYLGCMGTFFHPECFRCHSCGYAITEHEFSLSGTKPYHKLCFKELTHPKCEVCHHFIPTNDAGLIEYRCHPFWNQKYCPSHEYDKTARCCSCERLESWDVRYYTLEDGRSLCLECMETAITDTGECQPLYHAIRDYYEGMYMKLDQQIPMLLVQREALNDAIVGEKNGYHHMPETRGLCLSEEQTVTSVLRRPRLGAHRLVGMRTQPQRLTRKCEVTAILVLYGLPRLLTGAILAHELMHGWLRLNGTYWFRNLNPEVEEGICQVLSYMWLESEVLSDPSTRNLPSTSSVATSSSSSFSNKKGGKSNVEKKLGEFFKHQIAHDASPAYGGGFRAANAAACKYGLRRTLDHIRLTGTFPL

SEQ ID NO: 87115 - protein, 466 aa, Arabidopsis thaliana
  peptide (1)..(466): Ceres Seq. ID no. 12697395
MVFPLPPSSLDDRSRGARDKEELDRSISLSLADNTKRPHGYGWSMDNNRDFPRPFHGGLNPSSFIPPYEPSYQYRRRQSHFQVHIGNVVYVIFSRICGGCNSDIGSGNYLGCMGTFFHPECFRCHSCGYAITEHEFSLSGTKPYHKLCFKELTHPKCEVCHHFIPTNDAGLIEYRCHPFWNQKYCPSHEYDKTARCCSCERLESWDVRYYTLEDGRSLCLECMETAITDTGECQPLYHAIRDYYEGMYMKLDQQIPMLLVQREALNDAIVGEKNGYHHMPETRGLCLSEEQTVTSVLRRPRLGAHRLVGMRTQPQRLTRKCEVTAILVLYGLPRLLTGAILAHELMHGWLRLNGTYWFRNLNPEVEEGICQVLSYMWLESEVLSDPSTRNLPSTSSVATSSSSSFSNKKGGKSNVEKKLGEFFKHQIAHDASPAYGGGFRAANAAACKYGLRRTLDHIRLTGTFPL

SEQ ID NO: 87116 - DNA, 1361 bp, Arabidopsis thaliana
  misc_feature (1)..(1361): Ceres Seq. ID no. 12697417
  misc_feature (1)..(1361): Ortholog of  Ceres SEQ ID NO 14307233 as cited in SEQ ID NO 54395
  misc_feature (1)..(1361): Ortholog of  Ceres SEQ ID NO 14306986 as cited in SEQ ID NO 54853
gaacttctgaagcgaaaaaaagagagaattaaagtcattcattatttggggaatggagaagaagctcctttcctacagacgccatcattaacaacatcctcttaagcttctgcgattctctccgtttgtcggaagatttcacgacgattcttcaatccttatccgaaccggagaaatcatgtcggacgctttgatcaatggattggctggagctggtggtgggatcattgctcagcttctcacttatcctcttcaaactgtaaatacgcgccaacagacggagcgggatctgaagagggagaagaggaaacttggaactatcgaacacatgtgtcaggttgtcaaacaagaaggatgggagaggttatatggtggattggcgccgtctcttgctggaacggctgcatcacagggtgtgtactactacttctaccaagtgtttcggaatcgagctgaagccacagctcttgcacggaagaagaaaggtttgggtgacggatcagttgggatgtttgcttcacttttagtggctgcctttgccggatcggttaatgttcttatgacgaatccgatttgggtgattgttacgcgtatgcagacccacagaaaaatgacaaaagatcaaacagcggcccccgagtcaccttcttctaatgcagaagctctggttgctgttgagccgcgtccatatgggacctttaatacgattcgagaggtttacgatgaagctggaataactggcttctggaaaggtgtaattccaacattgatcatggtaagtaatccgtcaatgcaatttatgttgtacgagacaatgctaaccaagctgaagaaaaagcgtgccttgaagggtagcaacaacgttaccgctttggagacatttcttctcggagctgtggcgaaactcggagctacagtcacaacttaccctctcttggttgtaaagtcgcgacttcaagccaaacaggtcacaacaggggacaaaagacaacaatacaaaggaacattggacgcgattctgaaaatgattcgatatgaagggctttacgggttttataaagggatgagcacaaagattgtgcagagcgttttagctgctgcggttctgttcatgatcaaggaagagcttgtcaagggagctaagctgttgctctcaaacgctacctctagctaagtcaagtccaagccttcttgaatgaacgctagtagttagaaataaataaaaatagattaaatttccaatagttttcttgattaattattacactattgggattgttgttcatttcctgatgattgcaattgattattgtaatttctgcaagattctttagtaatgaaatctgaataaagtttggcag

SEQ ID NO: 87117 - protein, 331 aa, Arabidopsis thaliana; identical to SEQ ID NO: 27131
  peptide (1)..(331): Ceres Seq. ID no. 12697418

SEQ ID NO: 87118 - protein, 281 aa, Arabidopsis thaliana; identical to SEQ ID NO: 27132
  peptide (1)..(281): Ceres Seq. ID no. 12697419

SEQ ID NO: 87119 - protein, 221 aa, Arabidopsis thaliana; identical to SEQ ID NO: 27133
  peptide (1)..(221): Ceres Seq. ID no. 12697420

SEQ ID NO: 87120 - DNA, 1513 bp, Arabidopsis thaliana
  misc_feature (1)..(1513): Ceres Seq. ID no. 12697421
  misc_feature (1)..(1513): Ortholog of  Ceres SEQ ID NO 15172093 as cited in SEQ ID NO 54938
aaattcaaaatttaacacacaaacacaaacacacacaccaaaaaaaacacagaccttaaaaaaataaaaatggttgatatggattggaagaggaagatggtatcatcagatttaccaaactcacctaagctttcttcaaagcttcacgtaactattccatcaccgttcaaaatcgtccctgtttcatctccgatctcatgttcagcacctgctctttgctctgcttacgagctttaccttcgtctccctgagctaagaaagctctggtcatctcgtgattttcctcaatggacatcagagccgattctcaaaccagctcttcaagctttggagatcagtttcagattagttttcgccgtttgttctgatactagaccgtacatcaaccaccgtgaatggaaccggaggctagattctctcatcacgaagcagatccagcttgtagcagcgatctgcgaagatgaagaagaagaaggtatatcagcggaggctccggtcggcggtggacggagttcgttgagtttgttaccgcagctagctacgtggaggagatcagaggctttggggaagaagatcttatatacgatcgataacgagatgagtcggtgtaagtacacgctcggactcggtgaacaaaacatcgccggaaaaccaaatctccggtacgatgcgatttgccgaccaaacgagatctatagcctcaaggataatccatacgcagatcatatcgataatcacgagaatcaaactctctatatcattcaccagatcctcgaatcgtggatctacgcatctggaaatcttctgaatcgaatcgtctcaagtatcgaagaagagaaattcggaaaagcttcaaacgatgtttacttgctggagaagatctggaaaattttagcggagattgaagatcttcatatgttgatggatccggaagattttttgaaattgaagaaacagttacagatcaaatcgacgggtaaaaacgatgcgttttgtttcagatctaaaggattagtggagatgatgaagatgtcgaaagatctgagacagaaagtaccggcggtcttggcggttgaggtagatccaaccggaggaccaagattacaagaggcggcgatgaagctttacgcgaggaagacagagtgcgataagattcatttgcttcaggggatgcaagcggtggaagcggcggcgaagagtttcttctttgggtataggcagttagtggcggctatgatgggaagtgcggagatgaacgcgacggcgagtcaagagtcgtgtgactcactgagtcagatatttatggagccgacgtatttcccgagccttgacgcggcaaagacgtttctgggagagttttggagtcatttgggatgattaaattttaatttctgctggtataattatttaatataaatttaaattggtggtttggtttaatttagtttgtaagatagtgaaatttttggaacatttgacgatccatatttgaatacaaattcatttttatatg

SEQ ID NO: 87121 - protein, 435 aa, Arabidopsis thaliana; identical to SEQ ID NO: 22980
  peptide (1)..(435): Ceres Seq. ID no. 12697422

SEQ ID NO: 87122 - protein, 432 aa, Arabidopsis thaliana; identical to SEQ ID NO: 22981
  peptide (1)..(432): Ceres Seq. ID no. 12697423

SEQ ID NO: 87123 - protein, 426 aa, Arabidopsis thaliana; identical to SEQ ID NO: 22982
  peptide (1)..(426): Ceres Seq. ID no. 12697424

SEQ ID NO: 87124 - DNA, 1778 bp, Arabidopsis thaliana
  misc_feature (1)..(1778): Ceres Seq. ID no. 12697459
  misc_feature (1)..(1778): Ortholog of  Ceres SEQ ID NO 14307374 as cited in SEQ ID NO 54073
gctttttctgattgcttctctgatctcttatctctaattctaatccatagtaaactcgatttcatcatcttctgctcacaacacttactgttgttgttgttgttgttattgttcttctcgattcactcgatcgatgttgttcaaaatgcgttcttttgtggcttttgtgctccttctgagctggttcggttcgtgttgttctctcaaggaccaagctgtagattttctcaaaagtgaagatagtttaaagaaagatctatcgtcagatgaagattccacgtatttgaaagcttttggatttcacaggaaaacacttgtccgtaacccttacaaagacttgccttcaagaaaagaccgcaaaaaccgtgttgtggctgcaactacaacaccatcatcatccccagaacctgctccaaaacatgtttcaactaaagcttcaacagtttcagagccacaaaagagatcatctacacaagatgtttcaccttctccatctgcgccacttgcaaactctcccattccaagaaactctcattcttctgttcctttagttgttggctgcgtaggcggtgctttttttcttctccttgtagctaccggtctctactttttcacaagtaaggccgggaaaactgtgaatccttggcgtactggtcttagtggacaacttcagaaagtattcgttactggtattcctgtactcaaaagatctgagattgaagctgcatgtgaagattttagtaatgtcattggatcttgtcccattgggaagttgttcaaaggaacattatcaagtggagtggagattgctgttgcttcttttgctactactactgccaaagactggaaggacagtacagaaattcacttcaggaagaagatcgaaatgttatcgaagatcaaccacaagaattttgcaaaccttcttggttattgtgaagaaaaggaacctttcaccaggatcttgatctttgagtatgctccaaatggatcactctttgagcatttacattataaagaatcagaacacttggattggggaatgcggttaagaattgcaatgggattagcatattgccttgaccatatgcaccaactcaatccacctatagctcacaccaatctcgtctcatcatctcttcagctcacagaggattatgctgtcaaagtatcagatttcagtttcggttcatctgagacagagactaacatcaacaacaacacagtcatagacacacacatctcagccttgaatccagaagacaacatttacagctttggtttactgttattcgaaatgataaccgggaaactcatagaatccgttaacaaacctgactcagtagatagctcgctggttgatttcttaagaggagagactctagccaaaatggtagatccaacactggaatcttatgatgccaagattgagaatataggtgaagtgatcaaatcatgccttaggactgacccgaaagagagacctacaatgcaagaagtcacaggatggttacgggagatcacgggattgtcaccgaacgatgctacaccgaaattgtcacctctttggtgggcagagttggaggttttgtccacggcgtaagagagaccccttcactaataaaactgtatatattttgaagatgtgagttttgtaagtgtctgttttatttatctctcgtaatattggtaaagcaaaattgaagttctcttcaagtttagtaaatttacaaacatgtatatgataaattagtgtgcatatcggaaaaaagttcttg

SEQ ID NO: 87125 - protein, 489 aa, Arabidopsis thaliana; identical to SEQ ID NO: 41786
  peptide (1)..(489): Ceres Seq. ID no. 12697460

SEQ ID NO: 87126 - protein, 485 aa, Arabidopsis thaliana; identical to SEQ ID NO: 41787
  peptide (1)..(485): Ceres Seq. ID no. 12697461

SEQ ID NO: 87127 - DNA, 1402 bp, Arabidopsis thaliana
  misc_feature (1)..(1402): Ceres Seq. ID no. 12697462
  misc_feature (1)..(1402): Ortholog of  Ceres SEQ ID NO 15176611 as cited in SEQ ID NO 52869
  misc_feature (1)..(1402): Ortholog of  Ceres SEQ ID NO 14307408 as cited in SEQ ID NO 59419
  misc_feature (1)..(1402): Ortholog of  Ceres SEQ ID NO 12617729 as cited in SEQ ID NO 65352
attttccgtttgtgttccttgctcatttcttatctctagaaacctgtctgatttgctccgtcgcctaaaaagtctaaaaccctaagtgtctccgcctcgtagctttacccgattcaacgaagagtgaattcgcgtgagctcaagcagtatcgaaatctaccaatcatggcgagtcaaacaccgaatctcgagtgtcggatgtacgaggcgaaatacccagaggtggatatggcggtgatgatccaggtgaagaacattgccgatatgggagcttatgtttctctcctcgagtacaacaacatcgaaggcatgatccttttctccgagctctctcgtcgtcggatccgaagtgttagcagtttgattaaggtcggaagaattgagcctgtcatggttctccgtgttgacaaagagaaaggttacattgatctgagcaaacgtagagtcagcgaggaagatattcagacttgtgaagagaggtataacaagagcaaacttgttcattctatcatgcgccatgttgctgagactctttcaattgatttggaggacttgtatgtgaacattggttggcctttgtatcgacgacatggtcatgcttttgaggctttcaagatcttagtgacggatcctgattcagtgttgggtcctctcacccgtgagatcaaagaagttgggcctgatgggcaagaggtgactaaggttgtacctgctgttacggaagaagtgaaagatgcacttgtgaagaacattaggaggagaatgacaccacaaccaatgaaaatccgggctgatatcgaattgaagtgttttcagtttgatggagttgttcacattaaggaggctatgaaaaatgctgaagccgctggaaatgaagactgtcctgttaagattaaattggttgctccacctctgtatgtccttactactcagacacttgacaaggaacaagggattgaaattctaaacaaagccatagcagcatgcactgagacaattgagacacacaaaggcaagcttgtcgttaaggagggggctagagctgtgagtgaacgtgatgaaaagatgctgacagaacacatggctaagctacgtcttgacaatgaagaaatgagcggcgatgaagatagcggagacgaagaagaggacactggtatgggcgaagtggatctcgatgcaggtgccggaatcatcgagtaagattgccggatttttctttctattaaatctacccaatctcaacagtcccagtattttggtttaagctttgacaaggcagtagaaaaacctccgagaggatttatgtgctttttgatgactctgaggcattttattttacccatagggggtggttacatatcaatcatacattcatggttttataaaagatttgattctttgc

SEQ ID NO: 87128 - protein, 344 aa, Arabidopsis thaliana [sequence omitted]

SEQ ID NO: 87129 - protein, 333 aa, Arabidopsis thaliana; identical to SEQ ID NO: 29335
  peptide (1)..(333): Ceres Seq. ID no. 12697464

SEQ ID NO: 87130 - protein, 323 aa, Arabidopsis thaliana; identical to SEQ ID NO: 29336
  peptide (1)..(323): Ceres Seq. ID no. 12697465

SEQ ID NO: 87131 - DNA, 780 bp, Arabidopsis thaliana
  misc_feature (1)..(780): Ceres Seq. ID no. 12697466
  misc_feature (1)..(780): Ortholog of  Ceres SEQ ID NO 15170807 as cited in SEQ ID NO 52723
  misc_feature (1)..(780): Ortholog of  Ceres SEQ ID NO 12611846 as cited in SEQ ID NO 59904
  misc_feature (1)..(780): Ortholog of  Ceres SEQ ID NO 14303535 as cited in SEQ ID NO 68728
  misc_feature (1)..(780): Ortholog of  Ceres SEQ ID NO 12635196 as cited in SEQ ID NO 0
  misc_feature (1)..(780): Ortholog of  Ceres SEQ ID NO 15179463 as cited in SEQ ID NO 0
atgcttctcaagactgtttcttcatcttcttcttcagctctctcgctggtgaatttccatggcgtgaagaaggatgtgtctcctttgttaccttccatttcatcgaatcttcgagtttcttctggaaaatctggaaacttaactttctcttttcgcgcatctaaaagctcaaccaccgacgcgctaagcggcgttgtcttcgagccgtttaaggaagtaaaaaaggagctcgatctcgtccctaccagctctcatctctcactcgctcgacaaaagtactcagacgagtgcgaagccgccattaacgagcagatcaatgtggaatacaatgtctcgtatgtgtatcacgctatgtatgcttactttgatcgggataacatcgcgctcaaaggtcttgccaagttctttaaggaatcaagtttggaagaaagagagcatgctgagaagttaatggagtatcagaacaaacgtggtgggagggttaagttacagtccattgtaatgcctctttcagagtttgaacatgttgacaaaggagatgctctttatggcatggagcttgctctgtcactggagaaactagttaatgagaagctcttaaaccttcacagtgttgcttcgaagaacaatgatgtccacttggcagattttattgagagcgagtttctgacagagcaggtggaagcaatcaagttgatctcagaatatgtggctcaactgcgacgagttggcaaaggacacggaacatggcatttcaatcagatgcttctggaagggtaa

SEQ ID NO: 87132 - protein, 259 aa, Arabidopsis thaliana; identical to SEQ ID NO: 77941
  peptide (1)..(259): Ceres Seq. ID no. 12697467

SEQ ID NO: 87133 - protein, 142 aa, Arabidopsis thaliana; identical to SEQ ID NO: 77942
  peptide (1)..(142): Ceres Seq. ID no. 12697468

SEQ ID NO: 87134 - DNA, 845 bp, Arabidopsis thaliana
  misc_feature (1)..(845): Ceres Seq. ID no. 12697647
  misc_feature (1)..(845): Ortholog of  Ceres SEQ ID NO 14311859 as cited in SEQ ID NO 51658
  misc_feature (1)..(845): Ortholog of  Ceres SEQ ID NO 13638685 as cited in SEQ ID NO 51871
  misc_feature (1)..(845): Ortholog of  Ceres SEQ ID NO 13599200 as cited in SEQ ID NO 0
catttggtattgctgcttacgtcgtcagatctgctcgttttttcgctccatttttgggtcaccattactcagcttccgttttaaatatcacattagatggacgaaagcggaggtgatagtggttcagtggccacacctgttcaacagcgagcacatgaggcatggaggatttaccaacactatcttgacaagactacacctcatgcaaattacagatggattggaactcttgtcgtcgctcttatctactgtttgagggtttactatattcagggtttctacatcatcgcctatggtcttggaatctaccttctcaatctgcttatcgggttcttgtcccctcttgttgatcctgaagctggtggggtctctgatgggccttctctgcctactagaggttctgatgagttcaagcctttcattcgccgtctccccgagttcaaattctggtactccatgacaaaggctttctgcatagctttcctcatgacattcttctcggtgtttgacgttcctgtgttttggccaattctgctgtgctattggatcgttctctttgttctcaccatgagacgccagatcgcccacatgatcaagtacaaatacatccctttcagcttcggcaaacagaaatatggtggacggagcagcagcggctcacgtgcggattgatctgaccaatttgctgaccattagctactttttttgtctttgcaaaagagaaagaaaaaattgttaagaatatcattttggaccatttttacattgacaaaactatgcagagctataaggaagaattataggcaggataaaaaaggatggaaactaaacttgatttagctcgg

SEQ ID NO: 87135 - protein, 191 aa, Arabidopsis thaliana; identical to SEQ ID NO: 35029
  peptide (1)..(191): Ceres Seq. ID no. 12697648

SEQ ID NO: 87136 - DNA, 1292 bp, Arabidopsis thaliana
  misc_feature (1)..(1292): Ceres Seq. ID no. 12697709
  misc_feature (1)..(1292): Ortholog of  Ceres SEQ ID NO 14315461 as cited in SEQ ID NO 57150
atttccagttggaagtttaattaattagatatgaactaaagcgttacgccacggaagaatttaggatctgttcgcagcatccgtttcaacgctaaatccaaacaacaaaagaagattagcaaaatcggattatcttctttgtttcttttcccttgacaagtcttcgtttttgaattagggtttttggacaattcttctcttcttcggctgcaaaaggttttcgcaagatatggctggctctgttggtgaggaaactgagccagaatggattaagagagtgaaattagagggagctgttccatgtcttaagccagacgacaactgcaaaaatggttggacgacgccatctcctgacacatttatggttagaggaccaaagtatttctctgacaaagttaagatacctgctggtgatttccttctaaagcctctgggttttgattggattaaaggtcctaaaaagctttctgagatcctgagttatccaagcagccgaatcaggaaagttatcgatgaggagtttcaaaaagatggaactaagccttttgtctgggcattcaatctccagcttcctcacaaagacaattacagtgctgtggcttactttgttaccacagagcctatccttgaaggctccctgatggatcggtttttgaaaggagatgatgggttcaagaaatcgaggcttaaactgattgcaaacattgtcaaaggcccttggattgttagaaaagctgttggagagcaagcgatctgtgtgattggacgtgcactctcttgcaaatatgtttcaggggaaaactttgtggagattgatgtcgatattggttcttcaatggtcgctagtgccattgttcatctcgcatttggctacgttactacattgacagttgatcttgcgttcctcattgagagtcagaccgaagcagagcttccagaaaagctactaggagctgtgagattctctgagctgcagaccgagtcagccacatctatcgaactgtcctcaagcaccagtaatgaccagtgggatcaaactacctcagagcggtcgagctggtggaaatcgattggaaatggattctctaatctgcttaatcaagatacggccaacatgaacaatacttctcatggggacatccagaaggatgaacatgtacagaagcagtaagtgttttgggagttattaacttcacaattctttgaatttgttcgatttcattaccaaaaaacagaaacaaaaacttgtcaattctttaaaaaaaccacagatgtatagattggtttttact

SEQ ID NO: 87137 - protein, 313 aa, Arabidopsis thaliana
  peptide (1)..(313): Ceres Seq. ID no. 12697710
MAGSVGEETEPEWIKRVKLEGAVPCLKPDDNCKNGWTTPSPDTFMVRGPKYFSDKVKIPAGDFLLKPLGFDWIKGPKKLSEILSYPSSRIRKVIDEEFQKDGTKPFVWAFNLQLPHKDNYSAVAYFVTTEPILEGSLMDRFLKGDDGFKKSRLKLIANIVKGPWIVRKAVGEQAICVIGRALSCKYVSGENFVEIDVDIGSSMVASAIVHLAFGYVTTLTVDLAFLIESQTEAELPEKLLGAVRFSELQTESATSIELSSSTSNDQWDQTTSERSSWWKSIGNGFSNLLNQDTANMNNTSHGDIQKDEHVQKQ

SEQ ID NO: 87138 - protein, 269 aa, Arabidopsis thaliana; identical to SEQ ID NO: 38661
  peptide (1)..(269): Ceres Seq. ID no. 12697711

SEQ ID NO: 87139 - protein, 176 aa, Arabidopsis thaliana; identical to SEQ ID NO: 38662
  peptide (1)..(176): Ceres Seq. ID no. 12697712

SEQ ID NO: 87140 - DNA, 1400 bp, Arabidopsis thaliana
  misc_feature (1)..(1400): Ceres Seq. ID no. 12697736
  misc_feature (1)..(1400): Ortholog of  Ceres SEQ ID NO 13598368 as cited in SEQ ID NO 62140
aagaacaagaagaaaaaggtttgtgaaaaaaaaacaaaggcaaacatggtggagggcataccaaagagatggaaggtgctaagtggccaaaacaaatggaaaggcctgcttgatccacttgacccggatcttcgccgctacatcattcactacggcgagatgtctcaggttggttacgatgcctttaactgggaccgtaagtccagatacgccggtgattgttattactccaagaaccgactgttagctcgaaccggcttccttaaagccaaccctttcaggtacaaagtgactaagtacatctacgcaacagcttccataaagttaccaatctctttcatcgtaaagtctttgtcaaaggatgcatctcgcgtgcagactaactggatgggttacattgcggttgctacagaccagggaaaagcgatgttagggaggagagacattgttgttgcatggagaggaactctacagccatatgaatgggctaatgatttcgattttccgcttgagccagctatctcggttttcccagtaactgaccccaaagataaccctcgtattggaagtggctggctcgacatctataccgcttctgattctcgctcaccttatgacacgactagtgcacaagaacaggtacaaggagagctcaagaggttgctagaactttacaaggatgaagaaataagcatcaccttcacaggccatagcttgggcgcagttatgtcagttctatcagctgcagatcttgtctatggcaaaaagaataatatcaatataaatcttcaaaaaaagcaagttcctatcacagtttttgctttcgggagtcctcggattggagaccataacttcaaaaacgtagtcgactcactccaaccactaaacattctaagaatagtaaatgttccagatgtcgcaccacattatccactcttactgtactcagaaattggcgaggtgttagagatcaatactttgaactcaacatacctgaaacggtctctgaacttcaggaactaccataacctggagatatacctgcacggcatggcagggatgcaagatacagacggggtattcaagctggagattggccgggatatttcgttggtcaataaaggattggatgctctaaaggacgagtacttagtgccaagtacctggaggtgtctggcaaacaaagggatgcttcaaatggatgatgggacatggaagctggatgtccacaggagagatcatgatgatgatgttgatgctgatgacaatgacgactcctcaactagtaaccaactacaagagctaaatacagattagttacaaaaacttatataagattctgcacaatatgtttgtacacaaaaaaaaattcatttagaagaacaaagaatctgggaacc

SEQ ID NO: 87141 - protein, 438 aa, Arabidopsis thaliana
  peptide (1)..(438): Ceres Seq. ID no. 12697737
KNKKKKVCEKKTKANMVEGIPKRWKVLSGQNKWKGLLDPLDPDLRRYIIHYGEMSQVGYDAFNWDRKSRYAGDCYYSKNRLLARTGFLKANPFRYKVTKYIYATASIKLPISFIVKSLSKDASRVQTNWMGYIAVATDQGKAMLGRRDIVVAWRGTLQPYEWANDFDFPLEPAISVFPVTDPKDNPRIGSGWLDIYTASDSRSPYDTTSAQEQVQGELKRLLELYKDEEISITFTGHSLGAVMSVLSAADLVYGKKNNININLQKKQVPITVFAFGSPRIGDHNFKNVVDSLQPLNILRIVNVPDVAPHYPLLLYSEIGEVLEINTLNSTYLKRSLNFRNYHNLEIYLHGMAGMQDTDGVFKLEIGRDISLVNKGLDALKDEYLVPSTWRCLANKGMLQMDDGTWKLDVHRRDHDDDVDADDNDDSSTSNQLQELNTD

SEQ ID NO: 87142 - protein, 423 aa, Arabidopsis thaliana
  peptide (1)..(423): Ceres Seq. ID no. 12697738
MVEGIPKRWKVLSGQNKWKGLLDPLDPDLRRYIIHYGEMSQVGYDAFNWDRKSRYAGDCYYSKNRLLARTGFLKANPFRYKVTKYIYATASIKLPISFIVKSLSKDASRVQTNWMGYIAVATDQGKAMLGRRDIVVAWRGTLQPYEWANDFDFPLEPAISVFPVTDPKDNPRIGSGWLDIYTASDSRSPYDTTSAQEQVQGELKRLLELYKDEEISITFTGHSLGAVMSVLSAADLVYGKKNNININLQKKQVPITVFAFGSPRIGDHNFKNVVDSLQPLNILRIVNVPDVAPHYPLLLYSEIGEVLEINTLNSTYLKRSLNFRNYHNLEIYLHGMAGMQDTDGVFKLEIGRDISLVNKGLDALKDEYLVPSTWRCLANKGMLQMDDGTWKLDVHRRDHDDDVDADDNDDSSTSNQLQELNTD

SEQ ID NO: 87143 - protein, 385 aa, Arabidopsis thaliana
  peptide (1)..(385): Ceres Seq. ID no. 12697739
MSQVGYDAFNWDRKSRYAGDCYYSKNRLLARTGFLKANPFRYKVTKYIYATASIKLPISFIVKSLSKDASRVQTNWMGYIAVATDQGKAMLGRRDIVVAWRGTLQPYEWANDFDFPLEPAISVFPVTDPKDNPRIGSGWLDIYTASDSRSPYDTTSAQEQVQGELKRLLELYKDEEISITFTGHSLGAVMSVLSAADLVYGKKNNININLQKKQVPITVFAFGSPRIGDHNFKNVVDSLQPLNILRIVNVPDVAPHYPLLLYSEIGEVLEINTLNSTYLKRSLNFRNYHNLEIYLHGMAGMQDTDGVFKLEIGRDISLVNKGLDALKDEYLVPSTWRCLANKGMLQMDDGTWKLDVHRRDHDDDVDADDNDDSSTSNQLQELNTD

SEQ ID NO: 87144 - DNA, 1284 bp, Arabidopsis thaliana
  misc_feature (1)..(1284): Ceres Seq. ID no. 12697828
  misc_feature (1)..(1284): Ortholog of  Ceres SEQ ID NO 15177285 as cited in SEQ ID NO 52481
atggttccattgggttggattggtggtgtggttggtctcattcttgctactgcaatctccctttacgcaaacactcttgatatgtgctttggagctattggtgctcagaaagaggaaaaacagaacagaaagtcatatttccaccaacatactcgatcaccagtatcagagagggaagcggaatccgatcccagacgttccagcactcagaaggcgtttaatggaacgttggatctactaattccagtgataatcgtctctatcccaagggattggccgtttagagcggttattggctttaacagtcgattcttattgattagtgttttaggattaattgatctcaaaaacctattatcaactcttatcgccaagcttcatgagtttggtggcaaaagacacattcgttatagagatctcgcaggcttcatctatggtaaaaagatgtatcgtgttacatggggattgcaatatgtctatcttttcatgattaattgtgccttcatcttacttgctggttcgaccttaaaggctgtttatgtactttttagagataattgtctcatgaaactgcctcactttatcgccatcgcgggtgttgtatgtgcgattttggccatcggtattcctcatttatcagctcttggaatctggctaggagtttcaacaatccttagcataatctacattattgttgcaatagttctagcagctaaagatggagtaaacaagcctgaaagagattacaacatacaaggatcatcaataaacaaactcttaaccataacaggagcagtttgcattcaacacgggaatgctaccggaaatacaggcaattcactgttggtgttttaccgatgtatgcggttacattcatcggatattgggcttacgggtcctcgacatcgacttatctgtttaatagcgtcagtggacctctttgggtcaaagcactcgctaatatttcagcttttctccaatctgttatctctttacataacagtagcaagaggaagctacatcgcggtgagcactcttctctcggctcttttaccgtttctcggagatttcatgagcctcactggagcaataagcacgttccctctcacattcatattagcgaatcacatgtatcttgttgctatgaacgataagcttagtcttgtgcaaaagctttggcattggcttaatgtttgcttctttggattaatgtctcttgctgctgctattgctgctgttagactcatctctgtggactcccaagaacttccatgtttttgctga

SEQ ID NO: 87145 - protein, 427 aa, Arabidopsis thaliana
  peptide (1)..(427): Ceres Seq. ID no. 12697829
MVPLGWIGGVVGLILATAISLYANTLDMCFGAIGAQKEEKQNRKSYFHQHTRSPVSEREAESDPRRSSTQKAFNGTLDLLIPVIIVSIPRDWPFRAVIGFNSRFLLISVLGLIDLKNLLSTLIAKLHEFGGKRHIRYRDLAGFIYGKKMYRVTWGLQYVYLFMINCAFILLAGSTLKAVYVLFRDNCLMKLPHFIAIAGVVCAILAIGIPHLSALGIWLGVSTILSIIYIIVAIVLAAKDGVNKPERDYNIQGSSINKLLTITGAVCIQHGNATGNTGNSLLVFYRCMRLHSSDIGLTGPRHRLICLIASVDLFGSKHSLIFQLFSNLLSLYITVARGSYIAVSTLLSALLPFLGDFMSLTGAISTFPLTFILANHMYLVAMNDKLSLVQKLWHWLNVCFFGLMSLAAAIAAVRLISVDSQELPCFC

SEQ ID NO: 87146 - protein, 400 aa, Arabidopsis thaliana
  peptide (1)..(400): Ceres Seq. ID no. 12697830
MCFGAIGAQKEEKQNRKSYFHQHTRSPVSEREAESDPRRSSTQKAFNGTLDLLIPVIIVSIPRDWPFRAVIGFNSRFLLISVLGLIDLKNLLSTLIAKLHEFGGKRHIRYRDLAGFIYGKKMYRVTWGLQYVYLFMINCAFILLAGSTLKAVYVLFRDNCLMKLPHFIAIAGVVCAILAIGIPHLSALGIWLGVSTILSIIYIIVAIVLAAKDGVNKPERDYNIQGSSINKLLTITGAVCIQHGNATGNTGNSLLVFYRCMRLHSSDIGLTGPRHRLICLIASVDLFGSKHSLIFQLFSNLLSLYITVARGSYIAVSTLLSALLPFLGDFMSLTGAISTFPLTFILANHMYLVAMNDKLSLVQKLWHWLNVCFFGLMSLAAAIAAVRLISVDSQELPCFC

SEQ ID NO: 87147 - protein, 279 aa, Arabidopsis thaliana
  peptide (1)..(279): Ceres Seq. ID no. 12697831
MYRVTWGLQYVYLFMINCAFILLAGSTLKAVYVLFRDNCLMKLPHFIAIAGVVCAILAIGIPHLSALGIWLGVSTILSIIYIIVAIVLAAKDGVNKPERDYNIQGSSINKLLTITGAVCIQHGNATGNTGNSLLVFYRCMRLHSSDIGLTGPRHRLICLIASVDLFGSKHSLIFQLFSNLLSLYITVARGSYIAVSTLLSALLPFLGDFMSLTGAISTFPLTFILANHMYLVAMNDKLSLVQKLWHWLNVCFFGLMSLAAAIAAVRLISVDSQELPCFC

SEQ ID NO: 87148 - DNA, 855 bp, Arabidopsis thaliana
  misc_feature (1)..(855): Ceres Seq. ID no. 12698074
  misc_feature (1)..(855): Ortholog of  Ceres SEQ ID NO 15179676 as cited in SEQ ID NO 52442
  misc_feature (1)..(855): Ortholog of  Ceres SEQ ID NO 13582807 as cited in SEQ ID NO 67806
atggcggaaagaggaggagaaagcggcgcagagcgtggcggtgaccgtggtgacttcgggcgtggattcggcggtggacgtggaggtggccgtggccgtgatcgtggtccaagaggccgtggaagacgtggaggccgtgcctcggaagaaacgaaatgggttccagtgaccaaactaggtcgtctagtggctgacaataaaataacgaagctagagcagatctatcttcattctctcccagtaaaggagtaccaaatcatagatcatcttgttggtcctacgttgaaagacgaggttatgaagatcatgcctgttcagaaacaaaccagagctggtcaaaggactagattcaaggcctttgttgttgttggtgatggaaatggtcatgttggtttgggtgtcaagtgttctaaggaagttgctactgccattagaggagctattattcttgctaagctatcagtggttccggtgaggagaggttattgggggaataagattgggaagccacacactgtgccttgtaaggttactggtaaatgtggttctgttactgtgagaatggttcctgctccgagaggttctggtattgttgctgctagggttcctaagaaggttcttcagttcgctggtattgatgatgtctttacttcttcaagaggatctaccaaaacccttggaaactttgtcaaggctacattcgattgcttacagaagacatatgggttccttacaccagagttctggaaagagactagattctccagatcgccgtaccaagagcacactgatttcctgtcgactaaggctgtttctgcaaccaaggttatcactgagggtgaagaccaagcttaa

SEQ ID NO: 87149 - protein, 284 aa, Arabidopsis thaliana [sequence omitted]

SEQ ID NO: 87150 - protein, 185 aa, Arabidopsis thaliana; identical to SEQ ID NO: 38083
  peptide (1)..(185): Ceres Seq. ID no. 12698076

SEQ ID NO: 87151 - protein, 182 aa, Arabidopsis thaliana; identical to SEQ ID NO: 38084
  peptide (1)..(182): Ceres Seq. ID no. 12698077

SEQ ID NO: 87152 - DNA, 2631 bp, Arabidopsis thaliana
  misc_feature (1)..(2631): Ceres Seq. ID no. 12698097
  misc_feature (1)..(2631): Ortholog of  Ceres SEQ ID NO 13600310 as cited in SEQ ID NO 5086
atggaaaagatctgtgtcgcagtcagggtaagaccgccggcgccggaaaacggagcttcactctggaaagtcgaagataatcggatctctcttcataaatcactcgacactccaatcacaaccgcttctcacgcttttgtttctggaatttcaatttctacagatctgattgaaatcgtaagtctcttcctttttagttttggtgttgtttacttttttcttctttttgcagatcatgtgttcgacgaaagttctacgaatgctagtgtctacgagcttcttactaaggatatcatacatgccgctgttgagggttttaatggtactgcatttgcttatgggcaaactagtagtgggaagacgtttacgatgacgggctctgaaactgatcctggaattattcgaagatctgttcgagatgtgtttgaaagaatacatatgatatctgatcgtgagtttctcatccgggtttcgtacatggaaatttacaacgaagaaattaatgatcttttagctgttgagaaccagagactgcaaattcatgagcatttggagcgtggagtgtttgttgctggtcttaaggaagaaattgttagtgatgctgaacagattctaaagcttatagattctggagaagttaataggcactttggcgagacaaacatgaatgttcatagtagcaggtctcacaccatattcagaatggtgattgagagcaggggaaaagataatagttcttcagatgctattcgtgtctcagtcttgaatttggtcgatttagctggatctgagcgaattgctaaaactggtgctggtggtgtacgcttgcaagaagggaagtacattaataagagcttaatgattcttggtaatgtcatcaataaattaagtgacagtacaaagctaagggcacatattccgtaccgagatagtaagctgactcgaattcttcagcctgcacttggtggtaatgcaaagacctgcattatatgcactatcgcaccagaagagcatcatattgaggaatcaaaaggaactctccaatttgcaagcagagcaaagcgcatcaccaactgtgctcaagtgaatgagatcttgactgatgccgctttattgaagcgccaaaagttggagatagaagagctacgcatgaagcttcagggatctcatgcggaagtgttggaacaagagatcttaaatttaagcaatcagatgctgaagtatgagttggaatgtgaaaggctaaaaacacaactggaagaagagaaaaggaagcagaaggagcaggaaaattgcatcaaggagcaacagatgaaaattgagaaccttaacaattttgtcactaattctgacttcaagaggaaccagtcagaggactttatcatttcaagaaagactccagatgggctatgcaatgtcaatgacactagcgatgttcctggaaccccttgctttaaatcagcttcccgttcctttgtggttgctcggtcaaataattattcaggactatctgattttagtccgatggttcattccctgggggacgtggccgatgaagatacttggatgaaactaaacaagggttttgttgcagaccttgatcaaatccaatttacacctgctgttaaatgtcaacccactcctttaagtattgcaaccacggagtgcccgcgtgaaaatcactcagaggtggaagatctcaaaagtcggattcagttgctgaccaatgagaatgacagtcttcaggtaaaatttaatgaacaagtactcctgagcaacaatctgatgcaagagatgtctgagctcaaacaagaaacgcttactgtgaaagaaattccgaataggttatctgagtcagttgctaattgcaaagatgtctacaaggatgtcatagtcactatgaagagcttaatcactgacaaggaatctccaacggcaaacctgctcctgggtacaactgaaatcacaacgagcctactggcaactctagaaacacaattctcaatgataatggatggtcagaaaacgggtagtagcatagatcatcctttatctgaccattgggaaacacttcgtgtgaatctgaagaacacaacgacgttgttgctgtcagacgcacaagcaaaagatgaatttttgaactcccacaacaagttagatgttgtggtcagactactatttcacctttctctaagacaggttttgaatgtgattttaaagggacaagaaacagctgctttggaggagaagaaactgaagtctgagctcatcatcatcaaggaaagatacaacgagctcgagaaagagttgtgtttggataaacagcttctagaagcttcaagagaaagtcatgagaagctgataaaagaggtacagttcctgaaggaagaaagagattctttagatagaaaaatctctcaatcaactcagagattgagagtgattgcaagtgataaagagaatgctttgaaagatcttaatgtggaagtgaagaggaggaaagatatggaggaagagattaagcacatcagcattgctttcgctaccaggcacaaatcttttgtgtcttttcacagtgaaatcaagtccaaaatgcagaaactaaccactcaaaactcaaaagctccttag

SEQ ID NO: 87153 - protein, 876 aa, Arabidopsis thaliana
  peptide (1)..(876): Ceres Seq. ID no. 12698098
MEKICVAVRVRPPAPENGASLWKVEDNRISLHKSLDTPITTASHAFVSGISISTDLIEIVSLFLFSFGVVYFFLLFADHVFDESSTNASVYELLTKDIIHAAVEGFNGTAFAYGQTSSGKTFTMTGSETDPGIIRRSVRDVFERIHMISDREFLIRVSYMEIYNEEINDLLAVENQRLQIHEHLERGVFVAGLKEEIVSDAEQILKLIDSGEVNRHFGETNMNVHSSRSHTIFRMVIESRGKDNSSSDAIRVSVLNLVDLAGSERIAKTGAGGVRLQEGKYINKSLMILGNVINKLSDSTKLRAHIPYRDSKLTRILQPALGGNAKTCIICTIAPEEHHIEESKGTLQFASRAKRITNCAQVNEILTDAALLKRQKLEIEELRMKLQGSHAEVLEQEILNLSNQMLKYELECERLKTQLEEEKRKQKEQENCIKEQQMKIENLNNFVTNSDFKRNQSEDFIISRKTPDGLCNVNDTSDVPGTPCFKSASRSFVVARSNNYSGLSDFSPMVHSLGDVADEDTWMKLNKGFVADLDQIQFTPAVKCQPTPLSIATTECPRENHSEVEDLKSRIQLLTNENDSLQVKFNEQVLLSNNLMQEMSELKQETLTVKEIPNRLSESVANCKDVYKDVIVTMKSLITDKESPTANLLLGTTEITTSLLATLETQFSMIMDGQKTGSSIDHPLSDHWETLRVNLKNTTTLLLSDAQAKDEFLNSHNKLDVVVRLLFHLSLRQVLNVILKGQETAALEEKKLKSELIIIKERYNELEKELCLDKQLLEASRESHEKLIKEVQFLKEERDSLDRKISQSTQRLRVIASDKENALKDLNVEVKRRKDMEEEIKHISIAFATRHKSFVSFHSEIKSKMQKLTTQNSKAP

SEQ ID NO: 87154 - protein, 753 aa, Arabidopsis thaliana
  peptide (1)..(753): Ceres Seq. ID no. 12698099
MTGSETDPGIIRRSVRDVFERIHMISDREFLIRVSYMEIYNEEINDLLAVENQRLQIHEHLERGVFVAGLKEEIVSDAEQILKLIDSGEVNRHFGETNMNVHSSRSHTIFRMVIESRGKDNSSSDAIRVSVLNLVDLAGSERIAKTGAGGVRLQEGKYINKSLMILGNVINKLSDSTKLRAHIPYRDSKLTRILQPALGGNAKTCIICTIAPEEHHIEESKGTLQFASRAKRITNCAQVNEILTDAALLKRQKLEIEELRMKLQGSHAEVLEQEILNLSNQMLKYELECERLKTQLEEEKRKQKEQENCIKEQQMKIENLNNFVTNSDFKRNQSEDFIISRKTPDGLCNVNDTSDVPGTPCFKSASRSFVVARSNNYSGLSDFSPMVHSLGDVADEDTWMKLNKGFVADLDQIQFTPAVKCQPTPLSIATTECPRENHSEVEDLKSRIQLLTNENDSLQVKFNEQVLLSNNLMQEMSELKQETLTVKEIPNRLSESVANCKDVYKDVIVTMKSLITDKESPTANLLLGTTEITTSLLATLETQFSMIMDGQKTGSSIDHPLSDHWETLRVNLKNTTTLLLSDAQAKDEFLNSHNKLDVVVRLLFHLSLRQVLNVILKGQETAALEEKKLKSELIIIKERYNELEKELCLDKQLLEASRESHEKLIKEVQFLKEERDSLDRKISQSTQRLRVIASDKENALKDLNVEVKRRKDMEEEIKHISIAFATRHKSFVSFHSEIKSKMQKLTTQNSKAP

SEQ ID NO: 87155 - protein, 730 aa, Arabidopsis thaliana
  peptide (1)..(730): Ceres Seq. ID no. 12698100
MISDREFLIRVSYMEIYNEEINDLLAVENQRLQIHEHLERGVFVAGLKEEIVSDAEQILKLIDSGEVNRHFGETNMNVHSSRSHTIFRMVIESRGKDNSSSDAIRVSVLNLVDLAGSERIAKTGAGGVRLQEGKYINKSLMILGNVINKLSDSTKLRAHIPYRDSKLTRILQPALGGNAKTCIICTIAPEEHHIEESKGTLQFASRAKRITNCAQVNEILTDAALLKRQKLEIEELRMKLQGSHAEVLEQEILNLSNQMLKYELECERLKTQLEEEKRKQKEQENCIKEQQMKIENLNNFVTNSDFKRNQSEDFIISRKTPDGLCNVNDTSDVPGTPCFKSASRSFVVARSNNYSGLSDFSPMVHSLGDVADEDTWMKLNKGFVADLDQIQFTPAVKCQPTPLSIATTECPRENHSEVEDLKSRIQLLTNENDSLQVKFNEQVLLSNNLMQEMSELKQETLTVKEIPNRLSESVANCKDVYKDVIVTMKSLITDKESPTANLLLGTTEITTSLLATLETQFSMIMDGQKTGSSIDHPLSDHWETLRVNLKNTTTLLLSDAQAKDEFLNSHNKLDVVVRLLFHLSLRQVLNVILKGQETAALEEKKLKSELIIIKERYNELEKELCLDKQLLEASRESHEKLIKEVQFLKEERDSLDRKISQSTQRLRVIASDKENALKDLNVEVKRRKDMEEEIKHISIAFATRHKSFVSFHSEIKSKMQKLTTQNSKAP

SEQ ID NO: 87156 - DNA, 3162 bp, Arabidopsis thaliana
  misc_feature (1)..(3162): Ceres Seq. ID no. 12698107
  misc_feature (1)..(3162): Ortholog of  Ceres SEQ ID NO 14308128 as cited in SEQ ID NO 51081
  misc_feature (1)..(3162): Ortholog of  Ceres SEQ ID NO 15171088 as cited in SEQ ID NO 54178
  misc_feature (1)..(3162): Ortholog of  Ceres SEQ ID NO 13590691 as cited in SEQ ID NO 66290
atggaggcgatcgatgagttgtctcagctttcggattcgatgagacaagcggcgtctctgctcgctgacgaagatcccgatgagacctcttcttctagacggccagctacttctctcaacgtcgttgccctagggaatgtgggagctggaaagtctgcagttctaaatagcctaattgggcatccagttctgccgacgggtgagaatggtgcgacacgggctcctattatcattgatttgagtagagaagaatcactgagcagcaaggcaataatcttgcaaattgacaataaaaatcaacaagtttctgcaagtgcactaaggcattcactacaagataggcttagcaaaggagcttcaggaaggggtcgtgatgaaatatacctaaaacttcgtaccagcacagctccaccactgaaattgattgatttgcctggactggaccagcgaattgtggacgattctatgggcttcatagattcattatcattgtcatcttataatttgtttctctcctctctttgcaagattggtgaacatgcacagcacaacgatgctatattgctggttgttgtgcctgctagccaggcatctgaaatttcgtcatctcgagccctgaagatcgcaaaggagtatgatccagagagtgagtatataggcactttcgttatacagacccttcattatacttctaaacaactggggttactacatttggatagaaacattggaactaaattttgtgtatactataaccaaaaaaaaaaacatcactccttatttataggtactaggacagtaggaattatcagcaaaattgatcaggcagcagagaacccaaagtcccttgcagcagttcaggcgcttctttcaaatcaaggacctccaaaaacaactgatattccatgggttgcacttattggccaatctgtctcaattgcatcagcgcagtctggaggcagtgagaactctttagaaactgcttggcgtgctgagagtgaaagccttaaatccattttgactggtgctccacaaagcaaacttggcagaattgccctggtcgacactcttgctagccagatccgtagcagaatgaagctcaggcttccgaacatcttaactggactccagggtaagtctcaaatagtgcaggacgaattagcgaggcttggtgagcaattggttagcagtgctgaaggcacaagggcaatagctttggagctttgtcgtgagtttgaagacaaatttcttctccatttagctggtggtgaaggaagtggttggaaagttgttgcaagttttgaaggcaatttccccaatcgtatcaaaaagcttccgttggatagacattttgacttgaacaatgtcaaaaggatcgtgttggaggctgatggttatcaaccttatctcatatctccagagaaagggttgagatcgttaataaaaaccgttcttgagttggctaaagacccagcacgactatgtgttgatgaggttcaccgagtgcttgttgacatagtttcagcttccgcgaatgccacacctggtcttgggagatatcctccttttaagagagaggttgtagctatagcaagtgccgcacttgatggattcaagaatgaagctaagaagatggtagttgcattagttgatatggagcgtgcatttgtaccacctcagcacttcatccgcctcgtacaaagaagaatggaaaggcagcgtcgtgaggaggagctaaaaggtcgttcctctaaaaagggacaagatgcagagcagtctctcttaaacagggtttgcttttatctcagaacaatctggattcatttagtggatgtgcttctactatttttttgtgatatggaagtacataatgaaacaattctttttttgcttgtacatcaggctactagtcctcagccagatgggccatcatcaactggtggtagcttaaaatctttgagagacaaattaatgccacaagataaagataaagataaagaaaaagagactccggaggtgtctggtctgaagactgctggacctgagggagagataactgcagggtacttaatgaagaaaagtgcaaagacaaatgggtggagtaggcgatggtttgttctgaatgaaaaaactggaaagcttggttatacaaaaaaacaagaagaaagaaacttccgcggcactgtaactttggaggaatgcagtatcgaagaaatttctgatgatgaaggagaaaaatcaaagagctcgaaagataagaaatcaaatggaccggattcaaaaggaccaggccttgtatttaagataacttgcagggttccatataagactgtacttaaaggtatgtcaagcgattatcaaaatttactgcttgaccctctttttactctattatatgagcaaatcctcatatgctcttatattgcagctcacaatgcgttggttctcaaggccgagagcatggttgataagaatgaatggataaataagctgcaaaaggttatccaggcccgaggaggccaagtgggtagcgcttccatgagacaaagtctttcagaaggctcacttgataagatggtaaggaaaccggtcgacccggaagaggaattacggtggatgtcccaagaagtacggggttatgttgaagctgttctcaacagtctagctgccaatgttccaaaggctgttgttctctgtcaagtggagaaatccaaggaagacatgctgaatcagctatacagctctatcagcgcaattggtaatgagaggattgaatcattgattcaagaggatcagaacgtcaaaagacgaagagaccgttaccagaaacagtcctctcttctctcaaagctcactaggcagcttagcattcacgataaccgagcagctgctgcttcaagctggtctgacaatagtggcactgaaagcagcccgagaaccaatggagggtcatcaggagaggactggatgaatgcgtttaacgcagctgctagtggacctgactcattgaagagatatggatctggcggccatagccgtcgttacagtgatccagcacagaatggtgaggattcttctggatctggtggcagctcccgtcgcaccacaccaaaccggctcccaccagctccgccacagtctggatcatcttacaggtattag

SEQ ID NO: 87157 - protein, 1053 aa, Arabidopsis thaliana
  peptide (1)..(1053): Ceres Seq. ID no. 12698108
MEAIDELSQLSDSMRQAASLLADEDPDETSSSRRPATSLNVVALGNVGAGKSAVLNSLIGHPVLPTGENGATRAPIIIDLSREESLSSKAIILQIDNKNQQVSASALRHSLQDRLSKGASGRGRDEIYLKLRTSTAPPLKLIDLPGLDQRIVDDSMGFIDSLSLSSYNLFLSSLCKIGEHAQHNDAILLVVVPASQASEISSSRALKIAKEYDPESEYIGTFVIQTLHYTSKQLGLLHLDRNIGTKFCVYYNQKKKHHSLFIGTRTVGIISKIDQAAENPKSLAAVQALLSNQGPPKTTDIPWVALIGQSVSIASAQSGGSENSLETAWRAESESLKSILTGAPQSKLGRIALVDTLASQIRSRMKLRLPNILTGLQGKSQIVQDELARLGEQLVSSAEGTRAIALELCREFEDKFLLHLAGGEGSGWKVVASFEGNFPNRIKKLPLDRHFDLNNVKRIVLEADGYQPYLISPEKGLRSLIKTVLELAKDPARLCVDEVHRVLVDIVSASANATPGLGRYPPFKREVVAIASAALDGFKNEAKKMVVALVDMERAFVPPQHFIRLVQRRMERQRREEELKGRSSKKGQDAEQSLLNRVCFYLRTIWIHLVDVLLLFFCDMEVHNETILFLLVHQATSPQPDGPSSTGGSLKSLRDKLMPQDKDKDKEKETPEVSGLKTAGPEGEITAGYLMKKSAKTNGWSRRWFVLNEKTGKLGYTKKQEERNFRGTVTLEECSIEEISDDEGEKSKSSKDKKSNGPDSKGPGLVFKITCRVPYKTVLKGMSSDYQNLLLDPLFTLLYEQILICSYIAAHNALVLKAESMVDKNEWINKLQKVIQARGGQVGSASMRQSLSEGSLDKMVRKPVDPEEELRWMSQEVRGYVEAVLNSLAANVPKAVVLCQVEKSKEDMLNQLYSSISAIGNERIESLIQEDQNVKRRRDRYQKQSSLLSKLTRQLSIHDNRAAAASSWSDNSGTESSPRTNGGSSGEDWMNAFNAAASGPDSLKRYGSGGHSRRYSDPAQNGEDSSGSGGSSRRTTPNRLPPAPPQSGSSYRY

SEQ ID NO: 87158 - protein, 1040 aa, Arabidopsis thaliana
  peptide (1)..(1040): Ceres Seq. ID no. 12698109
MRQAASLLADEDPDETSSSRRPATSLNVVALGNVGAGKSAVLNSLIGHPVLPTGENGATRAPIIIDLSREESLSSKAIILQIDNKNQQVSASALRHSLQDRLSKGASGRGRDEIYLKLRTSTAPPLKLIDLPGLDQRIVDDSMGFIDSLSLSSYNLFLSSLCKIGEHAQHNDAILLVVVPASQASEISSSRALKIAKEYDPESEYIGTFVIQTLHYTSKQLGLLHLDRNIGTKFCVYYNQKKKHHSLFIGTRTVGIISKIDQAAENPKSLAAVQALLSNQGPPKTTDIPWVALIGQSVSIASAQSGGSENSLETAWRAESESLKSILTGAPQSKLGRIALVDTLASQIRSRMKLRLPNILTGLQGKSQIVQDELARLGEQLVSSAEGTRAIALELCREFEDKFLLHLAGGEGSGWKVVASFEGNFPNRIKKLPLDRHFDLNNVKRIVLEADGYQPYLISPEKGLRSLIKTVLELAKDPARLCVDEVHRVLVDIVSASANATPGLGRYPPFKREVVAIASAALDGFKNEAKKMVVALVDMERAFVPPQHFIRLVQRRMERQRREEELKGRSSKKGQDAEQSLLNRVCFYLRTIWIHLVDVLLLFFCDMEVHNETILFLLVHQATSPQPDGPSSTGGSLKSLRDKLMPQDKDKDKEKETPEVSGLKTAGPEGEITAGYLMKKSAKTNGWSRRWFVLNEKTGKLGYTKKQEERNFRGTVTLEECSIEEISDDEGEKSKSSKDKKSNGPDSKGPGLVFKITCRVPYKTVLKGMSSDYQNLLLDPLFTLLYEQILICSYIAAHNALVLKAESMVDKNEWINKLQKVIQARGGQVGSASMRQSLSEGSLDKMVRKPVDPEEELRWMSQEVRGYVEAVLNSLAANVPKAVVLCQVEKSKEDMLNQLYSSISAIGNERIESLIQEDQNVKRRRDRYQKQSSLLSKLTRQLSIHDNRAAAASSWSDNSGTESSPRTNGGSSGEDWMNAFNAAASGPDSLKRYGSGGHSRRYSDPAQNGEDSSGSGGSSRRTTPNRLPPAPPQSGSSYRY

SEQ ID NO: 87159 - protein, 898 aa, Arabidopsis thaliana
  peptide (1)..(898): Ceres Seq. ID no. 12698110
MGFIDSLSLSSYNLFLSSLCKIGEHAQHNDAILLVVVPASQASEISSSRALKIAKEYDPESEYIGTFVIQTLHYTSKQLGLLHLDRNIGTKFCVYYNQKKKHHSLFIGTRTVGIISKIDQAAENPKSLAAVQALLSNQGPPKTTDIPWVALIGQSVSIASAQSGGSENSLETAWRAESESLKSILTGAPQSKLGRIALVDTLASQIRSRMKLRLPNILTGLQGKSQIVQDELARLGEQLVSSAEGTRAIALELCREFEDKFLLHLAGGEGSGWKVVASFEGNFPNRIKKLPLDRHFDLNNVKRIVLEADGYQPYLISPEKGLRSLIKTVLELAKDPARLCVDEVHRVLVDIVSASANATPGLGRYPPFKREVVAIASAALDGFKNEAKKMVVALVDMERAFVPPQHFIRLVQRRMERQRREEELKGRSSKKGQDAEQSLLNRVCFYLRTIWIHLVDVLLLFFCDMEVHNETILFLLVHQATSPQPDGPSSTGGSLKSLRDKLMPQDKDKDKEKETPEVSGLKTAGPEGEITAGYLMKKSAKTNGWSRRWFVLNEKTGKLGYTKKQEERNFRGTVTLEECSIEEISDDEGEKSKSSKDKKSNGPDSKGPGLVFKITCRVPYKTVLKGMSSDYQNLLLDPLFTLLYEQILICSYIAAHNALVLKAESMVDKNEWINKLQKVIQARGGQVGSASMRQSLSEGSLDKMVRKPVDPEEELRWMSQEVRGYVEAVLNSLAANVPKAVVLCQVEKSKEDMLNQLYSSISAIGNERIESLIQEDQNVKRRRDRYQKQSSLLSKLTRQLSIHDNRAAAASSWSDNSGTESSPRTNGGSSGEDWMNAFNAAASGPDSLKRYGSGGHSRRYSDPAQNGEDSSGSGGSSRRTTPNRLPPAPPQSGSSYRY

SEQ ID NO: 87160 - DNA, 865 bp, Arabidopsis thaliana
  misc_feature (1)..(865): Ceres Seq. ID no. 12698123
  misc_feature (1)..(865): Ortholog of  Ceres SEQ ID NO 15177083 as cited in SEQ ID NO 51917
  misc_feature (1)..(865): Ortholog of  Ceres SEQ ID NO 12609093 as cited in SEQ ID NO 52008
  misc_feature (1)..(865): Ortholog of  Ceres SEQ ID NO 12609839 as cited in SEQ ID NO 52022
  misc_feature (1)..(865): Ortholog of  Ceres SEQ ID NO 13638931 as cited in SEQ ID NO 52200
  misc_feature (1)..(865): Ortholog of  Ceres SEQ ID NO 13638885 as cited in SEQ ID NO 55803
  misc_feature (1)..(865): Ortholog of  Ceres SEQ ID NO 14301452 as cited in SEQ ID NO 60984
  misc_feature (1)..(865): Ortholog of  Ceres SEQ ID NO 12587429 as cited in SEQ ID NO 63113
  misc_feature (1)..(865): Ortholog of  Ceres SEQ ID NO 12615635 as cited in SEQ ID NO 63133
  misc_feature (1)..(865): Ortholog of  Ceres SEQ ID NO 12586351 as cited in SEQ ID NO 64028
  misc_feature (1)..(865): Ortholog of  Ceres SEQ ID NO 15173174 as cited in SEQ ID NO 64046
  misc_feature (1)..(865): Ortholog of  Ceres SEQ ID NO 13654441 as cited in SEQ ID NO 67814
  misc_feature (1)..(865): Ortholog of  Ceres SEQ ID NO 14309027 as cited in SEQ ID NO 0
taaaaataatttagacaaaacaaagatgggagagagagaggaagtgaaactgttgggaacatggtacagtccggtcgtgataagagcaaagatcgctcttcgtctcaaatcggttgattatgattacgttgaagaggatttgttcggatctaagagtgagcttcttctcaaatcgaaccctattttcaagaaagtcccggttctcatccacaacactaaaccggtttgtgtatctcttaacatcgttgaatacatcgacgagacgtggaactcatctggatcgtccattcttccttctcatccttatgatcgtgcccttgctcgcttctggtctgtctttgttgatgacaagtggttaccgactttgatggcagctgtggtcgctaaatcggaagaagcaaaagcaaaaggcatggaagaagtggaagaagggttgttgcaactagaagctgcgtttattgctctaagcaaagggaaatctttttttggcggtgaaacaatcgggttcatagacatttgccttggaagctttttagttctcttaaaagctagagagaagcttaaaaacgaaaagattttagacgaattaaaaactccttctctttatagatgggccaaccagtttttgtcaaatgaaatggtgaagaatgtggtgccggatattgataaagtcgccaagtttatagaagagtttgaggatagagctcaatatatccggtgcttctagatcttgagatcatcacagaaatcgttagaaaagagtggaggtttagtcttggcttcaaagtcaaacttgttatctccaaaaacagagtttcatatggtttattcatatgttagttaatctaaaagaagaacatggttc

SEQ ID NO: 87161 - protein, 241 aa, Arabidopsis thaliana
  peptide (1)..(241): Ceres Seq. ID no. 12698124
KNNLDKTKMGEREEVKLLGTWYSPVVIRAKIALRLKSVDYDYVEEDLFGSKSELLLKSNPIFKKVPVLIHNTKPVCVSLNIVEYIDETWNSSGSSILPSHPYDRALARFWSVFVDDKWLPTLMAAVVAKSEEAKAKGMEEVEEGLLQLEAAFIALSKGKSFFGGETIGFIDICLGSFLVLLKAREKLKNEKILDELKTPSLYRWANQFLSNEMVKNVVPDIDKVAKFIEEFEDRAQYIRCF

SEQ ID NO: 87162 - protein, 233 aa, Arabidopsis thaliana
  peptide (1)..(233): Ceres Seq. ID no. 12698125
MGEREEVKLLGTWYSPVVIRAKIALRLKSVDYDYVEEDLFGSKSELLLKSNPIFKKVPVLIHNTKPVCVSLNIVEYIDETWNSSGSSILPSHPYDRALARFWSVFVDDKWLPTLMAAVVAKSEEAKAKGMEEVEEGLLQLEAAFIALSKGKSFFGGETIGFIDICLGSFLVLLKAREKLKNEKILDELKTPSLYRWANQFLSNEMVKNVVPDIDKVAKFIEEFEDRAQYIRCF

SEQ ID NO: 87163 - DNA, 931 bp, Arabidopsis thaliana
  misc_feature (1)..(931): Ceres Seq. ID no. 12698126
  misc_feature (1)..(931): Ortholog of  Ceres SEQ ID NO 15177083 as cited in SEQ ID NO 51917
  misc_feature (1)..(931): Ortholog of  Ceres SEQ ID NO 12609093 as cited in SEQ ID NO 52008
  misc_feature (1)..(931): Ortholog of  Ceres SEQ ID NO 12609839 as cited in SEQ ID NO 52022
  misc_feature (1)..(931): Ortholog of  Ceres SEQ ID NO 13638931 as cited in SEQ ID NO 52200
  misc_feature (1)..(931): Ortholog of  Ceres SEQ ID NO 13638885 as cited in SEQ ID NO 55803
  misc_feature (1)..(931): Ortholog of  Ceres SEQ ID NO 14301452 as cited in SEQ ID NO 60984
  misc_feature (1)..(931): Ortholog of  Ceres SEQ ID NO 12587429 as cited in SEQ ID NO 63113
  misc_feature (1)..(931): Ortholog of  Ceres SEQ ID NO 12615635 as cited in SEQ ID NO 63133
  misc_feature (1)..(931): Ortholog of  Ceres SEQ ID NO 12586351 as cited in SEQ ID NO 64028
  misc_feature (1)..(931): Ortholog of  Ceres SEQ ID NO 15173174 as cited in SEQ ID NO 64046
  misc_feature (1)..(931): Ortholog of  Ceres SEQ ID NO 14301603 as cited in SEQ ID NO 67721
  misc_feature (1)..(931): Ortholog of  Ceres SEQ ID NO 13654441 as cited in SEQ ID NO 67814
  misc_feature (1)..(931): Ortholog of  Ceres SEQ ID NO 12635608 as cited in SEQ ID NO 0
  misc_feature (1)..(931): Ortholog of  Ceres SEQ ID NO 14309027 as cited in SEQ ID NO 0
aaaaaaaaacgtctatacacaaaaaaacaaatgggagagaaagaggaagtgaaactattaggagtatggtacagtccatacgccataagacctaagatcgctcttcgtctcaaatcagtggattatgattacgttgaggaaaatctgtttggatccaagagtgagcttcttctcaaatcaaacccggttcacaagaaagtccctgttctcctccacaacaacaaaccgattgtcgagtctctcaacatcgttgaatacattgatgagacgtggaactcatctgcaccgtccattcttccttcacatccttatgatcgtgctcttgctcgcttttggtctgacttcgttgataacaagtggtttccggcgttgagaatggcggcgatcactaaatcggaagacgcaaaagcgaaagccatggaagaagtggaagaagggttgttgcaactcgaggatgcgtttgtttctataagcaaagggaaaccctttttcggcggtgaagcaatcgggtttatggatatttgctttggaagctttgtggttctcttgaaagctagagaaaagtttaaagcagaaaagcttttagacgaatcaaaaactccttctctttgtaaatgggccgaccggttcttgtccgatgaaacggtgaagaatgtggcaccggagatcgaaaaagtagctgagtttctacaagaacttgaggttagagctcaatccgcagcttcaagatcttgagatcatcttagaaatgtattgcaatgcaattgtgttttgtgtacatgtaaaacgaaaataagttgaagttttaaagtgttgtgttcagtctatgctaggatttatgacgcggtgtatgggctacggactattttcagtttatgtttatcgaaaatataagggtcagcccaagattattaggggtcgtccccccttt

SEQ ID NO: 87164 - protein, 244 aa, Arabidopsis thaliana
  peptide (1)..(244): Ceres Seq. ID no. 12698127
KKKRLYTKKQMGEKEEVKLLGVWYSPYAIRPKIALRLKSVDYDYVEENLFGSKSELLLKSNPVHKKVPVLLHNNKPIVESLNIVEYIDETWNSSAPSILPSHPYDRALARFWSDFVDNKWFPALRMAAITKSEDAKAKAMEEVEEGLLQLEDAFVSISKGKPFFGGEAIGFMDICFGSFVVLLKAREKFKAEKLLDESKTPSLCKWADRFLSDETVKNVAPEIEKVAEFLQELEVRAQSAASRS

SEQ ID NO: 87165 - protein, 234 aa, Arabidopsis thaliana
  peptide (1)..(234): Ceres Seq. ID no. 12698128
MGEKEEVKLLGVWYSPYAIRPKIALRLKSVDYDYVEENLFGSKSELLLKSNPVHKKVPVLLHNNKPIVESLNIVEYIDETWNSSAPSILPSHPYDRALARFWSDFVDNKWFPALRMAAITKSEDAKAKAMEEVEEGLLQLEDAFVSISKGKPFFGGEAIGFMDICFGSFVVLLKAREKFKAEKLLDESKTPSLCKWADRFLSDETVKNVAPEIEKVAEFLQELEVRAQSAASRS

SEQ ID NO: 87166 - DNA, 942 bp, Arabidopsis thaliana
  misc_feature (1)..(942): Ceres Seq. ID no. 12698141
  misc_feature (1)..(942): Ortholog of  Ceres SEQ ID NO 13639663 as cited in SEQ ID NO 57850
  misc_feature (1)..(942): Ortholog of  Ceres SEQ ID NO 15224330 as cited in SEQ ID NO 58808
atgggggttgattactacaatgtactcaacgtgaatccaagcgcaacggaagacgatctaaagaaatcgtatcgaagacttgcaatgaaatggcaccctgacaaaaaccctacttcaatcaagcaagaagctgaagctaagttcaaacaaatctccgaagcttacgatgttttaagcgatcctaacaaacgtcagatctatgatcaatatggtgaagacggacttacggcgacagaagcaacggcgtcgtctcaacaacataattactcttctggtaacaacaataattacaatgcagggtttaggtattatccacgtgatgctgaagatattttcgctgagtttttcggtgcatctgagaaagtctttgatggtggcgtcggcggtggcgggaggaaagctccggcgattgagagtaaattggcttgtactcttgaggagttgtataaaggtgggaggaggaagatgaagatttcccgcgttgttcctgatggtcttggaaagtcaaagccagtggaagagatcttgaagatagatataacaccaggatggaagaaaggaactaagataacttttccagagaaaggaaaccaagaacccggtgttactcccgcagatctcatctttgttatagatgagaaaccgcattcggtttacaaaagagacggtaacgatcttattgtagacaagaaagtttcgcttttggaggctttaacagggatcactcttagcttaacaacactagacgggaggaatctgactatcccggttttggatatcgttaaaccgggtcaggagatagtgattcctagtgaaggaatgcccatctctaaagaaggttcaaagagaggagatctaagaatcaactttgagatatgtttcccctcgaggctaacatcggaacagaagacagatctcaagagagttcttggtggtagctga

SEQ ID NO: 87167 - protein, 313 aa, Arabidopsis thaliana
  peptide (1)..(313): Ceres Seq. ID no. 12698142
MGVDYYNVLNVNPSATEDDLKKSYRRLAMKWHPDKNPTSIKQEAEAKFKQISEAYDVLSDPNKRQIYDQYGEDGLTATEATASSQQHNYSSGNNNNYNAGFRYYPRDAEDIFAEFFGASEKVFDGGVGGGGRKAPAIESKLACTLEELYKGGRRKMKISRVVPDGLGKSKPVEEILKIDITPGWKKGTKITFPEKGNQEPGVTPADLIFVIDEKPHSVYKRDGNDLIVDKKVSLLEALTGITLSLTTLDGRNLTIPVLDIVKPGQEIVIPSEGMPISKEGSKRGDLRINFEICFPSRLTSEQKTDLKRVLGGS

SEQ ID NO: 87168 - protein, 285 aa, Arabidopsis thaliana
  peptide (1)..(285): Ceres Seq. ID no. 12698143
MKWHPDKNPTSIKQEAEAKFKQISEAYDVLSDPNKRQIYDQYGEDGLTATEATASSQQHNYSSGNNNNYNAGFRYYPRDAEDIFAEFFGASEKVFDGGVGGGGRKAPAIESKLACTLEELYKGGRRKMKISRVVPDGLGKSKPVEEILKIDITPGWKKGTKITFPEKGNQEPGVTPADLIFVIDEKPHSVYKRDGNDLIVDKKVSLLEALTGITLSLTTLDGRNLTIPVLDIVKPGQEIVIPSEGMPISKEGSKRGDLRINFEICFPSRLTSEQKTDLKRVLGGS

SEQ ID NO: 87169 - protein, 158 aa, Arabidopsis thaliana
  peptide (1)..(158): Ceres Seq. ID no. 12698144
MKISRVVPDGLGKSKPVEEILKIDITPGWKKGTKITFPEKGNQEPGVTPADLIFVIDEKPHSVYKRDGNDLIVDKKVSLLEALTGITLSLTTLDGRNLTIPVLDIVKPGQEIVIPSEGMPISKEGSKRGDLRINFEICFPSRLTSEQKTDLKRVLGGS

SEQ ID NO: 87170 - DNA, 1677 bp, Arabidopsis thaliana
  misc_feature (1)..(1677): Ceres Seq. ID no. 12698155
  misc_feature (1)..(1677): Ortholog of  Ceres SEQ ID NO 13574398 as cited in SEQ ID NO 0
atggaggataatagctgtatcgggtttgagggatcgaaaagatttggtgagactagtaaacgtatcattggtttgattgactcagtgactgagtcaacgactgattcaagtcttagcagctcaagttctggtgttggatcgagctccgggaggtcttctgtagctgagagatctgtttcatcacctccgacgaaatcgcagattcttggatggccgttaggacaaggttcatggaggaagagttctggtaaaatgaagaagaaaactccgacaaagatcgatgattttgggtttaagagagttggaacagagacttcagagattgagttgttgaaagagagaatggcgaagttgttgcttggtgaagacatgtctggttctggtgaaggagtttgtcctgctttggctatttctaatgccattaccaatctctatgctgcaatattgggacaacaatggaggctagagccaatccctagtgagaaaaaattaatgtggagaagagaaatcgaagttcttctttctgttagtgatcacattgttgaattggtaccttcctttcagaatttccccaatggaaacaagattgaggtgatgaactgcagaccaagatcagatctctttacttgtcttcctgctcttaggaagctagacaatatgcttattgaaatattagatagttttggagaaacagagttctggtacgttgatcaagggattgtagctgcggaatctgcaaggtctaactctttccgtgaagacggagacaaatggtggcttccgctgccgcgtgtgccatccgatggacttaccgaacaaactaggaagaaactggatcatactcgcgaattcaccaaccaaatcttgaaagcttgtatgtcaatcaacagcattgctttagctgaaatggaagttccacaatcataccttgaagcccttccaaagaacggaagatcttgtcttggagattttctatatagaaacatcacatcggataacttctctgcggatcacttgctagaatcaatagatctttcatctgagcttgcggttgtagaaatggcgaaccgagtagaagcatcaatgtacgtttggaggagaagagctcactcgaggcatctgatatctctgtatcgatccacaagtacaagatgggggatgatagtgaaggagatgatgatgcatcaaaccgatggtgacaaaagggaaatatttgcggagagagcagaaagcttattgatccgtctcaagcaacgtttcccgggacttagacaaacagctttagacacaagcaagatccaatacaacaaggatgtaggaaagtctatacttgagagctactcaagggtattagagagtttagcgtatagcattggtgtacgcatagaggaagtgttgttcatggatgacatcagcaaagatgatggtgatggtgatgatgattcttgttcagacaagttgagattgttgtctaaagaagcagctagtggcacgtcaactccgtacagaactctatctttctctgcatcgactccaagttattcaccaatgccgttgataagccccatcaacggaggaagaggaggagaaagagctccgtttctctctgggaggaacattagagaacgttgcgggtttggtccaaagaaagcattggccaattatctccggggttga

SEQ ID NO: 87171 - protein, 558 aa, Arabidopsis thaliana
  peptide (1)..(558): Ceres Seq. ID no. 12698156
MEDNSCIGFEGSKRFGETSKRIIGLIDSVTESTTDSSLSSSSSGVGSSSGRSSVAERSVSSPPTKSQILGWPLGQGSWRKSSGKMKKKTPTKIDDFGFKRVGTETSEIELLKERMAKLLLGEDMSGSGEGVCPALAISNAITNLYAAILGQQWRLEPIPSEKKLMWRREIEVLLSVSDHIVELVPSFQNFPNGNKIEVMNCRPRSDLFTCLPALRKLDNMLIEILDSFGETEFWYVDQGIVAAESARSNSFREDGDKWWLPLPRVPSDGLTEQTRKKLDHTREFTNQILKACMSINSIALAEMEVPQSYLEALPKNGRSCLGDFLYRNITSDNFSADHLLESIDLSSELAVVEMANRVEASMYVWRRRAHSRHLISLYRSTSTRWGMIVKEMMMHQTDGDKREIFAERAESLLIRLKQRFPGLRQTALDTSKIQYNKDVGKSILESYSRVLESLAYSIGVRIEEVLFMDDISKDDGDGDDDSCSDKLRLLSKEAASGTSTPYRTLSFSASTPSYSPMPLISPINGGRGGERAPFLSGRNIRERCGFGPKKALANYLRG

SEQ ID NO: 87172 - protein, 474 aa, Arabidopsis thaliana
  peptide (1)..(474): Ceres Seq. ID no. 12698157
MKKKTPTKIDDFGFKRVGTETSEIELLKERMAKLLLGEDMSGSGEGVCPALAISNAITNLYAAILGQQWRLEPIPSEKKLMWRREIEVLLSVSDHIVELVPSFQNFPNGNKIEVMNCRPRSDLFTCLPALRKLDNMLIEILDSFGETEFWYVDQGIVAAESARSNSFREDGDKWWLPLPRVPSDGLTEQTRKKLDHTREFTNQILKACMSINSIALAEMEVPQSYLEALPKNGRSCLGDFLYRNITSDNFSADHLLESIDLSSELAVVEMANRVEASMYVWRRRAHSRHLISLYRSTSTRWGMIVKEMMMHQTDGDKREIFAERAESLLIRLKQRFPGLRQTALDTSKIQYNKDVGKSILESYSRVLESLAYSIGVRIEEVLFMDDISKDDGDGDDDSCSDKLRLLSKEAASGTSTPYRTLSFSASTPSYSPMPLISPINGGRGGERAPFLSGRNIRERCGFGPKKALANYLRG

SEQ ID NO: 87173 - protein, 444 aa, Arabidopsis thaliana
  peptide (1)..(444): Ceres Seq. ID no. 12698158
MAKLLLGEDMSGSGEGVCPALAISNAITNLYAAILGQQWRLEPIPSEKKLMWRREIEVLLSVSDHIVELVPSFQNFPNGNKIEVMNCRPRSDLFTCLPALRKLDNMLIEILDSFGETEFWYVDQGIVAAESARSNSFREDGDKWWLPLPRVPSDGLTEQTRKKLDHTREFTNQILKACMSINSIALAEMEVPQSYLEALPKNGRSCLGDFLYRNITSDNFSADHLLESIDLSSELAVVEMANRVEASMYVWRRRAHSRHLISLYRSTSTRWGMIVKEMMMHQTDGDKREIFAERAESLLIRLKQRFPGLRQTALDTSKIQYNKDVGKSILESYSRVLESLAYSIGVRIEEVLFMDDISKDDGDGDDDSCSDKLRLLSKEAASGTSTPYRTLSFSASTPSYSPMPLISPINGGRGGERAPFLSGRNIRERCGFGPKKALANYLRG

SEQ ID NO: 87174 - DNA, 882 bp, Arabidopsis thaliana
  misc_feature (1)..(882): Ceres Seq. ID no. 12698163
  misc_feature (1)..(882): Ortholog of  Ceres SEQ ID NO 15171265 as cited in SEQ ID NO 52326
atggtcgcgccgcctatagccgccgcgtcgttagagctccctcctccgttccccgccgtcttcgaacaaccaatggagaaactcaccttccctaacgagttcccttacgagtttgcctcctcaacgttttcaacttctccggaagactcaacggagacagaagatgaaacaaccgacgacgaagatgacttcttagccgggttaactcgcagactcgctctctcgactcagcgcctctcttctccttccttcgtcaccgacaagtctcagatgaaacccaaagtcacagagtcaactcagagtggactcggaagtcctaatggtccgttttctcaagttccttcaccgccgacatctccgtctcgtgaagaagactctttgaaagtgttatctgctgcagctggagaagtcgccaagatcaaaaaggccaattttgatgctaaacccatcagctacccaaaccctaaccctaattacttaaccagctttcctcaaaacgtggcatattataactgctactggttatgggagccgcattatcctcaatctcagatgggaatagttccaaatgcttggcatatacctccttctcccgttagagccttttacacccttccaaccgccgttaaatcgccgtcgactggtaccggcgttttccttccccggaaatactcaaacccttctgattccccgaagaagaaatcaggagatggatgtgttaaggttgttaaccagcaaaaacctaaaattgaagtgttaccggttcgctgtaaaccaaattcgaaagctggtctctctacaggacgcagcaaaatcgattacgtagctggtggtggatgtctgaagcatgaaaagcctcttctacaagaatggatgtactga

SEQ ID NO: 87175 - protein, 293 aa, Arabidopsis thaliana; identical to SEQ ID NO: 43365
  peptide (1)..(293): Ceres Seq. ID no. 12698164

SEQ ID NO: 87176 - protein, 269 aa, Arabidopsis thaliana; identical to SEQ ID NO: 43366
  peptide (1)..(269): Ceres Seq. ID no. 12698165

SEQ ID NO: 87177 - protein, 203 aa, Arabidopsis thaliana
  peptide (1)..(203): Ceres Seq. ID no. 12698166
MKPKVTESTQSGLGSPNGPFSQVPSPPTSPSREEDSLKVLSAAAGEVAKIKKANFDAKPISYPNPNPNYLTSFPQNVAYYNCYWLWEPHYPQSQMGIVPNAWHIPPSPVRAFYTLPTAVKSPSTGTGVFLPRKYSNPSDSPKKKSGDGCVKVVNQQKPKIEVLPVRCKPNSKAGLSTGRSKIDYVAGGGCLKHEKPLLQEWMY

SEQ ID NO: 87178 - DNA, 1111 bp, Arabidopsis thaliana
  misc_feature (1)..(1111): Ceres Seq. ID no. 12698195
  misc_feature (1)..(1111): Ortholog of  Ceres SEQ ID NO 15170807 as cited in SEQ ID NO 52723
  misc_feature (1)..(1111): Ortholog of  Ceres SEQ ID NO 12611846 as cited in SEQ ID NO 59904
  misc_feature (1)..(1111): Ortholog of  Ceres SEQ ID NO 14303535 as cited in SEQ ID NO 68728
  misc_feature (1)..(1111): Ortholog of  Ceres SEQ ID NO 12635196 as cited in SEQ ID NO 0
  misc_feature (1)..(1111): Ortholog of  Ceres SEQ ID NO 15179463 as cited in SEQ ID NO 0
accacaaaaccctttctcctccaatttcgtcgcacacaggaaaacaaaatgcttctcaaagctgcttctactttctctctattgaacattcatggagagaagaaagacatctctcctctcttctcctcctcctcctccatttcgtctccggtttcttctggaaaatccggcaatctctctttccctcttcgtgcttccaagagttcaaccactaccacaagcacgttgagcggcgttgtgttcgagcctttcgaagaggttaagaaagagatggatctagttccatctggtcaacagctttctcttgctcgtcatttgtactcccctgagtgcgaagccgccgtcaatgagcagatcaatgttgagtataacgtgtcgtatgtgtatcacgctttgtatgcatatttcgatcgtgacaacgttgccctcaagggtctcgccaagtttttcaaggaatcgagtgtggaagaacgagagcacgctgagctgttgatggagtatcagaacaaacgtggtgggagggtcaagttacagcccatggtgttgcctcagtctgagtttgatcatcctgagaaaggagatgctctctatgctatggagttggctctttcattggagaaactagtcaatgaaaagctcctaaacctgcacagtgtggcttccaagaacgatgatgtccagttggcagattttattgagagtgtgtttctgaacgaacaggtggaagccattaagaaaatctcagaatatgtttctcaacttaggagacttggcaaaggacatggaacatggcatttcgatcaggagcttcttggtgctgctgcttaatctgagttttagctgtaatctcgcagtttggttaacttttgagttattttgagtatgagatgtaacttttaaggtagatttgatcaatatcgattctgttgtgagagaaaacaagctattacgctccttggggttaactttctttgtgttttcagtattatggttttgtccacttcgtaatatcactttcctttagaacatttcaaatcagcagttgttttgaggtgtaatgtaatggtcactgatattttctattacccctgcatgaaagtagtatgtttta

SEQ ID NO: 87179 - protein, 275 aa, Arabidopsis thaliana; identical to SEQ ID NO: 22324
  peptide (1)..(275): Ceres Seq. ID no. 12698196

SEQ ID NO: 87180 - protein, 259 aa, Arabidopsis thaliana; identical to SEQ ID NO: 22325
  peptide (1)..(259): Ceres Seq. ID no. 12698197

SEQ ID NO: 87181 - protein, 185 aa, Arabidopsis thaliana; identical to SEQ ID NO: 22326
  peptide (1)..(185): Ceres Seq. ID no. 12698198

SEQ ID NO: 87182 - DNA, 825 bp, Arabidopsis thaliana
  misc_feature (1)..(825): Ceres Seq. ID no. 12698203
  misc_feature (1)..(825): Ortholog of  Ceres SEQ ID NO 15178997 as cited in SEQ ID NO 0
atgccatctatattaagaccaccaagaaacacaatatgtggatcatgctacgaaggggctagaacaacaattgcgctgctcaagaaacttgagggctcgaaagaagatcgtcatgacaaatcgaaccataattccaccatcaataatggctcctctatttcttcgtctcctttgttttcttgtgagccgcaaccattagagaaggtgatcaaatggatgaaaaacatgaaagaaaccgaagaagaacagaagaaaagaatagtcttcttaagcagctttgtgtcgggtttcaaagaacagcttcatgctgatattcttctaaaaccgggcgatgatggccctccaattcctgcacatagagctttgctggcttcaaaatctgagatctttaagaacattctagactcagatggatgcaaaaccgctccagaatacgccataacgctccaagaactaaattccgagcaacttcaagctctcttggagtttctatacaccggtacattggcttcagataagttggagaaaaatgtctacgcgttgtttattgcagcagataagtacatgattcattacttgcaagagttgtgcgagcaatatatgttaagttccttggacatctctagtgttcttaacgttcttgatgtctcggatcttggttcgagcaagacgctgaaggaggcttgtgtagggttcgtggtgcggaacatggacgacgtcgttttctcggataagtacgaacctttctctcagaaaaaccaacatctatgtgtggagatcacaagggcgttcttgatggaaacgagaagcaagagacgtgactaa

SEQ ID NO: 87183 - protein, 274 aa, Arabidopsis thaliana; identical to SEQ ID NO: 70828
  peptide (1)..(274): Ceres Seq. ID no. 12698204

SEQ ID NO: 87184 - protein, 202 aa, Arabidopsis thaliana; identical to SEQ ID NO: 70829
  peptide (1)..(202): Ceres Seq. ID no. 12698205

SEQ ID NO: 87185 - protein, 199 aa, Arabidopsis thaliana
  peptide (1)..(199): Ceres Seq. ID no. 12698206
MKETEEEQKKRIVFLSSFVSGFKEQLHADILLKPGDDGPPIPAHRALLASKSEIFKNILDSDGCKTAPEYAITLQELNSEQLQALLEFLYTGTLASDKLEKNVYALFIAADKYMIHYLQELCEQYMLSSLDISSVLNVLDVSDLGSSKTLKEACVGFVVRNMDDVVFSDKYEPFSQKNQHLCVEITRAFLMETRSKRRD

SEQ ID NO: 87186 - DNA, 1191 bp, Arabidopsis thaliana
  misc_feature (1)..(1191): Ceres Seq. ID no. 12698297
  misc_feature (1)..(1191): Ortholog of  Ceres SEQ ID NO 14309755 as cited in SEQ ID NO 20741
  misc_feature (1)..(1191): Ortholog of  Ceres SEQ ID NO 13638746 as cited in SEQ ID NO 59296
  misc_feature (1)..(1191): Ortholog of  Ceres SEQ ID NO 13596474 as cited in SEQ ID NO 62169
  misc_feature (1)..(1191): Ortholog of  Ceres SEQ ID NO 13598714 as cited in SEQ ID NO 62656
  misc_feature (1)..(1191): Ortholog of  Ceres SEQ ID NO 13596969 as cited in SEQ ID NO 63375
  misc_feature (1)..(1191): Ortholog of  Ceres SEQ ID NO 15225685 as cited in SEQ ID NO 63616
  misc_feature (1)..(1191): Ortholog of  Ceres SEQ ID NO 13597519 as cited in SEQ ID NO 64759
  misc_feature (1)..(1191): Ortholog of  Ceres SEQ ID NO 13587054 as cited in SEQ ID NO 0
atcttctcaaactaaatcaattaaagaggtttcttcttatagaaatgaatttctcttattcttccttgtcaacttggacaaccctaatgacattgggttgtcttctgcttcattcatccatttccagtgctcagctaaccccaactttctatgacaatacatgtccaagcgtctttaccatcgtacgggataccatagtaaacgagctaagatcggatcctcgtatcgctgcaagcatccttcgtcttcacttccacgactgtttcgtcaatggctgtgatgcatcgatcctgttagacaacacaacatcctttcgaacagagaaagatgcggctccaaacgcaaactcggctcgaggatttccagtgatcgatagaatgaaagcagcagtagagacagcatgtccaaggactgtttcatgcgcagatatacttaccatcgcagctcaacaagctgtaaatttggcaggaggtccttcttggagggttcctttggggagaagagatagcttacaagcattctttgctctcgctaatacaaatcttcccgctccattcttcactctcccacaacttaaggccagttttcaaaatgttggacttgaccgtccctctgatctcgttgcactctctggtggtcacacatttggtaaaaaccagtgccaatttattatggatagactatacaactttagcaacactggtttacccgaccctactcttaatactacatacctccagacacttcgtggacaatgtccccgcaatggtaaccagaccgtcttagttgatttcgatctacgcacaccgacggtttttgacaataaatactatgtgaatctgaaagagctaaagggacttatccagacggatcaagagttgttttccagccctaatgccactgacacaatccccttggtgagagaatacgctgatggcactcaaaaattcttcaatgcttttgtggaagcaatgaatagaatgggaaacattacacctctcactggaactcaaggacaaatcagacagaattgtagggtggttaactccaactcgctgctacatgatgtggtcgaaatcgttgactttgtcagctctatgtaacataacgttgtctcgatatatgtggcaaccaaaaatatgttttatgaaataaagtgttctcaaaatgtttatgaagaacatttcgtct

SEQ ID NO: 87187 - protein, 366 aa, Arabidopsis thaliana
  peptide (1)..(366): Ceres Seq. ID no. 12698298
LLKLNQLKRFLLIEMNFSYSSLSTWTTLMTLGCLLLHSSISSAQLTPTFYDNTCPSVFTIVRDTIVNELRSDPRIAASILRLHFHDCFVNGCDASILLDNTTSFRTEKDAAPNANSARGFPVIDRMKAAVETACPRTVSCADILTIAAQQAVNLAGGPSWRVPLGRRDSLQAFFALANTNLPAPFFTLPQLKASFQNVGLDRPSDLVALSGGHTFGKNQCQFIMDRLYNFSNTGLPDPTLNTTYLQTLRGQCPRNGNQTVLVDFDLRTPTVFDNKYYVNLKELKGLIQTDQELFSSPNATDTIPLVREYADGTQKFFNAFVEAMNRMGNITPLTGTQGQIRQNCRVVNSNSLLHDVVEIVDFVSSM

SEQ ID NO: 87188 - protein, 352 aa, Arabidopsis thaliana
  peptide (1)..(352): Ceres Seq. ID no. 12698299
MNFSYSSLSTWTTLMTLGCLLLHSSISSAQLTPTFYDNTCPSVFTIVRDTIVNELRSDPRIAASILRLHFHDCFVNGCDASILLDNTTSFRTEKDAAPNANSARGFPVIDRMKAAVETACPRTVSCADILTIAAQQAVNLAGGPSWRVPLGRRDSLQAFFALANTNLPAPFFTLPQLKASFQNVGLDRPSDLVALSGGHTFGKNQCQFIMDRLYNFSNTGLPDPTLNTTYLQTLRGQCPRNGNQTVLVDFDLRTPTVFDNKYYVNLKELKGLIQTDQELFSSPNATDTIPLVREYADGTQKFFNAFVEAMNRMGNITPLTGTQGQIRQNCRVVNSNSLLHDVVEIVDFVSSM

SEQ ID NO: 87189 - protein, 338 aa, Arabidopsis thaliana
  peptide (1)..(338): Ceres Seq. ID no. 12698300
MTLGCLLLHSSISSAQLTPTFYDNTCPSVFTIVRDTIVNELRSDPRIAASILRLHFHDCFVNGCDASILLDNTTSFRTEKDAAPNANSARGFPVIDRMKAAVETACPRTVSCADILTIAAQQAVNLAGGPSWRVPLGRRDSLQAFFALANTNLPAPFFTLPQLKASFQNVGLDRPSDLVALSGGHTFGKNQCQFIMDRLYNFSNTGLPDPTLNTTYLQTLRGQCPRNGNQTVLVDFDLRTPTVFDNKYYVNLKELKGLIQTDQELFSSPNATDTIPLVREYADGTQKFFNAFVEAMNRMGNITPLTGTQGQIRQNCRVVNSNSLLHDVVEIVDFVSSM

SEQ ID NO: 87190 - DNA, 6111 bp, Arabidopsis thaliana
  misc_feature (1)..(6111): Ceres Seq. ID no. 12699052
  misc_feature (1)..(6111): Ortholog of  Ceres SEQ ID NO 12578315 as cited in SEQ ID NO 62451
  misc_feature (1)..(6111): Ortholog of  Ceres SEQ ID NO 13584577 as cited in SEQ ID NO 65298
atggagtcatcacttccccaagttgctgcacttgatcgttcaactctactcaaagctttcgacgagactaaaaccggcgtgaaaggccttatcgacgccggaatcacagagattccttcgatatttcgtgcacctccggctactttaacaagtccaaaaccaccttcctcctctgatttctccatccccacaatcgatctcaaaggaggtggcacggactcgatcacgcggcggagcttggtggagaagatcggagacgcggcagagaaatggggatttttccaggtgatcaaccacgggatcccgatggatgtgttggagaagatgatagatgggattcgtgagtttcacgagcaagacactgaagtgaagaaagggttttactctcgagatccagctagtaagatggtatacagcagcaacttcgatctgtttagctcaccggcggcgaattggagagatacacttggttgttatacagcaccagatcccccgagaccggaggacttacccgccacttgtggatttttacgcccccattattcattagtgtgtcttaaagattttggtggacattttttcagggagatgatgattgagtactcaaaggaagtgatgaaattgggtaaattactcttcgagcttctctcggaagctctagggttaaacactaatcacctcaaggacatggattgcactaactccttgctgttgctcggccattattacccgccatgtccccaacccgaccttactctaggcttaacgaaacactccgacaactcttttctcactattcttcttcaagaccatatcggagggcttcaagttcttcatgaccaatattgggttgatgttcctcctgtccctggagctcttgttcttataacaaacgacaagttcataagcgtggagcatagggttttggccaatgtagctggaccgagaatttcagtggcatgtttcttcagctcgtatttgatggcgaatcctcgagtttatggacccatcaaagagattttgtctgaagaaaaccctcctaattatagagacactactattacagagtatgcaaagttctacagatccaaaggattcgatgcttgtctaataagggtgcttgggactttgattatatgtgtaatgccttcttttatgactgttaaagccatgcatgaaactgtcacaaggtcgatttttggatacattattggtttatgtgttaattcaaggcagttgaatcacttgatgtttcaggtactgttgtttatctctatggatgccaaaaagttggatactggcccgagagatgcaatcaactggctccctgacgagattctgggcaaaatcttgtcattacttgcgacaaaacaggctgtttcaacatcggttctttctaaaaagtggaggactctctttaaattagtggataccctcgagtttgacgattctgtctctggaatgggtgaacaagaagcgagctatgtgtttccggagagctttaaggatttggtggatcgaacagtagctttgcagtgtgattatccgatcaggaagttgtcactaaaatgtcatgttggcagggacgatgaacaacgaaaggcttgtgtgggccgctggatatcgaatgtcgtagggcgcggtgtttcagaagtggtactaaggatcaatgatcgtggtttacactttctgtctcctcagctcttgacatgcaaaacactggttaagctgacactaggcacacgtctctttcttggaaagcttccttcatatgtgtcacttccatctcttaagtttctcttcatccatagcgtcttctttgatgattttggagagttgtctaatgtgcttcttgctggttgcccggtggtcgaggcgttatatctcaatcaaaatggcgaatcaatgccttacaccatatcgagtcctacgctcaagagactatcagttcactacgagtatcattttgagagcgtaatctcatttgacctgccaaatctcgagtaccttgactactctgattacgccttgtatgggtatccacaagttaacttggaatcccttgttgaagcttatctgaatcttgataaggctgaacatgtcgagagcccggatgtaaccaaactcattatgggaataagaaatgttgagatccttagtctatctcccgattcggttggagtgatctattcatgctgtaaatatgggctacttctaccggtattcaacaatctggttagtttatcttttgggactaagaaaacacgagcttggaaattgcttgcagatatacttaaacagtctccaaagcttgaaactctcatcatcgaggatctgaatggttacccactcgatgtctccatgcctctgaaccaagtgaaggagttgcagattctggaatatggagaaagtgatgacgagagactccaaagtcgattggaatcgaaaaacaaactcggttcttttgatttcgagaagtttctgttcccgattcctccgccaatcaaaatcacggtgagtcctcatccttctgattccggtggtgatggttcgaactcgaagtcttcttccgacgacgagtttgttagcttggactcttccacttctggcttatgttcttcttccggcaagtttttcgatcttattaaatttctgattgctctatctgtcttacgagagaccaaaacgatggagagcacgaagattgctccttcattcgatcgtgccagtgagcttaaagctttcgatgagacgaagactggtgtgaaaggactcgttgactctggaatctcaaagattccacgcattttccatcactcatctgtcgaactagcaaaccctaaaccacttccctcggacctgctacatctcaagacgatcccaacgatcgatctcggaggacgggacttccaggacgcgattaagcacaagaacgcgattgaagggattaaagaagcagctgccaagtggggtttcttccaagtgatcaaccatggagtttcgctcgagcttcttgagaagatgaaagatggagttcgtgactttcatgagcaacctcctgaagtgaggaaagatttgtacagccgcgatttcggcagaaagtttatctatttaagtaatttcgatctctacactgctgcagctgcgaattggagagacacattctattgttacatggctccagatcctccagaaccacaggatctgccagagatttgtagggatgttatgatggaatactcaaagcaagtgatgattttgggtgaatttctgtttgagcttttgtcagaagcactagggttgaaccctaatcacctcaaggacatggagtgcttaaagggtttgcgcatgctttgccactacttcccaccgtgtccggagcctgacctaacttttggcacaagtaagcactccgacggctcttttcttaccgtccttctaccagataacatagaagggcttcaggtttgtcgtgagggatactggttcgatgttcctcatgttcccggcgctctcatcatcaacatcggagatcttctgcaggcaagtttgcgcaatcaatacatgtttgctagctcagatttcacaagtttatttacaatgctagatttgtttaagaaatcttcctcttggttcaaacttataacaaacgacaagttcatcagtttgaagcatagagtattggcgaacagagccacaagagctcgagtctctgtcgcatgtttcttccatacccacgtaaaaccaaatcctagagtgtacggacccattaaagagcttgtgtccgaagaaaatcctccaaagtacagagagaccaccatcagagattacgctacttacttcaatggcaaaggacttggcgggacctctgctttgctggattttaaacaactggtcccatctttgaacttgcgaaaaatgtttcattcttgctctgttattcgagaagctaaaactatggagacgaagaatattgctccttcattcgatcgtgccagtgagcttaaagcttttgatgagaccaaaacgggtgtgaaaggactcgtcgactccggaatctcacagattccacgcatctttcatcattcatctgtcaaacttgcaaaccctgaaccagtttcctcggacttgctacatctcaagacgatcccaacgatcgatcttggaggacgagttttcgaggacgagcttaagcacaagaacgcgattgaaaagattaaagaagcagcagagaagtggggtttcttccaggtgatcaaccatggagtttcgctcgaacttcttgagaagatgaaagatggagttcgtgggtttcacgagcaatcccctgaagtgaggaaagatttctacagtcgcgatttaactagaaagtttcagtattcaagtatgagtccattccttatacttgacttgatgtgtaatctctattcatatatggtgaattgtttcagggatgtcaccatagaatattcagagcaagtgatgaatttgggtgaatttctctttacgcttctatcagaagctctagggttgaaccctaatcacctcaatgacatggattgttctaagggtttgatcatgctttgccattactacccaccatgtccagagcctgacctaactttaggcacaagtcagcacgccgacaatacttttcttaccgttcttcttccagatcagatcgaagggcttcaggttcttcgtgaagggtactggttcaacgttcctcatgttccaggagctctaatcatcaacatcggagatcttctacaggcaagtttgcacaaccaatacatttttttgctctgttttgcagaacttataacaaacgacaagttcgtcagtttggagcacagagtattggcgaacagagcaacaagagctcgagtctctgtagcagaaacaaaaacgatggagatgatgaagattgatcctttattcgatcgtgccagtgagcttaaagctttcgatgaaacgaaaacgggtgtgaaaggactcgtcgactccggagtttcacaagttccacgcatctttcatcatccaactgtcaaattatcaaccccaaaaccacttccctcggacctgctacatctcaagacgatcccaacgatcgatctcggaggacgggacttccaggacgcgattaagcgcaataacgcgattgaagagattaaagaagcagcagcgaagtggggtttcttccaggtgatcaaccatggagtttcgcttgaacttcttgagaagatgaaaaaaggagttcgtgacttccacgagcaatcacaagaagtgaggaaagaattctacagtcgcgatttcagcagaaggtttctgtatttaagtaatttcgatctctttagttctccagcagcaaattggagagacactttctcttgtaccatggctccagatactccaaaaccacaggatcttccggagatttgtagggatattatgatggaatattcaaagcaagtgatgaatttgggtaaatttctcttcgagcttttatcagaagctctagggttggaacctaatcacctcaatgacatggattgctctaagggtttgctcatgctctcccactactacccaccgtgtccagagcctgacctaactttaggcacaagtcagcactccgacaactcttttctcactgtccttcttcccgatcagatcgaagggcttcaggttcgtcgtgaagggcactggttcgatgttcctcatgtttccggcgctctcatcatcaacatcggagatcttttacaggcaagttcactgatgcatttttgctcagttttgcattgtataacttatcttccctattgttcatttttgggttttgtggttttgatgcagcttataacaaacgacaaattcatcagtttggagcacagagtattggcgaacagagcaacaagagctcgagtgtctgtcgcatgtttctttaccactggagtaagaccgaatcctagaatgtacggaccgattagagagcttgtgtctgaagaaaatcctccaaagtacagagagaccacaattaaagactacgctacttacttcaatgccaaaggacttgacgggacctctgctttgctccattttaagatatga

SEQ ID NO: 87191 - protein, 2036 aa, Arabidopsis thaliana
  peptide (1)..(2036): Ceres Seq. ID no. 12699053
MESSLPQVAALDRSTLLKAFDETKTGVKGLIDAGITEIPSIFRAPPATLTSPKPPSSSDFSIPTIDLKGGGTDSITRRSLVEKIGDAAEKWGFFQVINHGIPMDVLEKMIDGIREFHEQDTEVKKGFYSRDPASKMVYSSNFDLFSSPAANWRDTLGCYTAPDPPRPEDLPATCGFLRPHYSLVCLKDFGGHFFREMMIEYSKEVMKLGKLLFELLSEALGLNTNHLKDMDCTNSLLLLGHYYPPCPQPDLTLGLTKHSDNSFLTILLQDHIGGLQVLHDQYWVDVPPVPGALVLITNDKFISVEHRVLANVAGPRISVACFFSSYLMANPRVYGPIKEILSEENPPNYRDTTITEYAKFYRSKGFDACLIRVLGTLIICVMPSFMTVKAMHETVTRSIFGYIIGLCVNSRQLNHLMFQVLLFISMDAKKLDTGPRDAINWLPDEILGKILSLLATKQAVSTSVLSKKWRTLFKLVDTLEFDDSVSGMGEQEASYVFPESFKDLVDRTVALQCDYPIRKLSLKCHVGRDDEQRKACVGRWISNVVGRGVSEVVLRINDRGLHFLSPQLLTCKTLVKLTLGTRLFLGKLPSYVSLPSLKFLFIHSVFFDDFGELSNVLLAGCPVVEALYLNQNGESMPYTISSPTLKRLSVHYEYHFESVISFDLPNLEYLDYSDYALYGYPQVNLESLVEAYLNLDKAEHVESPDVTKLIMGIRNVEILSLSPDSVGVIYSCCKYGLLLPVFNNLVSLSFGTKKTRAWKLLADILKQSPKLETLIIEDLNGYPLDVSMPLNQVKELQILEYGESDDERLQSRLESKNKLGSFDFEKFLFPIPPPIKITVSPHPSDSGGDGSNSKSSSDDEFVSLDSSTSGLCSSSGKFFDLIKFLIALSVLRETKTMESTKIAPSFDRASELKAFDETKTGVKGLVDSGISKIPRIFHHSSVELANPKPLPSDLLHLKTIPTIDLGGRDFQDAIKHKNAIEGIKEAAAKWGFFQVINHGVSLELLEKMKDGVRDFHEQPPEVRKDLYSRDFGRKFIYLSNFDLYTAAAANWRDTFYCYMAPDPPEPQDLPEICRDVMMEYSKQVMILGEFLFELLSEALGLNPNHLKDMECLKGLRMLCHYFPPCPEPDLTFGTSKHSDGSFLTVLLPDNIEGLQVCREGYWFDVPHVPGALIINIGDLLQASLRNQYMFASSDFTSLFTMLDLFKKSSSWFKLITNDKFISLKHRVLANRATRARVSVACFFHTHVKPNPRVYGPIKELVSEENPPKYRETTIRDYATYFNGKGLGGTSALLDFKQLVPSLNLRKMFHSCSVIREAKTMETKNIAPSFDRASELKAFDETKTGVKGLVDSGISQIPRIFHHSSVKLANPEPVSSDLLHLKTIPTIDLGGRVFEDELKHKNAIEKIKEAAEKWGFFQVINHGVSLELLEKMKDGVRGFHEQSPEVRKDFYSRDLTRKFQYSSMSPFLILDLMCNLYSYMVNCFRDVTIEYSEQVMNLGEFLFTLLSEALGLNPNHLNDMDCSKGLIMLCHYYPPCPEPDLTLGTSQHADNTFLTVLLPDQIEGLQVLREGYWFNVPHVPGALIINIGDLLQASLHNQYIFLLCFAELITNDKFVSLEHRVLANRATRARVSVAETKTMEMMKIDPLFDRASELKAFDETKTGVKGLVDSGVSQVPRIFHHPTVKLSTPKPLPSDLLHLKTIPTIDLGGRDFQDAIKRNNAIEEIKEAAAKWGFFQVINHGVSLELLEKMKKGVRDFHEQSQEVRKEFYSRDFSRRFLYLSNFDLFSSPAANWRDTFSCTMAPDTPKPQDLPEICRDIMMEYSKQVMNLGKFLFELLSEALGLEPNHLNDMDCSKGLLMLSHYYPPCPEPDLTLGTSQHSDNSFLTVLLPDQIEGLQVRREGHWFDVPHVSGALIINIGDLLQASSLMHFCSVLHCITYLPYCSFLGFVVLMQLITNDKFISLEHRVLANRATRARVSVACFFTTGVRPNPRMYGPIRELVSEENPPKYRETTIKDYATYFNAKGLDGTSALLHFKI

SEQ ID NO: 87192 - protein, 1934 aa, Arabidopsis thaliana
  peptide (1)..(1934): Ceres Seq. ID no. 12699054
MDVLEKMIDGIREFHEQDTEVKKGFYSRDPASKMVYSSNFDLFSSPAANWRDTLGCYTAPDPPRPEDLPATCGFLRPHYSLVCLKDFGGHFFREMMIEYSKEVMKLGKLLFELLSEALGLNTNHLKDMDCTNSLLLLGHYYPPCPQPDLTLGLTKHSDNSFLTILLQDHIGGLQVLHDQYWVDVPPVPGALVLITNDKFISVEHRVLANVAGPRISVACFFSSYLMANPRVYGPIKEILSEENPPNYRDTTITEYAKFYRSKGFDACLIRVLGTLIICVMPSFMTVKAMHETVTRSIFGYIIGLCVNSRQLNHLMFQVLLFISMDAKKLDTGPRDAINWLPDEILGKILSLLATKQAVSTSVLSKKWRTLFKLVDTLEFDDSVSGMGEQEASYVFPESFKDLVDRTVALQCDYPIRKLSLKCHVGRDDEQRKACVGRWISNVVGRGVSEVVLRINDRGLHFLSPQLLTCKTLVKLTLGTRLFLGKLPSYVSLPSLKFLFIHSVFFDDFGELSNVLLAGCPVVEALYLNQNGESMPYTISSPTLKRLSVHYEYHFESVISFDLPNLEYLDYSDYALYGYPQVNLESLVEAYLNLDKAEHVESPDVTKLIMGIRNVEILSLSPDSVGVIYSCCKYGLLLPVFNNLVSLSFGTKKTRAWKLLADILKQSPKLETLIIEDLNGYPLDVSMPLNQVKELQILEYGESDDERLQSRLESKNKLGSFDFEKFLFPIPPPIKITVSPHPSDSGGDGSNSKSSSDDEFVSLDSSTSGLCSSSGKFFDLIKFLIALSVLRETKTMESTKIAPSFDRASELKAFDETKTGVKGLVDSGISKIPRIFHHSSVELANPKPLPSDLLHLKTIPTIDLGGRDFQDAIKHKNAIEGIKEAAAKWGFFQVINHGVSLELLEKMKDGVRDFHEQPPEVRKDLYSRDFGRKFIYLSNFDLYTAAAANWRDTFYCYMAPDPPEPQDLPEICRDVMMEYSKQVMILGEFLFELLSEALGLNPNHLKDMECLKGLRMLCHYFPPCPEPDLTFGTSKHSDGSFLTVLLPDNIEGLQVCREGYWFDVPHVPGALIINIGDLLQASLRNQYMFASSDFTSLFTMLDLFKKSSSWFKLITNDKFISLKHRVLANRATRARVSVACFFHTHVKPNPRVYGPIKELVSEENPPKYRETTIRDYATYFNGKGLGGTSALLDFKQLVPSLNLRKMFHSCSVIREAKTMETKNIAPSFDRASELKAFDETKTGVKGLVDSGISQIPRIFHHSSVKLANPEPVSSDLLHLKTIPTIDLGGRVFEDELKHKNAIEKIKEAAEKWGFFQVINHGVSLELLEKMKDGVRGFHEQSPEVRKDFYSRDLTRKFQYSSMSPFLILDLMCNLYSYMVNCFRDVTIEYSEQVMNLGEFLFTLLSEALGLNPNHLNDMDCSKGLIMLCHYYPPCPEPDLTLGTSQHADNTFLTVLLPDQIEGLQVLREGYWFNVPHVPGALIINIGDLLQASLHNQYIFLLCFAELITNDKFVSLEHRVLANRATRARVSVAETKTMEMMKIDPLFDRASELKAFDETKTGVKGLVDSGVSQVPRIFHHPTVKLSTPKPLPSDLLHLKTIPTIDLGGRDFQDAIKRNNAIEEIKEAAAKWGFFQVINHGVSLELLEKMKKGVRDFHEQSQEVRKEFYSRDFSRRFLYLSNFDLFSSPAANWRDTFSCTMAPDTPKPQDLPEICRDIMMEYSKQVMNLGKFLFELLSEALGLEPNHLNDMDCSKGLLMLSHYYPPCPEPDLTLGTSQHSDNSFLTVLLPDQIEGLQVRREGHWFDVPHVSGALIINIGDLLQASSLMHFCSVLHCITYLPYCSFLGFVVLMQLITNDKFISLEHRVLANRATRARVSVACFFTTGVRPNPRMYGPIRELVSEENPPKYRETTIKDYATYFNAKGLDGTSALLHFKI

SEQ ID NO: 87193 - protein, 1928 aa, Arabidopsis thaliana
  peptide (1)..(1928): Ceres Seq. ID no. 12699055
MIDGIREFHEQDTEVKKGFYSRDPASKMVYSSNFDLFSSPAANWRDTLGCYTAPDPPRPEDLPATCGFLRPHYSLVCLKDFGGHFFREMMIEYSKEVMKLGKLLFELLSEALGLNTNHLKDMDCTNSLLLLGHYYPPCPQPDLTLGLTKHSDNSFLTILLQDHIGGLQVLHDQYWVDVPPVPGALVLITNDKFISVEHRVLANVAGPRISVACFFSSYLMANPRVYGPIKEILSEENPPNYRDTTITEYAKFYRSKGFDACLIRVLGTLIICVMPSFMTVKAMHETVTRSIFGYIIGLCVNSRQLNHLMFQVLLFISMDAKKLDTGPRDAINWLPDEILGKILSLLATKQAVSTSVLSKKWRTLFKLVDTLEFDDSVSGMGEQEASYVFPESFKDLVDRTVALQCDYPIRKLSLKCHVGRDDEQRKACVGRWISNVVGRGVSEVVLRINDRGLHFLSPQLLTCKTLVKLTLGTRLFLGKLPSYVSLPSLKFLFIHSVFFDDFGELSNVLLAGCPVVEALYLNQNGESMPYTISSPTLKRLSVHYEYHFESVISFDLPNLEYLDYSDYALYGYPQVNLESLVEAYLNLDKAEHVESPDVTKLIMGIRNVEILSLSPDSVGVIYSCCKYGLLLPVFNNLVSLSFGTKKTRAWKLLADILKQSPKLETLIIEDLNGYPLDVSMPLNQVKELQILEYGESDDERLQSRLESKNKLGSFDFEKFLFPIPPPIKITVSPHPSDSGGDGSNSKSSSDDEFVSLDSSTSGLCSSSGKFFDLIKFLIALSVLRETKTMESTKIAPSFDRASELKAFDETKTGVKGLVDSGISKIPRIFHHSSVELANPKPLPSDLLHLKTIPTIDLGGRDFQDAIKHKNAIEGIKEAAAKWGFFQVINHGVSLELLEKMKDGVRDFHEQPPEVRKDLYSRDFGRKFIYLSNFDLYTAAAANWRDTFYCYMAPDPPEPQDLPEICRDVMMEYSKQVMILGEFLFELLSEALGLNPNHLKDMECLKGLRMLCHYFPPCPEPDLTFGTSKHSDGSFLTVLLPDNIEGLQVCREGYWFDVPHVPGALIINIGDLLQASLRNQYMFASSDFTSLFTMLDLFKKSSSWFKLITNDKFISLKHRVLANRATRARVSVACFFHTHVKPNPRVYGPIKELVSEENPPKYRETTIRDYATYFNGKGLGGTSALLDFKQLVPSLNLRKMFHSCSVIREAKTMETKNIAPSFDRASELKAFDETKTGVKGLVDSGISQIPRIFHHSSVKLANPEPVSSDLLHLKTIPTIDLGGRVFEDELKHKNAIEKIKEAAEKWGFFQVINHGVSLELLEKMKDGVRGFHEQSPEVRKDFYSRDLTRKFQYSSMSPFLILDLMCNLYSYMVNCFRDVTIEYSEQVMNLGEFLFTLLSEALGLNPNHLNDMDCSKGLIMLCHYYPPCPEPDLTLGTSQHADNTFLTVLLPDQIEGLQVLREGYWFNVPHVPGALIINIGDLLQASLHNQYIFLLCFAELITNDKFVSLEHRVLANRATRARVSVAETKTMEMMKIDPLFDRASELKAFDETKTGVKGLVDSGVSQVPRIFHHPTVKLSTPKPLPSDLLHLKTIPTIDLGGRDFQDAIKRNNAIEEIKEAAAKWGFFQVINHGVSLELLEKMKKGVRDFHEQSQEVRKEFYSRDFSRRFLYLSNFDLFSSPAANWRDTFSCTMAPDTPKPQDLPEICRDIMMEYSKQVMNLGKFLFELLSEALGLEPNHLNDMDCSKGLLMLSHYYPPCPEPDLTLGTSQHSDNSFLTVLLPDQIEGLQVRREGHWFDVPHVSGALIINIGDLLQASSLMHFCSVLHCITYLPYCSFLGFVVLMQLITNDKFISLEHRVLANRATRARVSVACFFTTGVRPNPRMYGPIRELVSEENPPKYRETTIKDYATYFNAKGLDGTSALLHFKI

SEQ ID NO: 87194 - DNA, 1146 bp, Arabidopsis thaliana
  misc_feature (1)..(1146): Ceres Seq. ID no. 12699064
  misc_feature (1)..(1146): Ortholog of  Ceres SEQ ID NO 15224720 as cited in SEQ ID NO 0
atggttgaattctttgatccttgtcatccaattctagttggaggtattggtttcggcgaggacaatgttggatatatgcaggcccggttgaagaaacataggtggcataagaaagtactaaagacaagagatcctattattgtgtctattggatggagacgctatcagactattcctgtatttgccattgaagatcgcaatggcaggcatcgaatgctcaagtatactccagaacacatgcactgccttgcttcgttctggggtcctcttgtcccacccaacactggctttgtcgctttccagaacctgtcaaacaatcaggcaggatttaggataacagcgacttctgtagttctggagtttaatcaccaggcccgtattgtaaagaaaatcaagctggttgggactccgtgcaagatcaagaaaaagactgcatttatcaaagacatgttcacttctgaccttgaaatagctcgatttgaaggttcatctgttcggacagttagtggcattagaggacaagtaaaaaaggctggaaaaaacatgcttgataacaaggctgaagaagggattgcgaggtgtacctttgaagatcaaatccatatgagcgacatggtattcttaagggcttggactacagtggaagttccacaattttacaatcctctaacgacagccttgcaaccccgcgataagacctggaatgggatgaaaacttttggcgaactccgtagagagctgaatattcctattccagtgaataaggattcactctacaaggcaatcgaaagaaagcaaaagaagttcaatccactacagattccaaagcgtctagaaaaagatttaccgtttatgtcgaaacccaaaaatataccaaagcggaaaagaccatcactagaggataaaagagcagttataatggaaccgaaagaaagaaaagagcatactatcatccagcaattccagctgcttcaacatcacacgatgaagaagaaaaaggcaacggatcagaagaagaggaaagagtatgaagcagagaaagctaagaatgaggaaataaataagaaacgtaggagagaagagagacgggacagatatcgtgaggaagataaacagaaaaagaagacgagaagaagccttgattaa

SEQ ID NO: 87195 - protein, 381 aa, Arabidopsis thaliana
  peptide (1)..(381): Ceres Seq. ID no. 12699065
MVEFFDPCHPILVGGIGFGEDNVGYMQARLKKHRWHKKVLKTRDPIIVSIGWRRYQTIPVFAIEDRNGRHRMLKYTPEHMHCLASFWGPLVPPNTGFVAFQNLSNNQAGFRITATSVVLEFNHQARIVKKIKLVGTPCKIKKKTAFIKDMFTSDLEIARFEGSSVRTVSGIRGQVKKAGKNMLDNKAEEGIARCTFEDQIHMSDMVFLRAWTTVEVPQFYNPLTTALQPRDKTWNGMKTFGELRRELNIPIPVNKDSLYKAIERKQKKFNPLQIPKRLEKDLPFMSKPKNIPKRKRPSLEDKRAVIMEPKERKEHTIIQQFQLLQHHTMKKKKATDQKKRKEYEAEKAKNEEINKKRRREERRDRYREEDKQKKKTRRSLD

SEQ ID NO: 87196 - protein, 356 aa, Arabidopsis thaliana
  peptide (1)..(356): Ceres Seq. ID no. 12699066
MQARLKKHRWHKKVLKTRDPIIVSIGWRRYQTIPVFAIEDRNGRHRMLKYTPEHMHCLASFWGPLVPPNTGFVAFQNLSNNQAGFRITATSVVLEFNHQARIVKKIKLVGTPCKIKKKTAFIKDMFTSDLEIARFEGSSVRTVSGIRGQVKKAGKNMLDNKAEEGIARCTFEDQIHMSDMVFLRAWTTVEVPQFYNPLTTALQPRDKTWNGMKTFGELRRELNIPIPVNKDSLYKAIERKQKKFNPLQIPKRLEKDLPFMSKPKNIPKRKRPSLEDKRAVIMEPKERKEHTIIQQFQLLQHHTMKKKKATDQKKRKEYEAEKAKNEEINKKRRREERRDRYREEDKQKKKTRRSLD

SEQ ID NO: 87197 - protein, 310 aa, Arabidopsis thaliana
  peptide (1)..(310): Ceres Seq. ID no. 12699067
MLKYTPEHMHCLASFWGPLVPPNTGFVAFQNLSNNQAGFRITATSVVLEFNHQARIVKKIKLVGTPCKIKKKTAFIKDMFTSDLEIARFEGSSVRTVSGIRGQVKKAGKNMLDNKAEEGIARCTFEDQIHMSDMVFLRAWTTVEVPQFYNPLTTALQPRDKTWNGMKTFGELRRELNIPIPVNKDSLYKAIERKQKKFNPLQIPKRLEKDLPFMSKPKNIPKRKRPSLEDKRAVIMEPKERKEHTIIQQFQLLQHHTMKKKKATDQKKRKEYEAEKAKNEEINKKRRREERRDRYREEDKQKKKTRRSLD

SEQ ID NO: 87198 - DNA, 1245 bp, Arabidopsis thaliana
  misc_feature (1)..(1245): Ceres Seq. ID no. 12699072
  misc_feature (1)..(1245): Ortholog of  Ceres SEQ ID NO 15172020 as cited in SEQ ID NO 59739
atgatagcagccgcagtgcattaccgtctgcggaggctacgtgacaccaaaatcatccctcgtctcaaatcatctcacaaacacaaaggccatgagaaactcgagagattctctcattacgtcgcaaggcaaatgggattcaaggacagaagagagtgtccaaatctctgcaagttagcagcagaatacataagtaaatctgaatgttgtgaagaagacatttacagctttttctctgaagaacctgatgctgataccctcttcattaagcttgttgaggagtttgaaagatgcattctcagctactttgcgtttcactggagccacgccgatctcatgattactcagctacaagggaaaagcactgtgcttaaggacatactcaaagaagcattctgggcaggagcagactctgtggtgattgaagctgatgctttcaaagagtctgatgtcatttacagagccttaagctctcgtggccatgtcgatatgatccagacagctgaattggttcatcagtcatcaacagatgcagcttcatccctgctagtgacggctctgaacgaaggaagggatgtgataatggatgggacactctcttgggtaccttttgtggtgcagacaataacaatggcgaggaacgtacaccgacaccattacagaatgggagctggatacaaggttggtgatgatggagttataacagagaactattgggaacgaattggtgaaaggcaacagattcaagaggatggtcgtaggagaaaaccgtatagaatagaactagttggagttgtgtgcgatgcgtatttagcagttataagaggcattaggagagctatcatgtgcagaagagcagttagggtgagatcacagctgagatctcacaaacggtttgcggaagcatttcctacatattgcagccttgtcgacaatgctaggctctactgcactaacgcgctggaaggctctccaaagctgataggttggaaagaaaaggaaaagacattgctagtagatacagaagagatagattgtttgaagcgagtaggagggttaaacgagaacgcaggctccatttacgagctctatagacaacccaaccctgcttgtgaagcaggttcaatctggaaagacattgttctttcaccttcaaggtttagcattcaacaggaactcaaatattccattcagaaagttgaaaaaagatctaaacaacatctcatcaacaacaccaaaagctga

SEQ ID NO: 87199 - protein, 414 aa, Arabidopsis thaliana
  peptide (1)..(414): Ceres Seq. ID no. 12699073
MIAAAVHYRLRRLRDTKIIPRLKSSHKHKGHEKLERFSHYVARQMGFKDRRECPNLCKLAAEYISKSECCEEDIYSFFSEEPDADTLFIKLVEEFERCILSYFAFHWSHADLMITQLQGKSTVLKDILKEAFWAGADSVVIEADAFKESDVIYRALSSRGHVDMIQTAELVHQSSTDAASSLLVTALNEGRDVIMDGTLSWVPFVVQTITMARNVHRHHYRMGAGYKVGDDGVITENYWERIGERQQIQEDGRRRKPYRIELVGVVCDAYLAVIRGIRRAIMCRRAVRVRSQLRSHKRFAEAFPTYCSLVDNARLYCTNALEGSPKLIGWKEKEKTLLVDTEEIDCLKRVGGLNENAGSIYELYRQPNPACEAGSIWKDIVLSPSRFSIQQELKYSIQKVEKRSKQHLINNTKS

SEQ ID NO: 87200 - protein, 370 aa, Arabidopsis thaliana
  peptide (1)..(370): Ceres Seq. ID no. 12699074
MGFKDRRECPNLCKLAAEYISKSECCEEDIYSFFSEEPDADTLFIKLVEEFERCILSYFAFHWSHADLMITQLQGKSTVLKDILKEAFWAGADSVVIEADAFKESDVIYRALSSRGHVDMIQTAELVHQSSTDAASSLLVTALNEGRDVIMDGTLSWVPFVVQTITMARNVHRHHYRMGAGYKVGDDGVITENYWERIGERQQIQEDGRRRKPYRIELVGVVCDAYLAVIRGIRRAIMCRRAVRVRSQLRSHKRFAEAFPTYCSLVDNARLYCTNALEGSPKLIGWKEKEKTLLVDTEEIDCLKRVGGLNENAGSIYELYRQPNPACEAGSIWKDIVLSPSRFSIQQELKYSIQKVEKRSKQHLINNTKS

SEQ ID NO: 87201 - protein, 302 aa, Arabidopsis thaliana
  peptide (1)..(302): Ceres Seq. ID no. 12699075
MITQLQGKSTVLKDILKEAFWAGADSVVIEADAFKESDVIYRALSSRGHVDMIQTAELVHQSSTDAASSLLVTALNEGRDVIMDGTLSWVPFVVQTITMARNVHRHHYRMGAGYKVGDDGVITENYWERIGERQQIQEDGRRRKPYRIELVGVVCDAYLAVIRGIRRAIMCRRAVRVRSQLRSHKRFAEAFPTYCSLVDNARLYCTNALEGSPKLIGWKEKEKTLLVDTEEIDCLKRVGGLNENAGSIYELYRQPNPACEAGSIWKDIVLSPSRFSIQQELKYSIQKVEKRSKQHLINNTKS

SEQ ID NO: 87202 - DNA, 978 bp, Arabidopsis thaliana
  misc_feature (1)..(978): Ceres Seq. ID no. 12699087
  misc_feature (1)..(978): Ortholog of  Ceres SEQ ID NO 14307273 as cited in SEQ ID NO 54302
  misc_feature (1)..(978): Ortholog of  Ceres SEQ ID NO 14315317 as cited in SEQ ID NO 58242
  misc_feature (1)..(978): Ortholog of  Ceres SEQ ID NO 13655375 as cited in SEQ ID NO 63347
  misc_feature (1)..(978): Ortholog of  Ceres SEQ ID NO 12626166 as cited in SEQ ID NO 64505
  misc_feature (1)..(978): Ortholog of  Ceres SEQ ID NO 14301599 as cited in SEQ ID NO 65699
  misc_feature (1)..(978): Ortholog of  Ceres SEQ ID NO 14301978 as cited in SEQ ID NO 0
  misc_feature (1)..(978): Ortholog of  Ceres SEQ ID NO 14303290 as cited in SEQ ID NO 0
atgagcgagggccagaagttccagttgggaacaatcggcgctttgagtttgtccgttgtgtcatctgtctcgattgtgatctgtaacaaagcgcttattagcacccttggcttcacattcgcgactactttgacaagttggcatcttttggtcacattttgttcccttcatgtggcattatggatgaagatgttcgaacacaagccttttgatccacgagctgtgatgggatttggcatattgaatgggatatccataggactattgaacctcagcctgggctttaattctgtcggtttttaccagatgactaaactagctatcatcccctgcactgttctcttggagaccctcttcttcaggaaaaagttcagtcgaaaaatccagttttcattaaccatccttctccttggtgttggaattgcaaccgtcacagatcttcaacttaatatgctgggttctgtcttgtcgctgctggctgttgtcacaacttgtgttgctcaaattatgacaaataccatccagaagaagttcaaagtttcatccacgcagcttctgtatcagtcttgcccatatcaagcaatcactcttttcgtcactgggccatttttagatgggctcctaaccaatcagaacgtgtttgctttcaagtacacttctcaagtagtgttcttcatcgtcctgtcttgcctcatatcagtctctgtaaacttcagcacatttcttgtcattggaaaaacatctcctgtcacatatcaggttctaggacatctcaaaacatgcctggttctagcatttggctatgtgttgctgcgagacccattcgactggcgcaacattctcggtattctagtggctgtgattggaatggttgtttattcctattactgctcgattgagactcagcagaaggcaagtgaaacctcaactcagttgcctcaggtctatctatatatactgacttgttatattgcttaa

SEQ ID NO: 87203 - protein, 325 aa, Arabidopsis thaliana
  peptide (1)..(325): Ceres Seq. ID no. 12699088
MSEGQKFQLGTIGALSLSVVSSVSIVICNKALISTLGFTFATTLTSWHLLVTFCSLHVALWMKMFEHKPFDPRAVMGFGILNGISIGLLNLSLGFNSVGFYQMTKLAIIPCTVLLETLFFRKKFSRKIQFSLTILLLGVGIATVTDLQLNMLGSVLSLLAVVTTCVAQIMTNTIQKKFKVSSTQLLYQSCPYQAITLFVTGPFLDGLLTNQNVFAFKYTSQVVFFIVLSCLISVSVNFSTFLVIGKTSPVTYQVLGHLKTCLVLAFGYVLLRDPFDWRNILGILVAVIGMVVYSYYCSIETQQKASETSTQLPQVYLYILTCYIA

SEQ ID NO: 87204 - protein, 264 aa, Arabidopsis thaliana
  peptide (1)..(264): Ceres Seq. ID no. 12699089
MKMFEHKPFDPRAVMGFGILNGISIGLLNLSLGFNSVGFYQMTKLAIIPCTVLLETLFFRKKFSRKIQFSLTILLLGVGIATVTDLQLNMLGSVLSLLAVVTTCVAQIMTNTIQKKFKVSSTQLLYQSCPYQAITLFVTGPFLDGLLTNQNVFAFKYTSQVVFFIVLSCLISVSVNFSTFLVIGKTSPVTYQVLGHLKTCLVLAFGYVLLRDPFDWRNILGILVAVIGMVVYSYYCSIETQQKASETSTQLPQVYLYILTCYIA

SEQ ID NO: 87205 - protein, 262 aa, Arabidopsis thaliana
  peptide (1)..(262): Ceres Seq. ID no. 12699090
MFEHKPFDPRAVMGFGILNGISIGLLNLSLGFNSVGFYQMTKLAIIPCTVLLETLFFRKKFSRKIQFSLTILLLGVGIATVTDLQLNMLGSVLSLLAVVTTCVAQIMTNTIQKKFKVSSTQLLYQSCPYQAITLFVTGPFLDGLLTNQNVFAFKYTSQVVFFIVLSCLISVSVNFSTFLVIGKTSPVTYQVLGHLKTCLVLAFGYVLLRDPFDWRNILGILVAVIGMVVYSYYCSIETQQKASETSTQLPQVYLYILTCYIA

SEQ ID NO: 87206 - DNA, 1590 bp, Arabidopsis thaliana
  misc_feature (1)..(1590): Ceres Seq. ID no. 12699091
  misc_feature (1)..(1590): Ortholog of  Ceres SEQ ID NO 14303831 as cited in SEQ ID NO 52976
  misc_feature (1)..(1590): Ortholog of  Ceres SEQ ID NO 12619453 as cited in SEQ ID NO 65952
aagactctctctgctttcgaccaaaaccttctcctctcctctgggagatctccatcttcttcgcttcttcgcttccccgcctgaaacaattactcgatctcgccggcggaacaagctctccgtttctctttccggcagatcgattcttccaattccttattcctttctaggtcttccttaagaaacccttactttcttcaaaatctgcatttatggcgattagggttaccttcacctactccagctatgttgctaggagcattgcttcatccgccgggactcgtgtcggtaccggcgacgttagatcatgcttcgaaacatgggttcgtcccaggttctgcggccacaatcagataccagatattgttgataaatctcccggatccaacacatggggtccaagctcaggccctcgtgctcgaccagcttcatcaatgtatagcaccattgcgagggaaatcctcgaagaaggctgcaagagtccacttgtcttgggtatgatctctctcatgaatttgactggagctccacagttttcgggtatgaccggtctcgggatctctccctttaagacttcttctgtcatcccgttccttaggggttccaagtggatgccttgtagtattccggcgacgttatcaacggatattgctgaggttgatagaggaggaaaggtctgtgatcctaaagtgaagttggagttgagtgataaagtctcgaatggtggaaacggatgggttaataagctgttgaatatctgctcggaggatgctaaggctgctttcacggcggttactgtttctctccttttccgatcggctttggccgagccaaagtctataccttcaacatctatgcttcctactctcgatgtgggtgatcgtgttatagccgagaaggtctcatactttttcaggaagccagaggtttcagacatagttatcttcaaggctcctcctattttggtggaacatggttacagttgtgctgatgttttcataaaaaggatagttgctagcgaaggtgactgggttgaagtttgtgatggaaagctcttagtaaatgacactgttcaagcagaggattttgtcttagagccaattgactatgaaatggaaccaatgtttgtccctgaaggttatgtcttcgtcctaggagacaaccgcaacaaaagctttgattctcataactggggtccacttccaataaagaacatcatagggagatctgtgtttcgctattggccaccaagcaaagtgtcagacataatacaccatgaacaagttagccaaaagagagctgttgatgtatcttgaccaacgcagatggtatcttaggattaagcagaaaatttgattagatgagctgtgccatgccaaccattttggcgctgaaggcaacagagcaattctttcttcctgtctaggcttgatggcggacatggaatgcactgggaaatccatataaaaagaacaagaaaattgatatttttgctttgattttttttgatgtgttgaaacctaaatgcatccagtgtaattggcagtagctgtcaaacataaaagggtaaactttcttttttgagtattt

SEQ ID NO: 87207 - protein, 367 aa, Arabidopsis thaliana
  peptide (1)..(367): Ceres Seq. ID no. 12699092
MAIRVTFTYSSYVARSIASSAGTRVGTGDVRSCFETWVRPRFCGHNQIPDIVDKSPGSNTWGPSSGPRARPASSMYSTIAREILEEGCKSPLVLGMISLMNLTGAPQFSGMTGLGISPFKTSSVIPFLRGSKWMPCSIPATLSTDIAEVDRGGKVCDPKVKLELSDKVSNGGNGWVNKLLNICSEDAKAAFTAVTVSLLFRSALAEPKSIPSTSMLPTLDVGDRVIAEKVSYFFRKPEVSDIVIFKAPPILVEHGYSCADVFIKRIVASEGDWVEVCDGKLLVNDTVQAEDFVLEPIDYEMEPMFVPEGYVFVLGDNRNKSFDSHNWGPLPIKNIIGRSVFRYWPPSKVSDIIHHEQVSQKRAVDVS

SEQ ID NO: 87208 - protein, 293 aa, Arabidopsis thaliana
  peptide (1)..(293): Ceres Seq. ID no. 12699093
MYSTIAREILEEGCKSPLVLGMISLMNLTGAPQFSGMTGLGISPFKTSSVIPFLRGSKWMPCSIPATLSTDIAEVDRGGKVCDPKVKLELSDKVSNGGNGWVNKLLNICSEDAKAAFTAVTVSLLFRSALAEPKSIPSTSMLPTLDVGDRVIAEKVSYFFRKPEVSDIVIFKAPPILVEHGYSCADVFIKRIVASEGDWVEVCDGKLLVNDTVQAEDFVLEPIDYEMEPMFVPEGYVFVLGDNRNKSFDSHNWGPLPIKNIIGRSVFRYWPPSKVSDIIHHEQVSQKRAVDVS

SEQ ID NO: 87209 - protein, 272 aa, Arabidopsis thaliana
  peptide (1)..(272): Ceres Seq. ID no. 12699094
MISLMNLTGAPQFSGMTGLGISPFKTSSVIPFLRGSKWMPCSIPATLSTDIAEVDRGGKVCDPKVKLELSDKVSNGGNGWVNKLLNICSEDAKAAFTAVTVSLLFRSALAEPKSIPSTSMLPTLDVGDRVIAEKVSYFFRKPEVSDIVIFKAPPILVEHGYSCADVFIKRIVASEGDWVEVCDGKLLVNDTVQAEDFVLEPIDYEMEPMFVPEGYVFVLGDNRNKSFDSHNWGPLPIKNIIGRSVFRYWPPSKVSDIIHHEQVSQKRAVDVS

SEQ ID NO: 87210 - DNA, 1731 bp, Arabidopsis thaliana
  misc_feature (1)..(1731): Ceres Seq. ID no. 12699159
  misc_feature (1)..(1731): Ortholog of  Ceres SEQ ID NO 13594380 as cited in SEQ ID NO 58039
atggctgttggttcgatgaatgtcgaagaaggcactaaagcttttcctgcgaagctgacaggtcaagtctttctttgctgtgtcattgctgctgttggtggtctcatgtttggttacgacatcggaatctcaggaggtgtaacgagtatggacactttcttgttagattttttcccacacgtgtacgagaagaaacacagagtacacgaaaacaactactgcaaattcgatgaccagctcttgcagttgttcacttcctcactctacttggctggaatcttcgctagctttatttcttcctatgtttctagggcttttggaagaaaacccacaatcatgctcgcctccatcttcttcctcgtcggtgctatcctcaacttatctgcccaagaactcggcatgttgatcggtggtcgtattcttctcggctttggtatcggtttcggtaaccaggtatcatgtcaaaccctcaaaacgtttttctatctcagtggattcctctgttttcatctagggttcctctgttttcacctagggtttcctctgtttttatgccttaactcatcgtgttttgttttgttttgtttattaacattgaaagcaatacttttgcagaccgttccattgttcatctcagagattgctccggcgagatacagaggaggactaaacgtcatgttccagtttctcatcaccattggaatcttagcagcaagttatgtgaactacttaacttccacgttgaaaaacggctggagatattctctcggtggtgctgctgtccccgctttaatcctcttgataggatccttctttatccacgagactccggctagtctcatcgagcgcggtaaagacgaaaaggggaagcaagtcctgaggaagatcagaggcattgaagatattgagctcgagttcaatgagatcaaatacgcaacagaggtagcgacaaaggtgaaaagcccattcaaagaactcttcaccaagagtgagaacagaccaccattggtgtgtggaacgttacttcagttctttcaacagttcaccggtatcaacgtggttatgttctacgctccagttttgttccagacgatgggtagtggtgacaacgcttctctgatctctactgttgtcaccaatggtgtgaacgcaatcgctacagttatctctcttttagtggttgatttcgccggtagaaggtgtcttctgatggaaggagctctccagatgaccgctacacaggttagtttttttttttttttttttgcttgtgtcacatggtacacatattcttacttggataacaagctaacttatgacaattggaggcattctcttagctcacttgaagctagttggtcctattactggccatgccgtgcgctgattgtattgatcctcatctgcgtatacgtgtctggatttgcatggtcttggggtccattgggatggcttgttccgtctgagatctaccctcttgaagtgagaaatgctggttacttctgtgcggtggcgatgaacatggtctgcactttcatcattggacagttcttcttgtctgctctctgcagattcagatcattattgttcttcttcttcggaataatgaacattatcatgggactatttgtcgtgttttttcttcccgaaaccaaaggtgttcctattgaggaaatggccgagaagcgttggaaaacgcacccgcgttggaagaaatatttcaaagactag

SEQ ID NO: 87211 - protein, 576 aa, Arabidopsis thaliana
  peptide (1)..(576): Ceres Seq. ID no. 12699160
MAVGSMNVEEGTKAFPAKLTGQVFLCCVIAAVGGLMFGYDIGISGGVTSMDTFLLDFFPHVYEKKHRVHENNYCKFDDQLLQLFTSSLYLAGIFASFISSYVSRAFGRKPTIMLASIFFLVGAILNLSAQELGMLIGGRILLGFGIGFGNQVSCQTLKTFFYLSGFLCFHLGFLCFHLGFPLFLCLNSSCFVLFCLLTLKAILLQTVPLFISEIAPARYRGGLNVMFQFLITIGILAASYVNYLTSTLKNGWRYSLGGAAVPALILLIGSFFIHETPASLIERGKDEKGKQVLRKIRGIEDIELEFNEIKYATEVATKVKSPFKELFTKSENRPPLVCGTLLQFFQQFTGINVVMFYAPVLFQTMGSGDNASLISTVVTNGVNAIATVISLLVVDFAGRRCLLMEGALQMTATQVSFFFFFFACVTWYTYSYLDNKLTYDNWRHSLSSLEASWSYYWPCRALIVLILICVYVSGFAWSWGPLGWLVPSEIYPLEVRNAGYFCAVAMNMVCTFIIGQFFLSALCRFRSLLFFFFGIMNIIMGLFVVFFLPETKGVPIEEMAEKRWKTHPRWKKYFKD

SEQ ID NO: 87212 - protein, 571 aa, Arabidopsis thaliana
  peptide (1)..(571): Ceres Seq. ID no. 12699161
MNVEEGTKAFPAKLTGQVFLCCVIAAVGGLMFGYDIGISGGVTSMDTFLLDFFPHVYEKKHRVHENNYCKFDDQLLQLFTSSLYLAGIFASFISSYVSRAFGRKPTIMLASIFFLVGAILNLSAQELGMLIGGRILLGFGIGFGNQVSCQTLKTFFYLSGFLCFHLGFLCFHLGFPLFLCLNSSCFVLFCLLTLKAILLQTVPLFISEIAPARYRGGLNVMFQFLITIGILAASYVNYLTSTLKNGWRYSLGGAAVPALILLIGSFFIHETPASLIERGKDEKGKQVLRKIRGIEDIELEFNEIKYATEVATKVKSPFKELFTKSENRPPLVCGTLLQFFQQFTGINVVMFYAPVLFQTMGSGDNASLISTVVTNGVNAIATVISLLVVDFAGRRCLLMEGALQMTATQVSFFFFFFACVTWYTYSYLDNKLTYDNWRHSLSSLEASWSYYWPCRALIVLILICVYVSGFAWSWGPLGWLVPSEIYPLEVRNAGYFCAVAMNMVCTFIIGQFFLSALCRFRSLLFFFFGIMNIIMGLFVVFFLPETKGVPIEEMAEKRWKTHPRWKKYFKD

SEQ ID NO: 87213 - protein, 541 aa, Arabidopsis thaliana
  peptide (1)..(541): Ceres Seq. ID no. 12699162
MFGYDIGISGGVTSMDTFLLDFFPHVYEKKHRVHENNYCKFDDQLLQLFTSSLYLAGIFASFISSYVSRAFGRKPTIMLASIFFLVGAILNLSAQELGMLIGGRILLGFGIGFGNQVSCQTLKTFFYLSGFLCFHLGFLCFHLGFPLFLCLNSSCFVLFCLLTLKAILLQTVPLFISEIAPARYRGGLNVMFQFLITIGILAASYVNYLTSTLKNGWRYSLGGAAVPALILLIGSFFIHETPASLIERGKDEKGKQVLRKIRGIEDIELEFNEIKYATEVATKVKSPFKELFTKSENRPPLVCGTLLQFFQQFTGINVVMFYAPVLFQTMGSGDNASLISTVVTNGVNAIATVISLLVVDFAGRRCLLMEGALQMTATQVSFFFFFFACVTWYTYSYLDNKLTYDNWRHSLSSLEASWSYYWPCRALIVLILICVYVSGFAWSWGPLGWLVPSEIYPLEVRNAGYFCAVAMNMVCTFIIGQFFLSALCRFRSLLFFFFGIMNIIMGLFVVFFLPETKGVPIEEMAEKRWKTHPRWKKYFKD

SEQ ID NO: 87214 - DNA, 1533 bp, Arabidopsis thaliana
  misc_feature (1)..(1533): Ceres Seq. ID no. 12699183
  misc_feature (1)..(1533): Ortholog of  Ceres SEQ ID NO 15170458 as cited in SEQ ID NO 52842
  misc_feature (1)..(1533): Ortholog of  Ceres SEQ ID NO 14304224 as cited in SEQ ID NO 56350
  misc_feature (1)..(1533): Ortholog of  Ceres SEQ ID NO 13597679 as cited in SEQ ID NO 65073
atggatattaacaggtggagtcttcaaggtatgactgctcttgtaaccggtggatcaaagggaattgggtatgcaatagtggaggaacttgtaggctttggtgcaagagttcacatctgtgacatagacgaaactctgctaaacgaatgcttaagtggatggcatgcaaaagggtttgaagtgagtggttcaatctgtgatgtttcctctcgacctcagagagtgcaattgatgcagactgtttcttctctatttggtgccaaactcaacatccttataaacaatgttggcaagtacatattaaagccaactttagaaagtacagctgaagatttctcaagtttaatggctaccaatttggaatctgcttactacatctcccaattggcacatcctttacttaaagcctcgggaaatgggaatatcgtgtttatttcctcggtaacgggggttgtctctggcacatctaccatatatggtgtaacaaaaggagccttgaatcaactggcaagagatttggcgtgtgaatgggccagtgacaacataagggctaactctgtagctccttgggtcactgcaacttctcttgtccaaaaatatcttgaagacgagatatttgcggaagctatgttctcaagaaccccattaggacgtgcatgtgagccacgtgaggttgcgtcgctggtgacatttctctgtctccctgcagcttcttatataacaggacaaaccatttgtattgatgagcaaagccagagatggagccttaaggccaagaccgtacttgtaaccggtggaacaaaaggcatcgggcatgctatagtagaggaatttgcaggatttggagcagtaatacatacttgtgctagaaacgaatatgagcttaacgagtgtttaagcaaatggcaaaagaagggttttcaagtcactggttcggtctgtgacgcatctttgagaccagagagagaaaagctaatgcagactgtgtcttcaatgtttggtggaaagctcgatatcctcataaacaatttgggagcgattcggtcaaaaccaacgctggattacacagcagaagatttctcgtttcatatttcgacaaacttagaatctgcttatcatctgagccagcttgcgcatcctctgcttaaggcttcaggatgtgggaacataattttcatgtcctctattgctggagttgtatctgctagtgtcggctccatctactctgcaacgaaaggggcattgaatcagctagcaaggaacttggcatgtgagtgggctagtgatggcattagggctaatgctgtggctcctgcagtcatcgcaactcctttggctgaagctgtgtatgatgatgagttcaagaaagtggtgatatcaagaaagccgttggggcgtttcggggagcctgaagaagtgtcctcgcttgtggcttttctatgtatgcctgcagcttcttatataactggtcaaaccatttgtgtcgatggaggtctcactgtcaatggcttctcctatcagccacaaggttaa

SEQ ID NO: 87215 - protein, 510 aa, Arabidopsis thaliana
  peptide (1)..(510): Ceres Seq. ID no. 12699184
MDINRWSLQGMTALVTGGSKGIGYAIVEELVGFGARVHICDIDETLLNECLSGWHAKGFEVSGSICDVSSRPQRVQLMQTVSSLFGAKLNILINNVGKYILKPTLESTAEDFSSLMATNLESAYYISQLAHPLLKASGNGNIVFISSVTGVVSGTSTIYGVTKGALNQLARDLACEWASDNIRANSVAPWVTATSLVQKYLEDEIFAEAMFSRTPLGRACEPREVASLVTFLCLPAASYITGQTICIDEQSQRWSLKAKTVLVTGGTKGIGHAIVEEFAGFGAVIHTCARNEYELNECLSKWQKKGFQVTGSVCDASLRPEREKLMQTVSSMFGGKLDILINNLGAIRSKPTLDYTAEDFSFHISTNLESAYHLSQLAHPLLKASGCGNIIFMSSIAGVVSASVGSIYSATKGALNQLARNLACEWASDGIRANAVAPAVIATPLAEAVYDDEFKKVVISRKPLGRFGEPEEVSSLVAFLCMPAASYITGQTICVDGGLTVNGFSYQPQG

SEQ ID NO: 87216 - protein, 500 aa, Arabidopsis thaliana
  peptide (1)..(500): Ceres Seq. ID no. 12699185
MTALVTGGSKGIGYAIVEELVGFGARVHICDIDETLLNECLSGWHAKGFEVSGSICDVSSRPQRVQLMQTVSSLFGAKLNILINNVGKYILKPTLESTAEDFSSLMATNLESAYYISQLAHPLLKASGNGNIVFISSVTGVVSGTSTIYGVTKGALNQLARDLACEWASDNIRANSVAPWVTATSLVQKYLEDEIFAEAMFSRTPLGRACEPREVASLVTFLCLPAASYITGQTICIDEQSQRWSLKAKTVLVTGGTKGIGHAIVEEFAGFGAVIHTCARNEYELNECLSKWQKKGFQVTGSVCDASLRPEREKLMQTVSSMFGGKLDILINNLGAIRSKPTLDYTAEDFSFHISTNLESAYHLSQLAHPLLKASGCGNIIFMSSIAGVVSASVGSIYSATKGALNQLARNLACEWASDGIRANAVAPAVIATPLAEAVYDDEFKKVVISRKPLGRFGEPEEVSSLVAFLCMPAASYITGQTICVDGGLTVNGFSYQPQG

SEQ ID NO: 87217 - protein, 433 aa, Arabidopsis thaliana
  peptide (1)..(433): Ceres Seq. ID no. 12699186
MQTVSSLFGAKLNILINNVGKYILKPTLESTAEDFSSLMATNLESAYYISQLAHPLLKASGNGNIVFISSVTGVVSGTSTIYGVTKGALNQLARDLACEWASDNIRANSVAPWVTATSLVQKYLEDEIFAEAMFSRTPLGRACEPREVASLVTFLCLPAASYITGQTICIDEQSQRWSLKAKTVLVTGGTKGIGHAIVEEFAGFGAVIHTCARNEYELNECLSKWQKKGFQVTGSVCDASLRPEREKLMQTVSSMFGGKLDILINNLGAIRSKPTLDYTAEDFSFHISTNLESAYHLSQLAHPLLKASGCGNIIFMSSIAGVVSASVGSIYSATKGALNQLARNLACEWASDGIRANAVAPAVIATPLAEAVYDDEFKKVVISRKPLGRFGEPEEVSSLVAFLCMPAASYITGQTICVDGGLTVNGFSYQPQG

SEQ ID NO: 87218 - DNA, 1458 bp, Arabidopsis thaliana
  misc_feature (1)..(1458): Ceres Seq. ID no. 12699191
  misc_feature (1)..(1458): Ortholog of  Ceres SEQ ID NO 14314792 as cited in SEQ ID NO 56837
atgggtacaacaacgacaacaagcgctgtgtatatccatgttatcgaggatgtcgtcaacaaagttcgtgaggagttcattaacaacggaggtcctggcgagagtgttctcagcgagcttcaaggaatttgggagacgaagatgatgcaagccggagtcttgaatggaccaatagagaggtcatcggctcagaagccaacacctggtggtccactgactcatgatttgaatgttccttatgaaggtacagaggagtacgagactcccactgctgaaatgctcttccctcctacaccattgcagactccccttccaacgccgcttcccggtactgctgataactcatccatgtataacatccctaccggctcaagtgattatcccactcctggaactgagaatggagtcaacattgatgttaaagcaagacctagtccttatatgccaccgccttctccgtggacaaatcctagacttgatgtcaatgttgcttatgtggatggccgtgatgagcctgagagaggaaactctaaccagcagtttacgcaggatttatttgtgccatcctctgggaaacgaaaacgtgatgattcttctggacattatcaaaatggtggatctatacctcaacaggatggtgcaggcgatgctatccctgagtatctcgttgatacacctgattggagcacaattttgcaggcaaactttgagtgtgatgcattccgcataacctctattggcgatagaaaggtaccacgagacttcttcagctcatcatcgaagattcctcaggttgatgggccaatgcctgacccttatgatgaaatgctctctacaccaaatatatatagttatcaaggacccagtgaagagtttaacgaggccagaactcctgctccaaacgagatccaaacgagcactcctgttgctgtacaaaacgatatcattgaagatgatgaagagctgttgaacgaagatgatgatgatgacgagttggacgacctagaaagtggcgaggatatgaacacacaacacctggttttagctcaatttgacaaggtaatgactctcctctattcacaggtgacgcgcacaaagagcaggtggaagtgcagtctgaaagacgggatcatgcatataaacgataaggacattctcttcaacaaagtaatctgtgcctcccaaataaggttggagctattctggcagcaggcgagtttgacttctgatcttaacactagcaatgatgcttctaggaaagtccttcaaataccgaccgagagagacatgagtattcatgggaaagtgtactctggttggcttgttgtacaaaaagaaaagttttttctgtcgaagaaggcgtatcaactttcaccttgtttcatgaactcttattgtctttcacgcaatggaaaattaacttcccaaaaactggatcttgcttacagttgtatctag

SEQ ID NO: 87219 - protein, 485 aa, Arabidopsis thaliana
  peptide (1)..(485): Ceres Seq. ID no. 12699192
MGTTTTTSAVYIHVIEDVVNKVREEFINNGGPGESVLSELQGIWETKMMQAGVLNGPIERSSAQKPTPGGPLTHDLNVPYEGTEEYETPTAEMLFPPTPLQTPLPTPLPGTADNSSMYNIPTGSSDYPTPGTENGVNIDVKARPSPYMPPPSPWTNPRLDVNVAYVDGRDEPERGNSNQQFTQDLFVPSSGKRKRDDSSGHYQNGGSIPQQDGAGDAIPEYLVDTPDWSTILQANFECDAFRITSIGDRKVPRDFFSSSSKIPQVDGPMPDPYDEMLSTPNIYSYQGPSEEFNEARTPAPNEIQTSTPVAVQNDIIEDDEELLNEDDDDDELDDLESGEDMNTQHLVLAQFDKVMTLLYSQVTRTKSRWKCSLKDGIMHINDKDILFNKVICASQIRLELFWQQASLTSDLNTSNDASRKVLQIPTERDMSIHGKVYSGWLVVQKEKFFLSKKAYQLSPCFMNSYCLSRNGKLTSQKLDLAYSCI

SEQ ID NO: 87220 - protein, 438 aa, Arabidopsis thaliana
  peptide (1)..(438): Ceres Seq. ID no. 12699193
MMQAGVLNGPIERSSAQKPTPGGPLTHDLNVPYEGTEEYETPTAEMLFPPTPLQTPLPTPLPGTADNSSMYNIPTGSSDYPTPGTENGVNIDVKARPSPYMPPPSPWTNPRLDVNVAYVDGRDEPERGNSNQQFTQDLFVPSSGKRKRDDSSGHYQNGGSIPQQDGAGDAIPEYLVDTPDWSTILQANFECDAFRITSIGDRKVPRDFFSSSSKIPQVDGPMPDPYDEMLSTPNIYSYQGPSEEFNEARTPAPNEIQTSTPVAVQNDIIEDDEELLNEDDDDDELDDLESGEDMNTQHLVLAQFDKVMTLLYSQVTRTKSRWKCSLKDGIMHINDKDILFNKVICASQIRLELFWQQASLTSDLNTSNDASRKVLQIPTERDMSIHGKVYSGWLVVQKEKFFLSKKAYQLSPCFMNSYCLSRNGKLTSQKLDLAYSCI

SEQ ID NO: 87221 - protein, 437 aa, Arabidopsis thaliana
  peptide (1)..(437): Ceres Seq. ID no. 12699194
MQAGVLNGPIERSSAQKPTPGGPLTHDLNVPYEGTEEYETPTAEMLFPPTPLQTPLPTPLPGTADNSSMYNIPTGSSDYPTPGTENGVNIDVKARPSPYMPPPSPWTNPRLDVNVAYVDGRDEPERGNSNQQFTQDLFVPSSGKRKRDDSSGHYQNGGSIPQQDGAGDAIPEYLVDTPDWSTILQANFECDAFRITSIGDRKVPRDFFSSSSKIPQVDGPMPDPYDEMLSTPNIYSYQGPSEEFNEARTPAPNEIQTSTPVAVQNDIIEDDEELLNEDDDDDELDDLESGEDMNTQHLVLAQFDKVMTLLYSQVTRTKSRWKCSLKDGIMHINDKDILFNKVICASQIRLELFWQQASLTSDLNTSNDASRKVLQIPTERDMSIHGKVYSGWLVVQKEKFFLSKKAYQLSPCFMNSYCLSRNGKLTSQKLDLAYSCI

SEQ ID NO: 87222 - DNA, 2508 bp, Arabidopsis thaliana
  misc_feature (1)..(2508): Ceres Seq. ID no. 12699203
  misc_feature (1)..(2508): Ortholog of  Ceres SEQ ID NO 13595870 as cited in SEQ ID NO 62101
  misc_feature (1)..(2508): Ortholog of  Ceres SEQ ID NO 13590241 as cited in SEQ ID NO 63878
  misc_feature (1)..(2508): Ortholog of  Ceres SEQ ID NO 13657939 as cited in SEQ ID NO 66349
atgatattctccaagcttggttcttccctcgctcgatcctcacgttctaagggatttgtgtacggcggtggtgtgagatcggcggtatttaaccaagggaggttacgagcgccgcagaatctcgaggcggccgtcaatcaggtggatggtggattagggtttttgaggcggcactttgcttcttttgctgctcgaaagggactagaagccggtgatttaagccgtgctttcgctaaccctagattgcgtcggttcttttctagtcaaaccccaaagaagaagaattatgagaactactatccaaaagacagtaagaaagcacccaagaatgagcagaaatctgaatccagagatggttcaaagaaaaatgaaaacgaaaatgctggggacgcgttctcaaatgaatatcaaaatatgttaattcctcttatggccattgctttaatcctttctactttctctcttggttcccgagaacagcaacagattagtttccaggagttcaaaaacaagctcctcgaggctggtttagtggatcacatagatgtttccaataaagaagtcgcaaaagtctatgtgaggagttcaccaaaaagccaaacaacggaagaagttgttcaaggtcctggtaatggagttcctgctaaaggacgtggtggtcagtataagtactactttaatattggtagtgttgaatcatttgaggagaaactagaagaggcccaagaagctataggcgttaattctcatgactttgttcctgtcacctacgtcagtgaaactatctggtaccaggaactattgagatttgcaccgactttacttctcgtggctacgctaatttttggggcaagacggatgcaaggtggactgggaggtttaggcggacctggtgggaaggctggccgtggaattttcaatatagggaaagctcaaataacgagagcagataaaaactccaagaataagatatattttaaagatgttgcgggatgcgaggaggctaaacaagaaattatggaatttgtgcatttccttcagaacccaaagaaatatgaagatttgggagctaaaatcccaaaaggtgcgcttttagttggcccacccgggactggaaagacccttctagcaaaagctactgcaggagaatcagctgtaccgtttctctcaatatctggttcagatttcatggagatgtttgttggtgttggaccttccagagtgagaaacttgtttcaagaggctagacagtgtgcacctagcataatatttattgatgagatcgatgcgattggccgtgcgaggggacgtggaggtttctctggtggaaatgatgagcgtgaaagcacacttaatcaactgctagttgaaatggatggatttggtactaccgctggagttgtcgtccttgctgggactaacaggccagatattcttgataaagctttattacggcctggccggtttgatcgccagataaccatagataaacctgatattaaaggccgtgatcagatattccagatatacctgaagaagatcaaacttgatcacgagccctcatattactcacaaaggcttgcagccctcactcccggatttgctggagctgacattgcgaatgtctgtaacgaggcggctcttattgctgccagacatgaaggagcaacagttacaatggcgcactttgactctgcaatcgatcgtgttattggtggtctggagaagaaaaaccgggtaataagcaagctggagcgccgtacagttgcatatcatgaatctggccatgcggttgctgggtggttcctggaacatgcggaaccgttgctaaaggtgactattgttcctcgtggcacagcagcgctcggatttgcccagtatgttccaaatgaaaacttgctcatgacaaaagaacaactctttgatatgacttgcatgactctcgggggccgggcagctgaacagttggttggtagacagtttgttgagttgtttcctcttacagaagtcaagaactcattaaggtttcaggtattgattggaagaatatccactggggctcagaacgatctggaaaaggtgactaagatgacttatgcgcaagtggcagtgtacggattcagcgacaagataggattgctttcattcccacaacgggaagacgagttctccaagccgtacagcaacagaaccggtgcgatgatagatgaagaggtccgagaatgggtggggaaagcttacaagcggacggttgagctgatagaggaacacaaagagcaagtggctcagatcgctgagctcttgctagagaaggaggttttgcatcaggatgatctcactaaagtattgggcgagcgtccgtttaagtcgggtgagacaacgaattacgacaggtttaaatctggatttgaagagtcggagaaggagagccagaaggagtctgtgccggtgaagcctgtggaggatgatggaattccgcctcttgagccacaggtagttccgacgtag

SEQ ID NO: 87223 - protein, 835 aa, Arabidopsis thaliana
  peptide (1)..(835): Ceres Seq. ID no. 12699204
MIFSKLGSSLARSSRSKGFVYGGGVRSAVFNQGRLRAPQNLEAAVNQVDGGLGFLRRHFASFAARKGLEAGDLSRAFANPRLRRFFSSQTPKKKNYENYYPKDSKKAPKNEQKSESRDGSKKNENENAGDAFSNEYQNMLIPLMAIALILSTFSLGSREQQQISFQEFKNKLLEAGLVDHIDVSNKEVAKVYVRSSPKSQTTEEVVQGPGNGVPAKGRGGQYKYYFNIGSVESFEEKLEEAQEAIGVNSHDFVPVTYVSETIWYQELLRFAPTLLLVATLIFGARRMQGGLGGLGGPGGKAGRGIFNIGKAQITRADKNSKNKIYFKDVAGCEEAKQEIMEFVHFLQNPKKYEDLGAKIPKGALLVGPPGTGKTLLAKATAGESAVPFLSISGSDFMEMFVGVGPSRVRNLFQEARQCAPSIIFIDEIDAIGRARGRGGFSGGNDERESTLNQLLVEMDGFGTTAGVVVLAGTNRPDILDKALLRPGRFDRQITIDKPDIKGRDQIFQIYLKKIKLDHEPSYYSQRLAALTPGFAGADIANVCNEAALIAARHEGATVTMAHFDSAIDRVIGGLEKKNRVISKLERRTVAYHESGHAVAGWFLEHAEPLLKVTIVPRGTAALGFAQYVPNENLLMTKEQLFDMTCMTLGGRAAEQLVGRQFVELFPLTEVKNSLRFQVLIGRISTGAQNDLEKVTKMTYAQVAVYGFSDKIGLLSFPQREDEFSKPYSNRTGAMIDEEVREWVGKAYKRTVELIEEHKEQVAQIAELLLEKEVLHQDDLTKVLGERPFKSGETTNYDRFKSGFEESEKESQKESVPVKPVEDDGIPPLEPQVVPT

SEQ ID NO: 87224 - protein, 697 aa, Arabidopsis thaliana
  peptide (1)..(697): Ceres Seq. ID no. 12699205
MLIPLMAIALILSTFSLGSREQQQISFQEFKNKLLEAGLVDHIDVSNKEVAKVYVRSSPKSQTTEEVVQGPGNGVPAKGRGGQYKYYFNIGSVESFEEKLEEAQEAIGVNSHDFVPVTYVSETIWYQELLRFAPTLLLVATLIFGARRMQGGLGGLGGPGGKAGRGIFNIGKAQITRADKNSKNKIYFKDVAGCEEAKQEIMEFVHFLQNPKKYEDLGAKIPKGALLVGPPGTGKTLLAKATAGESAVPFLSISGSDFMEMFVGVGPSRVRNLFQEARQCAPSIIFIDEIDAIGRARGRGGFSGGNDERESTLNQLLVEMDGFGTTAGVVVLAGTNRPDILDKALLRPGRFDRQITIDKPDIKGRDQIFQIYLKKIKLDHEPSYYSQRLAALTPGFAGADIANVCNEAALIAARHEGATVTMAHFDSAIDRVIGGLEKKNRVISKLERRTVAYHESGHAVAGWFLEHAEPLLKVTIVPRGTAALGFAQYVPNENLLMTKEQLFDMTCMTLGGRAAEQLVGRQFVELFPLTEVKNSLRFQVLIGRISTGAQNDLEKVTKMTYAQVAVYGFSDKIGLLSFPQREDEFSKPYSNRTGAMIDEEVREWVGKAYKRTVELIEEHKEQVAQIAELLLEKEVLHQDDLTKVLGERPFKSGETTNYDRFKSGFEESEKESQKESVPVKPVEDDGIPPLEPQVVPT

SEQ ID NO: 87225 - protein, 692 aa, Arabidopsis thaliana
  peptide (1)..(692): Ceres Seq. ID no. 12699206
MAIALILSTFSLGSREQQQISFQEFKNKLLEAGLVDHIDVSNKEVAKVYVRSSPKSQTTEEVVQGPGNGVPAKGRGGQYKYYFNIGSVESFEEKLEEAQEAIGVNSHDFVPVTYVSETIWYQELLRFAPTLLLVATLIFGARRMQGGLGGLGGPGGKAGRGIFNIGKAQITRADKNSKNKIYFKDVAGCEEAKQEIMEFVHFLQNPKKYEDLGAKIPKGALLVGPPGTGKTLLAKATAGESAVPFLSISGSDFMEMFVGVGPSRVRNLFQEARQCAPSIIFIDEIDAIGRARGRGGFSGGNDERESTLNQLLVEMDGFGTTAGVVVLAGTNRPDILDKALLRPGRFDRQITIDKPDIKGRDQIFQIYLKKIKLDHEPSYYSQRLAALTPGFAGADIANVCNEAALIAARHEGATVTMAHFDSAIDRVIGGLEKKNRVISKLERRTVAYHESGHAVAGWFLEHAEPLLKVTIVPRGTAALGFAQYVPNENLLMTKEQLFDMTCMTLGGRAAEQLVGRQFVELFPLTEVKNSLRFQVLIGRISTGAQNDLEKVTKMTYAQVAVYGFSDKIGLLSFPQREDEFSKPYSNRTGAMIDEEVREWVGKAYKRTVELIEEHKEQVAQIAELLLEKEVLHQDDLTKVLGERPFKSGETTNYDRFKSGFEESEKESQKESVPVKPVEDDGIPPLEPQVVPT

SEQ ID NO: 87226 - DNA, 2814 bp, Arabidopsis thaliana
  misc_feature (1)..(2814): Ceres Seq. ID no. 12699215
  misc_feature (1)..(2814): Ortholog of  Ceres SEQ ID NO 13654989 as cited in SEQ ID NO 63117
  misc_feature (1)..(2814): Ortholog of  Ceres SEQ ID NO 13584744 as cited in SEQ ID NO 69137
atgttttatattgcaagtacattggcaattcgtaatccttttttttttttggacagaggtgggaaaatgaaaaacctccgtggacttctattggccttcctagttttgtctttaggcatttccgattttcttcgagcacaagatcaacaaggtataactttttttgtttcaggttttcttcttttaactttgactaaacatgtttcctatcacaatttagtcattaattcagtttccaaacttatttttttaccaaattatttctctgttttttttcttttgcctttatcaggattcatcagtttggattgcgggttgcaagccgatgagtctccttataccgaaccattaacaaagttaacattcacatcagacgccgatttcatcaaaagtggaaaaagcggcaagattcaaaatgttccggggatggagtatataaagccatacacggttttgagatattttccagatggagtacgaaactgttatactcttatcgtcatacaaggcacaaactatctgatcgtagccatgtttacttatggaaactacgataatcttaacacacacccaaagttcgacctttatcttggtccaaatatatggaccacggtcgatttgcaaagaaatgtaaacggaacaagggcggaaatcattcacataccaaggtcaacttctttgcagatttgtcttgttaagacgggaacaactacgccgctaatatcagctttagaactacgaccattgagaaataatacttatattcctcaatctggttccctcaagacattgttccgcgtccatttgactgattccaaagaaactgttcggtatccagaagatgtccatgatcgtctttggagtccatttttcatgccggaatggagactgttaagaacaagtctcacggtcaacacttctgatgataacggctatgacataccggaagacgtagtggttacggcagccacacctgcaaatgtgagttcaccattaaccatttcttggaatttggaaacacctgacgacttagtttatgcatacctccacgtcgctgagatccaatccttaagggaaaatgataccagggaattcaacattagcgcaggccaagatgttaactatggacctgttagtcctgacgagtttctagtgggtactctattcaatacatcaccagttaaatgtgaaggagggacatgccatttgcaactaataaaaactccaaaatcaactctccctcccctcctcaatgctattgaggcttttataacagtggagtttccgcagtctgaaactaatgcaaatgacgtccttgctatcaagagcatagaaacaagctatggattaagtagaattagttggcaaggagatccatgtgttcctcaacaattattgtgggatggtcttacctgcgagtacaccaatatgtctacaccaccaagaatccattccttagacttgtcctcaagtgaactaactggaattatagttcctgagatccaaaatcttacggagcttaaaaaattggacttttcaaataataatctaacaggtggagtacctgaatttctagccaaaatgaaatcattaaacttaagcggaaacaaccttagtggatcagtccctcaagctcttctcaacaaagtgaaaaatgggttgaagttgaacattcagggaaatccaaacctatgtttttccagttcatgcaacaaaaagaaaaatagcatcatgttaccagttgttgcatcacttgcttctttggctgctataatagcaatgatcgctctgctttttgtttgtattaaaagacgctcatcaagcagaaaaggtccatcaccaagccaacaatcaatagaaacaataaagaaaagatatacatatgccgaagttcttgccatgacaaagaaatttgaaagggttttgggtaaaggaggatttggaatggtctatcatggttatataaatggtactgaagaagtagcggtcaagctactctctccatcatcagctcaaggctataaagagttcaaaacagaggtagaacttcttctaagggtttaccacacaaatctggtaagtcttgttggatactgtgatgaaaaagatcatctggccctcatctaccagtacatggtcaatggcgatttgaaaaaacatttttcaggtagctccatcattagctgggttgatagactaaacatagctgttgatgcagcgtcaggtttggagtacttgcatattggttgcaaaccgctgatagttcatagagatgtaaaaagttctaacatactattggacgatcaattacaagctaagcttgcagattttgggctttctagatcttttcccattggggatgaatctcatgtgtctacacttgttgctggaacatttggataccttgatcatgaatactaccaaactaataggttgtctgagaagagtgatgtctacagttttggtgttgtactgctagaaattattacaaacaaaccggtgatcgatcataaccgcgacatgcctcacatagcagaatgggtgaaacttatgcttactagaggagacattagcaatattatggatcctaaacttcaaggggtctatgactctggttctgcatggaaagctcttgaattagcaatgacatgtgtgaatccttcttccttgaaaagacccaacatgtcccatgttgttcatgagctgaaggagtgtctggtatctgaaaacaacaggacaagagacatagacacatcgagatccatggacattaacttaagctttggcacagatgtgaaccccaaggcacgttag

SEQ ID NO: 87227 - protein, 937 aa, Arabidopsis thaliana
  peptide (1)..(937): Ceres Seq. ID no. 12699216
MFYIASTLAIRNPFFFLDRGGKMKNLRGLLLAFLVLSLGISDFLRAQDQQGITFFVSGFLLLTLTKHVSYHNLVINSVSKLIFLPNYFSVFFLLPLSGFISLDCGLQADESPYTEPLTKLTFTSDADFIKSGKSGKIQNVPGMEYIKPYTVLRYFPDGVRNCYTLIVIQGTNYLIVAMFTYGNYDNLNTHPKFDLYLGPNIWTTVDLQRNVNGTRAEIIHIPRSTSLQICLVKTGTTTPLISALELRPLRNNTYIPQSGSLKTLFRVHLTDSKETVRYPEDVHDRLWSPFFMPEWRLLRTSLTVNTSDDNGYDIPEDVVVTAATPANVSSPLTISWNLETPDDLVYAYLHVAEIQSLRENDTREFNISAGQDVNYGPVSPDEFLVGTLFNTSPVKCEGGTCHLQLIKTPKSTLPPLLNAIEAFITVEFPQSETNANDVLAIKSIETSYGLSRISWQGDPCVPQQLLWDGLTCEYTNMSTPPRIHSLDLSSSELTGIIVPEIQNLTELKKLDFSNNNLTGGVPEFLAKMKSLNLSGNNLSGSVPQALLNKVKNGLKLNIQGNPNLCFSSSCNKKKNSIMLPVVASLASLAAIIAMIALLFVCIKRRSSSRKGPSPSQQSIETIKKRYTYAEVLAMTKKFERVLGKGGFGMVYHGYINGTEEVAVKLLSPSSAQGYKEFKTEVELLLRVYHTNLVSLVGYCDEKDHLALIYQYMVNGDLKKHFSGSSIISWVDRLNIAVDAASGLEYLHIGCKPLIVHRDVKSSNILLDDQLQAKLADFGLSRSFPIGDESHVSTLVAGTFGYLDHEYYQTNRLSEKSDVYSFGVVLLEIITNKPVIDHNRDMPHIAEWVKLMLTRGDISNIMDPKLQGVYDSGSAWKALELAMTCVNPSSLKRPNMSHVVHELKECLVSENNRTRDIDTSRSMDINLSFGTDVNPKAR

SEQ ID NO: 87228 - protein, 915 aa, Arabidopsis thaliana
  peptide (1)..(915): Ceres Seq. ID no. 12699217
MKNLRGLLLAFLVLSLGISDFLRAQDQQGITFFVSGFLLLTLTKHVSYHNLVINSVSKLIFLPNYFSVFFLLPLSGFISLDCGLQADESPYTEPLTKLTFTSDADFIKSGKSGKIQNVPGMEYIKPYTVLRYFPDGVRNCYTLIVIQGTNYLIVAMFTYGNYDNLNTHPKFDLYLGPNIWTTVDLQRNVNGTRAEIIHIPRSTSLQICLVKTGTTTPLISALELRPLRNNTYIPQSGSLKTLFRVHLTDSKETVRYPEDVHDRLWSPFFMPEWRLLRTSLTVNTSDDNGYDIPEDVVVTAATPANVSSPLTISWNLETPDDLVYAYLHVAEIQSLRENDTREFNISAGQDVNYGPVSPDEFLVGTLFNTSPVKCEGGTCHLQLIKTPKSTLPPLLNAIEAFITVEFPQSETNANDVLAIKSIETSYGLSRISWQGDPCVPQQLLWDGLTCEYTNMSTPPRIHSLDLSSSELTGIIVPEIQNLTELKKLDFSNNNLTGGVPEFLAKMKSLNLSGNNLSGSVPQALLNKVKNGLKLNIQGNPNLCFSSSCNKKKNSIMLPVVASLASLAAIIAMIALLFVCIKRRSSSRKGPSPSQQSIETIKKRYTYAEVLAMTKKFERVLGKGGFGMVYHGYINGTEEVAVKLLSPSSAQGYKEFKTEVELLLRVYHTNLVSLVGYCDEKDHLALIYQYMVNGDLKKHFSGSSIISWVDRLNIAVDAASGLEYLHIGCKPLIVHRDVKSSNILLDDQLQAKLADFGLSRSFPIGDESHVSTLVAGTFGYLDHEYYQTNRLSEKSDVYSFGVVLLEIITNKPVIDHNRDMPHIAEWVKLMLTRGDISNIMDPKLQGVYDSGSAWKALELAMTCVNPSSLKRPNMSHVVHELKECLVSENNRTRDIDTSRSMDINLSFGTDVNPKAR

SEQ ID NO: 87229 - protein, 795 aa, Arabidopsis thaliana
  peptide (1)..(795): Ceres Seq. ID no. 12699218
MEYIKPYTVLRYFPDGVRNCYTLIVIQGTNYLIVAMFTYGNYDNLNTHPKFDLYLGPNIWTTVDLQRNVNGTRAEIIHIPRSTSLQICLVKTGTTTPLISALELRPLRNNTYIPQSGSLKTLFRVHLTDSKETVRYPEDVHDRLWSPFFMPEWRLLRTSLTVNTSDDNGYDIPEDVVVTAATPANVSSPLTISWNLETPDDLVYAYLHVAEIQSLRENDTREFNISAGQDVNYGPVSPDEFLVGTLFNTSPVKCEGGTCHLQLIKTPKSTLPPLLNAIEAFITVEFPQSETNANDVLAIKSIETSYGLSRISWQGDPCVPQQLLWDGLTCEYTNMSTPPRIHSLDLSSSELTGIIVPEIQNLTELKKLDFSNNNLTGGVPEFLAKMKSLNLSGNNLSGSVPQALLNKVKNGLKLNIQGNPNLCFSSSCNKKKNSIMLPVVASLASLAAIIAMIALLFVCIKRRSSSRKGPSPSQQSIETIKKRYTYAEVLAMTKKFERVLGKGGFGMVYHGYINGTEEVAVKLLSPSSAQGYKEFKTEVELLLRVYHTNLVSLVGYCDEKDHLALIYQYMVNGDLKKHFSGSSIISWVDRLNIAVDAASGLEYLHIGCKPLIVHRDVKSSNILLDDQLQAKLADFGLSRSFPIGDESHVSTLVAGTFGYLDHEYYQTNRLSEKSDVYSFGVVLLEIITNKPVIDHNRDMPHIAEWVKLMLTRGDISNIMDPKLQGVYDSGSAWKALELAMTCVNPSSLKRPNMSHVVHELKECLVSENNRTRDIDTSRSMDINLSFGTDVNPKAR

SEQ ID NO: 87230 - DNA, 1665 bp, Arabidopsis thaliana
  misc_feature (1)..(1665): Ceres Seq. ID no. 12699231
  misc_feature (1)..(1665): Ortholog of  Ceres SEQ ID NO 14313336 as cited in SEQ ID NO 55501
  misc_feature (1)..(1665): Ortholog of  Ceres SEQ ID NO 13584744 as cited in SEQ ID NO 69137
atggacaatgatgacgatgctgatgagtatactgtgcagaacacatccaggttatcagttaatgcttcctctcccagctttggactttataggacagctcgagtctctcctttatcgttgacttactacggaatctgtcttggaaatgggaactacactgtgaatctccactttgctgagatcatctttaccgatgacaatacattatacagtctcggcaaacgtttgtttgatatttatgttcaggatcagttggtgattaaaaactttaacattcaagaagctgctcgaggatcaggtaagccaatcattaaatcgtttctggtaaatgtaacggaccatactctgaagattggtttgcgatgggctggcaaagggacaacaggcattccgattagaggggtatatggtcctatgatttcagctatatctgtggaacccaatttcaaacctccggtatattatgacacaaaggatatcatactaaaagtgggggtacctgtcgctgcagcaacacttcttttgtttatcatagtgggtgtattctggaaaaaaaggcgtgacaaaaatgatattgacaaagagctaaggggtctagatcttcaaactggaacttttactctacggcagataaaagcagccactgataatttcgatgtaacaagaaagattggtgaaggtggatttggctctgtttacaagggtgaattatctgaggggaaattaattgcagttaaacaactgtctgcaaaatcgaggcagggaaatcgcgagtttgtaaatgagataggaatgatctcagctcttcaacatccgaatcttgtgaagctatatggatgttgtgttgaaggaaaccaattgatattggtgtatgagtacttggagaacaactgtctatctcgagcgttatttggaaaggatgagagttctagactgaaactagactggtcaacaaggaagaagatttttttggggatagccaagggactgacatttctccatgaagaatctaggataaagattgtacacagagatataaaggcaagcaatgtgttactcgataaggatctcaacgctaaaatttctgactttggtttggcaaagctgaatgatgatggaaacacacacatcagcactcgtattgcaggaactataggttatatggctcctgaatatgcaatgcgtggttacttgactgaaaaagcggatgtttatagcttcggcgtcgttgcactcgaaatcgttagtggaaagagtaacacaaactttaggccaaccgaggactttgtttaccttcttgattgggcttacgttttgcaagagagaggaagcttactagagctggttgatccaacgttagcctcagattactcagaagaggaagccatgttgatgctgaacgtggcattgatgtgcactaacgcatcaccgactctaaggcctacaatgtcgcaggtggtgagtctcatagaggggaagacagcgatgcaagagttgctgtcggatccgagcttctcaacggttaacccgaagcttaaagccttgaggaaccatttttggcaaaacgagctgagcagatcgcttagcttctccacaagcgggcctcgtactgcctctgctaactcactcgttgatgcagaggagaaaaccggacttttggattaa

SEQ ID NO: 87231 - protein, 554 aa, Arabidopsis thaliana
  peptide (1)..(554): Ceres Seq. ID no. 12699232
MDNDDDADEYTVQNTSRLSVNASSPSFGLYRTARVSPLSLTYYGICLGNGNYTVNLHFAEIIFTDDNTLYSLGKRLFDIYVQDQLVIKNFNIQEAARGSGKPIIKSFLVNVTDHTLKIGLRWAGKGTTGIPIRGVYGPMISAISVEPNFKPPVYYDTKDIILKVGVPVAAATLLLFIIVGVFWKKRRDKNDIDKELRGLDLQTGTFTLRQIKAATDNFDVTRKIGEGGFGSVYKGELSEGKLIAVKQLSAKSRQGNREFVNEIGMISALQHPNLVKLYGCCVEGNQLILVYEYLENNCLSRALFGKDESSRLKLDWSTRKKIFLGIAKGLTFLHEESRIKIVHRDIKASNVLLDKDLNAKISDFGLAKLNDDGNTHISTRIAGTIGYMAPEYAMRGYLTEKADVYSFGVVALEIVSGKSNTNFRPTEDFVYLLDWAYVLQERGSLLELVDPTLASDYSEEEAMLMLNVALMCTNASPTLRPTMSQVVSLIEGKTAMQELLSDPSFSTVNPKLKALRNHFWQNELSRSLSFSTSGPRTASANSLVDAEEKTGLLD

SEQ ID NO: 87232 - protein, 416 aa, Arabidopsis thaliana
  peptide (1)..(416): Ceres Seq. ID no. 12699233
MISAISVEPNFKPPVYYDTKDIILKVGVPVAAATLLLFIIVGVFWKKRRDKNDIDKELRGLDLQTGTFTLRQIKAATDNFDVTRKIGEGGFGSVYKGELSEGKLIAVKQLSAKSRQGNREFVNEIGMISALQHPNLVKLYGCCVEGNQLILVYEYLENNCLSRALFGKDESSRLKLDWSTRKKIFLGIAKGLTFLHEESRIKIVHRDIKASNVLLDKDLNAKISDFGLAKLNDDGNTHISTRIAGTIGYMAPEYAMRGYLTEKADVYSFGVVALEIVSGKSNTNFRPTEDFVYLLDWAYVLQERGSLLELVDPTLASDYSEEEAMLMLNVALMCTNASPTLRPTMSQVVSLIEGKTAMQELLSDPSFSTVNPKLKALRNHFWQNELSRSLSFSTSGPRTASANSLVDAEEKTGLLD

SEQ ID NO: 87233 - protein, 290 aa, Arabidopsis thaliana
  peptide (1)..(290): Ceres Seq. ID no. 12699234
MISALQHPNLVKLYGCCVEGNQLILVYEYLENNCLSRALFGKDESSRLKLDWSTRKKIFLGIAKGLTFLHEESRIKIVHRDIKASNVLLDKDLNAKISDFGLAKLNDDGNTHISTRIAGTIGYMAPEYAMRGYLTEKADVYSFGVVALEIVSGKSNTNFRPTEDFVYLLDWAYVLQERGSLLELVDPTLASDYSEEEAMLMLNVALMCTNASPTLRPTMSQVVSLIEGKTAMQELLSDPSFSTVNPKLKALRNHFWQNELSRSLSFSTSGPRTASANSLVDAEEKTGLLD

SEQ ID NO: 87234 - DNA, 1848 bp, Arabidopsis thaliana
  misc_feature (1)..(1848): Ceres Seq. ID no. 12699247
  misc_feature (1)..(1848): Ortholog of  Ceres SEQ ID NO 13598865 as cited in SEQ ID NO 0
atggtgctcttgaaacccaccaccttatcaaaatcctctaaggtcgggccgcaacagcaacagggcttctccgagtctctaatcggcgatagtgtggaggcagctgacgccttcatatgccaatgggttactccacacctctgcgactcttcttcttcttcatgcagcctctcttccctcttctccgctcaaaaccgcctagaaggcagacgcttcctcgaggttctcggcaagttacaatacgccattcagagcaccgttgctatgaatccggactccgctaagcttgctaaaggacaggatttgatgcggaaagctatgaagcatttggagaaggagttttaccgggttttgaaatcgaatcgccgctttctgagtccagaatccgtctctggttggtcttctgaatccaacataccttcgagatcaagtggaaccgcttcggattcttcatcagatggagagctttactctgaatcctcatcggaattaggtaaagacataggaggaggagggaattctgatgctattgttgatttgaagatgatagcaaattgcatgatctcctctggttacgagaaggattgtgttaaaatctacaagaagtttcgcaaaaagatcatcgtcgacacattgtctcatctagggttcgagaagctaacctctacacagatgcagaaactggaatgggagattctggagaagaagatcaaaatatgggtgattgttgcgagagtagcaatcaccactctgttcaacggagaacgaatcctttccgatcacattttctcctcctccgtcgctgaatcttgcttcgttgacataacgctacagagcgcgttaaacctcttcatcttctcactaaccgtagcgaaatccagaaaaactgcagagaagatcttccctacgcttgacgtttaccagacgatcttgcaactgactcccaaaatcgatcagatttttagctacgattcaaccgctgccgttagattacaggcgaatgaatctctagagaagctatcggaatcggtgaatgcaatgatgacggagtttcaatcgtcgattacgaaggaatcgtcgaaatcggcgatttctggcggcggagttcatcagctcacgaggtatgtgatgaacttcatcgtcttcctcgcagactacagcgattctctcgccaccattctcaaggagtcatcgttacctttaccggaggattacttcagtagcagcggcgaagagaatccaggatccggtgatcgttctccgatggcggcgagactcgcgtggttgattctcgtcttgctctgtaaaatcgacgccaaatctcggctctacaacgactcggctctatcgtatctcttcctagcgaacaacctccattacgttgtgaccaaggtccgtacatcgaatctcagactcgtactcggagacgattgggtagcgaatcacgaggttaaagtgaatcaatacctcgagaaatacgaaaaaatggcctggggggatgtgatagcgtcgctccccggtgattcaacggcggggacggaggcggaggagtctctgagacggttcaacgaggcgttcgaagaggcttacaagaagcacaagacatgggtcgtacccgacccgaacctgagagacgagatccaagcgtccatagcgagaaaactaatgcccgggtatacgggtttctataagaaacacccggtcgggtcatgcaatattgtcagatttacccctgaagatctaaataattacataaccgacctatatgttggtttaggaagatccgtgcccgtatccaaaactaagaagtatatggttagcccaagccatacgacggatttgaagtaa

SEQ ID NO: 87235 - protein, 615 aa, Arabidopsis thaliana
  peptide (1)..(615): Ceres Seq. ID no. 12699248
MVLLKPTTLSKSSKVGPQQQQGFSESLIGDSVEAADAFICQWVTPHLCDSSSSSCSLSSLFSAQNRLEGRRFLEVLGKLQYAIQSTVAMNPDSAKLAKGQDLMRKAMKHLEKEFYRVLKSNRRFLSPESVSGWSSESNIPSRSSGTASDSSSDGELYSESSSELGKDIGGGGNSDAIVDLKMIANCMISSGYEKDCVKIYKKFRKKIIVDTLSHLGFEKLTSTQMQKLEWEILEKKIKIWVIVARVAITTLFNGERILSDHIFSSSVAESCFVDITLQSALNLFIFSLTVAKSRKTAEKIFPTLDVYQTILQLTPKIDQIFSYDSTAAVRLQANESLEKLSESVNAMMTEFQSSITKESSKSAISGGGVHQLTRYVMNFIVFLADYSDSLATILKESSLPLPEDYFSSSGEENPGSGDRSPMAARLAWLILVLLCKIDAKSRLYNDSALSYLFLANNLHYVVTKVRTSNLRLVLGDDWVANHEVKVNQYLEKYEKMAWGDVIASLPGDSTAGTEAEESLRRFNEAFEEAYKKHKTWVVPDPNLRDEIQASIARKLMPGYTGFYKKHPVGSCNIVRFTPEDLNNYITDLYVGLGRSVPVSKTKKYMVSPSHTTDLK

SEQ ID NO: 87236 - protein, 527 aa, Arabidopsis thaliana
  peptide (1)..(527): Ceres Seq. ID no. 12699249
MNPDSAKLAKGQDLMRKAMKHLEKEFYRVLKSNRRFLSPESVSGWSSESNIPSRSSGTASDSSSDGELYSESSSELGKDIGGGGNSDAIVDLKMIANCMISSGYEKDCVKIYKKFRKKIIVDTLSHLGFEKLTSTQMQKLEWEILEKKIKIWVIVARVAITTLFNGERILSDHIFSSSVAESCFVDITLQSALNLFIFSLTVAKSRKTAEKIFPTLDVYQTILQLTPKIDQIFSYDSTAAVRLQANESLEKLSESVNAMMTEFQSSITKESSKSAISGGGVHQLTRYVMNFIVFLADYSDSLATILKESSLPLPEDYFSSSGEENPGSGDRSPMAARLAWLILVLLCKIDAKSRLYNDSALSYLFLANNLHYVVTKVRTSNLRLVLGDDWVANHEVKVNQYLEKYEKMAWGDVIASLPGDSTAGTEAEESLRRFNEAFEEAYKKHKTWVVPDPNLRDEIQASIARKLMPGYTGFYKKHPVGSCNIVRFTPEDLNNYITDLYVGLGRSVPVSKTKKYMVSPSHTTDLK

SEQ ID NO: 87237 - protein, 513 aa, Arabidopsis thaliana
  peptide (1)..(513): Ceres Seq. ID no. 12699250
MRKAMKHLEKEFYRVLKSNRRFLSPESVSGWSSESNIPSRSSGTASDSSSDGELYSESSSELGKDIGGGGNSDAIVDLKMIANCMISSGYEKDCVKIYKKFRKKIIVDTLSHLGFEKLTSTQMQKLEWEILEKKIKIWVIVARVAITTLFNGERILSDHIFSSSVAESCFVDITLQSALNLFIFSLTVAKSRKTAEKIFPTLDVYQTILQLTPKIDQIFSYDSTAAVRLQANESLEKLSESVNAMMTEFQSSITKESSKSAISGGGVHQLTRYVMNFIVFLADYSDSLATILKESSLPLPEDYFSSSGEENPGSGDRSPMAARLAWLILVLLCKIDAKSRLYNDSALSYLFLANNLHYVVTKVRTSNLRLVLGDDWVANHEVKVNQYLEKYEKMAWGDVIASLPGDSTAGTEAEESLRRFNEAFEEAYKKHKTWVVPDPNLRDEIQASIARKLMPGYTGFYKKHPVGSCNIVRFTPEDLNNYITDLYVGLGRSVPVSKTKKYMVSPSHTTDLK

SEQ ID NO: 87238 - DNA, 1352 bp, Arabidopsis thaliana
  misc_feature (1)..(1352): Ceres Seq. ID no. 12699257
  misc_feature (1)..(1352): Ortholog of  Ceres SEQ ID NO 14303631 as cited in SEQ ID NO 62864
acatcaaaacttactacttcttcttcttcttcctttaccaaatcttttcttctttactctttttcatcgtcgagaaaaaatggagttggatcttacacctaagttgcccaagaaggtttacggaggagatggtggatcttactctgcctggtgcccagaggagttgccgatgctcaaacagggtaacattggagccgctaagcttgctcttgagaagaatggcttcgctgtccctcgttactctgattcctctaaggtcgcttatgttcttcaaggatctggaactgctggaattgttctcccagagaaggaggagaaggtgatcgcaatcaagcaaggtgattcgattgctcttccctttggtgtggtcacatggtggttcaacaacgaggatcctgagcttgttatcctcttccttggtgaaacccacaagggtcacaaagcagggcagttcactgagttctatcttactggcacaaacggtatcttcactggtttctccactgagtttgttggcagagcctgggaccttgatgagaacaccgtgaagaaacttgttggttctcaaaccggtaatggcattgtgaagcttgatgcgggctttaagatgccacagcccaaggaggagaaccgtgctgggtttgtcttgaactgtttggaggctcctcttgatgtagacatcaaggatggaggcagggtcgttgtcttgaacaccaagaaccttcctttggttggagaggttggctttggagctgatcttgttcggatcgatgcacactccatgtgttcgcctggtttctcttgtgactctgctcttcaggtgacttacattgtgggtggaagtggaagagtccaggtggttggtggtgatgggaaaagagttcttgagacccatatcaaagctggttctctcttcattgttccaaggttctttgtggtttctaagattgctgatgctgatggcatgtcttggttctccattgtcaccactcctgatccgatcttcacacatttggccgggaatacatcggtgtggaagtctttgtcccctgaggttttgcaggcagcgtttaaggtggctccggaggtggagaagtccttccgatccacgaggacttcatcagccattttcttccctccttccaactgaagaaggagaagaatgagaacaagaaccagcttttatcttttatcgtttgttgctttccctcagagatttttgagggtttttacttttcttgtgattcaaggaagtttcttagtctagttgtttaattctcttcctgccttttccccctggaccggttcttgttctcgttgttttaaaatattaaaaaatcaacctttcctat

SEQ ID NO: 87239 - protein, 382 aa, Arabidopsis thaliana; identical to SEQ ID NO: 25400
  peptide (1)..(382): Ceres Seq. ID no. 12699258

SEQ ID NO: 87240 - protein, 356 aa, Arabidopsis thaliana; identical to SEQ ID NO: 25401
  peptide (1)..(356): Ceres Seq. ID no. 12699259

SEQ ID NO: 87241 - protein, 326 aa, Arabidopsis thaliana; identical to SEQ ID NO: 25402
  peptide (1)..(326): Ceres Seq. ID no. 12699260

SEQ ID NO: 87242 - DNA, 1047 bp, Arabidopsis thaliana
  misc_feature (1)..(1047): Ceres Seq. ID no. 12699266
  misc_feature (1)..(1047): Ortholog of  Ceres SEQ ID NO 14311922 as cited in SEQ ID NO 51539
atggaggagatcaccaaaccggtccttgttggaatagttaagaaagaagctccacagctagcatccgtgttgagagaaatgaagaatgttctagatgtggttaggagcaaagtggaagctctgactgcattggtaaaagcaaacagttttccgacagcgggtgggataagttatcttgaggccaagcatctgttacttctaagttattgccaggatcttgtatattatattctaaggaaagcaaaaggactctctattgatggtcatcctcttgtaaggagccttgtagagatacgtatgtttctggaaaagattcgtcccatagacaaaaaacttcagtaccagattcagaagctcaccacagccggtgggcctgtgacagagctagctcattccgagggaaaggggtcgtgtgaagcccaaaaatctgaagatctttcaaattataagcctaaacctgacttacttgctgacaaagaggatgaccaagaggatgatggtgtttatcgacccccgaaatttgcccctatgtctatggaagataagacttcaaaacaagaaagagatgctgccagaaaagagaaacacttttttagacaagccactgaaaatacatacatgaaagatgtgttggacgatctggaggacaggcctgaagagattagagactattatggggttgagagcaatgagcagaagaggtttatggcacagtatgaaaggcaacaaaaggcagaagaagagctctttacccgggcacctcgcactaaagaggataagaagagagagaagcgcttgaaatcaagcagcgggttgcatgaactaaccgagaacttttacgatgatatcaagttcttggataaggatggtgaaaagccaagaagcttcggccgtaataaaaggggagggccattcaagaaaagaaagtttcttttacaaggcactgatatggatacaccagtggttcctttagctgcttcagtgcaccaattttgttgccatgaaaaagatacaaattttcgatttgcttttatgattaaatgttga

SEQ ID NO: 87243 - protein, 348 aa, Arabidopsis thaliana
  peptide (1)..(348): Ceres Seq. ID no. 12699267
MEEITKPVLVGIVKKEAPQLASVLREMKNVLDVVRSKVEALTALVKANSFPTAGGISYLEAKHLLLLSYCQDLVYYILRKAKGLSIDGHPLVRSLVEIRMFLEKIRPIDKKLQYQIQKLTTAGGPVTELAHSEGKGSCEAQKSEDLSNYKPKPDLLADKEDDQEDDGVYRPPKFAPMSMEDKTSKQERDAARKEKHFFRQATENTYMKDVLDDLEDRPEEIRDYYGVESNEQKRFMAQYERQQKAEEELFTRAPRTKEDKKREKRLKSSSGLHELTENFYDDIKFLDKDGEKPRSFGRNKRGGPFKKRKFLLQGTDMDTPVVPLAASVHQFCCHEKDTNFRFAFMIKC

SEQ ID NO: 87244 - protein, 322 aa, Arabidopsis thaliana
  peptide (1)..(322): Ceres Seq. ID no. 12699268
MKNVLDVVRSKVEALTALVKANSFPTAGGISYLEAKHLLLLSYCQDLVYYILRKAKGLSIDGHPLVRSLVEIRMFLEKIRPIDKKLQYQIQKLTTAGGPVTELAHSEGKGSCEAQKSEDLSNYKPKPDLLADKEDDQEDDGVYRPPKFAPMSMEDKTSKQERDAARKEKHFFRQATENTYMKDVLDDLEDRPEEIRDYYGVESNEQKRFMAQYERQQKAEEELFTRAPRTKEDKKREKRLKSSSGLHELTENFYDDIKFLDKDGEKPRSFGRNKRGGPFKKRKFLLQGTDMDTPVVPLAASVHQFCCHEKDTNFRFAFMIKC

SEQ ID NO: 87245 - protein, 249 aa, Arabidopsis thaliana
  peptide (1)..(249): Ceres Seq. ID no. 12699269
MFLEKIRPIDKKLQYQIQKLTTAGGPVTELAHSEGKGSCEAQKSEDLSNYKPKPDLLADKEDDQEDDGVYRPPKFAPMSMEDKTSKQERDAARKEKHFFRQATENTYMKDVLDDLEDRPEEIRDYYGVESNEQKRFMAQYERQQKAEEELFTRAPRTKEDKKREKRLKSSSGLHELTENFYDDIKFLDKDGEKPRSFGRNKRGGPFKKRKFLLQGTDMDTPVVPLAASVHQFCCHEKDTNFRFAFMIKC

SEQ ID NO: 87246 - DNA, 1301 bp, Arabidopsis thaliana
  misc_feature (1)..(1301): Ceres Seq. ID no. 12699274
  misc_feature (1)..(1301): Ortholog of  Ceres SEQ ID NO 13654989 as cited in SEQ ID NO 63117
  misc_feature (1)..(1301): Ortholog of  Ceres SEQ ID NO 13584744 as cited in SEQ ID NO 69137
atgggttgtttcggatgcagtaagaaatcgagcaaacgatccgagactaacaaagatactgtcataaatagaaaaattgtcggtggtactacgagcgttgctaagagtgataagcgagacgatcagactcagcccagttcagattcaacaaaagtcagtccatatagagatgtaaacaatgaaggaggagttggtaaggaagatcagttatctttggatgtgaagggtttgaatctaaatgaccaagtcacagggaagaaagcacagacttttacttttcaagaacttgcagaagctacgggaaactttagatcggattgttttcttggtgaaggaggtttcggaaaagttttcaagggaactatagagaaattggatcaggttgttgcaatcaagcaacttgatcgtaatggggttcaaggaatcagggaatttgtggttgaggtattgactctaagtcttgctgaccatccgaatcttgtgaagcttattgggttttgtgctgagggtgatcagagactactggtgtacgagtatatgccgcaaggatcccttgaagatcatctacatgttctcccttctggtaaaaagcctcttgactggaacacccggatgaaaatagcagctggtgcagcaagaggtttagagtatctgcatgacagaatgacgccccctgtgatttaccgagatcttaaatgttcgaatattttgcttggtgaagactatcaaccgaaactatctgactttgggttggctaaagtaggaccaagcggggataaaacccatgtctcgacaagggttatgggaacgtacggatactgtgctcctgactacgctatgacgggtcagctcacatttaaatccgatatatacagttttggagtagtccttctcgagcttatcaccggaaggaaagcgattgacaatacaaaaacgcgtaaagatcagaatttggttggatgggcacgaccattgttcaaagacaggaggaacttcccaaaaatggttgatccattgcttcagggacaatacccagttagaggactgtaccaagcactagcaatatcagcaatgtgcgttcaagagcagcctaccatgagaccagtggtatctgatgtagtattggctctcaacttcttagcctcttctaaatatgatccgaatagccctagcagcagcagcgggaagaacccttcttttcacagagacagagatgatgaagagaaaagaccacacctcgtcaaggaaactgaatgtgaagggtcctcataggatatccaataagagagtggtaaaaaatc

SEQ ID NO: 87247 - protein, 423 aa, Arabidopsis thaliana; identical to SEQ ID NO: 24904
  peptide (1)..(423): Ceres Seq. ID no. 12699275

SEQ ID NO: 87248 - protein, 244 aa, Arabidopsis thaliana; identical to SEQ ID NO: 24905
  peptide (1)..(244): Ceres Seq. ID no. 12699276

SEQ ID NO: 87249 - protein, 219 aa, Arabidopsis thaliana; identical to SEQ ID NO: 77421
  peptide (1)..(219): Ceres Seq. ID no. 12699277

SEQ ID NO: 87250 - DNA, 2880 bp, Arabidopsis thaliana
  misc_feature (1)..(2880): Ceres Seq. ID no. 12699286
  misc_feature (1)..(2880): Ortholog of  Ceres SEQ ID NO 14314896 as cited in SEQ ID NO 54010
atgggtaaagagaagtttcacatcaacattgtggtcattggccacgtcgattctggaaagtcgaccaccactgggcacttgatctacaagttgggtggtattgacaagcgtgtcattgagaggttcgagaaggaggctgctgagatgaacaagaggtccttcaagtacgcatgggttttggacaaacttaaggctgagcgtgagcgtggtatcaccattgacattgctctctggaagttcgagaccaccaagtactactgcactgtcattgatgctcctggccatcgtgatttcatcaagaacatgatcactggtacctcccaggctgattgtgctgtccttatcattgactccaccactggtggttttgaggctggtatctccaaggatggtcagacccgtgagcacgctctacttgctttcacccttggtgtcaagcagatgatctgctgttgtaacaagatggatgccactacccccaagtactccaaggccaggtacgatgaaatcatcaaggaggtgtcttcctacttgaagaaggttggttacaaccccgacaaaatcccatttgtgcccatctctggatttgagggtgacaacatgattgagaggtccaccaaccttgactggtacaagggaccaactctccttgaggctcttgaccagatcaacgagcccaagaggccgtcagacaagccccttcgtctcccacttcaggatgtctacaagattggtggtattggaacggtgccagtgggacgtgttgagactggtatgatcaagcctggtatggttgtgacctttgctcccacaggattgaccactgaggtcaagtctgttgagatgcaccacgagtctcttcttgaggcacttccaggtgacaacgttgggttcaatgttaagaatgttgctgtcaaggatcttaagagagggtacgtcgcatccaactccaaggatgaccctgccaagggtgctgctaacttcacctcccaggtcatcatcatgaaccaccctggtcagattggtaacggttacgccccagtcctggattgccacacctctcacattgcagtcaagttctctgagatcttgaccaagattgacaggcgttctggtaaggagattgagaaggagcccaagttcttgaagaatggtgatgctggtatggtgaagatgactccaaccaagcccatggttgtggagaccttctctgagtacccaccacttggacgtttcgctgtgagggacatgaggcagactgttgcagtcggtgttatcaagagtgttgacaagaaggacccaaccggagccaaggttaccaaggctgccgtcaagaagggtgaatcaaaggacagtgttagttttattacaatagtttggtatttggtcgcgtgtctgtgttcttgtttcgttttctccccgtcagagcgttgttctcgtaattgggttcttgatcggaggtggcggatctacacacacattcttcctccgcatcatccttctcccttgtgcgatatcgtttgcctaaccatgggtaaagagaagtttcacatcaacattgtggtcattggccacgtcgattctggaaagtcgacaaccactggacacttgatctacaagttgggtggtattgacaagcgtgtgatcgagaggttcgagaaggaggctgctgagatgaacaagaggtccttcaagtacgcatgggtgttggacaaacttaaggctgagcgtgagcgtggtatcaccattgacattgctctctggaagttcgagaccaccaagtactactgcactgtcattgatgctcctggtcatcgtgatttcatcaagaacatgatcactggtacctcccaggctgattgtgctgtccttatcattgactccaccactggtggttttgaggctggtatctccaaggatggtcagacccgtgagcacgctctccttgctttcacccttggtgtcaagcagatgatctgctgttgtaacaagatggatgccactacccccaagtactccaaggccaggtacgatgaaatcatcaaggaggtgtcttcctacttgaagaaggttggttacaaccccgacaaaatcccatttgtgcccatctctggatttgagggtgacaacatgattgagaggtccaccaaccttgactggtacaagggaccaactctccttgaggctcttgaccagatcaacgagcccaagaggccgtcagacaagccccttcgtctcccacttcaggatgtctacaagattggtggtattggaacggtgccagtgggacgtgttgagactggtatgatcaagcctggtatggttgtgacctttgctcccacaggattgaccactgaggtcaagtctgttgagatgcaccacgagtctcttcttgaggcacttccaggtgacaacgttgggttcaatgttaagaatgttgccgtgaaggatcttaagagagggtacgtcgcctccaactccaaggatgaccctgccaagggtgctgctaacttcacctcccaggtcatcatcatgaaccaccctggtcagattggtaacggttacgccccagtcttggattgccacacctctcacattgcagtcaagttctctgagatcttgaccaagattgacaggcgttctggtaaggagattgagaaggagcccaaattcttgaagaatggtgatgctggtatggtgaagatgactccaaccaagcccatggttgtggagaccttctctgagtacccaccacttggacgtttcgctgttagggacatgaggcagactgttgcagtcggtgttatcaagagtgttgacaagaaggacccaaccggagccaaggttaccaaggctgcagttaagaagggtgcaaagtga

SEQ ID NO: 87251 - protein, 959 aa, Arabidopsis thaliana
  peptide (1)..(959): Ceres Seq. ID no. 12699287
MGKEKFHINIVVIGHVDSGKSTTTGHLIYKLGGIDKRVIERFEKEAAEMNKRSFKYAWVLDKLKAERERGITIDIALWKFETTKYYCTVIDAPGHRDFIKNMITGTSQADCAVLIIDSTTGGFEAGISKDGQTREHALLAFTLGVKQMICCCNKMDATTPKYSKARYDEIIKEVSSYLKKVGYNPDKIPFVPISGFEGDNMIERSTNLDWYKGPTLLEALDQINEPKRPSDKPLRLPLQDVYKIGGIGTVPVGRVETGMIKPGMVVTFAPTGLTTEVKSVEMHHESLLEALPGDNVGFNVKNVAVKDLKRGYVASNSKDDPAKGAANFTSQVIIMNHPGQIGNGYAPVLDCHTSHIAVKFSEILTKIDRRSGKEIEKEPKFLKNGDAGMVKMTPTKPMVVETFSEYPPLGRFAVRDMRQTVAVGVIKSVDKKDPTGAKVTKAAVKKGESKDSVSFITIVWYLVACLCSCFVFSPSERCSRNWVLDRRWRIYTHILPPHHPSPLCDIVCLTMGKEKFHINIVVIGHVDSGKSTTTGHLIYKLGGIDKRVIERFEKEAAEMNKRSFKYAWVLDKLKAERERGITIDIALWKFETTKYYCTVIDAPGHRDFIKNMITGTSQADCAVLIIDSTTGGFEAGISKDGQTREHALLAFTLGVKQMICCCNKMDATTPKYSKARYDEIIKEVSSYLKKVGYNPDKIPFVPISGFEGDNMIERSTNLDWYKGPTLLEALDQINEPKRPSDKPLRLPLQDVYKIGGIGTVPVGRVETGMIKPGMVVTFAPTGLTTEVKSVEMHHESLLEALPGDNVGFNVKNVAVKDLKRGYVASNSKDDPAKGAANFTSQVIIMNHPGQIGNGYAPVLDCHTSHIAVKFSEILTKIDRRSGKEIEKEPKFLKNGDAGMVKMTPTKPMVVETFSEYPPLGRFAVRDMRQTVAVGVIKSVDKKDPTGAKVTKAAVKKGAK

SEQ ID NO: 87252 - protein, 911 aa, Arabidopsis thaliana
  peptide (1)..(911): Ceres Seq. ID no. 12699288
MNKRSFKYAWVLDKLKAERERGITIDIALWKFETTKYYCTVIDAPGHRDFIKNMITGTSQADCAVLIIDSTTGGFEAGISKDGQTREHALLAFTLGVKQMICCCNKMDATTPKYSKARYDEIIKEVSSYLKKVGYNPDKIPFVPISGFEGDNMIERSTNLDWYKGPTLLEALDQINEPKRPSDKPLRLPLQDVYKIGGIGTVPVGRVETGMIKPGMVVTFAPTGLTTEVKSVEMHHESLLEALPGDNVGFNVKNVAVKDLKRGYVASNSKDDPAKGAANFTSQVIIMNHPGQIGNGYAPVLDCHTSHIAVKFSEILTKIDRRSGKEIEKEPKFLKNGDAGMVKMTPTKPMVVETFSEYPPLGRFAVRDMRQTVAVGVIKSVDKKDPTGAKVTKAAVKKGESKDSVSFITIVWYLVACLCSCFVFSPSERCSRNWVLDRRWRIYTHILPPHHPSPLCDIVCLTMGKEKFHINIVVIGHVDSGKSTTTGHLIYKLGGIDKRVIERFEKEAAEMNKRSFKYAWVLDKLKAERERGITIDIALWKFETTKYYCTVIDAPGHRDFIKNMITGTSQADCAVLIIDSTTGGFEAGISKDGQTREHALLAFTLGVKQMICCCNKMDATTPKYSKARYDEIIKEVSSYLKKVGYNPDKIPFVPISGFEGDNMIERSTNLDWYKGPTLLEALDQINEPKRPSDKPLRLPLQDVYKIGGIGTVPVGRVETGMIKPGMVVTFAPTGLTTEVKSVEMHHESLLEALPGDNVGFNVKNVAVKDLKRGYVASNSKDDPAKGAANFTSQVIIMNHPGQIGNGYAPVLDCHTSHIAVKFSEILTKIDRRSGKEIEKEPKFLKNGDAGMVKMTPTKPMVVETFSEYPPLGRFAVRDMRQTVAVGVIKSVDKKDPTGAKVTKAAVKKGAK

SEQ ID NO: 87253 - protein, 858 aa, Arabidopsis thaliana
  peptide (1)..(858): Ceres Seq. ID no. 12699289
MITGTSQADCAVLIIDSTTGGFEAGISKDGQTREHALLAFTLGVKQMICCCNKMDATTPKYSKARYDEIIKEVSSYLKKVGYNPDKIPFVPISGFEGDNMIERSTNLDWYKGPTLLEALDQINEPKRPSDKPLRLPLQDVYKIGGIGTVPVGRVETGMIKPGMVVTFAPTGLTTEVKSVEMHHESLLEALPGDNVGFNVKNVAVKDLKRGYVASNSKDDPAKGAANFTSQVIIMNHPGQIGNGYAPVLDCHTSHIAVKFSEILTKIDRRSGKEIEKEPKFLKNGDAGMVKMTPTKPMVVETFSEYPPLGRFAVRDMRQTVAVGVIKSVDKKDPTGAKVTKAAVKKGESKDSVSFITIVWYLVACLCSCFVFSPSERCSRNWVLDRRWRIYTHILPPHHPSPLCDIVCLTMGKEKFHINIVVIGHVDSGKSTTTGHLIYKLGGIDKRVIERFEKEAAEMNKRSFKYAWVLDKLKAERERGITIDIALWKFETTKYYCTVIDAPGHRDFIKNMITGTSQADCAVLIIDSTTGGFEAGISKDGQTREHALLAFTLGVKQMICCCNKMDATTPKYSKARYDEIIKEVSSYLKKVGYNPDKIPFVPISGFEGDNMIERSTNLDWYKGPTLLEALDQINEPKRPSDKPLRLPLQDVYKIGGIGTVPVGRVETGMIKPGMVVTFAPTGLTTEVKSVEMHHESLLEALPGDNVGFNVKNVAVKDLKRGYVASNSKDDPAKGAANFTSQVIIMNHPGQIGNGYAPVLDCHTSHIAVKFSEILTKIDRRSGKEIEKEPKFLKNGDAGMVKMTPTKPMVVETFSEYPPLGRFAVRDMRQTVAVGVIKSVDKKDPTGAKVTKAAVKKGAK

SEQ ID NO: 87254 - DNA, 1482 bp, Arabidopsis thaliana
  misc_feature (1)..(1482): Ceres Seq. ID no. 12699290
  misc_feature (1)..(1482): Ortholog of  Ceres SEQ ID NO 13590394 as cited in SEQ ID NO 66581
atgggtaaagagaagtttcacatcaacattgtggtcattggccacgtcgattctggaaagtcgaccaccactggacacttgatctacaagttgggtggtattgacaagcgtgtcattgagaggttcgagaaggaggctgctgagatgaacaagaggtccttcaagtacgcatgggttttggacaaacttaaggctgagcgtgagcgtggtatcaccattgacattgctctctggaagttcgagaccaccaagtactactgcactgtcattgatgctcctggccatcgtgatttcatcaagaacatgatcactggtacctcccaggctgattgtgctgtccttatcattgactccaccactggtggttttgaggctggtatctccaaggatggtcagacccgtgagcacgctctacttgctttcacccttggtgtcaagcagatgatctgctgttgtaacaagatggatgccactacccccaagtactccaaggccaggtacgatgaaatcatcaaggaggtgtcttcctacttgaagaaggttggttacaaccccgacaaaatcccatttgtgcccatctctggatttgagggtgacaacatgattgagaggtccaccaaccttgactggtacaagggaccaactctccttgaggctcttgaccagatcaacgagcccaagaggccgtcagacaagccccttcgtctcccacttcaggatgtctacaagattggtggtattggaacggtgccagtgggacgtgttgagactggtatgatcaagcctggtatggttgtgacctttgctcccacaggattgaccactgaggtcaagtctgttgagatgcaccacgagtctcttcttgaggcacttccaggtgacaacgttgggttcaatgttaagaatgttgctgtcaaggatcttaagagagggtacgtcgcatccaactccaaggatgaccctgccaagggtgctgctaacttcacctcccaggtcatcatcatgaaccaccctggtcagattggtaacggttacgccccagtcctggattgccacacctctcacattgcagtcaagttctctgagatcttgaccaagattgacaggcgttctggtaaggagattgagaaggagcctaaattcttgaagaatggtgatgctggtatggtgaagatgactccaaccaagcccatggttgtggagaccttctctgagtacccaccacttggacgtttcgctgtgagggacatgaggcagactgttgcagtcggtgttatcaagagtgttgacaagaaggacccaactggagccaaggttaccaaggctgcagtcaagaaggtttggtatttggttggttgtttgtgttaccgcttcgtttattctccgtcggagctcaattctcggaattgggttcttgatcggaggtggcggaggtacttggcactcgagcttcctgtttatttcttttgttttgtgttatga

SEQ ID NO: 87255 - protein, 493 aa, Arabidopsis thaliana
  peptide (1)..(493): Ceres Seq. ID no. 12699291
MGKEKFHINIVVIGHVDSGKSTTTGHLIYKLGGIDKRVIERFEKEAAEMNKRSFKYAWVLDKLKAERERGITIDIALWKFETTKYYCTVIDAPGHRDFIKNMITGTSQADCAVLIIDSTTGGFEAGISKDGQTREHALLAFTLGVKQMICCCNKMDATTPKYSKARYDEIIKEVSSYLKKVGYNPDKIPFVPISGFEGDNMIERSTNLDWYKGPTLLEALDQINEPKRPSDKPLRLPLQDVYKIGGIGTVPVGRVETGMIKPGMVVTFAPTGLTTEVKSVEMHHESLLEALPGDNVGFNVKNVAVKDLKRGYVASNSKDDPAKGAANFTSQVIIMNHPGQIGNGYAPVLDCHTSHIAVKFSEILTKIDRRSGKEIEKEPKFLKNGDAGMVKMTPTKPMVVETFSEYPPLGRFAVRDMRQTVAVGVIKSVDKKDPTGAKVTKAAVKKVWYLVGCLCYRFVYSPSELNSRNWVLDRRWRRYLALELPVYFFCFVL

SEQ ID NO: 87256 - protein, 445 aa, Arabidopsis thaliana
  peptide (1)..(445): Ceres Seq. ID no. 12699292
MNKRSFKYAWVLDKLKAERERGITIDIALWKFETTKYYCTVIDAPGHRDFIKNMITGTSQADCAVLIIDSTTGGFEAGISKDGQTREHALLAFTLGVKQMICCCNKMDATTPKYSKARYDEIIKEVSSYLKKVGYNPDKIPFVPISGFEGDNMIERSTNLDWYKGPTLLEALDQINEPKRPSDKPLRLPLQDVYKIGGIGTVPVGRVETGMIKPGMVVTFAPTGLTTEVKSVEMHHESLLEALPGDNVGFNVKNVAVKDLKRGYVASNSKDDPAKGAANFTSQVIIMNHPGQIGNGYAPVLDCHTSHIAVKFSEILTKIDRRSGKEIEKEPKFLKNGDAGMVKMTPTKPMVVETFSEYPPLGRFAVRDMRQTVAVGVIKSVDKKDPTGAKVTKAAVKKVWYLVGCLCYRFVYSPSELNSRNWVLDRRWRRYLALELPVYFFCFVL

SEQ ID NO: 87257 - protein, 392 aa, Arabidopsis thaliana
  peptide (1)..(392): Ceres Seq. ID no. 12699293
MITGTSQADCAVLIIDSTTGGFEAGISKDGQTREHALLAFTLGVKQMICCCNKMDATTPKYSKARYDEIIKEVSSYLKKVGYNPDKIPFVPISGFEGDNMIERSTNLDWYKGPTLLEALDQINEPKRPSDKPLRLPLQDVYKIGGIGTVPVGRVETGMIKPGMVVTFAPTGLTTEVKSVEMHHESLLEALPGDNVGFNVKNVAVKDLKRGYVASNSKDDPAKGAANFTSQVIIMNHPGQIGNGYAPVLDCHTSHIAVKFSEILTKIDRRSGKEIEKEPKFLKNGDAGMVKMTPTKPMVVETFSEYPPLGRFAVRDMRQTVAVGVIKSVDKKDPTGAKVTKAAVKKVWYLVGCLCYRFVYSPSELNSRNWVLDRRWRRYLALELPVYFFCFVL

SEQ ID NO: 87258 - DNA, 2931 bp, Arabidopsis thaliana
  misc_feature (1)..(2931): Ceres Seq. ID no. 12699302
  misc_feature (1)..(2931): Ortholog of  Ceres SEQ ID NO 15171016 as cited in SEQ ID NO 55391
atggctgttgtagaagaaccgatactttcaagattggatcgtattgatttcatggtgaggaagttagaggagatgaaaggaagctcgcctagaagctcgagcccatcgactccatctagtgggactcagccatcgtcaatggatctgtcgtcaccgaggagcatagggaaggtacactgccgttcgatggaacaagtcagggaggagactgagcggaaaggaactttgctagagagacttaataatgtagaggagcaagtgcttaagctgtgttcacagtttgaggaagaagttgaagaagagaggaagagagaagataagacggataaggaaaagaagaccccgaagaagaagaagggattgaggaagctgggttttcgagctgaaatcgatactcctccaccgcgaagaagcgattacctagatttttcttctaggtttctggcggatctcgccaagttctccttattctcttcagctacggcgaaactttctctagctccactcctccctcgccaccatgttttggaagctcacatctctctctgcatcatctcctatgtggagataatattagacaaagaaaatttcacgttggaagagcttcttgatgaggaagagattattcaagaatgcaaggctttgaatagcaggctcattaactttctaagggataaagctcaagtggagcaattattgcggtacattgttgaagaacctccacaggatgctgatagtaaacgtgctttcaagtttccattcatctcttgtgaaatatttacatgtgaaattgatgttattctaaaaactttggtcgaggatgaagagctgatgaacttgcttttttcctttctggaaccaaatcgtcctcatagtgcattgctggcaggctatttcagcaaggttgtcatttgccttatgatcagaaaaactgcagcgcttatgaattatgtaaaagggcatcaaaatgttttctgccagttagttgatttgattgggataacatccatcatggaggttttggttcgcttggttggggctgatgaccaagtctatcccaactttctggatgtgatgcaatggttggctgatagcaatttacttgaaatgatcgtggacaaacttaaaccatctagtcctccggaggttcaggcaaatgcagcagaaacattatgtgcaatttctcggaatgcaccgtcagctttagctacgcagctctctagccctggctacgttgcaaagatatttggtcatgctcttgaagactcgcattcaaaatccggtctagttcattcactttcagtatgcacctctcttctggatccgaggagatctgctgtttcatcttctatgttcaattcttacagaggtcaacatatgttcgagtctcctgtcccagtttccccagaaactattggtgccatgctgcccaaactcaatgacttgcttatgcttctcactgtagcatctgatagcacagtattgcctacaacatatggtgaactgaggcctcctctcggaaagcatcgtctaaagattgtggagttcattgcagttttgttgaaaactagaagtgaagctgcacaaaaggaattagtcagttcaggaacaatcaaaaggacccttgatctgtttttcgagtacccgtacaataatgctctgcatcatcaagtggagagtataatactttcttgtttggaaaacaagagcgatttgatggttaaccatattcttcgagactgcgatctgattggcaaattcctcttgtcggacagggactcaaacctcttaggtgatagccagcccactgtagctgcctccgggaaaaaaaaacctcgtgtcgggtatgtcgggcatatcacaagaatatcaaataaaattggtcagttgagtaacagcaatggccagataaaggcataccttcaggaaaacagcgaatggaatgagtggcaaggtagtgttctgcaggaccgcaacacggttgaaaatgtcaacagatggggatgtgggcgcccaactaccctacaagataggacaagagatagcgatgaggaagacagggattacgatgttgcagctctggccaataacttaagccaagcatttagatacaaaatatatggaaacgatgacaatgaagaggaccacaatgcccttgatagagacgatgatgatgtttacttcgacgatgaatctgctgaagtagtaatttcatccttaagacttggggatgaccaaggaagcttgtttacaaattcgaattggttcacattccaagacgatagattcggcagcacaccctctgacacagcgggttcgaacacgatagacgtggaattgaataaaacctataatgccaacactagcagtagtgacgatgatgaagttgtggttggagaagaagacgatgatctaactggaaacccaaaagacaacgcgttgaacacaactgaaaccaactttcaaatggagagtccactggatttcttcgacttcaacacctcacagaaagctgaagaagcttttgctgaacagccacccgaatgggtcgggtggggagaaccatctgatatgcaagcgagtggcaccggtctgaacccatttatcgatgatgatgatgatgatgacagcaagcacataatgaacctcgacataccaatggctgaggtcaaatctgaatccatgattccaaacgggtcagaaagatcgttatttgagaaggacgtggaatttgtgggagtggaaccagaaggggcagagaaagcgatggagcaagcgatgaaagaagggatagtaggagaagctggagtgatgaagaagaacaaggagatggctgaggactcaaagccggaggaaagttcaggaggagtgaaagagttcaacgataacaactactggaaagtggatcaagaagttggagtgttggaatga

SEQ ID NO: 87259 - protein, 976 aa, Arabidopsis thaliana
  peptide (1)..(976): Ceres Seq. ID no. 12699303
MAVVEEPILSRLDRIDFMVRKLEEMKGSSPRSSSPSTPSSGTQPSSMDLSSPRSIGKVHCRSMEQVREETERKGTLLERLNNVEEQVLKLCSQFEEEVEEERKREDKTDKEKKTPKKKKGLRKLGFRAEIDTPPPRRSDYLDFSSRFLADLAKFSLFSSATAKLSLAPLLPRHHVLEAHISLCIISYVEIILDKENFTLEELLDEEEIIQECKALNSRLINFLRDKAQVEQLLRYIVEEPPQDADSKRAFKFPFISCEIFTCEIDVILKTLVEDEELMNLLFSFLEPNRPHSALLAGYFSKVVICLMIRKTAALMNYVKGHQNVFCQLVDLIGITSIMEVLVRLVGADDQVYPNFLDVMQWLADSNLLEMIVDKLKPSSPPEVQANAAETLCAISRNAPSALATQLSSPGYVAKIFGHALEDSHSKSGLVHSLSVCTSLLDPRRSAVSSSMFNSYRGQHMFESPVPVSPETIGAMLPKLNDLLMLLTVASDSTVLPTTYGELRPPLGKHRLKIVEFIAVLLKTRSEAAQKELVSSGTIKRTLDLFFEYPYNNALHHQVESIILSCLENKSDLMVNHILRDCDLIGKFLLSDRDSNLLGDSQPTVAASGKKKPRVGYVGHITRISNKIGQLSNSNGQIKAYLQENSEWNEWQGSVLQDRNTVENVNRWGCGRPTTLQDRTRDSDEEDRDYDVAALANNLSQAFRYKIYGNDDNEEDHNALDRDDDDVYFDDESAEVVISSLRLGDDQGSLFTNSNWFTFQDDRFGSTPSDTAGSNTIDVELNKTYNANTSSSDDDEVVVGEEDDDLTGNPKDNALNTTETNFQMESPLDFFDFNTSQKAEEAFAEQPPEWVGWGEPSDMQASGTGLNPFIDDDDDDDSKHIMNLDIPMAEVKSESMIPNGSERSLFEKDVEFVGVEPEGAEKAMEQAMKEGIVGEAGVMKKNKEMAEDSKPEESSGGVKEFNDNNYWKVDQEVGVLE

SEQ ID NO: 87260 - protein, 959 aa, Arabidopsis thaliana
  peptide (1)..(959): Ceres Seq. ID no. 12699304
MVRKLEEMKGSSPRSSSPSTPSSGTQPSSMDLSSPRSIGKVHCRSMEQVREETERKGTLLERLNNVEEQVLKLCSQFEEEVEEERKREDKTDKEKKTPKKKKGLRKLGFRAEIDTPPPRRSDYLDFSSRFLADLAKFSLFSSATAKLSLAPLLPRHHVLEAHISLCIISYVEIILDKENFTLEELLDEEEIIQECKALNSRLINFLRDKAQVEQLLRYIVEEPPQDADSKRAFKFPFISCEIFTCEIDVILKTLVEDEELMNLLFSFLEPNRPHSALLAGYFSKVVICLMIRKTAALMNYVKGHQNVFCQLVDLIGITSIMEVLVRLVGADDQVYPNFLDVMQWLADSNLLEMIVDKLKPSSPPEVQANAAETLCAISRNAPSALATQLSSPGYVAKIFGHALEDSHSKSGLVHSLSVCTSLLDPRRSAVSSSMFNSYRGQHMFESPVPVSPETIGAMLPKLNDLLMLLTVASDSTVLPTTYGELRPPLGKHRLKIVEFIAVLLKTRSEAAQKELVSSGTIKRTLDLFFEYPYNNALHHQVESIILSCLENKSDLMVNHILRDCDLIGKFLLSDRDSNLLGDSQPTVAASGKKKPRVGYVGHITRISNKIGQLSNSNGQIKAYLQENSEWNEWQGSVLQDRNTVENVNRWGCGRPTTLQDRTRDSDEEDRDYDVAALANNLSQAFRYKIYGNDDNEEDHNALDRDDDDVYFDDESAEVVISSLRLGDDQGSLFTNSNWFTFQDDRFGSTPSDTAGSNTIDVELNKTYNANTSSSDDDEVVVGEEDDDLTGNPKDNALNTTETNFQMESPLDFFDFNTSQKAEEAFAEQPPEWVGWGEPSDMQASGTGLNPFIDDDDDDDSKHIMNLDIPMAEVKSESMIPNGSERSLFEKDVEFVGVEPEGAEKAMEQAMKEGIVGEAGVMKKNKEMAEDSKPEESSGGVKEFNDNNYWKVDQEVGVLE

SEQ ID NO: 87261 - protein, 952 aa, Arabidopsis thaliana
  peptide (1)..(952): Ceres Seq. ID no. 12699305
MKGSSPRSSSPSTPSSGTQPSSMDLSSPRSIGKVHCRSMEQVREETERKGTLLERLNNVEEQVLKLCSQFEEEVEEERKREDKTDKEKKTPKKKKGLRKLGFRAEIDTPPPRRSDYLDFSSRFLADLAKFSLFSSATAKLSLAPLLPRHHVLEAHISLCIISYVEIILDKENFTLEELLDEEEIIQECKALNSRLINFLRDKAQVEQLLRYIVEEPPQDADSKRAFKFPFISCEIFTCEIDVILKTLVEDEELMNLLFSFLEPNRPHSALLAGYFSKVVICLMIRKTAALMNYVKGHQNVFCQLVDLIGITSIMEVLVRLVGADDQVYPNFLDVMQWLADSNLLEMIVDKLKPSSPPEVQANAAETLCAISRNAPSALATQLSSPGYVAKIFGHALEDSHSKSGLVHSLSVCTSLLDPRRSAVSSSMFNSYRGQHMFESPVPVSPETIGAMLPKLNDLLMLLTVASDSTVLPTTYGELRPPLGKHRLKIVEFIAVLLKTRSEAAQKELVSSGTIKRTLDLFFEYPYNNALHHQVESIILSCLENKSDLMVNHILRDCDLIGKFLLSDRDSNLLGDSQPTVAASGKKKPRVGYVGHITRISNKIGQLSNSNGQIKAYLQENSEWNEWQGSVLQDRNTVENVNRWGCGRPTTLQDRTRDSDEEDRDYDVAALANNLSQAFRYKIYGNDDNEEDHNALDRDDDDVYFDDESAEVVISSLRLGDDQGSLFTNSNWFTFQDDRFGSTPSDTAGSNTIDVELNKTYNANTSSSDDDEVVVGEEDDDLTGNPKDNALNTTETNFQMESPLDFFDFNTSQKAEEAFAEQPPEWVGWGEPSDMQASGTGLNPFIDDDDDDDSKHIMNLDIPMAEVKSESMIPNGSERSLFEKDVEFVGVEPEGAEKAMEQAMKEGIVGEAGVMKKNKEMAEDSKPEESSGGVKEFNDNNYWKVDQEVGVLE

SEQ ID NO: 87262 - DNA, 1107 bp, Arabidopsis thaliana
  misc_feature (1)..(1107): Ceres Seq. ID no. 12699367
  misc_feature (1)..(1107): Ortholog of  Ceres SEQ ID NO 13598413 as cited in SEQ ID NO 68934
ccgaaactcgtctgagagaggctctgagattcgatgtcgttcgaggaagaagaagaggaggaaacattcgagcatacacttctcgtggtgcgtgaggtctccgtttacaagatcccgccgcgaaccacatccggcggatacaagtgcggcgaatggcttcaatccgataagatctggtctggtagactccgcgtcgtatcgtgcaaggatcgatgcgagatccgcctcgaggattcgaattccggtgatcttttcgcagcttgttttgtggatcctggacgtagagagaactctgtagagccgtctctcgattcgtctaggtatttcgttctcaggatcgatgacgggagagggaagtatgcgtttatcgggctaggattcgctgagaggaacgaagcgtttgatttcaatgttgcgttatcggatcatgaaaagtacgttaggagggagaaagagaaggagacaggggaaacgagtgagagcgataatcatattgatatccatcctgccgttaatcacagattgaaggaaggtgaaaccataagaatcaacgtgaagccgaaaccaacaacaaatggcactgggatgctctcagctgctctttcaggaacggggaagccaaaacctctagcacttgccccaccccccaaagctgccggagtaaccaggtctcctttacctcctcctccaaacgatcccgtcgcttcaaggattgcatctgatggctgcaaggaatcacgcaggaacgagcctctatctgatctatctcagctcaaaaaatcttccttcaacggcgggatcaggatcgagcaagtcaacaggagctgcatcaggttgggcagctttctgatgaatggagtgtaaaatttaagttattggacaagtccggcttcatcttcttgtgacttgagagcacgagacaatagacaacaatggtggtcagccaacagtctttttgatgtatgttaatggtaagttgatgtgtgtttctttgtaatcctcccacactccctgttttaattatttttcttccttataatcatcgttgttacattatcgattatcatttgtatcactgagatattaatatatacaaaaaggcttttt

SEQ ID NO: 87263 - protein, 276 aa, Arabidopsis thaliana
  peptide (1)..(276): Ceres Seq. ID no. 12699368
MSFEEEEEEETFEHTLLVVREVSVYKIPPRTTSGGYKCGEWLQSDKIWSGRLRVVSCKDRCEIRLEDSNSGDLFAACFVDPGRRENSVEPSLDSSRYFVLRIDDGRGKYAFIGLGFAERNEAFDFNVALSDHEKYVRREKEKETGETSESDNHIDIHPAVNHRLKEGETIRINVKPKPTTNGTGMLSAALSGTGKPKPLALAPPPKAAGVTRSPLPPPPNDPVASRIASDGCKESRRNEPLSDLSQLKKSSFNGGIRIEQVNRSCIRLGSFLMNGV

SEQ ID NO: 87264 - DNA, 879 bp, Arabidopsis thaliana
  misc_feature (1)..(879): Ceres Seq. ID no. 12699369
  misc_feature (1)..(879): Ortholog of  Ceres SEQ ID NO 15225233 as cited in SEQ ID NO 58014
atggaagcgagaatcatcctcctccgaattcaaatcccttggagcgctaatcgccaattctctcatcctcctttagatttccctcgttttatcagagcttcttcttcctcaacctcacagaagccgaaaacttacgaaggtccgaaaccgaggaagaatttagtagctgatttcatttccaaaaacgatgacttggttcgaagcttaccgatctacgtcgggggcgcttctcttttggccgttctctttaatcggactgtttccggtatcgctcctgttgccgatgctagcagctcacagtctagagcagatctattagcgcttggcttggctgtcaccaatctattgaccggtttagtctggttatcgattcgacctaagtcaataacacctgtaaatccgaaaggtgtggaatgcaaagttgtagaatctgatcttcctgcatcgatggtttccgagttgttatgggcttgggaatctcttaaggtagcaacatgttgtaagtctctagttattgtctacaatggaatttgccttattcaaattgggatggtagctgaatctccagaagataagaaaacagtcatagtaaagaccgataagttgatgcaaggatcggtttacagaggggttatgaaatccaaagcacagagttacttggctaatctttctctttatcctgggagatcagagctgccatttctacctgcaaatacacagccgcttggagataaaggaatcgcagtcattggtggaaatacgattagaggattcacgtcttcagaccaggcttggatttcttcaattggggagaagctagatgcgacactggggagatattttgttgattctgatgagatttccagagtaacagtttga

SEQ ID NO: 87265 - protein, 292 aa, Arabidopsis thaliana
  peptide (1)..(292): Ceres Seq. ID no. 12699370
MEARIILLRIQIPWSANRQFSHPPLDFPRFIRASSSSTSQKPKTYEGPKPRKNLVADFISKNDDLVRSLPIYVGGASLLAVLFNRTVSGIAPVADASSSQSRADLLALGLAVTNLLTGLVWLSIRPKSITPVNPKGVECKVVESDLPASMVSELLWAWESLKVATCCKSLVIVYNGICLIQIGMVAESPEDKKTVIVKTDKLMQGSVYRGVMKSKAQSYLANLSLYPGRSELPFLPANTQPLGDKGIAVIGGNTIRGFTSSDQAWISSIGEKLDATLGRYFVDSDEISRVTV

SEQ ID NO: 87266 - DNA, 1521 bp, Arabidopsis thaliana
  misc_feature (1)..(1521): Ceres Seq. ID no. 12699412
  misc_feature (1)..(1521): Ortholog of  Ceres SEQ ID NO 13600220 as cited in SEQ ID NO 0
atggaacagattttggctctgtttgccatttttcttgcttttgctttctccgggaaatgcagcgacgttttcagcagatctgactaccctgagggattcgtctttggagccggcacttctgcttatcagtgggaaggagctgctgcagaagacggaaggaaacctagcctgtgggacactctttgtcactctcgtgaccaaggtaacggagatatagcatgtgatgggtatcacaagtacaaggatgatgtgaagttgatggtggacactaacttagatgctttcagattctccatctcttggtctaggctaatacctaatggaagagggcctgttaaccaaaagggtctacagttctacaagaacctcatccaagagttagtaagccacggaattgaaccacatgttacactctaccactatgatcatcctcagtctctggaggatgaatatggaggatgcaaagactttactacttatgcagatgtttgcttcagagagtttgggaaccatgtcaaactatggaccacgatcaacgaggctaatatattctctataggaggttacaacgatggggatacaccgcctggtcgttgttccaaaccgagcaaaaactgttcttcagggaactcttccattgaaccatatattgtaggccataatttgttgcttgcgcacgcctctgtttcaagacgatacaaacaaaaatacaaggataagcagggaggttccataggatttagcttattcatattagggcttattcctactacaagctccaaggatgatgccactgcaacccaaagagcccaagatttctacgtcggctggttccttagacctcttttatttggagactatcctgatacaatgaaaagaaccattggatcaagactgccagttttctctgagaaagaatcagaacaagttaaaggctcatgtgactttgtaggagtcatacactatcatgcggcttctgtcactaacatcaaatccaaaccttctctgtccggaaacccggatttctactcatacatggagacagattttggaaaaagtttagattttcagtatgctaatactccatgggctatggaagttgtgctggagtatataaagcagagctatggaaatcctcctgtctacattcttgagagtgctaaattcactttccaatggcaacaaataggtacaccgatgaagcaagattcgcagctgaaacagaaggatataccaagggtggaatacttgcatgcctacattggtggtgtgctcaaatccataaggaatggatcagacacgagaggctacttcgtatggtcatttatggatttatacgagcttctagggggatatgaggttggttttgggttgtacactgtcaatttcagcgatcctcatcgcaagagatctcccaaactctctgcttattggtactctgattttctcaagggtgaatctgcctttcttgattcccaaggcatcaaggaattgcagagcaaatactcttcttccttctag

SEQ ID NO: 87267 - protein, 506 aa, Arabidopsis thaliana
  peptide (1)..(506): Ceres Seq. ID no. 12699413
MEQILALFAIFLAFAFSGKCSDVFSRSDYPEGFVFGAGTSAYQWEGAAAEDGRKPSLWDTLCHSRDQGNGDIACDGYHKYKDDVKLMVDTNLDAFRFSISWSRLIPNGRGPVNQKGLQFYKNLIQELVSHGIEPHVTLYHYDHPQSLEDEYGGCKDFTTYADVCFREFGNHVKLWTTINEANIFSIGGYNDGDTPPGRCSKPSKNCSSGNSSIEPYIVGHNLLLAHASVSRRYKQKYKDKQGGSIGFSLFILGLIPTTSSKDDATATQRAQDFYVGWFLRPLLFGDYPDTMKRTIGSRLPVFSEKESEQVKGSCDFVGVIHYHAASVTNIKSKPSLSGNPDFYSYMETDFGKSLDFQYANTPWAMEVVLEYIKQSYGNPPVYILESAKFTFQWQQIGTPMKQDSQLKQKDIPRVEYLHAYIGGVLKSIRNGSDTRGYFVWSFMDLYELLGGYEVGFGLYTVNFSDPHRKRSPKLSAYWYSDFLKGESAFLDSQGIKELQSKYSSSF

SEQ ID NO: 87268 - protein, 420 aa, Arabidopsis thaliana
  peptide (1)..(420): Ceres Seq. ID no. 12699414
MVDTNLDAFRFSISWSRLIPNGRGPVNQKGLQFYKNLIQELVSHGIEPHVTLYHYDHPQSLEDEYGGCKDFTTYADVCFREFGNHVKLWTTINEANIFSIGGYNDGDTPPGRCSKPSKNCSSGNSSIEPYIVGHNLLLAHASVSRRYKQKYKDKQGGSIGFSLFILGLIPTTSSKDDATATQRAQDFYVGWFLRPLLFGDYPDTMKRTIGSRLPVFSEKESEQVKGSCDFVGVIHYHAASVTNIKSKPSLSGNPDFYSYMETDFGKSLDFQYANTPWAMEVVLEYIKQSYGNPPVYILESAKFTFQWQQIGTPMKQDSQLKQKDIPRVEYLHAYIGGVLKSIRNGSDTRGYFVWSFMDLYELLGGYEVGFGLYTVNFSDPHRKRSPKLSAYWYSDFLKGESAFLDSQGIKELQSKYSSSF

SEQ ID NO: 87269 - DNA, 1178 bp, Arabidopsis thaliana
  misc_feature (1)..(1178): Ceres Seq. ID no. 12699476
  misc_feature (1)..(1178): Ortholog of  Ceres SEQ ID NO 13623732 as cited in SEQ ID NO 0
ataaaatccatggctgaagcttgcagagttaggaggatgaagctaggaagccaaggccttgaggtatctgcgcaaggccttggctgcatggccctctccgctcgatacggtgctcccaagccggaaactgacgccatcgctctcctccaccatgctattaactccggtgttactttctttgacacctctgacatgtatggtcctgaaaccaacgagttgctcctcggaaaggctctgaaagatggggtgaaggagaaagtggagcttgcgaccaaatttggattctttatagtagagggggaaatttctgaggtaagaggagatcctgagtatgtaagggcagcgtgtgaggctagtttaaagaggctagatattgcctgcattgatctttattatcagcatcgaatcgatactcgtgtccctatcgaaatcactatgagagaactgaagaagctagttgaagagggtaagataaagtatattggtctgtcagaagcttcagcttcaactatcagaagagcacatgctgttcacccgataactgcggtgcaaatagaatggtccttatggtcgagagacgcggaagaagatatcattcctatctgcagggaacttgggattggaatcgtagcttatagccctctaggaagaggcttcttagcagcaggacccaaacttgctgagaatctggaaaacgatgacttcagaaagactctaccaagattccaacaagaaaacgtagaccacaacaagattctctttgagaaagtttctgcaatggctgagaagaaagggtgcactccagcacaactagccttagcatgggttcatcaccagggagatgatgtttgccccattccaggaaccactaagattgaaaacctcaaccagaacattagagctttgtcagtaaaactcactcctgaagaaatatctgagctcgactcccttgccaaaccagagtctgtgaaaggagaaagatacatggcctcaatgtccaccttcaagaactccaacactccaccgttgtcttcctggaaagccacttaaaaccgcatgagagtttctctagctaaacctactaaaattaatatgctaagggcttgtgtaagcccacaaaaataatatgtaagagtttgtgttgatgttcagagtgttcaatgtataattttctatgc

SEQ ID NO: 87270 - protein, 349 aa, Arabidopsis thaliana
  peptide (1)..(349): Ceres Seq. ID no. 12699477
IKSMAEACRVRRMKLGSQGLEVSAQGLGCMALSARYGAPKPETDAIALLHHAINSGVTFFDTSDMYGPETNELLLGKALKDGVKEKVELATKFGFFIVEGEISEVRGDPEYVRAACEASLKRLDIACIDLYYQHRIDTRVPIEITMRELKKLVEEGKIKYIGLSEASASTIRRAHAVHPITAVQIEWSLWSRDAEEDIIPICRELGIGIVAYSPLGRGFLAAGPKLAENLENDDFRKTLPRFQQENVDHNKILFEKVSAMAEKKGCTPAQLALAWVHHQGDDVCPIPGTTKIENLNQNIRALSVKLTPEEISELDSLAKPESVKGERYMASMSTFKNSNTPPLSSWKAT

SEQ ID NO: 87271 - protein, 346 aa, Arabidopsis thaliana
  peptide (1)..(346): Ceres Seq. ID no. 12699478
MAEACRVRRMKLGSQGLEVSAQGLGCMALSARYGAPKPETDAIALLHHAINSGVTFFDTSDMYGPETNELLLGKALKDGVKEKVELATKFGFFIVEGEISEVRGDPEYVRAACEASLKRLDIACIDLYYQHRIDTRVPIEITMRELKKLVEEGKIKYIGLSEASASTIRRAHAVHPITAVQIEWSLWSRDAEEDIIPICRELGIGIVAYSPLGRGFLAAGPKLAENLENDDFRKTLPRFQQENVDHNKILFEKVSAMAEKKGCTPAQLALAWVHHQGDDVCPIPGTTKIENLNQNIRALSVKLTPEEISELDSLAKPESVKGERYMASMSTFKNSNTPPLSSWKAT

SEQ ID NO: 87272 - protein, 337 aa, Arabidopsis thaliana
  peptide (1)..(337): Ceres Seq. ID no. 12699479
MKLGSQGLEVSAQGLGCMALSARYGAPKPETDAIALLHHAINSGVTFFDTSDMYGPETNELLLGKALKDGVKEKVELATKFGFFIVEGEISEVRGDPEYVRAACEASLKRLDIACIDLYYQHRIDTRVPIEITMRELKKLVEEGKIKYIGLSEASASTIRRAHAVHPITAVQIEWSLWSRDAEEDIIPICRELGIGIVAYSPLGRGFLAAGPKLAENLENDDFRKTLPRFQQENVDHNKILFEKVSAMAEKKGCTPAQLALAWVHHQGDDVCPIPGTTKIENLNQNIRALSVKLTPEEISELDSLAKPESVKGERYMASMSTFKNSNTPPLSSWKAT

SEQ ID NO: 87273 - DNA, 1348 bp, Arabidopsis thaliana
  misc_feature (1)..(1348): Ceres Seq. ID no. 12699484
  misc_feature (1)..(1348): Ortholog of  Ceres SEQ ID NO 13623732 as cited in SEQ ID NO 0
agacaagtcaagagagagagatagttctgacttctgacagagactcatggcggaagcttgcggagtgagaaggattaagctaggaagccaaggccttgaggtatcggcgcaaggtcttggttgcatgggtctctctgctttctacggtactcccaagccggaaaccgaagctatcgctctcatccaccacgccattcactccggcgtcactttccttgacacctccgatatctacggtcctgagaccaacgagcttctcctcagcaaggctctcaaggatggggtgagagaaaaagtggaacttgcgaccaaatatggaatcaggtatgcagaggggaaagtagagtttaagggagatcctgcttatgtaagagctgcgtgtgaggctagtttaatgcgagtagatgttgcctgcattgatctctattatcagcatcgaattgatactcgtgtccctatcgaaatcactattggagagctgaagaagctagttgaagaaggtaaaataaagtatatcggtttgtctgaagcttcagcttcaactatcagaagagcacatgctgttcacccgataaccgctctgcaaatagaatggtccttatggtcgagagacgtggaagaagatataattccaacctgcagggaacttgggattggaattgttgcttacagtcctctgggacgaggtttctttgcttcaggacccaagcttgttgagaacctagacaataatgacgtcagaaagactctaccaagattccaacaggaaaacttagaccacaacaagattctctttgagaaggtttctgcaatgtctgagaagaaaggatgcactcctgcacaactagcccttgcatgggttcatcaccagggagatgatgtttgccccatcccaggaaccactaagattgaaaacctcaaccagaacattggagctttatcagtgaaacttactcccgaagagatgtctgagctcgaatcccttgcacaaccaggttttgtgaaaggagaaagatccattagcatcctgaccacgttcaaaaactctgagactccaccattgtcttcttggaaagccgcttaaaatcgtctgagtttctctgattgttgtggggttcatgtcatttaagtggtctaagttatgtcagctagatcaaggtaataaaagtgctgtgtcttcgagagtggattatggtaggttcattcccagggaaagccaaaactatcaagggttgatgcctttaagagtaaataatgtatagagttccccaagtgagaacttcaatttacatttcatacattttgaccaaactctataaagaaagttatgtttagactttttttttgc

SEQ ID NO: 87274 - protein, 345 aa, Arabidopsis thaliana
  peptide (1)..(345): Ceres Seq. ID no. 12699485
MAEACGVRRIKLGSQGLEVSAQGLGCMGLSAFYGTPKPETEAIALIHHAIHSGVTFLDTSDIYGPETNELLLSKALKDGVREKVELATKYGIRYAEGKVEFKGDPAYVRAACEASLMRVDVACIDLYYQHRIDTRVPIEITIGELKKLVEEGKIKYIGLSEASASTIRRAHAVHPITALQIEWSLWSRDVEEDIIPTCRELGIGIVAYSPLGRGFFASGPKLVENLDNNDVRKTLPRFQQENLDHNKILFEKVSAMSEKKGCTPAQLALAWVHHQGDDVCPIPGTTKIENLNQNIGALSVKLTPEEMSELESLAQPGFVKGERSISILTTFKNSETPPLSSWKAA

SEQ ID NO: 87275 - protein, 319 aa, Arabidopsis thaliana
  peptide (1)..(319): Ceres Seq. ID no. 12699486
MGLSAFYGTPKPETEAIALIHHAIHSGVTFLDTSDIYGPETNELLLSKALKDGVREKVELATKYGIRYAEGKVEFKGDPAYVRAACEASLMRVDVACIDLYYQHRIDTRVPIEITIGELKKLVEEGKIKYIGLSEASASTIRRAHAVHPITALQIEWSLWSRDVEEDIIPTCRELGIGIVAYSPLGRGFFASGPKLVENLDNNDVRKTLPRFQQENLDHNKILFEKVSAMSEKKGCTPAQLALAWVHHQGDDVCPIPGTTKIENLNQNIGALSVKLTPEEMSELESLAQPGFVKGERSISILTTFKNSETPPLSSWKAA

SEQ ID NO: 87276 - protein, 229 aa, Arabidopsis thaliana
  peptide (1)..(229): Ceres Seq. ID no. 12699487
MRVDVACIDLYYQHRIDTRVPIEITIGELKKLVEEGKIKYIGLSEASASTIRRAHAVHPITALQIEWSLWSRDVEEDIIPTCRELGIGIVAYSPLGRGFFASGPKLVENLDNNDVRKTLPRFQQENLDHNKILFEKVSAMSEKKGCTPAQLALAWVHHQGDDVCPIPGTTKIENLNQNIGALSVKLTPEEMSELESLAQPGFVKGERSISILTTFKNSETPPLSSWKAA

SEQ ID NO: 87277 - DNA, 860 bp, Arabidopsis thaliana
  misc_feature (1)..(860): Ceres Seq. ID no. 12699545
  misc_feature (1)..(860): Ortholog of  Ceres SEQ ID NO 13662677 as cited in SEQ ID NO 63824
gcacagtatgttttttgacttcttcgcgtcggcgatattatccagaaacagtagtgtcgaagaagaagaagaagaagaaggagagattctgagtttagggttttgtttgtgttgcttcgaattgagcagctatggcttccgtgttgctacttcttctggtgttcgtgtttgatctcattgcttttggtcttgctgttgctgcagagcaacgaagaaccacctggcaaatttctagagaatcaagagatttgagctactgtgtgtatgacaaggacatagcaacgggtctcggagtcggttctttcttggtcttattagcgagtcagctcttaataatggtggcgagccgatgtttatgctgtggaagagcattgacaccaagtggttcaagatcttgggcaatttttctcttcatcaccacctgggttttcttcttcatagcacaagtgtgtttacttgctggctctgtacgaaacgcttaccatacaaagtaccgtgtctactttggtaacacttccccttcttgtcgatcactgaggaaaggcgtgtttggggctggagcagcattcatagtgctcacggggattgtctccgagctttactatgtgaccctttcgagggccaaagactttcaaccttcaagagatcccggtatccgaatgagtagcctgtagaacttacacctgctttgtagatttagaatagttatgttcattgttgttatcatcttactatcttaggtcattgttgttatgattttaatagtatggaggaaactaacattattttcaatttcttaaaatatatgtacctatcaaaaacgatagattgaaaacaataaagaaccataaagttgatat

SEQ ID NO: 87278 - protein, 180 aa, Arabidopsis thaliana; identical to SEQ ID NO: 36058
  peptide (1)..(180): Ceres Seq. ID no. 12699546

SEQ ID NO: 87279 - protein, 112 aa, Arabidopsis thaliana; identical to SEQ ID NO: 36059
  peptide (1)..(112): Ceres Seq. ID no. 12699547

SEQ ID NO: 87280 - DNA, 1014 bp, Arabidopsis thaliana
  misc_feature (1)..(1014): Ceres Seq. ID no. 12699575
  misc_feature (1)..(1014): Ortholog of  Ceres SEQ ID NO 13579918 as cited in SEQ ID NO 64644
  misc_feature (1)..(1014): Ortholog of  Ceres SEQ ID NO 13654122 as cited in SEQ ID NO 68192
atgactaaatctcatgtcattttctctgcctccatcgctctctttctcctactctccatctcgcatttcccgggagctctctctcaatccaataaagattgccaatcaaaatccaactactcatgtatagacaaaaacaaagcattagatctcaaactcttatcaatcttctcaattctcatcactagtctaatcggtgtttgcctcccgttctttgcccgatcaattcccgctttccaacccgagaaatctcacttcctcatcgtaaaatctttcgcctccggaatcatcctttccactggtttcatgcatgtcttgcctgattctttcgagatgctttcatctccttgtcttaacgataacccctggcacaagtttcctttcgccggctttgtagccatgatgtctgccgtgttcacgctcatggttgactctattaccaccagcgtcttcaccaagtcaggaaggaaagatctacgtgctgacgtagcatccgttgagactcctgaccaagagatagggcacgtacagcttctgcggtatcgtattcttgcaatcgtattggagctaggaatagtggtgcagtcgatagtgataggactatcggtaggagacactaacaatacttgcaccatcaaaggactcgtcgctgcgctttgcttccatcaaatgttcgaaggcatgggtctcggcggttgcatccttcaggcggagtacgggtgggttaaaaaggcggtgatggctttcttttttgcggtgacgacgccttttggagtggttctagggatggcactatctaaaacatacaaagagaatagccctgaatcgcttataacagttgggttgctcaacgcttcctcggcaggactactcatctacatggctttagttgaccttctagctgccgattttatgggtcaaaaaatgcaaaggagcatcaagcttcaattaaagtcatatgctgccgttttgcttggtgctggtggcatgtccgtcatggccaagtgggcttga

SEQ ID NO: 87281 - protein, 337 aa, Arabidopsis thaliana
  peptide (1)..(337): Ceres Seq. ID no. 12699576
MTKSHVIFSASIALFLLLSISHFPGALSQSNKDCQSKSNYSCIDKNKALDLKLLSIFSILITSLIGVCLPFFARSIPAFQPEKSHFLIVKSFASGIILSTGFMHVLPDSFEMLSSPCLNDNPWHKFPFAGFVAMMSAVFTLMVDSITTSVFTKSGRKDLRADVASVETPDQEIGHVQLLRYRILAIVLELGIVVQSIVIGLSVGDTNNTCTIKGLVAALCFHQMFEGMGLGGCILQAEYGWVKKAVMAFFFAVTTPFGVVLGMALSKTYKENSPESLITVGLLNASSAGLLIYMALVDLLAADFMGQKMQRSIKLQLKSYAAVLLGAGGMSVMAKWA

SEQ ID NO: 87282 - protein, 235 aa, Arabidopsis thaliana
  peptide (1)..(235): Ceres Seq. ID no. 12699577
MHVLPDSFEMLSSPCLNDNPWHKFPFAGFVAMMSAVFTLMVDSITTSVFTKSGRKDLRADVASVETPDQEIGHVQLLRYRILAIVLELGIVVQSIVIGLSVGDTNNTCTIKGLVAALCFHQMFEGMGLGGCILQAEYGWVKKAVMAFFFAVTTPFGVVLGMALSKTYKENSPESLITVGLLNASSAGLLIYMALVDLLAADFMGQKMQRSIKLQLKSYAAVLLGAGGMSVMAKWA

SEQ ID NO: 87283 - protein, 226 aa, Arabidopsis thaliana
  peptide (1)..(226): Ceres Seq. ID no. 12699578
MLSSPCLNDNPWHKFPFAGFVAMMSAVFTLMVDSITTSVFTKSGRKDLRADVASVETPDQEIGHVQLLRYRILAIVLELGIVVQSIVIGLSVGDTNNTCTIKGLVAALCFHQMFEGMGLGGCILQAEYGWVKKAVMAFFFAVTTPFGVVLGMALSKTYKENSPESLITVGLLNASSAGLLIYMALVDLLAADFMGQKMQRSIKLQLKSYAAVLLGAGGMSVMAKWA

SEQ ID NO: 87284 - DNA, 819 bp, Arabidopsis thaliana
  misc_feature (1)..(819): Ceres Seq. ID no. 12699587
  misc_feature (1)..(819): Ortholog of  Ceres SEQ ID NO 13595821 as cited in SEQ ID NO 56524
  misc_feature (1)..(819): Ortholog of  Ceres SEQ ID NO 12784729 as cited in SEQ ID NO 61383
  misc_feature (1)..(819): Ortholog of  Ceres SEQ ID NO 15174365 as cited in SEQ ID NO 0
agaaccctagaattcgaaatctccaaagaacccgacaaagcgccatgtcgctcactatcccggcgaatctcgttctcaacccgagatctaacaaatctctcactcaatccgtacctaaatcctccgcaagattcgtctgctccgatgacaaatcctcctcctccacacctcaatccatgaaagctttctccgccgccgtcgccctctcttccatcctcctctctgctcctatgccagctgtcgctgatatctcaggtttgactccttgcaaggactcaaaacagttcgctaaaagagagaagcaacagatcaagaagcttgaatcttctcttaagctctacgctcctgaatctgcccctgctcttgctctcaatgctcagatcgagaaaaccaaacgcaggttcgacaactacgggaagtacggattgttatgcgggtcagacggtttaccgcacttgatagtgaacggagaccagcggcattggggagagttcattactccagggattcttttcctctacattgctggatggatcgggtgggttggaagaagctacttaatagctattagtggtgagaagaaacccgcgatgaaagagatcatcatcgatgttcctttggctagtcggatcatcttccgtggtttcatttggcccgttgctgcctacagagagtttctcaatggtgatctcattgctaaggatgtttaaaaagggaacttgttttctgcttttgtgttactctctctaatctctttgttttccattgtacttattgaaaaacaatgcattgtcgaaaaccttataaaatttggattgc

SEQ ID NO: 87285 - protein, 235 aa, Arabidopsis thaliana
  peptide (1)..(235): Ceres Seq. ID no. 12699588
NPRIRNLQRTRQSAMSLTIPANLVLNPRSNKSLTQSVPKSSARFVCSDDKSSSSTPQSMKAFSAAVALSSILLSAPMPAVADISGLTPCKDSKQFAKREKQQIKKLESSLKLYAPESAPALALNAQIEKTKRRFDNYGKYGLLCGSDGLPHLIVNGDQRHWGEFITPGILFLYIAGWIGWVGRSYLIAISGEKKPAMKEIIIDVPLASRIIFRGFIWPVAAYREFLNGDLIAKDV

SEQ ID NO: 87286 - protein, 221 aa, Arabidopsis thaliana; identical to SEQ ID NO: 40468
  peptide (1)..(221): Ceres Seq. ID no. 12699589

SEQ ID NO: 87287 - protein, 177 aa, Arabidopsis thaliana; identical to SEQ ID NO: 25335
  peptide (1)..(177): Ceres Seq. ID no. 12699590

SEQ ID NO: 87288 - DNA, 1185 bp, Arabidopsis thaliana
  misc_feature (1)..(1185): Ceres Seq. ID no. 12699623
  misc_feature (1)..(1185): Ortholog of  Ceres SEQ ID NO 13592961 as cited in SEQ ID NO 20522
  misc_feature (1)..(1185): Ortholog of  Ceres SEQ ID NO 15226378 as cited in SEQ ID NO 62741
  misc_feature (1)..(1185): Ortholog of  Ceres SEQ ID NO 13597389 as cited in SEQ ID NO 63426
  misc_feature (1)..(1185): Ortholog of  Ceres SEQ ID NO 15169639 as cited in SEQ ID NO 64624
  misc_feature (1)..(1185): Ortholog of  Ceres SEQ ID NO 14303071 as cited in SEQ ID NO 67114
  misc_feature (1)..(1185): Ortholog of  Ceres SEQ ID NO 13595998 as cited in SEQ ID NO 68161
atggcgtcgctagattctcatgtgttgatgaaactaggtagcctctttttatctactctttttgtttctatcgtaagctcggaatcgcagtgccggaacttcgagtcgatcatcagtttcggcgattcgattgccgacactggaaacttgctaggtctctcagatcataacaatcttcctatgagcgcgtttccaccgtacggagaaactttcttccaccacccaaccggtcgtttctctgacggtcgcctcatcattgacttcatcgctgaatttttggggcttccttatgtgcctccttacttcggatctacaaatggaaactttgagaaaggagttaattttgccgtagcctcagcaactgcattggaaagttcttttctagaagagaaaggataccattgtcctcacaacttcagtttaggagttcagcttaagatcttcaagcagagcttaccaaatctatgtggcttaccatcagattgtagagatatgattggaaatgctttgattctcatgggagagattggagctaatgattacaatttcccattcttccaactcagaccattggacgaggtcaaagagcttgttccgttggtgattagtactatttcttctgcgattacggagttgattggtatgggaggaagaacatttctggtgcccggagggttccctctcggatgctcagtagcatttttgacattacaccaaacatcaaacatggaagaatatgatcctttaacaggatgtttgaaatggctgaacaagtttggagaataccacagtgagcagcttcaggaagaactcaacagactcaggaagcttaaccctcacgtcaacatcatatatgctgactactacaatgcttcattgcgccttggccgagaaccaagtaaatacggattcataaacagacacttgtcagcttgttgcggtgtaggagggccgtacaacttcaacttaagtagaagttgtgggagtgtaggagtggaagcttgtagtgatccttcaaagtatgtggcctgggatggccttcatatgactgaggctgcacacaaatcgatggctgatggattagtcaaaggaccatatgcgattcctcctttcgattggtcatgtctcagctcaatgattaagaagaaggaagtcgttggaaacacaatattctttgatgaatag

SEQ ID NO: 87289 - protein, 394 aa, Arabidopsis thaliana
  peptide (1)..(394): Ceres Seq. ID no. 12699624
MASLDSHVLMKLGSLFLSTLFVSIVSSESQCRNFESIISFGDSIADTGNLLGLSDHNNLPMSAFPPYGETFFHHPTGRFSDGRLIIDFIAEFLGLPYVPPYFGSTNGNFEKGVNFAVASATALESSFLEEKGYHCPHNFSLGVQLKIFKQSLPNLCGLPSDCRDMIGNALILMGEIGANDYNFPFFQLRPLDEVKELVPLVISTISSAITELIGMGGRTFLVPGGFPLGCSVAFLTLHQTSNMEEYDPLTGCLKWLNKFGEYHSEQLQEELNRLRKLNPHVNIIYADYYNASLRLGREPSKYGFINRHLSACCGVGGPYNFNLSRSCGSVGVEACSDPSKYVAWDGLHMTEAAHKSMADGLVKGPYAIPPFDWSCLSSMIKKKEVVGNTIFFDE

SEQ ID NO: 87290 - protein, 385 aa, Arabidopsis thaliana
  peptide (1)..(385): Ceres Seq. ID no. 12699625
MKLGSLFLSTLFVSIVSSESQCRNFESIISFGDSIADTGNLLGLSDHNNLPMSAFPPYGETFFHHPTGRFSDGRLIIDFIAEFLGLPYVPPYFGSTNGNFEKGVNFAVASATALESSFLEEKGYHCPHNFSLGVQLKIFKQSLPNLCGLPSDCRDMIGNALILMGEIGANDYNFPFFQLRPLDEVKELVPLVISTISSAITELIGMGGRTFLVPGGFPLGCSVAFLTLHQTSNMEEYDPLTGCLKWLNKFGEYHSEQLQEELNRLRKLNPHVNIIYADYYNASLRLGREPSKYGFINRHLSACCGVGGPYNFNLSRSCGSVGVEACSDPSKYVAWDGLHMTEAAHKSMADGLVKGPYAIPPFDWSCLSSMIKKKEVVGNTIFFDE

SEQ ID NO: 87291 - protein, 334 aa, Arabidopsis thaliana
  peptide (1)..(334): Ceres Seq. ID no. 12699626
MSAFPPYGETFFHHPTGRFSDGRLIIDFIAEFLGLPYVPPYFGSTNGNFEKGVNFAVASATALESSFLEEKGYHCPHNFSLGVQLKIFKQSLPNLCGLPSDCRDMIGNALILMGEIGANDYNFPFFQLRPLDEVKELVPLVISTISSAITELIGMGGRTFLVPGGFPLGCSVAFLTLHQTSNMEEYDPLTGCLKWLNKFGEYHSEQLQEELNRLRKLNPHVNIIYADYYNASLRLGREPSKYGFINRHLSACCGVGGPYNFNLSRSCGSVGVEACSDPSKYVAWDGLHMTEAAHKSMADGLVKGPYAIPPFDWSCLSSMIKKKEVVGNTIFFDE

SEQ ID NO: 87292 - DNA, 1068 bp, Arabidopsis thaliana
  misc_feature (1)..(1068): Ceres Seq. ID no. 12699678
  misc_feature (1)..(1068): Ortholog of  Ceres SEQ ID NO 14308615 as cited in SEQ ID NO 58538
  misc_feature (1)..(1068): Ortholog of  Ceres SEQ ID NO 13585342 as cited in SEQ ID NO 63601
atgaagaaatgtgagtttttgattgattcaagtaaacgagcagtggtaatagtgttgattggattaggggcatgggctattgtttccattacacctccacctcctaagagatgcggaaccccaggtggaccgcctattaccgcccctaggatacgtctcagcgatggccgttatttagcctatgaagaacatggagttagtagacaaaatgccactttcaagatcgtctttatccatgcattctcgacatttaggcgtgacgctgttatcgccaaccgtgttcgccctggctttctcgagaaaaatggcatctacgtggtttcatatgatcgacctggttatggagagagcgatcctcactcgagtcgcaatgaaaagactttagctcatgacgttgaacaacttgctgaccaactacaacttggttccaaattttacgtggttggatactcaatgggaggtcaagccgtttggggtgttctcaaatacattcctcacaggctcgcaggagcgacactgctttgtcctgtgaccaactcatggtggccgagtttcccagatagtttgacatgggagctatggaacaaacaatcaaaatccgaaaggttttcgatgctcattactcatcacactccatggctactctactggtggaacaatcaaaagctattttcaacaacagctgtgatgcaatcaagccccaatatgttctctcctcaagatcttgcactactgcccaaactcgccgcaagggtgtcttacaagaaccaaacaacacaacaagggacacacgaatcacttgaccgagacctgattgttggatttgggaaatggagttttgaccctatgaagatcgagaatccgttccctaagggtgaaggttcggtacatatgtggcaaggggatgatgatcggctcgtcccgatacaactacaaaggatcattgctcagaaactaacttggatcaagtatcatgagattccaggtgctggtcatatttttccgatggctgatgggatggcagaaactatcttaaaagaactcttgcctattcctcaatcatcttaa

SEQ ID NO: 87293 - protein, 355 aa, Arabidopsis thaliana
  peptide (1)..(355): Ceres Seq. ID no. 12699679
MKKCEFLIDSSKRAVVIVLIGLGAWAIVSITPPPPKRCGTPGGPPITAPRIRLSDGRYLAYEEHGVSRQNATFKIVFIHAFSTFRRDAVIANRVRPGFLEKNGIYVVSYDRPGYGESDPHSSRNEKTLAHDVEQLADQLQLGSKFYVVGYSMGGQAVWGVLKYIPHRLAGATLLCPVTNSWWPSFPDSLTWELWNKQSKSERFSMLITHHTPWLLYWWNNQKLFSTTAVMQSSPNMFSPQDLALLPKLAARVSYKNQTTQQGTHESLDRDLIVGFGKWSFDPMKIENPFPKGEGSVHMWQGDDDRLVPIQLQRIIAQKLTWIKYHEIPGAGHIFPMADGMAETILKELLPIPQSS

SEQ ID NO: 87294 - protein, 204 aa, Arabidopsis thaliana; identical to SEQ ID NO: 75219
  peptide (1)..(204): Ceres Seq. ID no. 12699680

SEQ ID NO: 87295 - DNA, 1464 bp, Arabidopsis thaliana
  misc_feature (1)..(1464): Ceres Seq. ID no. 12699707
  misc_feature (1)..(1464): Ortholog of  Ceres SEQ ID NO 12465151 as cited in SEQ ID NO 67782
atggaaagcgaagcagcagcgactgttcaagccaccaggccgagaagagcacctaggactccggtgacagccattttgacggataagagaagacggaaacctaagagcaacaacgagtctcagttaccatttttgctacagcagagtcaaaaggccaccgttgacgacacttactctcagtggaagactcttcttcccattctctatgattcgtttgttaatcataccctcgtctggccctctctctcttgcagatgggggccacagcttgagcaagcaggttctaagactcaacgtctctatctctcggaacaaacgaatggcagtgtgcctaatactttggtcatagccaattgcgaaactgttaataggcagcttaatgaaaaggcacactctccatttgtgaagaagtacaagaccatcatccaccctggagaggtcaacagaattagggaactccctcaaaatagcaagattgtagctactcacaccgacagtcctgatattctcatttggaacactgagactcaaccagaccggtatgctgtgcttggagctccagattctcgtccagatttgttactaattgggcaccaggatgatgctgaatttgctcttgcaatgtgcccaaccgaaccttttgttctctctggaggcaaggacaagtccgttattttgtggaatatccaagaccatatcacaatggctggttcggattccaaatcccctggatccagcttcaagcagactggtgaaggtagtgataaaactggtggtccttctgttggccctcgaggcatatataatggccacaaagatactgttgaagacgtggcattctgtccatctagtgcacaagaattctgcagtgttggtgacgattcttgccttatgctatgggacgcaagaactggcactagtcctgccatgaaggttgagaaggcacatgatgctgatcttcactgtgtcgattggaatcctcatgacaataatctgatcctgactgggtcagcagataacactgtccgtgtgtttgaccgccgaaaccttacctcaaatggagttggttcacctgtttacaaatttgaaggccacagagctgctgttctttgtgttcagtggtctcctgataaatcatctgtttttgggagttctgcagaagatggtctcttgaacatatgggattgtgatagggttggcaagaagtctgagcgtgcaaccaaaactcctgatgggcttttcttccagcatgctggtcacagggacaaagtggtcgacttccactggagcctattgaacccttggactattgtcagtgtttctgataattgtgagagtatcggtggaggtggtacattgcagatatggcggatgagtgacttgatttacagaccggaagatgaagtcctgacagagctagagaaattcaagtcacatgttttcacatgtacctccaagtcttga

SEQ ID NO: 87296 - protein, 487 aa, Arabidopsis thaliana [sequence omitted]

SEQ ID NO: 87297 - protein, 280 aa, Arabidopsis thaliana; identical to SEQ ID NO: 69730
  peptide (1)..(280): Ceres Seq. ID no. 12699709

SEQ ID NO: 87298 - protein, 253 aa, Arabidopsis thaliana; identical to SEQ ID NO: 69731
  peptide (1)..(253): Ceres Seq. ID no. 12699710

SEQ ID NO: 87299 - DNA, 1202 bp, Arabidopsis thaliana
  misc_feature (1)..(1202): Ceres Seq. ID no. 12699759
  misc_feature (1)..(1202): Ortholog of  Ceres SEQ ID NO 13581579 as cited in SEQ ID NO 58361
  misc_feature (1)..(1202): Ortholog of  Ceres SEQ ID NO 13596969 as cited in SEQ ID NO 63375
  misc_feature (1)..(1202): Ortholog of  Ceres SEQ ID NO 13597519 as cited in SEQ ID NO 64759
  misc_feature (1)..(1202): Ortholog of  Ceres SEQ ID NO 13597870 as cited in SEQ ID NO 64982
  misc_feature (1)..(1202): Ortholog of  Ceres SEQ ID NO 13595926 as cited in SEQ ID NO 67778
  misc_feature (1)..(1202): Ortholog of  Ceres SEQ ID NO 12567001 as cited in SEQ ID NO 0
aatttaaatttctctttctatctactataaaaagtgactctctaagaactccaaagattagaacattgaattgaattagccatggagaagaatacttctcaaaccatcttctccaacttttttcttctccttctcctttcttcatgtgtctctgctcagctccggacaggtttctaccagaactcatgtccgaacgtggaaaccattgtacgtaacgctgtccgtcagaaattccagcagactttcgttaccgctccggccactcttcgcctcttcttccacgattgcttcgttcgtggatgtgatgcgtcaataatgatagcatcaccatcggagagagaccatccagatgacatgtcattggccggagacggattcgacacggtggtgaaggcgaagcaagccgttgatagcaatcccaattgccgcaacaaagtctcatgtgctgacattttggctctcgccactcgtgaagtcgtcgttttgaccggaggaccaagctacccggtggagctagggaggagagatggcagaatctccacgaaggccagcgttcaaagccaattgcctcagcccgagtttaacctaaaccagctcaacggcatgtttagccgtcacggcctctctcaaaccgatatgattgccctctcaggagcacacactataggatttgcacattgtggaaaaatgtcaaagagaatatacaattttagccctacaacacgtatcgacccgagtataaaccgtggatacgtggttcagcttaagcaaatgtgcccgatcggtgtcgacgtaagaatcgcaatcaacatggatccgaccagtccacgtactttcgataatgcttatttcaagaatctccaacaaggaaagggtttgttcacgtcagatcaaatcttgttcacagatcaacggtcaagatctacagttaattcgtttgccaatagtgaaggagcttttagacaagctttcatcacagcgatcacgaagttaggtcgggttggtgttttgactggtaatgctggtgagattcgaagggattgttcacgtgtcaattagtgtgatttgaggttttctttcttttattccttaaagaggatttttttttttaataataaaatttaatttcttgttgtcaaaataaggagttcataagtgtgaaacatggaaacttaaattaataagatgggtttatttcgttg

SEQ ID NO: 87300 - protein, 325 aa, Arabidopsis thaliana; identical to SEQ ID NO: 42846
  peptide (1)..(325): Ceres Seq. ID no. 12699760

SEQ ID NO: 87301 - protein, 247 aa, Arabidopsis thaliana; identical to SEQ ID NO: 42847
  peptide (1)..(247): Ceres Seq. ID no. 12699761

SEQ ID NO: 87302 - protein, 234 aa, Arabidopsis thaliana; identical to SEQ ID NO: 42848
  peptide (1)..(234): Ceres Seq. ID no. 12699762

SEQ ID NO: 87303 - DNA, 992 bp, Arabidopsis thaliana
  misc_feature (1)..(992): Ceres Seq. ID no. 12699808
  misc_feature (1)..(992): Ortholog of  Ceres SEQ ID NO 14313959 as cited in SEQ ID NO 57842
actgctctatttctcaatctctctcctaaatcaatcaatctttgtattttcatttagccagaacaaaaaaaatggtggagcaaaagagatacgctctgtttctagcgactttggactcagagttcgtgaagaaaacttacggaggataccacaacgtgttcgtgacgacgttcggagacgaaggagagcattgggactcctttagagtcgtcagcggagagtttcctgacgagaaagatctggagaaatacgatggcttcgttatcagcggaagctctcacgatgcctttgagaatgatgattggatccttaagctctgtgatattgtcaagaaaattgatgagatgaagaagaaaattcttggcatctgctttggtcatcagatcatagccagggtaaggggaggaacagtcggaagagcaaagaagggaccagaacttaaacttggagacataaccatcgtcaaggatgcgattacgcctggaagttacttcggaaacgagattcctgatagcatagcgatcatcaaatgtcaccaggacgaagtgttggtgctgcccgaaactgctaaagtgcttgcgtattccaagaactacgaggtggagatgtattcgattgaggatcatttgttctgtatccaaggacatcctgagtataacaaagagattctcttcgagattgttgatcgtgttcttgctctaggctacgtcaagcaagaatttgctgatgcggctaaggcaacgatggagaataggggagcagacaggaagctttgggagacgatttgcaagaacttcctcaaaggcagagttccaactaactagtttcactcccaaattatctatttggctcttgtcatattgaaacaatttgtggatttatgatcttgctttatttttattcaatgtataacgacatattaatctcggcgtgacttatttgtgttataccagttgataaatgaataagaagaacctaagctatttaaagcc

SEQ ID NO: 87304 - protein, 250 aa, Arabidopsis thaliana; identical to SEQ ID NO: 24278
  peptide (1)..(250): Ceres Seq. ID no. 12699809

SEQ ID NO: 87305 - protein, 159 aa, Arabidopsis thaliana; identical to SEQ ID NO: 24279
  peptide (1)..(159): Ceres Seq. ID no. 12699810

SEQ ID NO: 87306 - DNA, 1440 bp, Arabidopsis thaliana
  misc_feature (1)..(1440): Ceres Seq. ID no. 12699845
  misc_feature (1)..(1440): Ortholog of  Ceres SEQ ID NO 14314659 as cited in SEQ ID NO 56868
atggtggaaatgaggaaatctggaggtttaagaccggagtctgaatcggcggccaggtgccgagatgagctaccggtgaaattggagattgctgaagatgatttagaagaagagcatggtcctctcaacaaacgatctaggttatggagtcctgggacaagctcatcgacaatggcaccagctaagtataacccgcttgatgagccgagtcctcttggattgagtcttaagaagagtccatctttgttggagttgattcagatgaagataacgcattgtggtgatcctaaagcagctgaaacgttgaaagctggtgcacttggctctggaagtattgagaagctgaaagcttctaactttcctgcttcgcttttgaagatcgggcagtgggagtataaatcgaggtatgaaggtgatttggtggcaaagtgttactttgctaaacacaaacttgtttgggaagtgttggaacaaggtcttaagagtaaaatcgagatccagtggtcagatattatggctttgaaggcaaactgtcctgaagacggacctggaactttgactctcgtgcttgctagacagcccttatttttccgggaaacaaacccacagcctagaaagcataccttgtggcaggcgacatcagatttcactgatggccaagccagcatgaacaggcagcattttctgcaatgtgctcaagggataatgaacaaacattttgaaaagctcgttcaatgtgatcatcgtctgttccatctaagccgacagccggagatagctattgactctccctactttgatgcacggcaatctatttttgaggatccaagtccttcgatctctgggactcagaatttagcatctcctgttggggctcagtcatcatctgagcatatgtatctgtctcatgaagcaccatcacccagctcagtgatagatgctcgtgcaaatgaaggaattggggatcagataaaagtacctggactacaccaatctatgtcagtgagcgatttcgttggacttctctctgattctgctggtggaagtcatccggaacatatggagaaatttgagatcatgaaacagcagttgctaagtgataatatccagttcgaggcaccagatgagaagtctctcatgccaagggttaactctttattcaacctcttgtacaaggatcccaacgtcgctgcaaactcacagctcaataccgaaatgtcggttggattgaagtctgaacccaagggaattgtttctgacaacaacaacaacaacaacaacaacaacagagttcttgatacagcttctagcagcaaaccacagggtatgttaaggaaagactcattcagcgatttgctattacacctcccccggatcacatccttgccaaagttcttgtccaacatttcagaagaagatggtgatgcatataatagataa

SEQ ID NO: 87307 - protein, 479 aa, Arabidopsis thaliana
  peptide (1)..(479): Ceres Seq. ID no. 12699846
MVEMRKSGGLRPESESAARCRDELPVKLEIAEDDLEEEHGPLNKRSRLWSPGTSSSTMAPAKYNPLDEPSPLGLSLKKSPSLLELIQMKITHCGDPKAAETLKAGALGSGSIEKLKASNFPASLLKIGQWEYKSRYEGDLVAKCYFAKHKLVWEVLEQGLKSKIEIQWSDIMALKANCPEDGPGTLTLVLARQPLFFRETNPQPRKHTLWQATSDFTDGQASMNRQHFLQCAQGIMNKHFEKLVQCDHRLFHLSRQPEIAIDSPYFDARQSIFEDPSPSISGTQNLASPVGAQSSSEHMYLSHEAPSPSSVIDARANEGIGDQIKVPGLHQSMSVSDFVGLLSDSAGGSHPEHMEKFEIMKQQLLSDNIQFEAPDEKSLMPRVNSLFNLLYKDPNVAANSQLNTEMSVGLKSEPKGIVSDNNNNNNNNNRVLDTASSSKPQGMLRKDSFSDLLLHLPRITSLPKFLSNISEEDGDAYNR

SEQ ID NO: 87308 - protein, 476 aa, Arabidopsis thaliana
  peptide (1)..(476): Ceres Seq. ID no. 12699847
MRKSGGLRPESESAARCRDELPVKLEIAEDDLEEEHGPLNKRSRLWSPGTSSSTMAPAKYNPLDEPSPLGLSLKKSPSLLELIQMKITHCGDPKAAETLKAGALGSGSIEKLKASNFPASLLKIGQWEYKSRYEGDLVAKCYFAKHKLVWEVLEQGLKSKIEIQWSDIMALKANCPEDGPGTLTLVLARQPLFFRETNPQPRKHTLWQATSDFTDGQASMNRQHFLQCAQGIMNKHFEKLVQCDHRLFHLSRQPEIAIDSPYFDARQSIFEDPSPSISGTQNLASPVGAQSSSEHMYLSHEAPSPSSVIDARANEGIGDQIKVPGLHQSMSVSDFVGLLSDSAGGSHPEHMEKFEIMKQQLLSDNIQFEAPDEKSLMPRVNSLFNLLYKDPNVAANSQLNTEMSVGLKSEPKGIVSDNNNNNNNNNRVLDTASSSKPQGMLRKDSFSDLLLHLPRITSLPKFLSNISEEDGDAYNR

SEQ ID NO: 87309 - protein, 422 aa, Arabidopsis thaliana
  peptide (1)..(422): Ceres Seq. ID no. 12699848
MAPAKYNPLDEPSPLGLSLKKSPSLLELIQMKITHCGDPKAAETLKAGALGSGSIEKLKASNFPASLLKIGQWEYKSRYEGDLVAKCYFAKHKLVWEVLEQGLKSKIEIQWSDIMALKANCPEDGPGTLTLVLARQPLFFRETNPQPRKHTLWQATSDFTDGQASMNRQHFLQCAQGIMNKHFEKLVQCDHRLFHLSRQPEIAIDSPYFDARQSIFEDPSPSISGTQNLASPVGAQSSSEHMYLSHEAPSPSSVIDARANEGIGDQIKVPGLHQSMSVSDFVGLLSDSAGGSHPEHMEKFEIMKQQLLSDNIQFEAPDEKSLMPRVNSLFNLLYKDPNVAANSQLNTEMSVGLKSEPKGIVSDNNNNNNNNNRVLDTASSSKPQGMLRKDSFSDLLLHLPRITSLPKFLSNISEEDGDAYNR

SEQ ID NO: 87310 - DNA, 938 bp, Arabidopsis thaliana
  misc_feature (1)..(938): Ceres Seq. ID no. 12699907
  misc_feature (1)..(938): Ortholog of  Ceres SEQ ID NO 14308320 as cited in SEQ ID NO 59093
  misc_feature (1)..(938): Ortholog of  Ceres SEQ ID NO 12590628 as cited in SEQ ID NO 0
aaaaacattactcccgaagaagcccaaattgacgacaggcgttagtggcgattggcgatggcagctcctgcggtggaggcaaccgtcgcaagtgctctccgctctgtgattcttagagctcgtaaggcggcggagcaagtaggaagagatgccgagcgggtcagggtccttccagtctccaagactaaacccgtctcacttatccgccaaatctacgacgcaggtcaccgttgcttcggcgagaattacgttcaagaaatcatcgataaagctccacagcttccggaagatatagagtggcatttcgtggggcatttacagagcaacaaagccaaaacgctattgactggagtcccaaatttggcaatggttcatggtgtggatggagaaaaggtagcaaatcatctagatcgagctgtttcaaatcttgggagacatccactaaaggttttggtccaagtgaacacaagcggagaagtttctaaatctggaatcgaaccttctagcgttgtagagctagcaagacatgtgaaacatcactgtccaaatctggtattctccggattaatgactattgggatgcctgattatacgtctaccccagagaacttcaggacactttcaaactgtagagctgatgtatgcaaggcacttggaatggctgaggatcaatttgaactgtccatgggcatgtctggtgacttcgagctagcgattgagatgggaagcaccaatgtgagggttggttccaccattttcggaccaagagagtaccccaagaaaacaacttagctactatgctcaaacacttgttgtaaaattcatgtataatgttattttgtcgattattttaaacaattttattcttcattgataaacttaggtgtattcacaaagttactttatagaaaattagaaatcaatacattgttaagggc

SEQ ID NO: 87311 - protein, 244 aa, Arabidopsis thaliana
  peptide (1)..(244): Ceres Seq. ID no. 12699908
MAAPAVEATVASALRSVILRARKAAEQVGRDAERVRVLPVSKTKPVSLIRQIYDAGHRCFGENYVQEIIDKAPQLPEDIEWHFVGHLQSNKAKTLLTGVPNLAMVHGVDGEKVANHLDRAVSNLGRHPLKVLVQVNTSGEVSKSGIEPSSVVELARHVKHHCPNLVFSGLMTIGMPDYTSTPENFRTLSNCRADVCKALGMAEDQFELSMGMSGDFELAIEMGSTNVRVGSTIFGPREYPKKTT

SEQ ID NO: 87312 - protein, 141 aa, Arabidopsis thaliana; identical to SEQ ID NO: 28737
  peptide (1)..(141): Ceres Seq. ID no. 12699909

SEQ ID NO: 87313 - DNA, 1254 bp, Arabidopsis thaliana
  misc_feature (1)..(1254): Ceres Seq. ID no. 12699925
  misc_feature (1)..(1254): Ortholog of  Ceres SEQ ID NO 15179287 as cited in SEQ ID NO 0
atggaagaaaagctgccaaaatcgctcaagaatctcgatttgaatacgaatcgtggtcgtggaccagagaataagattcttgtttcagcttatgtatcttcgtcacgtaagcctcgctttcgacaatctttcttttctcgagctcggttaaaattgggttctgagaatggattactgaatttgggtctaagcatggctggtggaatgtctccactgaaatcaaaacctccatctcttgtgagctcatgtcttggtgttattgggaagcatttggaggatatgattcgttgtttagctgaaatctctgttatatttcctgcagacatcaagtgttttcttctttcaagctgtttagtactatatccatttgctaatcaaaggcatactcatgtgcaacagatgtcgattgcagcaattgctagaagaaaaaagctgctggatgatgatgtgattatctgtttggctgacagttcctgggaaattctagatgttagcggttcagatgttacgaattttggcttagctaaagtggcagaaatctgcaaatctctccgagctgtggacattagctctggtcttgctggttctttagtttggggcttctgtatgttggataagtggtgctcccggtgcaacaaaatctcatccatgggcgtcttagagcttgtacaacactgcagatcattggagactcttagatgcgggggatgcccaagcagtgagtccacggcacgcagatctttgagtatttttaagccaaacttgagtaatgttgaaggagaaacatgggaagaaatagacacttcagagattggccatggtggtcaatcattgcgttggcttgtttggccacgaattgataaggattcactggagatgttatcctcggagtgtccaagaatagtggtaaatcccaagccatcacttgtcgcgtacagagcagacgaggttcctcgagaagcactaccagatgttgcactggacgaaccatttgtcaaagatattgatcctaagacgtgggttgttactggagttgtgcagaagcccacatctttcccgttaagcaatgaactgtcaatagcagagaagttcagactagcatttgcagagagagatgcaagaatggcccctaaacgtgcaaagaatgcaaggcaacgtcaacgtcgtgctgagagggattggatgatgtcaagcgacgaagccaaagcaatggtttttgcatcaaaggctaccagatctttgcacaagagttaa

SEQ ID NO: 87314 - protein, 417 aa, Arabidopsis thaliana
  peptide (1)..(417): Ceres Seq. ID no. 12699926
MEEKLPKSLKNLDLNTNRGRGPENKILVSAYVSSSRKPRFRQSFFSRARLKLGSENGLLNLGLSMAGGMSPLKSKPPSLVSSCLGVIGKHLEDMIRCLAEISVIFPADIKCFLLSSCLVLYPFANQRHTHVQQMSIAAIARRKKLLDDDVIICLADSSWEILDVSGSDVTNFGLAKVAEICKSLRAVDISSGLAGSLVWGFCMLDKWCSRCNKISSMGVLELVQHCRSLETLRCGGCPSSESTARRSLSIFKPNLSNVEGETWEEIDTSEIGHGGQSLRWLVWPRIDKDSLEMLSSECPRIVVNPKPSLVAYRADEVPREALPDVALDEPFVKDIDPKTWVVTGVVQKPTSFPLSNELSIAEKFRLAFAERDARMAPKRAKNARQRQRRAERDWMMSSDEAKAMVFASKATRSLHKS

SEQ ID NO: 87315 - protein, 353 aa, Arabidopsis thaliana
  peptide (1)..(353): Ceres Seq. ID no. 12699927
MAGGMSPLKSKPPSLVSSCLGVIGKHLEDMIRCLAEISVIFPADIKCFLLSSCLVLYPFANQRHTHVQQMSIAAIARRKKLLDDDVIICLADSSWEILDVSGSDVTNFGLAKVAEICKSLRAVDISSGLAGSLVWGFCMLDKWCSRCNKISSMGVLELVQHCRSLETLRCGGCPSSESTARRSLSIFKPNLSNVEGETWEEIDTSEIGHGGQSLRWLVWPRIDKDSLEMLSSECPRIVVNPKPSLVAYRADEVPREALPDVALDEPFVKDIDPKTWVVTGVVQKPTSFPLSNELSIAEKFRLAFAERDARMAPKRAKNARQRQRRAERDWMMSSDEAKAMVFASKATRSLHKS

SEQ ID NO: 87316 - protein, 349 aa, Arabidopsis thaliana
  peptide (1)..(349): Ceres Seq. ID no. 12699928
MSPLKSKPPSLVSSCLGVIGKHLEDMIRCLAEISVIFPADIKCFLLSSCLVLYPFANQRHTHVQQMSIAAIARRKKLLDDDVIICLADSSWEILDVSGSDVTNFGLAKVAEICKSLRAVDISSGLAGSLVWGFCMLDKWCSRCNKISSMGVLELVQHCRSLETLRCGGCPSSESTARRSLSIFKPNLSNVEGETWEEIDTSEIGHGGQSLRWLVWPRIDKDSLEMLSSECPRIVVNPKPSLVAYRADEVPREALPDVALDEPFVKDIDPKTWVVTGVVQKPTSFPLSNELSIAEKFRLAFAERDARMAPKRAKNARQRQRRAERDWMMSSDEAKAMVFASKATRSLHKS

SEQ ID NO: 87317 - DNA, 1455 bp, Arabidopsis thaliana
  misc_feature (1)..(1455): Ceres Seq. ID no. 12700026
  misc_feature (1)..(1455): Ortholog of  Ceres SEQ ID NO 13500385 as cited in SEQ ID NO 67583
atgggttgctacagcagtaagaacctaaaacaatcaaaaagaaccattcttgagaaaccattcgttgacatcggaaaggtttacatcctcggggatgaattgggtcaaggccaattcggtataactcgaaaatgcgttgagaagacttcaggtaagacttacgcctgcaagaccattctcaagacgaatctaaagagtagagaagatgaagaagccgtgaagagagagattcgtatcatgaagcatttgtctggagaaccgaacattgttgagttcaagaaagcttacgaggacagagattctgtacatattgttatggaatattgtggtggtggagagttattcaaaaagatcgaagctttgtccaaagatggaaagtcttactccgagaaagaagctgttgaaatcattaggccgattgtgaatgttgtcaagaattgtcattacatgggtgtgatgcttcgtgatctaaagcctgagaatttcttgctctccagtaccgataagaatgctacggtcaaagctatcgacttcgggtgttctgttttcattgaagaaggagaagtacaccggaaattcgctgggagtgcttactacattgctcctgaagtgttacagggaaaatacggtaaagaagcggacatttggagtgcagggattatattgtacatcctactctgcggcaaacctccctttgtgacagaacctgaggcacagatgttctctgagataaagagtgccaaaatcgacgttgacagcgaatcatggaagtttatagatgtgaaggcaaaacatcttgtcaataggatgcttaacagaaaccccaaggaacgaatctctgctgcagaggttcttggacatccttggatgaaagacggagaagcttcagataagcctattgatggcgttgttttatctcgattgaagcaatttcgagatatgaacaagctaaagaaagtagctctaaaggttattgcagcaaatctatcggaagaggaaatcaaaggtcttaaaacactgttcaccaacattgataccgacaaaagtggcacaatcactcttgaagaactcaaaacaggtcttactagacttggatctaacctctctaaaaccgaagtggagcaactcatggaagctgctgatgtggatggtaatggaacaatcgacatagacgagtttatctctgccacgatgcatagatatagattggatagagatgatcatgtgtaccaagcattccaacactttgacaaagacaatgacgggcacataaccaaggaagagttggagatggcaatgaaagagcatggtgtgggagatgaagttagcatcaaacaaatcataaccgaagttgataccgataatgatgggaaaataaactttgaggaattccgcacaatgatgagaagtggcagcagcttgcagccacaaagggagcttcttccgatcaagtga

SEQ ID NO: 87318 - protein, 484 aa, Arabidopsis thaliana
  peptide (1)..(484): Ceres Seq. ID no. 12700027
MGCYSSKNLKQSKRTILEKPFVDIGKVYILGDELGQGQFGITRKCVEKTSGKTYACKTILKTNLKSREDEEAVKREIRIMKHLSGEPNIVEFKKAYEDRDSVHIVMEYCGGGELFKKIEALSKDGKSYSEKEAVEIIRPIVNVVKNCHYMGVMLRDLKPENFLLSSTDKNATVKAIDFGCSVFIEEGEVHRKFAGSAYYIAPEVLQGKYGKEADIWSAGIILYILLCGKPPFVTEPEAQMFSEIKSAKIDVDSESWKFIDVKAKHLVNRMLNRNPKERISAAEVLGHPWMKDGEASDKPIDGVVLSRLKQFRDMNKLKKVALKVIAANLSEEEIKGLKTLFTNIDTDKSGTITLEELKTGLTRLGSNLSKTEVEQLMEAADVDGNGTIDIDEFISATMHRYRLDRDDHVYQAFQHFDKDNDGHITKEELEMAMKEHGVGDEVSIKQIITEVDTDNDGKINFEEFRTMMRSGSSLQPQRELLPIK

SEQ ID NO: 87319 - protein, 405 aa, Arabidopsis thaliana
  peptide (1)..(405): Ceres Seq. ID no. 12700028
MKHLSGEPNIVEFKKAYEDRDSVHIVMEYCGGGELFKKIEALSKDGKSYSEKEAVEIIRPIVNVVKNCHYMGVMLRDLKPENFLLSSTDKNATVKAIDFGCSVFIEEGEVHRKFAGSAYYIAPEVLQGKYGKEADIWSAGIILYILLCGKPPFVTEPEAQMFSEIKSAKIDVDSESWKFIDVKAKHLVNRMLNRNPKERISAAEVLGHPWMKDGEASDKPIDGVVLSRLKQFRDMNKLKKVALKVIAANLSEEEIKGLKTLFTNIDTDKSGTITLEELKTGLTRLGSNLSKTEVEQLMEAADVDGNGTIDIDEFISATMHRYRLDRDDHVYQAFQHFDKDNDGHITKEELEMAMKEHGVGDEVSIKQIITEVDTDNDGKINFEEFRTMMRSGSSLQPQRELLPIK

SEQ ID NO: 87320 - protein, 379 aa, Arabidopsis thaliana
  peptide (1)..(379): Ceres Seq. ID no. 12700029
MEYCGGGELFKKIEALSKDGKSYSEKEAVEIIRPIVNVVKNCHYMGVMLRDLKPENFLLSSTDKNATVKAIDFGCSVFIEEGEVHRKFAGSAYYIAPEVLQGKYGKEADIWSAGIILYILLCGKPPFVTEPEAQMFSEIKSAKIDVDSESWKFIDVKAKHLVNRMLNRNPKERISAAEVLGHPWMKDGEASDKPIDGVVLSRLKQFRDMNKLKKVALKVIAANLSEEEIKGLKTLFTNIDTDKSGTITLEELKTGLTRLGSNLSKTEVEQLMEAADVDGNGTIDIDEFISATMHRYRLDRDDHVYQAFQHFDKDNDGHITKEELEMAMKEHGVGDEVSIKQIITEVDTDNDGKINFEEFRTMMRSGSSLQPQRELLPIK

SEQ ID NO: 87321 - DNA, 1458 bp, Arabidopsis thaliana
  misc_feature (1)..(1458): Ceres Seq. ID no. 12700030
  misc_feature (1)..(1458): Ortholog of  Ceres SEQ ID NO 13500385 as cited in SEQ ID NO 67583
atgggttgcttcagcagtaaggagctacaacaatcgaaaagaaccattcttgagaaacctttagttgacatcacaaagatttatatcctcggggaggaattgggtagaggtaatttcggtctaacccgaaagtgcgttgagaaatctacaggtaagacattcgcctgcaaaaccattctcaagacaaagctaaaggacgaagaatgtgaagaagacgtgaagagagagattcggattatgaagcaattgtctggagaaccaaacattgtcgagttcaagaatgcttacgaggacaaagattctgtacatattgttatggaatattgtggtggtggagagttatacgacaagatcctagctttgtacgatgttgggaagtcttactcggagaaagaagctgctggaatcattaggtcgattgtgaatgttgtgaagaattgccattacatgggtgtgatgcatcgtgatctaaagcctgagaatttcttgcttacgagtaacgatgacaatgctacggtcaaagttattgactttgggtgttctgtgttcattgaagaaggaaaagtataccaggatttagctgggagtgattactacattgctcctgaagtgttacagggaaattacggtaaagaagcggacatttggagtgcagggattatattatacatcctactctgtggcaaatctccctttgtgaaagaacctgagggacagatgttcaatgagattaagagtttggaaatcgactacagcgaggaaccatggcctcttagagattcaagggcaatacatcttgtcaagaggatgcttgatagaaaccccaaggaacgaatctctgctgcagaggttcttggacatccttggatgaaagaaggagaagcttcggataagcctattgatggcgttgttttatcccgtttgaagagatttcgagatgcgaacaagtttaagaaggtagttctaaagtttattgcagcaaatctatcagaagaggaaatcaaaggtcttaagacactgttcaccaacatagatactgacaaaagtggaaatattactcttgaagaactcaaaacaggtcttactagacttggatctaacctctctaaaaccgaagtggagcaactcatggaagctgctgatatggatggtaatggaacaatcgacatagacgagtttatttctgcaacgatgcatagatacaaattggatagagatgaacatgtgtacaaagcattccaacactttgacaaagacaacgacgggcacataacgaaggaagagttggagatggcgatgaaggaggatggtgcgggagatgaaggtagcatcaaacaaatcatagccgatgctgataccgataatgatggaaaaataaactttgaggaattccgcacaatgatgagaactgagagcagcttgcagccagaaggggaacttcttccgatcatcaattga

SEQ ID NO: 87322 - protein, 485 aa, Arabidopsis thaliana
  peptide (1)..(485): Ceres Seq. ID no. 12700031
MGCFSSKELQQSKRTILEKPLVDITKIYILGEELGRGNFGLTRKCVEKSTGKTFACKTILKTKLKDEECEEDVKREIRIMKQLSGEPNIVEFKNAYEDKDSVHIVMEYCGGGELYDKILALYDVGKSYSEKEAAGIIRSIVNVVKNCHYMGVMHRDLKPENFLLTSNDDNATVKVIDFGCSVFIEEGKVYQDLAGSDYYIAPEVLQGNYGKEADIWSAGIILYILLCGKSPFVKEPEGQMFNEIKSLEIDYSEEPWPLRDSRAIHLVKRMLDRNPKERISAAEVLGHPWMKEGEASDKPIDGVVLSRLKRFRDANKFKKVVLKFIAANLSEEEIKGLKTLFTNIDTDKSGNITLEELKTGLTRLGSNLSKTEVEQLMEAADMDGNGTIDIDEFISATMHRYKLDRDEHVYKAFQHFDKDNDGHITKEELEMAMKEDGAGDEGSIKQIIADADTDNDGKINFEEFRTMMRTESSLQPEGELLPIIN

SEQ ID NO: 87323 - protein, 406 aa, Arabidopsis thaliana
  peptide (1)..(406): Ceres Seq. ID no. 12700032
MKQLSGEPNIVEFKNAYEDKDSVHIVMEYCGGGELYDKILALYDVGKSYSEKEAAGIIRSIVNVVKNCHYMGVMHRDLKPENFLLTSNDDNATVKVIDFGCSVFIEEGKVYQDLAGSDYYIAPEVLQGNYGKEADIWSAGIILYILLCGKSPFVKEPEGQMFNEIKSLEIDYSEEPWPLRDSRAIHLVKRMLDRNPKERISAAEVLGHPWMKEGEASDKPIDGVVLSRLKRFRDANKFKKVVLKFIAANLSEEEIKGLKTLFTNIDTDKSGNITLEELKTGLTRLGSNLSKTEVEQLMEAADMDGNGTIDIDEFISATMHRYKLDRDEHVYKAFQHFDKDNDGHITKEELEMAMKEDGAGDEGSIKQIIADADTDNDGKINFEEFRTMMRTESSLQPEGELLPIIN

SEQ ID NO: 87324 - protein, 380 aa, Arabidopsis thaliana
  peptide (1)..(380): Ceres Seq. ID no. 12700033
MEYCGGGELYDKILALYDVGKSYSEKEAAGIIRSIVNVVKNCHYMGVMHRDLKPENFLLTSNDDNATVKVIDFGCSVFIEEGKVYQDLAGSDYYIAPEVLQGNYGKEADIWSAGIILYILLCGKSPFVKEPEGQMFNEIKSLEIDYSEEPWPLRDSRAIHLVKRMLDRNPKERISAAEVLGHPWMKEGEASDKPIDGVVLSRLKRFRDANKFKKVVLKFIAANLSEEEIKGLKTLFTNIDTDKSGNITLEELKTGLTRLGSNLSKTEVEQLMEAADMDGNGTIDIDEFISATMHRYKLDRDEHVYKAFQHFDKDNDGHITKEELEMAMKEDGAGDEGSIKQIIADADTDNDGKINFEEFRTMMRTESSLQPEGELLPIIN

SEQ ID NO: 87325 - DNA, 1493 bp, Arabidopsis thaliana
  misc_feature (1)..(1493): Ceres Seq. ID no. 12700063
  misc_feature (1)..(1493): Ortholog of  Ceres SEQ ID NO 15171669 as cited in SEQ ID NO 51370
aaaatccctaaaagttttgggggaaagaagaaagaaggaagacgatgatgatgctcagaatccgaagcagagatggactggagagagtcacagcggagggagctcatatcactgtttcccagctcaaaaccttgatcgcggatcagcttcagatccctctccataagcagaccttatccaccaatcgtgatctcctcctcgccaaaactcccgctgatctactcgccttcaccgacctcacggacccaaacctccccctctcctctctcaacctcggccatggctctatgctctacctcgcctacgatggcgagcgctccattcctggagctcctcccgttactcctgccggatccttcgggaggaagatgaccgtcgatgacttgatcgcccgccagatgcgcgtcactcgtcaggagacgtctcactgcgactccgtctccttcgatcgcgatgccgccaacgctttccagcactacgtcaatgagtctctagcttttgccgtcaagcgcggcggctttatgtacggcaccgtcaccgaggaaggacaggtggaagttgatttcatttacgagccgccccagcaaggcacggaggctaatcttattctgatgagagatgctgatgaagagaagcgcgtggacgcaatcgccatgggcttggggatgaggagggtcggtttcatttttaaccagaccgtggtgcaggacaagactgaatacactctgtccaacgccgaggtgctacaggcggcggagcttcacgccgagagcgagctgaaggagtgggtcacggcggtggtgaagcttgaggtgaatgaggatggtggcgccgatgtccatttcgaggcgtttcaaatgagtgatatgtgcatcaggctgttcaaggaagagtggttcgagacggagattatgccggacgatgatccaaagctctctaagatgaagaaggaggtggttgttggtgtgaaggatcttaaggaggtagataacgatttcttcctcgttctcgtcaggatcttggatcaccaggggcctctgtcatcaacattcccaatagagaaccggagcagtcgagcaacgatgcgggctctaaaaacacatctggaccgggcaaagagcttgccgttggtgaagaagatgtcagattttcatctgcttctctttgtggctcagtttctggacgtgtcatcggacgtccctgctttagccgagtgtgtgcgtctgcagtcgcctgtcccagagggctatgcgttgctcatcgaatcaatggccaacacttgttaatttttgtgtcattgttttttggttcttgatacagtatatcatgttcgttttatggtccagaaaatcttttttactagttgacaaatgaaaaatctctagtgtactcgtgatgtatttgattcaagtttgggggttaatttaagttatcaacaacttgtagaaacaaagttaattcacagagtaataaatcattctaataggtatgct

SEQ ID NO: 87326 - protein, 413 aa, Arabidopsis thaliana
  peptide (1)..(413): Ceres Seq. ID no. 12700064
MMMLRIRSRDGLERVTAEGAHITVSQLKTLIADQLQIPLHKQTLSTNRDLLLAKTPADLLAFTDLTDPNLPLSSLNLGHGSMLYLAYDGERSIPGAPPVTPAGSFGRKMTVDDLIARQMRVTRQETSHCDSVSFDRDAANAFQHYVNESLAFAVKRGGFMYGTVTEEGQVEVDFIYEPPQQGTEANLILMRDADEEKRVDAIAMGLGMRRVGFIFNQTVVQDKTEYTLSNAEVLQAAELHAESELKEWVTAVVKLEVNEDGGADVHFEAFQMSDMCIRLFKEEWFETEIMPDDDPKLSKMKKEVVVGVKDLKEVDNDFFLVLVRILDHQGPLSSTFPIENRSSRATMRALKTHLDRAKSLPLVKKMSDFHLLLFVAQFLDVSSDVPALAECVRLQSPVPEGYALLIESMANTC

SEQ ID NO: 87327 - protein, 412 aa, Arabidopsis thaliana
  peptide (1)..(412): Ceres Seq. ID no. 12700065
MMLRIRSRDGLERVTAEGAHITVSQLKTLIADQLQIPLHKQTLSTNRDLLLAKTPADLLAFTDLTDPNLPLSSLNLGHGSMLYLAYDGERSIPGAPPVTPAGSFGRKMTVDDLIARQMRVTRQETSHCDSVSFDRDAANAFQHYVNESLAFAVKRGGFMYGTVTEEGQVEVDFIYEPPQQGTEANLILMRDADEEKRVDAIAMGLGMRRVGFIFNQTVVQDKTEYTLSNAEVLQAAELHAESELKEWVTAVVKLEVNEDGGADVHFEAFQMSDMCIRLFKEEWFETEIMPDDDPKLSKMKKEVVVGVKDLKEVDNDFFLVLVRILDHQGPLSSTFPIENRSSRATMRALKTHLDRAKSLPLVKKMSDFHLLLFVAQFLDVSSDVPALAECVRLQSPVPEGYALLIESMANTC

SEQ ID NO: 87328 - protein, 411 aa, Arabidopsis thaliana
  peptide (1)..(411): Ceres Seq. ID no. 12700066
MLRIRSRDGLERVTAEGAHITVSQLKTLIADQLQIPLHKQTLSTNRDLLLAKTPADLLAFTDLTDPNLPLSSLNLGHGSMLYLAYDGERSIPGAPPVTPAGSFGRKMTVDDLIARQMRVTRQETSHCDSVSFDRDAANAFQHYVNESLAFAVKRGGFMYGTVTEEGQVEVDFIYEPPQQGTEANLILMRDADEEKRVDAIAMGLGMRRVGFIFNQTVVQDKTEYTLSNAEVLQAAELHAESELKEWVTAVVKLEVNEDGGADVHFEAFQMSDMCIRLFKEEWFETEIMPDDDPKLSKMKKEVVVGVKDLKEVDNDFFLVLVRILDHQGPLSSTFPIENRSSRATMRALKTHLDRAKSLPLVKKMSDFHLLLFVAQFLDVSSDVPALAECVRLQSPVPEGYALLIESMANTC

SEQ ID NO: 87329 - DNA, 1515 bp, Arabidopsis thaliana
  misc_feature (1)..(1515): Ceres Seq. ID no. 12700109
  misc_feature (1)..(1515): Ortholog of  Ceres SEQ ID NO 15226659 as cited in SEQ ID NO 60052
  misc_feature (1)..(1515): Ortholog of  Ceres SEQ ID NO 14301518 as cited in SEQ ID NO 69156
atggatccgatcagttttcaatccaaggctcaagaggtttcacgattctccgagaattctaaccctaacttcgtctcacactcgactccactcgagaaaccgagtaaatcttctgcgcagaagaatccgaaatggaagcctaatcctgttccggcggttttctcaccacggaatcggatcagagagaggaggttcgtggtggtgaagaagaattcaaggaaggagaagaatgattccgcgtctgtggattgcaaatgtggagctaagaccatttccaatatgaagaaatgtgtctgtatagcatacgaaactctacgggcgtcacaggaagagttcttcaacaatcgaagagaatccgtatcagaaattggagaatccagccagaatttggaggatggaaatgaacaagtcgaatttggagattctgatgaaactagggtttctttgatgaagaggagaagagaaaaagtattggaagaagcgagaatgagtatacctgaatttggtaaagtgatgcatctagttaaagcttttgagaagcttacttgcttcccactttcgaaggtaacttctaaggaagaagaagatcagattaagcaacctttgaaatgggaattgcctggaatgagccagcctaagtgttcagaatctgagacagatcaattcacttggagttcttcattctatccatcatctggtttgatcttaacagctacgaatctaggactagaacaacctcatgcctcagtttcttcatcatgggacaatagtgtttcaagtctcaactcaaatggtggccggaggggcagaagaaatagcttcgaatcctctgcttcaatgggaagtagaagatcaacgaagaagcagatcaaagtcacttctctgaagccatttaaactcagaactgaggaacggggacgaatgaaagaagaagagtttgcaaagaagctacacgagatgacgttggagaaagcaaaaaagagaatccccatagctcaaggtcttccctggacaactgatgaacctgagaatctggttaagcctcatgtgaaagatatcacgataccagtagacttaaagctccattccgacattcgagcagtagaacgtgcagaatttgattaccagtttctcgttatgacctcaactttgaatctacacaagcagagtcttttttgtggatcttgtatgataaaatccagcattgtctcattgtatcaggttactgagaaaataaacctagtcgagcaatacaaaacagaaagagaacgccaacaaaagctagcagaagaagaagagatacgaaggctgaggaaagagttggtccctaaggcacaaccaatgccatactttgatcgaccattcattcccaaaaggtcgaacaagcacccgacggtacctcgagatcccaagtttaatataccgcaacacaagaagataagatgctgcagtacatcgtcttggagtgacactggatcttacatgagcgacctcttataccaacaagacctctaa

SEQ ID NO: 87330 - protein, 504 aa, Arabidopsis thaliana
  peptide (1)..(504): Ceres Seq. ID no. 12700110
MDPISFQSKAQEVSRFSENSNPNFVSHSTPLEKPSKSSAQKNPKWKPNPVPAVFSPRNRIRERRFVVVKKNSRKEKNDSASVDCKCGAKTISNMKKCVCIAYETLRASQEEFFNNRRESVSEIGESSQNLEDGNEQVEFGDSDETRVSLMKRRREKVLEEARMSIPEFGKVMHLVKAFEKLTCFPLSKVTSKEEEDQIKQPLKWELPGMSQPKCSESETDQFTWSSSFYPSSGLILTATNLGLEQPHASVSSSWDNSVSSLNSNGGRRGRRNSFESSASMGSRRSTKKQIKVTSLKPFKLRTEERGRMKEEEFAKKLHEMTLEKAKKRIPIAQGLPWTTDEPENLVKPHVKDITIPVDLKLHSDIRAVERAEFDYQFLVMTSTLNLHKQSLFCGSCMIKSSIVSLYQVTEKINLVEQYKTERERQQKLAEEEEIRRLRKELVPKAQPMPYFDRPFIPKRSNKHPTVPRDPKFNIPQHKKIRCCSTSSWSDTGSYMSDLLYQQDL

SEQ ID NO: 87331 - protein, 411 aa, Arabidopsis thaliana
  peptide (1)..(411): Ceres Seq. ID no. 12700111
MKKCVCIAYETLRASQEEFFNNRRESVSEIGESSQNLEDGNEQVEFGDSDETRVSLMKRRREKVLEEARMSIPEFGKVMHLVKAFEKLTCFPLSKVTSKEEEDQIKQPLKWELPGMSQPKCSESETDQFTWSSSFYPSSGLILTATNLGLEQPHASVSSSWDNSVSSLNSNGGRRGRRNSFESSASMGSRRSTKKQIKVTSLKPFKLRTEERGRMKEEEFAKKLHEMTLEKAKKRIPIAQGLPWTTDEPENLVKPHVKDITIPVDLKLHSDIRAVERAEFDYQFLVMTSTLNLHKQSLFCGSCMIKSSIVSLYQVTEKINLVEQYKTERERQQKLAEEEEIRRLRKELVPKAQPMPYFDRPFIPKRSNKHPTVPRDPKFNIPQHKKIRCCSTSSWSDTGSYMSDLLYQQDL

SEQ ID NO: 87332 - protein, 355 aa, Arabidopsis thaliana
  peptide (1)..(355): Ceres Seq. ID no. 12700112
MKRRREKVLEEARMSIPEFGKVMHLVKAFEKLTCFPLSKVTSKEEEDQIKQPLKWELPGMSQPKCSESETDQFTWSSSFYPSSGLILTATNLGLEQPHASVSSSWDNSVSSLNSNGGRRGRRNSFESSASMGSRRSTKKQIKVTSLKPFKLRTEERGRMKEEEFAKKLHEMTLEKAKKRIPIAQGLPWTTDEPENLVKPHVKDITIPVDLKLHSDIRAVERAEFDYQFLVMTSTLNLHKQSLFCGSCMIKSSIVSLYQVTEKINLVEQYKTERERQQKLAEEEEIRRLRKELVPKAQPMPYFDRPFIPKRSNKHPTVPRDPKFNIPQHKKIRCCSTSSWSDTGSYMSDLLYQQDL

SEQ ID NO: 87333 - DNA, 489 bp, Arabidopsis thaliana
  misc_feature (1)..(489): Ceres Seq. ID no. 12700113
  misc_feature (1)..(489): Ortholog of  Ceres SEQ ID NO 13580026 as cited in SEQ ID NO 62641
atgatgctaaggcaaacgtcgagaaaggcttacctagggttacaggcgtctcctctagggttaggtcgtcgattataccacgagaatgtaatcgaccactttgaaaaccctagaaacgttggctccttcaacaggaatgaccctaacgttggcacgggattggtaggagctcctgcctgcggagacctcatgagcctccagattaaggtcgatgattcaggtcagatcattgatactcgattcaagacctttggctgtggctccgctatcgcctcatcttccgttgcttctgaatggatcaagggcaaaaccttagacgaagttatgaccatcaagaacgcggaaatcgctaagcatcttaggttgccaccggtaaagctacattgcagtatgcttgcagaggacgctatcaagtccgcggtcagagactacaaggagaagcaagcaaagactaatgctgctgctgcagaagaaaccgtcaaggcctga

SEQ ID NO: 87334 - protein, 162 aa, Arabidopsis thaliana; identical to SEQ ID NO: 71777
  peptide (1)..(162): Ceres Seq. ID no. 12700114

SEQ ID NO: 87335 - protein, 161 aa, Arabidopsis thaliana; identical to SEQ ID NO: 71778
  peptide (1)..(161): Ceres Seq. ID no. 12700115

SEQ ID NO: 87336 - protein, 99 aa, Arabidopsis thaliana
  peptide (1)..(99): Ceres Seq. ID no. 12700116
MSLQIKVDDSGQIIDTRFKTFGCGSAIASSSVASEWIKGKTLDEVMTIKNAEIAKHLRLPPVKLHCSMLAEDAIKSAVRDYKEKQAKTNAAAAEETVKA

SEQ ID NO: 87337 - DNA, 1602 bp, Arabidopsis thaliana
  misc_feature (1)..(1602): Ceres Seq. ID no. 12700121
  misc_feature (1)..(1602): Ortholog of  Ceres SEQ ID NO 14315469 as cited in SEQ ID NO 57169
  misc_feature (1)..(1602): Ortholog of  Ceres SEQ ID NO 13657008 as cited in SEQ ID NO 69164
atgcagcttcacatatcgcctagcatgagaagcattacgatatcgagcagcaatgagtttattgatttgatgaagatcaaagtcgcagctcgtcacatctcttaccgaactctcttccacactatcttaatcctcgctttcttgttaccttttgttttcatcctaaccgctgttgttacccttgaaggtgtcaacaagtgctcctcttttgattgtttcgggaggcggctaggaccacgtcttcttggtaggatagatgattcagagcagagactagttagagatttttacaaaattctaaatgaagtaagcactcaagaaattccagatggtttaaagcttccagagtcttttagtcaactggtttcggatatgaagaacaaccactatgatgctaaaacatttgccctcgtatttcgagctatggtagagaagtttgaaagggatttaagggaatccaaatttgcagaactcatgaacaagcactttgctgcaagttcaattccaaaaggaattcactgtctctctttaagactaaccgatgaatattcctccaatgctcatgcccggagacagcttccttccccggagcttctccctgttctctcagacaatgcttaccaccattttgttctagctacagataatatcttagctgcatcggttgtggtctcatctgctgttcaatcatcttcaaaacccgagaaaattgtcttccatgttatcacagacaagaaaacctatgcgggtatgcattcttggtttgcactcaattctgttgctcctgcgattgttgaagtgaaaagcgttcatcagtttgattggttaacaagagagaatgttccagttcttgaagctgtggaaagccataacagtatcagaaattattaccatgggaatcatattgctggtgcaaacctcagcgaaacaacccctcgaacatttgcttcgaaactgcagtcaagaagtcccaaatacatatctttgctcaaccatcttagaatatatctaccagagctttttccgaacttagacaaggtagtgttcttagatgatgatatagtgatacagaaagatttatctccgctttgggatattgaccttaacgggaaggttaatggagctgtggagacttgtcgaggagaagacgtatgggttatgtcaaagcgtcttaggaactacttcaatttttctcacccgctcatcgcaaagcatttagatcccgaagaatgtgcttgggcttatggaatgaatatctttgatctacggacttggaggaagacaaatatcagagaaacgtatcattcttggcttaaagagaatctgaagtcgaatctaacaatgtggaaacttggaacattgcctcctgctctaatagcatttaaaggtcatgttcagccaatagattcctcttggcatatgcttggattaggttatcagagcaagaccaacttagaaaatgcgaagaaagctgcagtgattcattacaatggccaatcaaagccgtggcttgagataggtttcgagcatctcagaccattctggacaaaatatgttaactactccaatgatttcattaagaattgtcatatcttggaatag

SEQ ID NO: 87338 - protein, 533 aa, Arabidopsis thaliana
  peptide (1)..(533): Ceres Seq. ID no. 12700122
MQLHISPSMRSITISSSNEFIDLMKIKVAARHISYRTLFHTILILAFLLPFVFILTAVVTLEGVNKCSSFDCFGRRLGPRLLGRIDDSEQRLVRDFYKILNEVSTQEIPDGLKLPESFSQLVSDMKNNHYDAKTFALVFRAMVEKFERDLRESKFAELMNKHFAASSIPKGIHCLSLRLTDEYSSNAHARRQLPSPELLPVLSDNAYHHFVLATDNILAASVVVSSAVQSSSKPEKIVFHVITDKKTYAGMHSWFALNSVAPAIVEVKSVHQFDWLTRENVPVLEAVESHNSIRNYYHGNHIAGANLSETTPRTFASKLQSRSPKYISLLNHLRIYLPELFPNLDKVVFLDDDIVIQKDLSPLWDIDLNGKVNGAVETCRGEDVWVMSKRLRNYFNFSHPLIAKHLDPEECAWAYGMNIFDLRTWRKTNIRETYHSWLKENLKSNLTMWKLGTLPPALIAFKGHVQPIDSSWHMLGLGYQSKTNLENAKKAAVIHYNGQSKPWLEIGFEHLRPFWTKYVNYSNDFIKNCHILE

SEQ ID NO: 87339 - protein, 525 aa, Arabidopsis thaliana
  peptide (1)..(525): Ceres Seq. ID no. 12700123
MRSITISSSNEFIDLMKIKVAARHISYRTLFHTILILAFLLPFVFILTAVVTLEGVNKCSSFDCFGRRLGPRLLGRIDDSEQRLVRDFYKILNEVSTQEIPDGLKLPESFSQLVSDMKNNHYDAKTFALVFRAMVEKFERDLRESKFAELMNKHFAASSIPKGIHCLSLRLTDEYSSNAHARRQLPSPELLPVLSDNAYHHFVLATDNILAASVVVSSAVQSSSKPEKIVFHVITDKKTYAGMHSWFALNSVAPAIVEVKSVHQFDWLTRENVPVLEAVESHNSIRNYYHGNHIAGANLSETTPRTFASKLQSRSPKYISLLNHLRIYLPELFPNLDKVVFLDDDIVIQKDLSPLWDIDLNGKVNGAVETCRGEDVWVMSKRLRNYFNFSHPLIAKHLDPEECAWAYGMNIFDLRTWRKTNIRETYHSWLKENLKSNLTMWKLGTLPPALIAFKGHVQPIDSSWHMLGLGYQSKTNLENAKKAAVIHYNGQSKPWLEIGFEHLRPFWTKYVNYSNDFIKNCHILE

SEQ ID NO: 87340 - protein, 510 aa, Arabidopsis thaliana; identical to SEQ ID NO: 72184
  peptide (1)..(510): Ceres Seq. ID no. 12700124

SEQ ID NO: 87341 - DNA, 4119 bp, Arabidopsis thaliana
  misc_feature (1)..(4119): Ceres Seq. ID no. 12700172
  misc_feature (1)..(4119): Ortholog of  Ceres SEQ ID NO 13600485 as cited in SEQ ID NO 1221
atgaagcggataagagatgatgtatatgcctctgggtctcaatttagacgtcctcttggttcttctcgaggccaattatgtggacaatctccggtccacggcagtggtgacaccgaagaagaagaagaaggagggagccggagagtctctcagaaattgacaaccaatgatgcgttgtcgtacctgagggaagtaaaagagatgtttcaagatcaacgcgagaaatatgacaggttcctcgaggttatgaaagattttaaggctcaaagaaccgacacaggcggtgtgatcgcaagagttaaggaattgtttaagggacataataatttgatttatggattcaacacctttttgcctaagggatatgaaattacgcttattgaggaagacgacgctctgccaaagaagactgttgaattcgaacaagccatcaattttgtgaataaaattaagatgcgattcaagcacgatgaacatgtctataaatctttcttggaaatcttgaatatgtaccgaaaggagaacaaggaaattaaagaggtgtacaacgaggtatctattctttttcaaggccacttggatttgcttgaacagtttactaggtttttgccagcgtctttgccatctcattcagcagcgcagcatagccggagtcaggctcaacagtacagcgaccgaggatcagaccctcctctacttcatcaaatgcaagtggaaaaggaacgccgacgagaaagggctgttgctctccgcggtgattatagtgttgaacgttatgaccttaatgatgataaaacgatggtgaagattcaaagagagcagcggaagcgccttgataaggagaacagggcaaggagaggccgtgatttggacgatagagaagcaggtcaagataacctacaccattttccagagaaaagaaagtcgtccagaagagctgaagctcttgaagcatattctggttctgcttcacattctgagaaagacaatttgaaaagtatgtacaaacaagcattcgttttctgtgagaaagtcaaggatagactatgcagccaagatgattatcagacattcttgaagtgcctcaatatttttagcaatggaataatccaaaggaaggatctgcaaaacttggtttctgatcttcttgggaaatttcctgatctgatggatgagttcaaccagttcttcgagcggtgtgagagtattactgatggatttcagcgtcttgctggtgttatgagcaaaaaattatttagcagcgaagaacagttatccaggccaatgaaggtggaagagaaagaaagtgaacacaagcctgaactcgaggctgtgaaggaaactgagcaatgcaagaaggagtacatgggaaaatctattcaagagctcgatctctctgattgcgagtgttgcactcctagctaccggcttctgcctgcggattatccgataccaattgcgagtcagagatcggagctaggagctgaggttttaaatgatcattgggtatctgtcacttccggaagtgaagattattcttttaagcacatgcgcagaaaccaatatgaagagagcttgttcagatgcgaagatgatagatttgagttggacatgttgctggaatctgtgagctctgcggccagaagtgcagaaagtttgttgaacatcatcacagagaagaaaataagtttttctggctccttcaggatcgaagaccattttacggccctaaatttaaggtgtattgagcgactttatggcgaccatggtcttgacgtgatagacatattaaataagaatccagccactgcacttcctgtaatcctaactcgtttaaagcagaaacaaggtgaatggaagaaatgccgtgacgattttgataaggtctgggcgaacgtatatgcaaaaaaccattacaagtcacttgatcaccgcagcttctacttcaagcaacaagattcaaagaacttgagtgcaaaatcattgttggctgaaattaaggagctgaaagagaagtctcagaatgatgatgatgttctgttgtctatttctgctggttacagacaacctataaatcctaatcttgaatatgagtatttgaacagagctattcatgaagacatgttcaaagtagtccagttttcatgtgaggagttatgttctacaaaagaacagctcagtaaagttctgaggctttgggaaaatttcctggaggcagtgctgggtgttcctcccagggccaagggcacagatcttgttgaagatgttgtaataaaccccaagactctcgatgtgaatcacagcacatctcctaacggggaggctgctgtgagttctggaggagacacagcaaggttggcttctaggaaacttaaatctgctgccaatggagatgagaattcttcatctgggacattcaaacatgggataggtttgttaaataaagattcgacagggaaagaaaatcttgaagatgttgaaatagctaacagagatggtgttgcctgctctgctgtgaaacctcagaaagaacaagaaactggaaatgaagccgagaaaaggtttggaaaacctatcccaatggatattagcgaaagagcagccatctcgagtatatcaatcccaagtggggcagaaaacaatcattgtgtagtaggcaaggaagttttgccaggtgcacatgagattcaagccaaaccaagcgacaccctcactgatattcatcatgatgtagatagcattgaaactgttcattcgactcagggaggtgatgttggcaattcgatagttttggcaaatggattaaggtcagattcttctaaaggtactaggaattctgatgatcccgaaggtccctccagaaatgagaaagaggaaggtgaactgtcacctaatggtgattttgaagacaactttggtgtttacaaagatcatggggtgaagtccacatccaaaccagagaattcagcagaggctgaagtagaggcagatgctgaagtagagaatgaggacgatgctgacgatgttgatagtgaaaatgcttccgaggcatctggaactgaatctggtggcgacgtatgttctcaggacgaagatagagaggaggagaatggtgagcatgatgagatcgatggtaaagctgagagtgaaggagaagcggagggaatggatccacatctcttagaaggagaaagtgagctgcttccacagtcagaacgtgttctcttatccgtcagacccctttcaaagcatgtcgcagcagttttatgcgatgagagaacaaaagatctccaagttttctatgggaatgacgacttttatgttctttttaggcttcaccaaatcctgtacgagagaattttgtatgcaaaaaggaattgctcaggcggtgaactgaaatcgaaaaacttaaaggataccaatgccggagatccttatgcgaggtttatgagggttttgtatggtttgctagatggatcagctgaaaataccaagtttgaggatgagtgcagagctataattggaaaccaatcatatgtgttattcacgttggacaaactgatttacagattggttaagcagcttcaagctattgtagccgatgaaatggacaacaagctgcttcagttgtatgagtatgagaaatcccggaaaccaggaagggttatcgactcagtgtattatgaaaatgttagggtcctcgttcacgaggaaaatatttaccggttggaatgttcatccttgccttcacgtttatctatccagcttatggataacataatcgagaagccagaagcatatgcagtttctatggatcccacatttgcaagttatatgcaaactgagttgctttccgtctcatcaggaaagaaagaggagggacatgacattgtattacaaaggaacctcaccgggttgtatgatctctgtaaagctatggaaggtgtcgaagtagtaaatggcttggaatgcaagatgtcttgctcttcttacaagatcgcgtacgtattggacacagaggattacttccacaggaagaagaagaaaaagaagactgaacagttatggcaacgtaacaaggtgagagtagaaaggttccataggtttctctcagcttaa

SEQ ID NO: 87342 - protein, 1372 aa, Arabidopsis thaliana
  peptide (1)..(1372): Ceres Seq. ID no. 12700173
MKRIRDDVYASGSQFRRPLGSSRGQLCGQSPVHGSGDTEEEEEGGSRRVSQKLTTNDALSYLREVKEMFQDQREKYDRFLEVMKDFKAQRTDTGGVIARVKELFKGHNNLIYGFNTFLPKGYEITLIEEDDALPKKTVEFEQAINFVNKIKMRFKHDEHVYKSFLEILNMYRKENKEIKEVYNEVSILFQGHLDLLEQFTRFLPASLPSHSAAQHSRSQAQQYSDRGSDPPLLHQMQVEKERRRERAVALRGDYSVERYDLNDDKTMVKIQREQRKRLDKENRARRGRDLDDREAGQDNLHHFPEKRKSSRRAEALEAYSGSASHSEKDNLKSMYKQAFVFCEKVKDRLCSQDDYQTFLKCLNIFSNGIIQRKDLQNLVSDLLGKFPDLMDEFNQFFERCESITDGFQRLAGVMSKKLFSSEEQLSRPMKVEEKESEHKPELEAVKETEQCKKEYMGKSIQELDLSDCECCTPSYRLLPADYPIPIASQRSELGAEVLNDHWVSVTSGSEDYSFKHMRRNQYEESLFRCEDDRFELDMLLESVSSAARSAESLLNIITEKKISFSGSFRIEDHFTALNLRCIERLYGDHGLDVIDILNKNPATALPVILTRLKQKQGEWKKCRDDFDKVWANVYAKNHYKSLDHRSFYFKQQDSKNLSAKSLLAEIKELKEKSQNDDDVLLSISAGYRQPINPNLEYEYLNRAIHEDMFKVVQFSCEELCSTKEQLSKVLRLWENFLEAVLGVPPRAKGTDLVEDVVINPKTLDVNHSTSPNGEAAVSSGGDTARLASRKLKSAANGDENSSSGTFKHGIGLLNKDSTGKENLEDVEIANRDGVACSAVKPQKEQETGNEAEKRFGKPIPMDISERAAISSISIPSGAENNHCVVGKEVLPGAHEIQAKPSDTLTDIHHDVDSIETVHSTQGGDVGNSIVLANGLRSDSSKGTRNSDDPEGPSRNEKEEGELSPNGDFEDNFGVYKDHGVKSTSKPENSAEAEVEADAEVENEDDADDVDSENASEASGTESGGDVCSQDEDREEENGEHDEIDGKAESEGEAEGMDPHLLEGESELLPQSERVLLSVRPLSKHVAAVLCDERTKDLQVFYGNDDFYVLFRLHQILYERILYAKRNCSGGELKSKNLKDTNAGDPYARFMRVLYGLLDGSAENTKFEDECRAIIGNQSYVLFTLDKLIYRLVKQLQAIVADEMDNKLLQLYEYEKSRKPGRVIDSVYYENVRVLVHEENIYRLECSSLPSRLSIQLMDNIIEKPEAYAVSMDPTFASYMQTELLSVSSGKKEEGHDIVLQRNLTGLYDLCKAMEGVEVVNGLECKMSCSSYKIAYVLDTEDYFHRKKKKKKTEQLWQRNKVRVERFHRFLSA

SEQ ID NO: 87343 - protein, 1305 aa, Arabidopsis thaliana
  peptide (1)..(1305): Ceres Seq. ID no. 12700174
MFQDQREKYDRFLEVMKDFKAQRTDTGGVIARVKELFKGHNNLIYGFNTFLPKGYEITLIEEDDALPKKTVEFEQAINFVNKIKMRFKHDEHVYKSFLEILNMYRKENKEIKEVYNEVSILFQGHLDLLEQFTRFLPASLPSHSAAQHSRSQAQQYSDRGSDPPLLHQMQVEKERRRERAVALRGDYSVERYDLNDDKTMVKIQREQRKRLDKENRARRGRDLDDREAGQDNLHHFPEKRKSSRRAEALEAYSGSASHSEKDNLKSMYKQAFVFCEKVKDRLCSQDDYQTFLKCLNIFSNGIIQRKDLQNLVSDLLGKFPDLMDEFNQFFERCESITDGFQRLAGVMSKKLFSSEEQLSRPMKVEEKESEHKPELEAVKETEQCKKEYMGKSIQELDLSDCECCTPSYRLLPADYPIPIASQRSELGAEVLNDHWVSVTSGSEDYSFKHMRRNQYEESLFRCEDDRFELDMLLESVSSAARSAESLLNIITEKKISFSGSFRIEDHFTALNLRCIERLYGDHGLDVIDILNKNPATALPVILTRLKQKQGEWKKCRDDFDKVWANVYAKNHYKSLDHRSFYFKQQDSKNLSAKSLLAEIKELKEKSQNDDDVLLSISAGYRQPINPNLEYEYLNRAIHEDMFKVVQFSCEELCSTKEQLSKVLRLWENFLEAVLGVPPRAKGTDLVEDVVINPKTLDVNHSTSPNGEAAVSSGGDTARLASRKLKSAANGDENSSSGTFKHGIGLLNKDSTGKENLEDVEIANRDGVACSAVKPQKEQETGNEAEKRFGKPIPMDISERAAISSISIPSGAENNHCVVGKEVLPGAHEIQAKPSDTLTDIHHDVDSIETVHSTQGGDVGNSIVLANGLRSDSSKGTRNSDDPEGPSRNEKEEGELSPNGDFEDNFGVYKDHGVKSTSKPENSAEAEVEADAEVENEDDADDVDSENASEASGTESGGDVCSQDEDREEENGEHDEIDGKAESEGEAEGMDPHLLEGESELLPQSERVLLSVRPLSKHVAAVLCDERTKDLQVFYGNDDFYVLFRLHQILYERILYAKRNCSGGELKSKNLKDTNAGDPYARFMRVLYGLLDGSAENTKFEDECRAIIGNQSYVLFTLDKLIYRLVKQLQAIVADEMDNKLLQLYEYEKSRKPGRVIDSVYYENVRVLVHEENIYRLECSSLPSRLSIQLMDNIIEKPEAYAVSMDPTFASYMQTELLSVSSGKKEEGHDIVLQRNLTGLYDLCKAMEGVEVVNGLECKMSCSSYKIAYVLDTEDYFHRKKKKKKTEQLWQRNKVRVERFHRFLSA

SEQ ID NO: 87344 - protein, 1290 aa, Arabidopsis thaliana
  peptide (1)..(1290): Ceres Seq. ID no. 12700175
MKDFKAQRTDTGGVIARVKELFKGHNNLIYGFNTFLPKGYEITLIEEDDALPKKTVEFEQAINFVNKIKMRFKHDEHVYKSFLEILNMYRKENKEIKEVYNEVSILFQGHLDLLEQFTRFLPASLPSHSAAQHSRSQAQQYSDRGSDPPLLHQMQVEKERRRERAVALRGDYSVERYDLNDDKTMVKIQREQRKRLDKENRARRGRDLDDREAGQDNLHHFPEKRKSSRRAEALEAYSGSASHSEKDNLKSMYKQAFVFCEKVKDRLCSQDDYQTFLKCLNIFSNGIIQRKDLQNLVSDLLGKFPDLMDEFNQFFERCESITDGFQRLAGVMSKKLFSSEEQLSRPMKVEEKESEHKPELEAVKETEQCKKEYMGKSIQELDLSDCECCTPSYRLLPADYPIPIASQRSELGAEVLNDHWVSVTSGSEDYSFKHMRRNQYEESLFRCEDDRFELDMLLESVSSAARSAESLLNIITEKKISFSGSFRIEDHFTALNLRCIERLYGDHGLDVIDILNKNPATALPVILTRLKQKQGEWKKCRDDFDKVWANVYAKNHYKSLDHRSFYFKQQDSKNLSAKSLLAEIKELKEKSQNDDDVLLSISAGYRQPINPNLEYEYLNRAIHEDMFKVVQFSCEELCSTKEQLSKVLRLWENFLEAVLGVPPRAKGTDLVEDVVINPKTLDVNHSTSPNGEAAVSSGGDTARLASRKLKSAANGDENSSSGTFKHGIGLLNKDSTGKENLEDVEIANRDGVACSAVKPQKEQETGNEAEKRFGKPIPMDISERAAISSISIPSGAENNHCVVGKEVLPGAHEIQAKPSDTLTDIHHDVDSIETVHSTQGGDVGNSIVLANGLRSDSSKGTRNSDDPEGPSRNEKEEGELSPNGDFEDNFGVYKDHGVKSTSKPENSAEAEVEADAEVENEDDADDVDSENASEASGTESGGDVCSQDEDREEENGEHDEIDGKAESEGEAEGMDPHLLEGESELLPQSERVLLSVRPLSKHVAAVLCDERTKDLQVFYGNDDFYVLFRLHQILYERILYAKRNCSGGELKSKNLKDTNAGDPYARFMRVLYGLLDGSAENTKFEDECRAIIGNQSYVLFTLDKLIYRLVKQLQAIVADEMDNKLLQLYEYEKSRKPGRVIDSVYYENVRVLVHEENIYRLECSSLPSRLSIQLMDNIIEKPEAYAVSMDPTFASYMQTELLSVSSGKKEEGHDIVLQRNLTGLYDLCKAMEGVEVVNGLECKMSCSSYKIAYVLDTEDYFHRKKKKKKTEQLWQRNKVRVERFHRFLSA

SEQ ID NO: 87345 - DNA, 1566 bp, Arabidopsis thaliana
  misc_feature (1)..(1566): Ceres Seq. ID no. 12700205
  misc_feature (1)..(1566): Ortholog of  Ceres SEQ ID NO 12613725 as cited in SEQ ID NO 68196
atggatttagaacagaagacaagaggacttagcaagtcatgtgcccttctcatagtgattgcgggaatggagagatatgcattcaaaggagttgcatcaaacttagtgacatatctaacagatgtagtgaagatgagtaattcaagagcagccaaaactgttaacacttgggctggtttcacttctatgttgcctctcttctctgctcctttggctgatacttattgggacagattcttcaccatccttgcttcttcttccgtctactttgtgggactagtgggattgacatggacggcatttgctgggtcacgttcagctactaagactatctcttcttactttctctactcttcactatgtcttgtctcaatcggtttaggcgtcttaaacccttctcttcaagcctttggtgcagaccaactcgaccacgacctcgataagaatttcgatctttcctcgggtgatcaaaaggacgcgaaagctacccgaaagactcagtttttccaattgtggtactttggcgtctgcaccggcagccttatgggtgtcacagtcatggcttatattcaagacacttttggttgggttctcggtttcgccattcctggtatcgtgatattcctgtcgattttggtgttcatgtcgggttgtggaatttatgtttatgctccgggcgcccgtctgaagaagaaaacaactactacaccttttgagaagattcttaaattcattaaagggagagtagtgaagcagagaaatgacgagagctcgaaaacggttttctctggaattgataatgttaagttagtgattcgccttttccccatatggatgatgcttctcatgttcgcggttatcttccagctaccagcaacctttttcaccaaacaaggtgtgactatgaagagaaacattgggtccaacttcaaaatcccacctgcaaccctgcaaagcacgatcacattatcaatcatcctgcttatgccattatatgataagattttgatacctattaccaagagaatcaagaaaaacggtacaggtatctctgtgatggagagaatgggagtcggaatgtttctatccatcattgccattgttattgcggcaatagtcgaaaggaaaagactagccataagccaaaagatgaagactttacctgattatgatccagaaaccgtcccactgagcatcttctggctgctgcctcagtacatcctcttgggaatctcagatatattcacagtcgttgggatgcaagagtttttctacagtgaggttcctgtaagaatgagaacaatgggatttgctctctacacaagtgtttttggtgttggaagctttgtgagcgccgcactgatctcaattgtcgaggcttactcgagctcaacaggtgaccgacaaaactggtttgcagatgatatgtcggaagctcggcttgacaaatactactggcttcttgctcttacaagtacaataagctttgtagtctacatatttctatgcaagtttttcaagagtagcagtgatcaaggcgatgaaaaagaagaagcccctaaatga

SEQ ID NO: 87346 - protein, 521 aa, Arabidopsis thaliana
  peptide (1)..(521): Ceres Seq. ID no. 12700206
MDLEQKTRGLSKSCALLIVIAGMERYAFKGVASNLVTYLTDVVKMSNSRAAKTVNTWAGFTSMLPLFSAPLADTYWDRFFTILASSSVYFVGLVGLTWTAFAGSRSATKTISSYFLYSSLCLVSIGLGVLNPSLQAFGADQLDHDLDKNFDLSSGDQKDAKATRKTQFFQLWYFGVCTGSLMGVTVMAYIQDTFGWVLGFAIPGIVIFLSILVFMSGCGIYVYAPGARLKKKTTTTPFEKILKFIKGRVVKQRNDESSKTVFSGIDNVKLVIRLFPIWMMLLMFAVIFQLPATFFTKQGVTMKRNIGSNFKIPPATLQSTITLSIILLMPLYDKILIPITKRIKKNGTGISVMERMGVGMFLSIIAIVIAAIVERKRLAISQKMKTLPDYDPETVPLSIFWLLPQYILLGISDIFTVVGMQEFFYSEVPVRMRTMGFALYTSVFGVGSFVSAALISIVEAYSSSTGDRQNWFADDMSEARLDKYYWLLALTSTISFVVYIFLCKFFKSSSDQGDEKEEAPK

SEQ ID NO: 87347 - protein, 499 aa, Arabidopsis thaliana
  peptide (1)..(499): Ceres Seq. ID no. 12700207
MERYAFKGVASNLVTYLTDVVKMSNSRAAKTVNTWAGFTSMLPLFSAPLADTYWDRFFTILASSSVYFVGLVGLTWTAFAGSRSATKTISSYFLYSSLCLVSIGLGVLNPSLQAFGADQLDHDLDKNFDLSSGDQKDAKATRKTQFFQLWYFGVCTGSLMGVTVMAYIQDTFGWVLGFAIPGIVIFLSILVFMSGCGIYVYAPGARLKKKTTTTPFEKILKFIKGRVVKQRNDESSKTVFSGIDNVKLVIRLFPIWMMLLMFAVIFQLPATFFTKQGVTMKRNIGSNFKIPPATLQSTITLSIILLMPLYDKILIPITKRIKKNGTGISVMERMGVGMFLSIIAIVIAAIVERKRLAISQKMKTLPDYDPETVPLSIFWLLPQYILLGISDIFTVVGMQEFFYSEVPVRMRTMGFALYTSVFGVGSFVSAALISIVEAYSSSTGDRQNWFADDMSEARLDKYYWLLALTSTISFVVYIFLCKFFKSSSDQGDEKEEAPK

SEQ ID NO: 87348 - protein, 477 aa, Arabidopsis thaliana
  peptide (1)..(477): Ceres Seq. ID no. 12700208
MSNSRAAKTVNTWAGFTSMLPLFSAPLADTYWDRFFTILASSSVYFVGLVGLTWTAFAGSRSATKTISSYFLYSSLCLVSIGLGVLNPSLQAFGADQLDHDLDKNFDLSSGDQKDAKATRKTQFFQLWYFGVCTGSLMGVTVMAYIQDTFGWVLGFAIPGIVIFLSILVFMSGCGIYVYAPGARLKKKTTTTPFEKILKFIKGRVVKQRNDESSKTVFSGIDNVKLVIRLFPIWMMLLMFAVIFQLPATFFTKQGVTMKRNIGSNFKIPPATLQSTITLSIILLMPLYDKILIPITKRIKKNGTGISVMERMGVGMFLSIIAIVIAAIVERKRLAISQKMKTLPDYDPETVPLSIFWLLPQYILLGISDIFTVVGMQEFFYSEVPVRMRTMGFALYTSVFGVGSFVSAALISIVEAYSSSTGDRQNWFADDMSEARLDKYYWLLALTSTISFVVYIFLCKFFKSSSDQGDEKEEAPK

SEQ ID NO: 87349 - DNA, 1453 bp, Arabidopsis thaliana
  misc_feature (1)..(1453): Ceres Seq. ID no. 12700221
  misc_feature (1)..(1453): Ortholog of  Ceres SEQ ID NO 15171739 as cited in SEQ ID NO 57134
attattattccactctctctctctagactctgaattagctcattcttgcctccaaacaaatattcctgacagaccagaccactcgtaagacagaccaaaccctaaactaaaagcatccacgttctttgtttttgtattgatggtctgatctcatatccatggagatggagaatcaccgccccggcagtttcacctacatgggccgcaaattcagcgatttaagtctcaacgatgactcctctgctttcagcgattgtaacagcgacagatccggcgaattccccactgcttcctccgagagccgtcgtctcctcctctcttgcgcctctgagaattccgatgatctcatcaatcatctcgtgtcgcatcttgattcctcctattcgatcgatgagcagaagcaagctgctatggagatcaggctcttatccaagaacaaacctgagaatcggatcaaaatcgccaaggccggtgcgattaagccgttgatttctctgatctcttcttcggatcttcagcttcaggagtatggtgtcactgcaatcttgaatctatctctctgcgacgagaacaaagagtcgattgcttcttccggtgcgattaagccgcttgtcagggctttgaaaatgggaacaccgactgctaaagagaacgctgcttgtgctctgctccgtctatcgcagatcgaggagaacaaagtcgccatcgggagatccggagcgattcctctgttggtgaaccttctagaaacaggcggattcagagcgaagaaggacgcgtcgacggctctgtactcgttgtgctcagctaaagagaacaaaatcagagccgtgcaatcgggaattatgaagccgcttgttgaattgatggcggatttcggatcaaacatggtggataaatcggcgtttgtgatgagtctgttaatgtcggtgccggaatcgaaaccggcgattgtggaggaaggaggagttccggtgctggtggagatagtagaggtgggaacacagagacagaaagagatggctgtgtcgatattgctacagctttgtgaggagagtgttgtgtatagaacaatggtggctagagaaggagcgatacctccgctagtggctctgtcgcaggcaggaacaagtcgagctaagcaaaaggctgaggcgttgattgagcttctaaggcaaccaagatccattagtaatggtggtgctagatcatcgtcccaactctgatgtgagcttttcttatttatctttttttaccacactctttcttcgtcttttactgttaatgcgagggtgtatacaaacaaccagaaaaaaaaggggggaaaaggaaactgtaaatagtttgtgtagaaaattagtgggcttgttgtaatttatcttgagtttggcttttcttttctttttgtgatccatttcataaatttcggtttggttttaacagatttctcatt

SEQ ID NO: 87350 - protein, 355 aa, Arabidopsis thaliana
  peptide (1)..(355): Ceres Seq. ID no. 12700222
MEMENHRPGSFTYMGRKFSDLSLNDDSSAFSDCNSDRSGEFPTASSESRRLLLSCASENSDDLINHLVSHLDSSYSIDEQKQAAMEIRLLSKNKPENRIKIAKAGAIKPLISLISSSDLQLQEYGVTAILNLSLCDENKESIASSGAIKPLVRALKMGTPTAKENAACALLRLSQIEENKVAIGRSGAIPLLVNLLETGGFRAKKDASTALYSLCSAKENKIRAVQSGIMKPLVELMADFGSNMVDKSAFVMSLLMSVPESKPAIVEEGGVPVLVEIVEVGTQRQKEMAVSILLQLCEESVVYRTMVAREGAIPPLVALSQAGTSRAKQKAEALIELLRQPRSISNGGARSSSQL

SEQ ID NO: 87351 - protein, 353 aa, Arabidopsis thaliana
  peptide (1)..(353): Ceres Seq. ID no. 12700223
MENHRPGSFTYMGRKFSDLSLNDDSSAFSDCNSDRSGEFPTASSESRRLLLSCASENSDDLINHLVSHLDSSYSIDEQKQAAMEIRLLSKNKPENRIKIAKAGAIKPLISLISSSDLQLQEYGVTAILNLSLCDENKESIASSGAIKPLVRALKMGTPTAKENAACALLRLSQIEENKVAIGRSGAIPLLVNLLETGGFRAKKDASTALYSLCSAKENKIRAVQSGIMKPLVELMADFGSNMVDKSAFVMSLLMSVPESKPAIVEEGGVPVLVEIVEVGTQRQKEMAVSILLQLCEESVVYRTMVAREGAIPPLVALSQAGTSRAKQKAEALIELLRQPRSISNGGARSSSQL

SEQ ID NO: 87352 - protein, 342 aa, Arabidopsis thaliana
  peptide (1)..(342): Ceres Seq. ID no. 12700224
MGRKFSDLSLNDDSSAFSDCNSDRSGEFPTASSESRRLLLSCASENSDDLINHLVSHLDSSYSIDEQKQAAMEIRLLSKNKPENRIKIAKAGAIKPLISLISSSDLQLQEYGVTAILNLSLCDENKESIASSGAIKPLVRALKMGTPTAKENAACALLRLSQIEENKVAIGRSGAIPLLVNLLETGGFRAKKDASTALYSLCSAKENKIRAVQSGIMKPLVELMADFGSNMVDKSAFVMSLLMSVPESKPAIVEEGGVPVLVEIVEVGTQRQKEMAVSILLQLCEESVVYRTMVAREGAIPPLVALSQAGTSRAKQKAEALIELLRQPRSISNGGARSSSQL

SEQ ID NO: 87353 - DNA, 842 bp, Arabidopsis thaliana
  misc_feature (1)..(842): Ceres Seq. ID no. 12700233
  misc_feature (1)..(842): Ortholog of  Ceres SEQ ID NO 14306117 as cited in SEQ ID NO 0
  misc_feature (1)..(842): Ortholog of  Ceres SEQ ID NO 14309181 as cited in SEQ ID NO 0
acaagaacagaggctgacacctaaagcttactctctaactgcaatggctcacttcatagacctcaacagtctcaccaacactttaccgtctcttccgaaactacccgagagtcgtaaaaccgggaaatccagcgggtttgcttgcaggagaactgaagaatttcaagaaccggattcggtacagatcacaagacggatgacattaggatttgctgtctcaataggtcttaccggaattctcggcgaaaataatgtttccttggcacaagacaatgggttttggattgatggtcctcttccaattcctcctatttacaacaatatcgtgaatgagaagacgggaacgagaacattcataaagaaaggagtgtatgtagcggatatcgggacgaaaggaagaatgtatagagttaaaaagaatgcttttgatctcttggcaatggaggatttgatcggaccagatactttaaactatgtgaaaaagtacttgaggcttaaatccacatttttgttttacgatttcgacaatctcatctctgctgctgcctctgaagacaagcaacctctcactgatttagccaacagattgttcgacaatttcgaaaagcttgaagatgcagctaagacgaagaacttagcagagacggaatcgtgttataaagatacaaagtttcttcttcaagaggtaatgaccagaatggcatgatcctggttcggtttataccggtttacttgctattgatgatcctacatggttgataactctgtggtcataaattgtaatctttgcggaaaaatattgagatctagtaatcaaaaaaaaaaaatgtaatgtatagacc

SEQ ID NO: 87354 - protein, 234 aa, Arabidopsis thaliana; identical to SEQ ID NO: 29280
  peptide (1)..(234): Ceres Seq. ID no. 12700234

SEQ ID NO: 87355 - protein, 220 aa, Arabidopsis thaliana; identical to SEQ ID NO: 29281
  peptide (1)..(220): Ceres Seq. ID no. 12700235

SEQ ID NO: 87356 - protein, 169 aa, Arabidopsis thaliana; identical to SEQ ID NO: 29282
  peptide (1)..(169): Ceres Seq. ID no. 12700236

SEQ ID NO: 87357 - DNA, 2151 bp, Arabidopsis thaliana
  misc_feature (1)..(2151): Ceres Seq. ID no. 12700257
  misc_feature (1)..(2151): Ortholog of  Ceres SEQ ID NO 13595870 as cited in SEQ ID NO 62101
  misc_feature (1)..(2151): Ortholog of  Ceres SEQ ID NO 13590241 as cited in SEQ ID NO 63878
  misc_feature (1)..(2151): Ortholog of  Ceres SEQ ID NO 13657939 as cited in SEQ ID NO 66349
atggggaggagaggtcgcggcggcggcggtggtatgggcggaggaatcaatcgtagatatctgagtcaagttatggatacgtgcggcaaggatttatctacggcggaggacatcgttgatgatcttcgttccaggtacggcaattttgcgaggttgactcggcaagtgcttctactcaatgtcaggcaagtccttaatgttagaaacaacaagagggttaaagacgaagatgaagatgacaacattggagatgaggaaggttctgcttctcagaggaagaaacagagacgggttgatgagaaagaggagaaattgcagcgagcggagcagtcgcatttaaggaagaggaatatggaacttgagggtactaaaggacctacttttaaagactttggtgggattaagaaaatattggatgaattggagatgaatgttctattccccattctcaatcctgagccgtttaagaagattggagtgaagccaccaagtgggattctatttcatggaccacctggctgtgggaagactaagttggccaatgccattgccaatgaagctggtgttccgttttataagatttcagccacagaggtgatttctggtgtttctggtgcttctgaagagaatatcagagagctcttttctaaagcatataggactgcgccttcgattgtgtttatcgatgagattgatgcgattggttcaaagagagagaatcagcaaagagagatggagaagcggatagtaacacaattgttgacttgtatggatggacctggtaacaaaggcgataaaaatgctcctgattctagtgctggttttgttcttgtcattggagctacaaataggcctgatgctcttgatcctgctttgaggagaagtggacgatttgaaactgagatcgctctaactgctccagatgaagacgcaagggctgagatactctctgttgtagcccaaaaacttagattagaaggaccctttgacaagaaaagaatagctcgtttaacaccgggttttgttggagctgatttggagagtgttgcttacttggctggcaggaaagccattaagagaatcttggattcaaggaaatctgaacagtctggggacggtgaagacgataaatcttggctgaggatgccctggccagaagaagagttggaaaagctctttgtcaaaatgtctgatttcgaggaagcagtgaatctagttcaggcatctttaacaagagaaggattctctatcgtgcctgatgtcaagtgggatgatgttggtggacttgaccatctacgacttcaattcaaccgttatatagtgaggcctatcaaaaagcctgatatttataaggcttttggggtagacttagagacagggtttttgctctatggaccaccgggttgtggcaagacattgattgcaaaggcagctgctaacgaggctggagctaatttcatgcacatcaagggtgccgaacttctaaataaatacgttggagaaagtgagcttgctattcgtacgttgtttcagcgagctcggacatgtgcaccatgtgtaatcttctttgatgaggtggatgctttgacaacaagtcgtggcaaagaaggtgcttgggttgttgaacggcttttgaaccagtttcttgttgagctggatggtggagagaggcgtaatgtatatgtaattggagctacaaacaggccagatgtagttgatcctgctttcttgagaccgggtagatttgggaatcttctttatgtacccctccccaacgcagatgagcgtgcttcaattctaaaagctattgcaaggaagaaaccgatagatcctagtgttgatctggatggaattgcaaagaataactgtgaaggtttcagcggagctgatctcgcacacttggtgcaaaaagctacattccaagcagtggaggagatgataggctccagtgagtcgtctgaagatgatgttacagatataacgcagtgtacaatcaagacgaggcatttcgagcaagccttgtccttagtctcaccatctgtgaacaaacagcaaagaagacactatgacgcactatcaacaaagcttcaagaaagcgttgggaggaacactgaacaagtcaccatagggccatcttttaccctcgagtaa

SEQ ID NO: 87358 - protein, 716 aa, Arabidopsis thaliana
  peptide (1)..(716): Ceres Seq. ID no. 12700258
MGRRGRGGGGGMGGGINRRYLSQVMDTCGKDLSTAEDIVDDLRSRYGNFARLTRQVLLLNVRQVLNVRNNKRVKDEDEDDNIGDEEGSASQRKKQRRVDEKEEKLQRAEQSHLRKRNMELEGTKGPTFKDFGGIKKILDELEMNVLFPILNPEPFKKIGVKPPSGILFHGPPGCGKTKLANAIANEAGVPFYKISATEVISGVSGASEENIRELFSKAYRTAPSIVFIDEIDAIGSKRENQQREMEKRIVTQLLTCMDGPGNKGDKNAPDSSAGFVLVIGATNRPDALDPALRRSGRFETEIALTAPDEDARAEILSVVAQKLRLEGPFDKKRIARLTPGFVGADLESVAYLAGRKAIKRILDSRKSEQSGDGEDDKSWLRMPWPEEELEKLFVKMSDFEEAVNLVQASLTREGFSIVPDVKWDDVGGLDHLRLQFNRYIVRPIKKPDIYKAFGVDLETGFLLYGPPGCGKTLIAKAAANEAGANFMHIKGAELLNKYVGESELAIRTLFQRARTCAPCVIFFDEVDALTTSRGKEGAWVVERLLNQFLVELDGGERRNVYVIGATNRPDVVDPAFLRPGRFGNLLYVPLPNADERASILKAIARKKPIDPSVDLDGIAKNNCEGFSGADLAHLVQKATFQAVEEMIGSSESSEDDVTDITQCTIKTRHFEQALSLVSPSVNKQQRRHYDALSTKLQESVGRNTEQVTIGPSFTLE

SEQ ID NO: 87359 - protein, 705 aa, Arabidopsis thaliana
  peptide (1)..(705): Ceres Seq. ID no. 12700259
MGGGINRRYLSQVMDTCGKDLSTAEDIVDDLRSRYGNFARLTRQVLLLNVRQVLNVRNNKRVKDEDEDDNIGDEEGSASQRKKQRRVDEKEEKLQRAEQSHLRKRNMELEGTKGPTFKDFGGIKKILDELEMNVLFPILNPEPFKKIGVKPPSGILFHGPPGCGKTKLANAIANEAGVPFYKISATEVISGVSGASEENIRELFSKAYRTAPSIVFIDEIDAIGSKRENQQREMEKRIVTQLLTCMDGPGNKGDKNAPDSSAGFVLVIGATNRPDALDPALRRSGRFETEIALTAPDEDARAEILSVVAQKLRLEGPFDKKRIARLTPGFVGADLESVAYLAGRKAIKRILDSRKSEQSGDGEDDKSWLRMPWPEEELEKLFVKMSDFEEAVNLVQASLTREGFSIVPDVKWDDVGGLDHLRLQFNRYIVRPIKKPDIYKAFGVDLETGFLLYGPPGCGKTLIAKAAANEAGANFMHIKGAELLNKYVGESELAIRTLFQRARTCAPCVIFFDEVDALTTSRGKEGAWVVERLLNQFLVELDGGERRNVYVIGATNRPDVVDPAFLRPGRFGNLLYVPLPNADERASILKAIARKKPIDPSVDLDGIAKNNCEGFSGADLAHLVQKATFQAVEEMIGSSESSEDDVTDITQCTIKTRHFEQALSLVSPSVNKQQRRHYDALSTKLQESVGRNTEQVTIGPSFTLE

SEQ ID NO: 87360 - protein, 692 aa, Arabidopsis thaliana
  peptide (1)..(692): Ceres Seq. ID no. 12700260
MDTCGKDLSTAEDIVDDLRSRYGNFARLTRQVLLLNVRQVLNVRNNKRVKDEDEDDNIGDEEGSASQRKKQRRVDEKEEKLQRAEQSHLRKRNMELEGTKGPTFKDFGGIKKILDELEMNVLFPILNPEPFKKIGVKPPSGILFHGPPGCGKTKLANAIANEAGVPFYKISATEVISGVSGASEENIRELFSKAYRTAPSIVFIDEIDAIGSKRENQQREMEKRIVTQLLTCMDGPGNKGDKNAPDSSAGFVLVIGATNRPDALDPALRRSGRFETEIALTAPDEDARAEILSVVAQKLRLEGPFDKKRIARLTPGFVGADLESVAYLAGRKAIKRILDSRKSEQSGDGEDDKSWLRMPWPEEELEKLFVKMSDFEEAVNLVQASLTREGFSIVPDVKWDDVGGLDHLRLQFNRYIVRPIKKPDIYKAFGVDLETGFLLYGPPGCGKTLIAKAAANEAGANFMHIKGAELLNKYVGESELAIRTLFQRARTCAPCVIFFDEVDALTTSRGKEGAWVVERLLNQFLVELDGGERRNVYVIGATNRPDVVDPAFLRPGRFGNLLYVPLPNADERASILKAIARKKPIDPSVDLDGIAKNNCEGFSGADLAHLVQKATFQAVEEMIGSSESSEDDVTDITQCTIKTRHFEQALSLVSPSVNKQQRRHYDALSTKLQESVGRNTEQVTIGPSFTLE

SEQ ID NO: 87361 - DNA, 2174 bp, Arabidopsis thaliana
  misc_feature (1)..(2174): Ceres Seq. ID no. 12700336
  misc_feature (1)..(2174): Ortholog of  Ceres SEQ ID NO 13532807 as cited in SEQ ID NO 53012
  misc_feature (1)..(2174): Ortholog of  Ceres SEQ ID NO 13663060 as cited in SEQ ID NO 60964
  misc_feature (1)..(2174): Ortholog of  Ceres SEQ ID NO 13500573 as cited in SEQ ID NO 67431
  misc_feature (1)..(2174): Ortholog of  Ceres SEQ ID NO 13656501 as cited in SEQ ID NO 69206
atgggtgctagtcacagcaccaacgttaataatcatcctcattctcggaatgcttctaatcatcctctgaccaacagtaacagcaccagctctcgtcactctgcttcatcaagtgatcgcttatctgttagtaatttacggtctcagctcacaactatttacagaaatcaggaagaagaggaagaagaagaagaagaagaagaagaggaagaagaaggaggaaaagagaaaagagcagaagaagaagcgaaaagtttctcccttgttagagattttgatttgtctggtttgaactgcattagggtttctagaaggaattatattctcatggatcctcataaaaaggttgcactggagactgagttctttacagaatacggtgaagctagccgataccaaatccaagaagttatagggaaaggaagttacggtgttgtggcatctgcaatcgacacacattcaggcgaaaaggttgccattaagaaaatcaatgatgtgtttgagcacgtctctgatgcaacgcggattctaagagagatcaagcttctcaggttgctccgccatcctgatatagtggagataaagcatgtaatgcttcctccttcacgccgtgagttcagagacatttatgttgttttcgagttgatggaatcagatcttcaccaagttatcaaggcgaacgatgatcttacacctgagcactaccagtttttcctctaccagcttcttcgtggtctgaagttcatacacacagctaatgtgtttcatcgtgatttgaagcctaaaaatattctagccaactctgattgcaagttgaagatttgcgactttgggcttgctcgagtgtcctttaatgatgcaccttcggctatattctggactgactatgttgctacaagatggtaccgtgcgccagaactttgtggctctttcttctccaaatatactcctgccattgatatatggagcataggatgcatatttgcagaaatgctcactgggaagccattgtttcctgggaagaatgtggtgcaccaattggatattatgactgatttgcttggtactcctcctcccgaagctattgcaaggattcgtaatgaaaaggcgaggagatatctcggcaatatgaggagaaaaccgccagttccattcactcacaaatttcctcatgtagacccattggcccttcgcttactgcaccgtcttcttgcatttgatcccaaagaccgtccctcagctgaagaggcactggcagatccttacttctatggtctggcaaacgttgatcgggaaccatctactcaaccgattccgaaactcgagtttgagtttgaaagaaggaagataacaaaagaagatgtgagagaattgatctacagagagatattagagtatcatcctcagatgctgcaagaatatcttcgaggtggagaacagactagcttcatgtacccaagtggtgttgatcgctttaagagacaatttgctcatcttgaggaaaattacggtaagggtgagaaaggctcacctcttcaacgccaacacgcttccttgcctagagagcgagtccctgctcctaagaaagagaatggatcacataatcacgatatcgagaacagatccatagcgtctttagtcacgaccctcgaaagccctccaacgtcacaacacgaggggtcagactacaggaatgggacgagccagacgggttacagcgctcgcagcttgctgaaaagtgccagcatcagtgcatctaaatgcattggcatgaaaccaagaaacaagtccgagtacggggaatcaaacaatgatacggttgatgctctgtctcaaaaggtcgcggctctccacacttgacttgtttcagagattgaggattgaaacttgttgctaacagtagacggctgattctacaagtcttgtacacatctctcagagaagacgaagaagaagtctgatcttgatagagatattgagagacatgactcatgagctatgaacaaaacaacttaaccttcattggtcttcaatttgtccatcaagtcgagttgtattaaaaatggatggagaatataattaaagaagaattgtgttaacccctggatttatgcctgacaagtatttgactttatcaggcattataaattatagttaaagtgtgtgttttcttc

SEQ ID NO: 87362 - protein, 619 aa, Arabidopsis thaliana
  peptide (1)..(619): Ceres Seq. ID no. 12700337
MGASHSTNVNNHPHSRNASNHPLTNSNSTSSRHSASSSDRLSVSNLRSQLTTIYRNQEEEEEEEEEEEEEEEGGKEKRAEEEAKSFSLVRDFDLSGLNCIRVSRRNYILMDPHKKVALETEFFTEYGEASRYQIQEVIGKGSYGVVASAIDTHSGEKVAIKKINDVFEHVSDATRILREIKLLRLLRHPDIVEIKHVMLPPSRREFRDIYVVFELMESDLHQVIKANDDLTPEHYQFFLYQLLRGLKFIHTANVFHRDLKPKNILANSDCKLKICDFGLARVSFNDAPSAIFWTDYVATRWYRAPELCGSFFSKYTPAIDIWSIGCIFAEMLTGKPLFPGKNVVHQLDIMTDLLGTPPPEAIARIRNEKARRYLGNMRRKPPVPFTHKFPHVDPLALRLLHRLLAFDPKDRPSAEEALADPYFYGLANVDREPSTQPIPKLEFEFERRKITKEDVRELIYREILEYHPQMLQEYLRGGEQTSFMYPSGVDRFKRQFAHLEENYGKGEKGSPLQRQHASLPRERVPAPKKENGSHNHDIENRSIASLVTTLESPPTSQHEGSDYRNGTSQTGYSARSLLKSASISASKCIGMKPRNKSEYGESNNDTVDALSQKVAALHT

SEQ ID NO: 87363 - protein, 510 aa, Arabidopsis thaliana
  peptide (1)..(510): Ceres Seq. ID no. 12700338
MDPHKKVALETEFFTEYGEASRYQIQEVIGKGSYGVVASAIDTHSGEKVAIKKINDVFEHVSDATRILREIKLLRLLRHPDIVEIKHVMLPPSRREFRDIYVVFELMESDLHQVIKANDDLTPEHYQFFLYQLLRGLKFIHTANVFHRDLKPKNILANSDCKLKICDFGLARVSFNDAPSAIFWTDYVATRWYRAPELCGSFFSKYTPAIDIWSIGCIFAEMLTGKPLFPGKNVVHQLDIMTDLLGTPPPEAIARIRNEKARRYLGNMRRKPPVPFTHKFPHVDPLALRLLHRLLAFDPKDRPSAEEALADPYFYGLANVDREPSTQPIPKLEFEFERRKITKEDVRELIYREILEYHPQMLQEYLRGGEQTSFMYPSGVDRFKRQFAHLEENYGKGEKGSPLQRQHASLPRERVPAPKKENGSHNHDIENRSIASLVTTLESPPTSQHEGSDYRNGTSQTGYSARSLLKSASISASKCIGMKPRNKSEYGESNNDTVDALSQKVAALHT

SEQ ID NO: 87364 - protein, 422 aa, Arabidopsis thaliana
  peptide (1)..(422): Ceres Seq. ID no. 12700339
MLPPSRREFRDIYVVFELMESDLHQVIKANDDLTPEHYQFFLYQLLRGLKFIHTANVFHRDLKPKNILANSDCKLKICDFGLARVSFNDAPSAIFWTDYVATRWYRAPELCGSFFSKYTPAIDIWSIGCIFAEMLTGKPLFPGKNVVHQLDIMTDLLGTPPPEAIARIRNEKARRYLGNMRRKPPVPFTHKFPHVDPLALRLLHRLLAFDPKDRPSAEEALADPYFYGLANVDREPSTQPIPKLEFEFERRKITKEDVRELIYREILEYHPQMLQEYLRGGEQTSFMYPSGVDRFKRQFAHLEENYGKGEKGSPLQRQHASLPRERVPAPKKENGSHNHDIENRSIASLVTTLESPPTSQHEGSDYRNGTSQTGYSARSLLKSASISASKCIGMKPRNKSEYGESNNDTVDALSQKVAALHT

SEQ ID NO: 87365 - DNA, 981 bp, Arabidopsis thaliana
  misc_feature (1)..(981): Ceres Seq. ID no. 12700356
  misc_feature (1)..(981): Ortholog of  Ceres SEQ ID NO 12613953 as cited in SEQ ID NO 68388
atggccgagggactcgtattgaagggcattatgcgcgcccacaccgacattgtcacggccatcgctacgccgatcgacaattccgacatcatcgtcacagcgtcgcgtgacaaatccatcatcctctggaaactcacaaaggacgataagtcttacggtgttgctcagcgtaggctcacaggtcactctcacttcgtggaagatgttgttctctcatcggacggtcagtttgcactctccggaagctgggacggtgagctccgtctctgggatcttgccacgggagaaacaactcgtcgattcgttggtcatacgaaagatgtgctctctgttgcattctctactgataaccggcagatcgtgtctgcttctcgtgatcgtacgattaagctttggaacacacttggtgagtgtaagtataccatctctgaaggtgatggtcacaaggaatgggttagttgtgttaggtttagtcctaatactcttgtaccaactattgtatctgcttcttgggataaaactgtgaaagtttggaatctccagaactgtaagctgaggaactctcttgttggtcactctggttacctcaacactgttgctgtctcgcctgatggttcgctatgcgccagtggtgggaaagatggtgttatcttgttgtgggatttggctgaaggaaagaagctttactcgcttgaggcgggttcgattattcactcgctttgcttcagtcctaacagatactggttgtgtgctgctactgagaatagcattaggatttgggatcttgagagcaagtctgttgttgaggacttgaaggttgatctcaagtctgaggcagagaagaatgaaggtggtgttggaactggtaaccagaagaaggttatctactgcacaagcttgaactggagtgcagatggaagcacattgttcagtggttacactgatggagttgtcagggtctggggtattggtcgttactag

SEQ ID NO: 87366 - protein, 326 aa, Arabidopsis thaliana; identical to SEQ ID NO: 77148
  peptide (1)..(326): Ceres Seq. ID no. 12700357

SEQ ID NO: 87367 - protein, 316 aa, Arabidopsis thaliana; identical to SEQ ID NO: 77149
  peptide (1)..(316): Ceres Seq. ID no. 12700358

SEQ ID NO: 87368 - DNA, 1749 bp, Arabidopsis thaliana
  misc_feature (1)..(1749): Ceres Seq. ID no. 12700582
  misc_feature (1)..(1749): Ortholog of  Ceres SEQ ID NO 14314070 as cited in SEQ ID NO 56946
  misc_feature (1)..(1749): Ortholog of  Ceres SEQ ID NO 14302852 as cited in SEQ ID NO 64814
  misc_feature (1)..(1749): Ortholog of  Ceres SEQ ID NO 13598593 as cited in SEQ ID NO 64978
  misc_feature (1)..(1749): Ortholog of  Ceres SEQ ID NO 14303067 as cited in SEQ ID NO 67078
  misc_feature (1)..(1749): Ortholog of  Ceres SEQ ID NO 13595992 as cited in SEQ ID NO 68401
atggatctagctaaacacacaagacttcaaatattgggatgcatactcctggcatcacttgcattaacaatggccgatacacccccgggcatagccaagaacccaagccacgcaacatgtaagatcaagaagtacaaacattgttacaacttggaacatgtttgtcccaagttttgccctgactcttgccatgtcgaatgtgcttcttgcaaacccatatgtggtcctccttcccctggcgacgatggtggcggcgatgacagtggtggtgatgacggtggatacactcctcctgctcctgttccaccagtttcaccaccacctcctacaccttccgtgccaagccctactccaccagtttcaccaccgcctccaactcctacaccatctgtgccaagtcccactccaccagtttcaccaccacctccaactcctacaccgtctgtgccaagtcccactccaccagtttcaccaccacctccgactcctacaccttccgtgccaagtcccaccccaccagtttcaccaccacctccgactcctacaccttctgtgccaagtcccactccaccagttcctactgatcctatgccaagtccccctccgccagtttcaccaccgcctccaactcctacaccatctgtgccaagtcctcctgatgttactcccactcctcctacgccatctgtgccaagtcctcctgatgttactcccactcctcctacgccatccgtgccaagtcctcctgatgttactcccactcctcctacgccaccttccgtcccaactccttccggctctcccccttacgttcccccgccatcagacgaagaggaagcagcaggtgccaaaagggtcaggtgtaagaagcagcgctctccatgttacggagttgaatacacttgccccgccgattgtccccgttcttgtcaagtggattgcgtcacttgcaagcctgtttgcaattgcgacaagcctggatctgtttgccaagacccacgtttcatcggaggagatggtctaaccttttacttccacggcaagaaagactccaacttctgccttatctctgatcctaaccttcacatcaacgctcatttcatcggtaaacgtagagctggtatggcacgtgacttcacatgggtccaatccattgccatactcttcggcactcaccgtttatacgtcggagccctaaagactgccacgtgggatgattccgttgaccggattgccgtctctttcgacggaaatgttatctcacttcctcagctagacggtgccaggtggacttcttcccctggtgtataccctgaggtctcggtcaagcgagtcaacactgatactaacaatcttgaggttgaagtagagggtttgcttaagatcacagcaagagtggtgccaataacaatggaagattcaagaatccatggctacgacgtgaaggaagacgactgtctagctcaccttgacctaggcttcaagttccaagaccttagcgataatgtcgatggtgttttgggacagacttataggtctaactacgttagccgagttaagattggagtccacatgcctgtgatgggtggtgacagagaatttcagaccaccggactttttgcacctgactgttcagccgcaaggttcaccggtaacggagacagcaacaatggccggagcaaattggagctccctgagatgagttgtgccagtggcttaggtggcaagggagtggtttgcaagagataa

SEQ ID NO: 87369 - protein, 582 aa, Arabidopsis thaliana
  peptide (1)..(582): Ceres Seq. ID no. 12700583
MDLAKHTRLQILGCILLASLALTMADTPPGIAKNPSHATCKIKKYKHCYNLEHVCPKFCPDSCHVECASCKPICGPPSPGDDGGGDDSGGDDGGYTPPAPVPPVSPPPPTPSVPSPTPPVSPPPPTPTPSVPSPTPPVSPPPPTPTPSVPSPTPPVSPPPPTPTPSVPSPTPPVSPPPPTPTPSVPSPTPPVPTDPMPSPPPPVSPPPPTPTPSVPSPPDVTPTPPTPSVPSPPDVTPTPPTPSVPSPPDVTPTPPTPPSVPTPSGSPPYVPPPSDEEEAAGAKRVRCKKQRSPCYGVEYTCPADCPRSCQVDCVTCKPVCNCDKPGSVCQDPRFIGGDGLTFYFHGKKDSNFCLISDPNLHINAHFIGKRRAGMARDFTWVQSIAILFGTHRLYVGALKTATWDDSVDRIAVSFDGNVISLPQLDGARWTSSPGVYPEVSVKRVNTDTNNLEVEVEGLLKITARVVPITMEDSRIHGYDVKEDDCLAHLDLGFKFQDLSDNVDGVLGQTYRSNYVSRVKIGVHMPVMGGDREFQTTGLFAPDCSAARFTGNGDSNNGRSKLELPEMSCASGLGGKGVVCKR

SEQ ID NO: 87370 - protein, 559 aa, Arabidopsis thaliana
  peptide (1)..(559): Ceres Seq. ID no. 12700584
MADTPPGIAKNPSHATCKIKKYKHCYNLEHVCPKFCPDSCHVECASCKPICGPPSPGDDGGGDDSGGDDGGYTPPAPVPPVSPPPPTPSVPSPTPPVSPPPPTPTPSVPSPTPPVSPPPPTPTPSVPSPTPPVSPPPPTPTPSVPSPTPPVSPPPPTPTPSVPSPTPPVPTDPMPSPPPPVSPPPPTPTPSVPSPPDVTPTPPTPSVPSPPDVTPTPPTPSVPSPPDVTPTPPTPPSVPTPSGSPPYVPPPSDEEEAAGAKRVRCKKQRSPCYGVEYTCPADCPRSCQVDCVTCKPVCNCDKPGSVCQDPRFIGGDGLTFYFHGKKDSNFCLISDPNLHINAHFIGKRRAGMARDFTWVQSIAILFGTHRLYVGALKTATWDDSVDRIAVSFDGNVISLPQLDGARWTSSPGVYPEVSVKRVNTDTNNLEVEVEGLLKITARVVPITMEDSRIHGYDVKEDDCLAHLDLGFKFQDLSDNVDGVLGQTYRSNYVSRVKIGVHMPVMGGDREFQTTGLFAPDCSAARFTGNGDSNNGRSKLELPEMSCASGLGGKGVVCKR

SEQ ID NO: 87371 - protein, 386 aa, Arabidopsis thaliana
  peptide (1)..(386): Ceres Seq. ID no. 12700585
MPSPPPPVSPPPPTPTPSVPSPPDVTPTPPTPSVPSPPDVTPTPPTPSVPSPPDVTPTPPTPPSVPTPSGSPPYVPPPSDEEEAAGAKRVRCKKQRSPCYGVEYTCPADCPRSCQVDCVTCKPVCNCDKPGSVCQDPRFIGGDGLTFYFHGKKDSNFCLISDPNLHINAHFIGKRRAGMARDFTWVQSIAILFGTHRLYVGALKTATWDDSVDRIAVSFDGNVISLPQLDGARWTSSPGVYPEVSVKRVNTDTNNLEVEVEGLLKITARVVPITMEDSRIHGYDVKEDDCLAHLDLGFKFQDLSDNVDGVLGQTYRSNYVSRVKIGVHMPVMGGDREFQTTGLFAPDCSAARFTGNGDSNNGRSKLELPEMSCASGLGGKGVVCKR

SEQ ID NO: 87372 - DNA, 1089 bp, Arabidopsis thaliana
  misc_feature (1)..(1089): Ceres Seq. ID no. 12700586
  misc_feature (1)..(1089): Ortholog of  Ceres SEQ ID NO 13502952 as cited in SEQ ID NO 62271
  misc_feature (1)..(1089): Ortholog of  Ceres SEQ ID NO 13502973 as cited in SEQ ID NO 68052
  misc_feature (1)..(1089): Ortholog of  Ceres SEQ ID NO 13596000 as cited in SEQ ID NO 68188
atggcggctactccaatcagagttatagtctcagctcttgtgatcctctcggtattactactttcctcgtctctgggagtcgccacagagacagaaattgagcggaacgagacagaggtgcggctgatgtacgagcaatggcttgtggagaatcgaaagaactataatggtcttggagagaaagagagacgattcaagatcttcaaagacaacttgaagtttgtcgatgaacacaattctgttccggatcggacttttgaagtagggttgaccaggttcgctgatctaacaaatgaagagtttagagcgatttatttaaggaagaagatggaaagaactaaagattcggtgaaaactgagagatatttgtacaaagaaggagatgttttgcctgatgaagtagattggagagcgaatggcgcagttgtttcagtcaaagatcaaggaaactgtggaagttgttgggcgttttctgcggttggagcagtggaagggatcaaccagatcactaccggagagttgatatctttgtcggagcaagaactcgttgactgtgacagaggttttgtcaacgctggatgtgatggaggtatcatgaactatgcttttgagttcattatgaaaaatggtggtattgagacagatcaagattacccttataacgccaacgatcttggcttgtgcaatgcagataagaataacaatactcgtgttgttacaattgatggttatgaagatgttcctagagacgatgagaagtctttgaaaaaggctgttgctcatcaacctgttagtgttgctattgaagctagtagccaagctttccagctttacaaatccggtgtgatgacaggaacatgtggaatatctttggaccatggtgtagtagtggttggatatggatccacaagtggtgaagattattggatcattcgcaattcatgggggttgaattggggagatagcggttacgttaagctccaacgtaacatcgatgatccatttgggaaatgtggtatagcaatgatgccttcttacccgaccaaatcatcattcccatcgtcatttgatttgttgtctgagatttga

SEQ ID NO: 87373 - protein, 362 aa, Arabidopsis thaliana
  peptide (1)..(362): Ceres Seq. ID no. 12700587
MAATPIRVIVSALVILSVLLLSSSLGVATETEIERNETEVRLMYEQWLVENRKNYNGLGEKERRFKIFKDNLKFVDEHNSVPDRTFEVGLTRFADLTNEEFRAIYLRKKMERTKDSVKTERYLYKEGDVLPDEVDWRANGAVVSVKDQGNCGSCWAFSAVGAVEGINQITTGELISLSEQELVDCDRGFVNAGCDGGIMNYAFEFIMKNGGIETDQDYPYNANDLGLCNADKNNNTRVVTIDGYEDVPRDDEKSLKKAVAHQPVSVAIEASSQAFQLYKSGVMTGTCGISLDHGVVVVGYGSTSGEDYWIIRNSWGLNWGDSGYVKLQRNIDDPFGKCGIAMMPSYPTKSSFPSSFDLLSEI

SEQ ID NO: 87374 - protein, 320 aa, Arabidopsis thaliana
  peptide (1)..(320): Ceres Seq. ID no. 12700588
MYEQWLVENRKNYNGLGEKERRFKIFKDNLKFVDEHNSVPDRTFEVGLTRFADLTNEEFRAIYLRKKMERTKDSVKTERYLYKEGDVLPDEVDWRANGAVVSVKDQGNCGSCWAFSAVGAVEGINQITTGELISLSEQELVDCDRGFVNAGCDGGIMNYAFEFIMKNGGIETDQDYPYNANDLGLCNADKNNNTRVVTIDGYEDVPRDDEKSLKKAVAHQPVSVAIEASSQAFQLYKSGVMTGTCGISLDHGVVVVGYGSTSGEDYWIIRNSWGLNWGDSGYVKLQRNIDDPFGKCGIAMMPSYPTKSSFPSSFDLLSEI

SEQ ID NO: 87375 - protein, 253 aa, Arabidopsis thaliana
  peptide (1)..(253): Ceres Seq. ID no. 12700589
MERTKDSVKTERYLYKEGDVLPDEVDWRANGAVVSVKDQGNCGSCWAFSAVGAVEGINQITTGELISLSEQELVDCDRGFVNAGCDGGIMNYAFEFIMKNGGIETDQDYPYNANDLGLCNADKNNNTRVVTIDGYEDVPRDDEKSLKKAVAHQPVSVAIEASSQAFQLYKSGVMTGTCGISLDHGVVVVGYGSTSGEDYWIIRNSWGLNWGDSGYVKLQRNIDDPFGKCGIAMMPSYPTKSSFPSSFDLLSEI

SEQ ID NO: 87376 - DNA, 658 bp, Arabidopsis thaliana
  misc_feature (1)..(658): Ceres Seq. ID no. 12700598
  misc_feature (1)..(658): Ortholog of  Ceres SEQ ID NO 12608953 as cited in SEQ ID NO 51227
actcattattgttatttttgacagagagaaatttctcagttacgcttcatcctcctctaagagatcttttttctatcttgggtagtagagagaaatggcgggtcggggaaaacaacttggatctggtgcagcgaagaagtctacttctcgtagtagcaaggctgggcttcaattccctgttggtcgtatcgctcgatttttgaaagccggtaagtacgccgagcgtgttggtgccggagctccggtctatctcgccgccgttcttgaatacctcgccgctgaggtacttgagcttgctgggaacgcagcgagagacaacaagaagacccgtatagttccacgacacattcagcttgctgtgaggaatgatgaggagctaagcaagttgcttggagatgtgacaattgctaatggaggagtgatgcctaacatccacaatctccttctccccaagaaggctggttcatctaagcctactgaagaagattaggttcattacgaagatagggaaagctggaaactggttgatatcagataatgcttaggattgttttttttttcatttgcttttcctctgcagcaatggaagctgtgtggttgtactagttgttaaggttacctttgtttcactttatgtgaatatatgaagaaattgttc

SEQ ID NO: 87377 - protein, 131 aa, Arabidopsis thaliana; identical to SEQ ID NO: 29862
  peptide (1)..(131): Ceres Seq. ID no. 12700599

SEQ ID NO: 87378 - protein, 66 aa, Arabidopsis thaliana
  peptide (1)..(66): Ceres Seq. ID no. 12700600
SLLLFLTERNFSVTLHPPLRDLFSILGSREKWRVGENNLDLVQRRSLLLVVARLGFNSLLVVSLDF

SEQ ID NO: 87379 - DNA, 1509 bp, Arabidopsis thaliana
  misc_feature (1)..(1509): Ceres Seq. ID no. 12700601
  misc_feature (1)..(1509): Ortholog of  Ceres SEQ ID NO 15169244 as cited in SEQ ID NO 58988
aattatttttcccattctcttcactatctctctccctagaaaattgccagaagaagaaggttctccaattcaaaaaaatagaaactcgctaccattcatttcaaaaaatttcttgttaagttacgtttttttctttttttttgcttctttcgttcttattgtcttagaagacaaaagagactagagaggatagaaaaatggaagcttcaagcacaagaagcgagaagaagaagaagaagaagacgatacagagagaaaacaccgatactcaaaagaaaaaaaagctacccagtgtttggttttcacttaagaaatctctcccctgcaaatctgatgtctccgatgtccacattccgagatccaaaaaagagctagctcccatatccactaagagaacaacaacctcctccggcggcggggtcggcggcaggtccggttgttcaagatccatagccaatcttaaagacgtaatccatggaaaccaacggcatttagagaagccgctttgctctagccctcgttctataggaagcagcgagtttctcaatcccattactcacgatgtaatctttagcaactccacctgcgagctcaagatcaccgccgccggagcaacagaattcgtcgggaatcttagaccagggacgccggtcaattactcttcttcacgccgtagccaaacttcgagaaaggcttcttctttagatagagaaggattagggtttcaccagagcagaagagagaatgatagagaagccgccattaacggagacaattcctctgtttcttgccataaatgcggcgagaaatttagcaaactcgaagctgcagaagctcatcatctaaccaaacacgccgtgactgagctaatggaaggagactcgtcgaggagaatagtggagataatctgcagaacaagctggttaaagacagagaatcaaggagggagaatcgatcggattttgaaagtacacaacatgcaaaaaaccttagcgagattcgaagaatacagagatacagtgaagatcagagcaagcaagttacaaaagaaacatccgagatgtatcgccgacggaaacgagcttctcaggtttcacggcaccactgtggcttgcgctttggggataaacgggtcgacgagtctgtgttcgtcggaaaagtgttgcgtttgtcggattatacgaaatgggttctcggcgaaacgggagatgaataacggaattggggtttttactgcgtcgacgagtgagagggcgtttgagtctattgtgattggagatggtggtggtggtgatcggaaggcgttgattgtgtgtcgagtgattgccgggagggttcatcggccggtggagaatgtagaggagatgggtgggttgttgagtgggtttgattcattggctggtaaagttgggttgtacacaaatgttgaggagctctatttgctcaattctcgagctttgcttccttgttttgtgctaatctgcaaaccttaaatcaaacttttgaggt

SEQ ID NO: 87380 - protein, 431 aa, Arabidopsis thaliana
  peptide (1)..(431): Ceres Seq. ID no. 12700602
MEASSTRSEKKKKKKTIQRENTDTQKKKKLPSVWFSLKKSLPCKSDVSDVHIPRSKKELAPISTKRTTTSSGGGVGGRSGCSRSIANLKDVIHGNQRHLEKPLCSSPRSIGSSEFLNPITHDVIFSNSTCELKITAAGATEFVGNLRPGTPVNYSSSRRSQTSRKASSLDREGLGFHQSRRENDREAAINGDNSSVSCHKCGEKFSKLEAAEAHHLTKHAVTELMEGDSSRRIVEIICRTSWLKTENQGGRIDRILKVHNMQKTLARFEEYRDTVKIRASKLQKKHPRCIADGNELLRFHGTTVACALGINGSTSLCSSEKCCVCRIIRNGFSAKREMNNGIGVFTASTSERAFESIVIGDGGGGDRKALIVCRVIAGRVHRPVENVEEMGGLLSGFDSLAGKVGLYTNVEELYLLNSRALLPCFVLICKP

SEQ ID NO: 87381 - DNA, 1508 bp, Arabidopsis thaliana
  misc_feature (1)..(1508): Ceres Seq. ID no. 12700621
  misc_feature (1)..(1508): Ortholog of  Ceres SEQ ID NO 14306667 as cited in SEQ ID NO 52925
  misc_feature (1)..(1508): Ortholog of  Ceres SEQ ID NO 15177522 as cited in SEQ ID NO 0
atccactacgatagttttcttcagcaatcacactctctctttgttcgagtaccaacaatggcccttcaagctgcttctttggtctcctctgctttctctgttcgcaaagatgcgaagttgaatgcttcttcatcatctttcaaggactcgagtctttttggtgcctccattaccgaccaaatcaaatccgaacatggatcttcctcgttaagattcaagagagaacagagcttaaggaatctagcaattcgagcccaaaccgctgcgacttcaagccctacagttacaaaatccgtggacggcaagaaaacgttgaggaaaggaaatgtggtggtcactggagcctcgtctgggttaggtctagccacggctaaagctctagctgagacagggaaatggaacgtgataatggcgtgcagagacttccttaaagccgagagagctgctaaatccgtagggatgcctaaagacagctacacagtgatgcatttagacttagcctcgttggacagcgtgagacagtttgttgataatttcaggagaacagagacgcctctcgatgttttggtctgcaatgctgcggtttatttcccgacagctaaagagcctacttacagtgctgaagggtttgagcttagtgttgcgacgaaccatttgggacattttcttctcgcaaggttgttgcttgatgacttgaagaaatctgattacccttcaaagcgtctcatcatcgtcggatccattaccgggaacacgaatacattggcgggtaatgtaccaccgaaggcgaatctcggtgatttgaggggtttagccggcggattaaacggtttaaacagctcagctatgattgatggaggagatttcgacggtgcaaaggcttacaaagacagtaaagtctgcaatatgttgacaatgcaagagtttcacaggcgtttccatgaagaaactggagtcactttcgcttcgctttaccccggttgcatcgcctccacaggtttattccgagagcacattcctctcttccgtgccctcttccctccctttcagaagtacatcactaaaggatatgtctccgaaacagagtcaggcaaaagacttgctcaggtggtgagtgatccaagcttgacgaaatcaggggtttattggagctggaacaatgcttcggcttcttttgagaaccagttatcagaagaagcaagtgacgttgagaaggctcgtaaagtgtgggagatcagtgagaagctcgtgggcttggcctaataaacttgaagtctgttaaatttgatgacacctctcggtaccaatcgaagaaatctagtgaatttccgggatttttagatatctgattctgttgcgaagtttttttatccttattagtgtctgttgagtgtagattgcttggcgagtagcccacaataaagaaataaaaatggcgaatctttagctttatttactctgtttttcatcgaaacagattcagtaatatatactctgttttttcatct

SEQ ID NO: 87382 - protein, 420 aa, Arabidopsis thaliana; identical to SEQ ID NO: 23614
  peptide (1)..(420): Ceres Seq. ID no. 12700622

SEQ ID NO: 87383 - protein, 401 aa, Arabidopsis thaliana; identical to SEQ ID NO: 23615
  peptide (1)..(401): Ceres Seq. ID no. 12700623

SEQ ID NO: 87384 - protein, 284 aa, Arabidopsis thaliana; identical to SEQ ID NO: 23616
  peptide (1)..(284): Ceres Seq. ID no. 12700624

SEQ ID NO: 87385 - DNA, 1362 bp, Arabidopsis thaliana
  misc_feature (1)..(1362): Ceres Seq. ID no. 12700637
  misc_feature (1)..(1362): Ortholog of  Ceres SEQ ID NO 13582281 as cited in SEQ ID NO 51014
  misc_feature (1)..(1362): Ortholog of  Ceres SEQ ID NO 15176795 as cited in SEQ ID NO 54453
  misc_feature (1)..(1362): Ortholog of  Ceres SEQ ID NO 14310508 as cited in SEQ ID NO 58965
  misc_feature (1)..(1362): Ortholog of  Ceres SEQ ID NO 12617417 as cited in SEQ ID NO 65089
atgggtggtttgaagtttcatgtacttatgtatccatggttcgcaacaggccatatgaccccgttcctttttcttgccaacaaattggctgagaaaggtcatacggtcactttcttgcttcccaagaaatctctgaaacagttggaacatttcaatctgtttccacacaacattgtctttcgctctgtcaccgtccctcatgtggatggtctccccgttggcacagagacagcctctgagatccctgtgacatcaactgatctcttgatgtctgctatggatctcacacgtgatcaagttgaagctgtggtccgagccgttgaaccggacctgatcttctttgactttgctcattggattccagaagtagctagggacttcggccttaagactgtaaagtacgtcgtggtgtctgcatcgactatagctagtatgcttgtcccaggtggtgagttaggtgttcctccaccgggatatccatcatcaaaggtgctgcttcgtaaacaagatgcttacactatgaagaaactggagcctacaaatacaatcgatgtcggaccaaacctcttggaacgagtcactacaagtcttatgaactctgatgtcattgcgataaggacagccagagaaatcgaaggaaacttttgcgactatatagaaaaacattgcaggaaaaaggttctcttgacaggtccggtgttccctgagccagacaagactagagagctagaggaacgatgggttaagtggctaagtgggtatgaaccagactcagtggtgttttgtgcactgggctcacaagtcattttagagaaagatcaattccaagaactctgcttaggaatggagctaacaggttcaccgtttcttgtagcggttaagccccctagaggctcatcaacgattcaagaagcacttcctgaaggattcgaagagcgggttaaaggaagaggccttgtttggggaggatgggttcaacaaccattgatattgtctcatccatcagtcgggtgctttgtgagccattgtgggtttggatcaatgtgggagtctttgctgagtgattgtcagatagtcttagtaccacagttgggtgatcaagtcctgaacacaagattgctgagtgacgaactcaaggtttcggttgaagtggcaagagaggaaacaggatggttctcgaaagagagcttgtgcgatgctgtcaatagtgtgatgaaaagggacagcgagctcgggaacctggtgaggaagaatcacaccaagtggagggagacagtagctagtcctggactaatgactggttatgtcgatgctttcgtagagtcattgcaggatcttgtctctgggaccacccatgactga

SEQ ID NO: 87386 - protein, 453 aa, Arabidopsis thaliana
  peptide (1)..(453): Ceres Seq. ID no. 12700638
MGGLKFHVLMYPWFATGHMTPFLFLANKLAEKGHTVTFLLPKKSLKQLEHFNLFPHNIVFRSVTVPHVDGLPVGTETASEIPVTSTDLLMSAMDLTRDQVEAVVRAVEPDLIFFDFAHWIPEVARDFGLKTVKYVVVSASTIASMLVPGGELGVPPPGYPSSKVLLRKQDAYTMKKLEPTNTIDVGPNLLERVTTSLMNSDVIAIRTAREIEGNFCDYIEKHCRKKVLLTGPVFPEPDKTRELEERWVKWLSGYEPDSVVFCALGSQVILEKDQFQELCLGMELTGSPFLVAVKPPRGSSTIQEALPEGFEERVKGRGLVWGGWVQQPLILSHPSVGCFVSHCGFGSMWESLLSDCQIVLVPQLGDQVLNTRLLSDELKVSVEVAREETGWFSKESLCDAVNSVMKRDSELGNLVRKNHTKWRETVASPGLMTGYVDAFVESLQDLVSGTTHD

SEQ ID NO: 87387 - protein, 444 aa, Arabidopsis thaliana
  peptide (1)..(444): Ceres Seq. ID no. 12700639
MYPWFATGHMTPFLFLANKLAEKGHTVTFLLPKKSLKQLEHFNLFPHNIVFRSVTVPHVDGLPVGTETASEIPVTSTDLLMSAMDLTRDQVEAVVRAVEPDLIFFDFAHWIPEVARDFGLKTVKYVVVSASTIASMLVPGGELGVPPPGYPSSKVLLRKQDAYTMKKLEPTNTIDVGPNLLERVTTSLMNSDVIAIRTAREIEGNFCDYIEKHCRKKVLLTGPVFPEPDKTRELEERWVKWLSGYEPDSVVFCALGSQVILEKDQFQELCLGMELTGSPFLVAVKPPRGSSTIQEALPEGFEERVKGRGLVWGGWVQQPLILSHPSVGCFVSHCGFGSMWESLLSDCQIVLVPQLGDQVLNTRLLSDELKVSVEVAREETGWFSKESLCDAVNSVMKRDSELGNLVRKNHTKWRETVASPGLMTGYVDAFVESLQDLVSGTTHD

SEQ ID NO: 87388 - protein, 435 aa, Arabidopsis thaliana
  peptide (1)..(435): Ceres Seq. ID no. 12700640
MTPFLFLANKLAEKGHTVTFLLPKKSLKQLEHFNLFPHNIVFRSVTVPHVDGLPVGTETASEIPVTSTDLLMSAMDLTRDQVEAVVRAVEPDLIFFDFAHWIPEVARDFGLKTVKYVVVSASTIASMLVPGGELGVPPPGYPSSKVLLRKQDAYTMKKLEPTNTIDVGPNLLERVTTSLMNSDVIAIRTAREIEGNFCDYIEKHCRKKVLLTGPVFPEPDKTRELEERWVKWLSGYEPDSVVFCALGSQVILEKDQFQELCLGMELTGSPFLVAVKPPRGSSTIQEALPEGFEERVKGRGLVWGGWVQQPLILSHPSVGCFVSHCGFGSMWESLLSDCQIVLVPQLGDQVLNTRLLSDELKVSVEVAREETGWFSKESLCDAVNSVMKRDSELGNLVRKNHTKWRETVASPGLMTGYVDAFVESLQDLVSGTTHD

SEQ ID NO: 87389 - DNA, 1388 bp, Arabidopsis thaliana
  misc_feature (1)..(1388): Ceres Seq. ID no. 12700657
  misc_feature (1)..(1388): Ortholog of  Ceres SEQ ID NO 14315234 as cited in SEQ ID NO 52501
aaaacagcctggtaagcttcttcgttttcccttctagagaccattgattatcataattgttctacaaactttagctttttcattagtctctcgatctacttgatcgttgtcacttagcaaccctaatttctgggagaatcgtccctgcagtattacccatcccgatgagtgttaaggttggatgatagaagacattttttgaccttctcttacaatgactacacgaagaaatggcgtttccaggcatcagcggtttgagagttttcgcggtgaaggaccaaattggatcttaattgctgggggtgctttgttgagtacattgtccattcgttttggctacaaattaaagcagtctattgactccaaacctcctcattccaatgccactggtggattaaaacctaatggaacaaccgacagaggaagatttaagggctgctgcttgcattctaatgcatcaccctgtgaaaggaataatgattgttgctttcactgcactcccggaactgagaatggggaaggaaatcatgctacaaatgagcaaatggcagagtccagtacttctctgcctcttgtgacagttcctgcttcatcatatagcaaagagagtgcagtcgtatggggatcttctcctgaccacctggaagtgccgatgaaagcataccatcaacattcgacctgctcagattctccttgcgtatctgaatccggctcagacatcttcagcaagcgagaagtaatacagaaactgaggcaacagctgaagagacgtgacgacatgatagttgaaatgcaggaacagattctagagctgcaaaactcgctaaacgcccagatgggacactctagccatatccaaacacagctagacgcaacaaacagggacctgtttgaatcagaaagagaagtccagagactgagaaaggcaatcgctgatcactgcgtgggacacacaggtagcaatggttggagtggcgatgtgaacagcgaaaacaactacgagtcaccagaaaatggaataagggatggagaaagaatagagatgttgagaaaagaagtgggtgagcttaaagaagtgatagatgggaaagagtatctacttaggagctataaggagcagaaaacagagcttttgcagaaggtaaaagagttgcagcagagactggactcgcagctcccaaacattttgtaggtgaagaaggttaggcattgtgcattcttaccactctcttttgtttccccgagtaaaaaatatgaatctttgttcaaaaatatctcaatttctccggggaaacttatcaactgactacattgttttgggtgtcaattatgattttatccaaattgtttttttctcttggtgaagtggatattcgaaagttgcaaac

SEQ ID NO: 87390 - protein, 325 aa, Arabidopsis thaliana
  peptide (1)..(325): Ceres Seq. ID no. 12700658
MTTRRNGVSRHQRFESFRGEGPNWILIAGGALLSTLSIRFGYKLKQSIDSKPPHSNATGGLKPNGTTDRGRFKGCCLHSNASPCERNNDCCFHCTPGTENGEGNHATNEQMAESSTSLPLVTVPASSYSKESAVVWGSSPDHLEVPMKAYHQHSTCSDSPCVSESGSDIFSKREVIQKLRQQLKRRDDMIVEMQEQILELQNSLNAQMGHSSHIQTQLDATNRDLFESEREVQRLRKAIADHCVGHTGSNGWSGDVNSENNYESPENGIRDGERIEMLRKEVGELKEVIDGKEYLLRSYKEQKTELLQKVKELQQRLDSQLPNIL

SEQ ID NO: 87391 - protein, 215 aa, Arabidopsis thaliana
  peptide (1)..(215): Ceres Seq. ID no. 12700659
MAESSTSLPLVTVPASSYSKESAVVWGSSPDHLEVPMKAYHQHSTCSDSPCVSESGSDIFSKREVIQKLRQQLKRRDDMIVEMQEQILELQNSLNAQMGHSSHIQTQLDATNRDLFESEREVQRLRKAIADHCVGHTGSNGWSGDVNSENNYESPENGIRDGERIEMLRKEVGELKEVIDGKEYLLRSYKEQKTELLQKVKELQQRLDSQLPNIL

SEQ ID NO: 87392 - protein, 179 aa, Arabidopsis thaliana
  peptide (1)..(179): Ceres Seq. ID no. 12700660
MKAYHQHSTCSDSPCVSESGSDIFSKREVIQKLRQQLKRRDDMIVEMQEQILELQNSLNAQMGHSSHIQTQLDATNRDLFESEREVQRLRKAIADHCVGHTGSNGWSGDVNSENNYESPENGIRDGERIEMLRKEVGELKEVIDGKEYLLRSYKEQKTELLQKVKELQQRLDSQLPNIL

SEQ ID NO: 87393 - DNA, 1712 bp, Arabidopsis thaliana
  misc_feature (1)..(1712): Ceres Seq. ID no. 12700669
  misc_feature (1)..(1712): Ortholog of  Ceres SEQ ID NO 15176053 as cited in SEQ ID NO 57792
  misc_feature (1)..(1712): Ortholog of  Ceres SEQ ID NO 14308023 as cited in SEQ ID NO 65865
  misc_feature (1)..(1712): Ortholog of  Ceres SEQ ID NO 14307972 as cited in SEQ ID NO 66436
  misc_feature (1)..(1712): Ortholog of  Ceres SEQ ID NO 12614670 as cited in SEQ ID NO 68565
atggaacttataagcacaatcaatctcttaacaatcgttcttctactcttcgttgtttccaagatatggaaagcttgttggatcctccttttgcgtccattgatgctatcaaaaagattcaagaaacaaggaatctcaggaccaaagtacaaaatcttgtacggaaacctcagcgagataaagaagatgaagaaagaagctgacctttgtgttctggatcccaattccaatgatattttccctcgtgtgtttcctcagtatcaccaatggatgtctcaatacggagatacatttctattctggactggaacaaaaccaactatatacatctcaaatcatgagctagcgaaacaggtcttgtcgagcaagttcggtttcactattataccggtgaaacgacctgaggtcttcatacttttcggtaaaggactttcctttatccaaggtgatgattggattcgccatagacgaatcttgaaccctgctttctccatggatcggctcaaggccatgacacaaccgatgggagattgcaccttacggatatttgaggagtggagaaaacagagaagaaatggtgaagtgttgatcaagattgagataagcaaagagttccataaactgaccgctgacattatagcaactactgcgtttggaagtagttatgccgaaggaatcgaattgtgtaggtcacaaacagagcttgagaagtattatattagttctctcactaacgttttcatccccggaactcaataccttcctacgcctaccaaccttaaactatgggagctccataagaaagtgaagaactcgatcaaaagaatcatagattcaaggctaaaatcaaaatgtaagacctatggctatggggacgatcttctaggggtcatgttgactgctgcgaaatctaacgagtatgagagaaagatgagaatggatgagatcatagaggaatgcaagaatttctactatgcagggcaaggaactacttcgattctattgacatggactacgatgttactaagcttgcaccaaggttggcaagagaaactcagagaagaggtttttaatgaatgtggtaaagataaaatcccagatacagacaccttctctaaactcaaattgatgaacatggtgttgatggagtcgcttcgtctgtacggacccgtgattaaaatttcccgagaggcaacacaagatatgaaggtaggacacttggagatcccaaagggcacaagcattatcataccgttactgaagatgcacagagacaaggccatatggggcgaagacgccgaacaattcaatcccttgagattcgaaaacggcatttctcaagccaccattcacccaaacgctctcctcccgttctcaatcggaccaagagcttgcattgccaaaaactttgccatggtcgaagccaagaccgttctcactatgatccttcaacagttccagcttagcctctcccccgagtataagcacacgccagttgatcacttcgatctcttcccgcaatacggcctacccgtaatgcttcaccctctcggatagtagttctgaatggtgaggaagagaaaaccaagaatctcaacggatatttggtcacgttatgttctatatttggccttggtcacaaataaagttcagatgatataattcaatagtggataagtcaaattcaaagtgaagtaaggaataaaaatctg

SEQ ID NO: 87394 - protein, 518 aa, Arabidopsis thaliana
  peptide (1)..(518): Ceres Seq. ID no. 12700670
MELISTINLLTIVLLLFVVSKIWKACWILLLRPLMLSKRFKKQGISGPKYKILYGNLSEIKKMKKEADLCVLDPNSNDIFPRVFPQYHQWMSQYGDTFLFWTGTKPTIYISNHELAKQVLSSKFGFTIIPVKRPEVFILFGKGLSFIQGDDWIRHRRILNPAFSMDRLKAMTQPMGDCTLRIFEEWRKQRRNGEVLIKIEISKEFHKLTADIIATTAFGSSYAEGIELCRSQTELEKYYISSLTNVFIPGTQYLPTPTNLKLWELHKKVKNSIKRIIDSRLKSKCKTYGYGDDLLGVMLTAAKSNEYERKMRMDEIIEECKNFYYAGQGTTSILLTWTTMLLSLHQGWQEKLREEVFNECGKDKIPDTDTFSKLKLMNMVLMESLRLYGPVIKISREATQDMKVGHLEIPKGTSIIIPLLKMHRDKAIWGEDAEQFNPLRFENGISQATIHPNALLPFSIGPRACIAKNFAMVEAKTVLTMILQQFQLSLSPEYKHTPVDHFDLFPQYGLPVMLHPLG

SEQ ID NO: 87395 - protein, 484 aa, Arabidopsis thaliana
  peptide (1)..(484): Ceres Seq. ID no. 12700671
MLSKRFKKQGISGPKYKILYGNLSEIKKMKKEADLCVLDPNSNDIFPRVFPQYHQWMSQYGDTFLFWTGTKPTIYISNHELAKQVLSSKFGFTIIPVKRPEVFILFGKGLSFIQGDDWIRHRRILNPAFSMDRLKAMTQPMGDCTLRIFEEWRKQRRNGEVLIKIEISKEFHKLTADIIATTAFGSSYAEGIELCRSQTELEKYYISSLTNVFIPGTQYLPTPTNLKLWELHKKVKNSIKRIIDSRLKSKCKTYGYGDDLLGVMLTAAKSNEYERKMRMDEIIEECKNFYYAGQGTTSILLTWTTMLLSLHQGWQEKLREEVFNECGKDKIPDTDTFSKLKLMNMVLMESLRLYGPVIKISREATQDMKVGHLEIPKGTSIIIPLLKMHRDKAIWGEDAEQFNPLRFENGISQATIHPNALLPFSIGPRACIAKNFAMVEAKTVLTMILQQFQLSLSPEYKHTPVDHFDLFPQYGLPVMLHPLG

SEQ ID NO: 87396 - protein, 456 aa, Arabidopsis thaliana
  peptide (1)..(456): Ceres Seq. ID no. 12700672
MKKEADLCVLDPNSNDIFPRVFPQYHQWMSQYGDTFLFWTGTKPTIYISNHELAKQVLSSKFGFTIIPVKRPEVFILFGKGLSFIQGDDWIRHRRILNPAFSMDRLKAMTQPMGDCTLRIFEEWRKQRRNGEVLIKIEISKEFHKLTADIIATTAFGSSYAEGIELCRSQTELEKYYISSLTNVFIPGTQYLPTPTNLKLWELHKKVKNSIKRIIDSRLKSKCKTYGYGDDLLGVMLTAAKSNEYERKMRMDEIIEECKNFYYAGQGTTSILLTWTTMLLSLHQGWQEKLREEVFNECGKDKIPDTDTFSKLKLMNMVLMESLRLYGPVIKISREATQDMKVGHLEIPKGTSIIIPLLKMHRDKAIWGEDAEQFNPLRFENGISQATIHPNALLPFSIGPRACIAKNFAMVEAKTVLTMILQQFQLSLSPEYKHTPVDHFDLFPQYGLPVMLHPLG

SEQ ID NO: 87397 - DNA, 1824 bp, Arabidopsis thaliana
  misc_feature (1)..(1824): Ceres Seq. ID no. 12700687
  misc_feature (1)..(1824): Ortholog of  Ceres SEQ ID NO 12587870 as cited in SEQ ID NO 63523
atgaatccaactccaactccaagctccgccggcaacagtgtctgcacagatgaattgaccaaccttcccccggaggactcgccactcgacagcgagaaggatgatagcgttgacttcagccaggagcaaggatcggagtcaaatgaagctattgacactgagaatggttcaagatccgtagacaagaaccaatactctgaaactgaagttgtagttagagcaaaagatttacagacagaacctgattcactggatgatgatgtggagattgtgatcaaaaaccaacataagtattacatatactgcccttgctgtggtgaagatatcaccaaaacagtcaagctcgtgaagatatcagatcccaaacacacaaaagaccatgacaaagctgttgacagtgacactgagaatggttcaaaatccaaagacaagaacacaaaggttccatcatggttctctgattttattcagccgctgttttcttctgaagacagaggaaagaaaggggttgttgattcagagttactaggaacttacgaagatctcggtatcattggtgaggaaccgagcatagatgtcagtaacgagaaagacagaccgagttttccaaagtggtacctcgatgtttttgcttggttattcctctgtattattattgctctttctgtcctttcgacttctccaccgcctttcattcaaccacatctgcaattaccatctatgcctacattgaggatgccttctgcttctgtacttttgttacttcccacatctgcggtgttgcttctcttcattatttcaatgaggtcccgtttcactccgagatatcacaaggagaaaggcgaggtcgttcccaagtctactgattccaagtctcacgatgaccaagctgcaaatactgatcaagattttgacaagaaaacagacaacaaaagaaatcgcctaactcctatatacccttcatcactagagaaaccttccaagcaaactgtcaataaggaaactcaaaatcacgataaagaagctgcagatcctgaccaagatgtagacaaggaaacagagaaccaaaaaagtcacctaactccgatatatccttcaccactggagcaaccttccaagcaaattatcaataaggaaactcaaacagaacctatgttgccacctaatgctcaatcagagatcccaaatagtgttgaaccacgcaaaggcggtaataaagtagaaattctgaaaagtattgtgtatggaggtcttacagaatccatcacaagcctatgcacggtaacatctgcggcagcttctggtgcttcaactctgaacgttttagccttgggagttgccaatttgtcaagcggtcttcttctgactgttcacagcctccaagaactaataaacgagaaacccagaaaacaaaccaacactgatgattctccagaagaaggagaaggagaagaagatcgatacgaggaagtactcgggagaagagagtattcgaggattcacagagtgatcgcaatctcttctttcgtcatcttcggattgatcccacctttagtatacggtttctcgtttcgaaaaaagatggaaaagagacaagagtacaaggttttagctgtttacgcagtgtctctactctgcatcgtcttgctctcaatagcgaaagcttacgtgtcgaagaaacgcgattatgtcaagactctgtttcggtacacgacgacggcgacgacggcgtcgggattctctcaatttgtgggatacttggtgagtcaatggcttgagaaaagcgggttttatgatgattctccagaaactcaacgagtttga

SEQ ID NO: 87398 - protein, 607 aa, Arabidopsis thaliana; identical to SEQ ID NO: 81028
  peptide (1)..(607): Ceres Seq. ID no. 12700688

SEQ ID NO: 87399 - protein, 367 aa, Arabidopsis thaliana
  peptide (1)..(367): Ceres Seq. ID no. 12700689
MPTLRMPSASVLLLLPTSAVLLLFIISMRSRFTPRYHKEKGEVVPKSTDSKSHDDQAANTDQDFDKKTDNKRNRLTPIYPSSLEKPSKQTVNKETQNHDKEAADPDQDVDKETENQKSHLTPIYPSPLEQPSKQIINKETQTEPMLPPNAQSEIPNSVEPRKGGNKVEILKSIVYGGLTESITSLCTVTSAAASGASTLNVLALGVANLSSGLLLTVHSLQELINEKPRKQTNTDDSPEEGEGEEDRYEEVLGRREYSRIHRVIAISSFVIFGLIPPLVYGFSFRKKMEKRQEYKVLAVYAVSLLCIVLLSIAKAYVSKKRDYVKTLFRYTTTATTASGFSQFVGYLVSQWLEKSGFYDDSPETQRV

SEQ ID NO: 87400 - protein, 362 aa, Arabidopsis thaliana
  peptide (1)..(362): Ceres Seq. ID no. 12700690
MPSASVLLLLPTSAVLLLFIISMRSRFTPRYHKEKGEVVPKSTDSKSHDDQAANTDQDFDKKTDNKRNRLTPIYPSSLEKPSKQTVNKETQNHDKEAADPDQDVDKETENQKSHLTPIYPSPLEQPSKQIINKETQTEPMLPPNAQSEIPNSVEPRKGGNKVEILKSIVYGGLTESITSLCTVTSAAASGASTLNVLALGVANLSSGLLLTVHSLQELINEKPRKQTNTDDSPEEGEGEEDRYEEVLGRREYSRIHRVIAISSFVIFGLIPPLVYGFSFRKKMEKRQEYKVLAVYAVSLLCIVLLSIAKAYVSKKRDYVKTLFRYTTTATTASGFSQFVGYLVSQWLEKSGFYDDSPETQRV

SEQ ID NO: 87401 - DNA, 913 bp, Arabidopsis thaliana
  misc_feature (1)..(913): Ceres Seq. ID no. 12700691
  misc_feature (1)..(913): Ortholog of  Ceres SEQ ID NO 12635907 as cited in SEQ ID NO 525
  misc_feature (1)..(913): Ortholog of  Ceres SEQ ID NO 13503463 as cited in SEQ ID NO 65057
atggcgattatctctgagatggaggaggcgagaccctcgatggtgcctttcaccgcaagttttgatccttcaaacccaatagcgtttttggagaaagttcttgatgttatcgggaaagagagcaattttctgaagaaagacacggctgagaaggagatcgtggctgctgttatggctgcgaagcagaggttgagggaagcggagaagaagaagttggagaaggagagtgttaagtccatggaggttgagaagccaaagaaagatagcttgaagcccacggagctggagaagccgaaggaggagagcttgatggcgactgatcccatggagattgagaagcctaaagaggagaaagaatcgggtcccatcgttcctaacaaaggcaatgggcttgattttgagaaatactcatggggacagaatctccaagaggtcacaattaacattccaatgccggaaggcactaaatcaaggtctgttacctgtgaaatcaagaagaaccgtctcaaagttggtctcaaagggcaagacctaatcgtcgatggagaattcttcaattctgtcaagcctgacgactgcttctggaatatcgaggatcaaaagatgatatcggtgctcttgacaaagcaagaccagatggagtggtggaagtattgtgtgaagggagaacctgagatagacactcagaaagttgaaccagagaccagcaaacttggtgatctcgaccctgaaactcgcgcatccgttgagaagatgatgtttgatcaaaggcagaagcagatgggactaccaaggagtgatgagatagagaagaaagatatgctcaagaagttcatggctcagaatcctgggatggacttctctaatgcaaagtttaactgatgatctttatccaactcttcttcgtttaagg

SEQ ID NO: 87402 - protein, 293 aa, Arabidopsis thaliana
  peptide (1)..(293): Ceres Seq. ID no. 12700692
MAIISEMEEARPSMVPFTASFDPSNPIAFLEKVLDVIGKESNFLKKDTAEKEIVAAVMAAKQRLREAEKKKLEKESVKSMEVEKPKKDSLKPTELEKPKEESLMATDPMEIEKPKEEKESGPIVPNKGNGLDFEKYSWGQNLQEVTINIPMPEGTKSRSVTCEIKKNRLKVGLKGQDLIVDGEFFNSVKPDDCFWNIEDQKMISVLLTKQDQMEWWKYCVKGEPEIDTQKVEPETSKLGDLDPETRASVEKMMFDQRQKQMGLPRSDEIEKKDMLKKFMAQNPGMDFSNAKFN

SEQ ID NO: 87403 - protein, 287 aa, Arabidopsis thaliana
  peptide (1)..(287): Ceres Seq. ID no. 12700693
MEEARPSMVPFTASFDPSNPIAFLEKVLDVIGKESNFLKKDTAEKEIVAAVMAAKQRLREAEKKKLEKESVKSMEVEKPKKDSLKPTELEKPKEESLMATDPMEIEKPKEEKESGPIVPNKGNGLDFEKYSWGQNLQEVTINIPMPEGTKSRSVTCEIKKNRLKVGLKGQDLIVDGEFFNSVKPDDCFWNIEDQKMISVLLTKQDQMEWWKYCVKGEPEIDTQKVEPETSKLGDLDPETRASVEKMMFDQRQKQMGLPRSDEIEKKDMLKKFMAQNPGMDFSNAKFN

SEQ ID NO: 87404 - protein, 280 aa, Arabidopsis thaliana
  peptide (1)..(280): Ceres Seq. ID no. 12700694
MVPFTASFDPSNPIAFLEKVLDVIGKESNFLKKDTAEKEIVAAVMAAKQRLREAEKKKLEKESVKSMEVEKPKKDSLKPTELEKPKEESLMATDPMEIEKPKEEKESGPIVPNKGNGLDFEKYSWGQNLQEVTINIPMPEGTKSRSVTCEIKKNRLKVGLKGQDLIVDGEFFNSVKPDDCFWNIEDQKMISVLLTKQDQMEWWKYCVKGEPEIDTQKVEPETSKLGDLDPETRASVEKMMFDQRQKQMGLPRSDEIEKKDMLKKFMAQNPGMDFSNAKFN

SEQ ID NO: 87405 - DNA, 2499 bp, Arabidopsis thaliana
  misc_feature (1)..(2499): Ceres Seq. ID no. 12700699
  misc_feature (1)..(2499): Ortholog of  Ceres SEQ ID NO 13590241 as cited in SEQ ID NO 63878
  misc_feature (1)..(2499): Ortholog of  Ceres SEQ ID NO 13660597 as cited in SEQ ID NO 67655
  misc_feature (1)..(2499): Ortholog of  Ceres SEQ ID NO 15179308 as cited in SEQ ID NO 0
atggagcagaagagcgtgttgttttccgcgttaggggttggtgttgggttagggattggtctagcgtcgggtcagagtttgggtaaatgggcaaacgggtctatttctgcggaggatggactaaccggagaaaagattgagcaagagttggttaggcagatcgttgatggcagagagagtagtgtcactttcgacgagtttccttattacctaagtgagaaaactcggcttttattgacaagtgcagcttatgttcacctaaagcaatctgatatctcgaagcacacgcgtaatcttgcacctggaagtaaggccattcttctgtctggacctgctgaattctatcagcaaatgcttgcaaaagcattggctcattactttgaatcgaaattactgttactagatataaccgacttctctatcaagatacagagcaagtatggatgcgtcaagaaagaaccttctcacaagaggtctatttctgagttgacaatggacaaaatgtctaatttgatgggttctatctctgtgctctcccaaaaggaagctacaagagggaccttgcgtaggcacacaagtggcaacgatcttcattcaaggggctttgacgttacaagtcagcctccacgactcaagcggaatgcttctgctgcttctgatatgagtagcatatcatcccgttctgcaacttctgtttcagcttcaagcaaacgcagtgctaacttgtgctttgatgagagacttttccttcagtcactttacaaggtcttggtttcgatttcagaaaccaatcctataataatatacctgagggatgttgagaagctttgtcagtcagaaaggttctacaagttgttccagaggctcttgacgaagctttctggccctgttttggttctcggctcaagactattggaacccgaagatgactgtcaagaagtaggagagggcatttctgctttgtttccttacaacatcgagatcagaccgccagaggatgaaaatcaactcatgagctggaaaacgagatttgaagatgacatgaaagtgatacagtttcaagacaacaagaaccacatagccgaggttctagcggctaatgatcttgagtgtgatgacttaggttccatatgccatgcagatacaatgttcctaagcagtcacattgaggaaattgttgtttctgcaatctcctaccatctgatgaacaacaaagaacccgaatacaaaaacgggaggcttgtaatatcttctaatagcttgtcccatggactgaatatattacaggaaggtcaaggatgctttgaggactccttgaagctggacacaaacatcgactccaaggtagaagaaggtgaagggataacaaagagcgagtcaaaatctgagacaactgttccggaaaacaaaaatgaatcggatacatcaatcccggcagcaaaaaatgaatgccccctgcctccgaaagcacctgtacatgaggtggctcctgataatgaattcgagaagcgcataagaccagaggttatcccagcaaatgagattggtgtgacttttgctgatataggttcactggatgaaaccaaagaatcacttcaagagcttgtcatgcttcctcttcgtaggcctgacctgttcaaaggtggtcttctaaagccctgcagaggaatcctcctctttggaccacctggtactggaaaaactatgatggcaaaagccattgcgaacgaagctggggctagtttcataaatgtgtcgatgtccacaatcacttcaaaatggtttggagaagatgagaagaacgtgagagctttgttcaccctcgcggccaaagtgtctccaactattatatttgtggatgaagtggatagtatgctgggacagaggacaagagttggcgagcatgaagctatgaggaagatcaaaaatgagttcatgacacactgggatgggcttatgtcaaatgcgggtgaccgtattctcgttcttgcagcaacaaacagaccatttgatctcgatgaagctatcatcaggaggtttgagcgaagaatcatggtgggtcttccatcggtcgagagcagagagaagatcttgagaaccttattgtcaaaagagaaaacagagaatcttgatttccaagagcttgcgcagatgacagatggctatagtggaagtgatctcaagaacttttgcacaacagcagcatatcgaccagtgagggagctgataaagcaagagtgcttgaaagaccaggagaggaggaagagagaggaagcagagaagaatagtgaagaaggatctgaagcaaaagaagaagtatctgaagagagaggcataacgttgagacctttgagcatggaagacatgaaagtagctaaaagccaggttgctgctagttttgcagcagaaggagcaggaatgaacgaactcaagcagtggaatgatttgtatggagaaggaggctccaggaaaaaggaacagctctcttacttcctttaa

SEQ ID NO: 87406 - protein, 832 aa, Arabidopsis thaliana
  peptide (1)..(832): Ceres Seq. ID no. 12700700
MEQKSVLFSALGVGVGLGIGLASGQSLGKWANGSISAEDGLTGEKIEQELVRQIVDGRESSVTFDEFPYYLSEKTRLLLTSAAYVHLKQSDISKHTRNLAPGSKAILLSGPAEFYQQMLAKALAHYFESKLLLLDITDFSIKIQSKYGCVKKEPSHKRSISELTMDKMSNLMGSISVLSQKEATRGTLRRHTSGNDLHSRGFDVTSQPPRLKRNASAASDMSSISSRSATSVSASSKRSANLCFDERLFLQSLYKVLVSISETNPIIIYLRDVEKLCQSERFYKLFQRLLTKLSGPVLVLGSRLLEPEDDCQEVGEGISALFPYNIEIRPPEDENQLMSWKTRFEDDMKVIQFQDNKNHIAEVLAANDLECDDLGSICHADTMFLSSHIEEIVVSAISYHLMNNKEPEYKNGRLVISSNSLSHGLNILQEGQGCFEDSLKLDTNIDSKVEEGEGITKSESKSETTVPENKNESDTSIPAAKNECPLPPKAPVHEVAPDNEFEKRIRPEVIPANEIGVTFADIGSLDETKESLQELVMLPLRRPDLFKGGLLKPCRGILLFGPPGTGKTMMAKAIANEAGASFINVSMSTITSKWFGEDEKNVRALFTLAAKVSPTIIFVDEVDSMLGQRTRVGEHEAMRKIKNEFMTHWDGLMSNAGDRILVLAATNRPFDLDEAIIRRFERRIMVGLPSVESREKILRTLLSKEKTENLDFQELAQMTDGYSGSDLKNFCTTAAYRPVRELIKQECLKDQERRKREEAEKNSEEGSEAKEEVSEERGITLRPLSMEDMKVAKSQVAASFAAEGAGMNELKQWNDLYGEGGSRKKEQLSYFL

SEQ ID NO: 87407 - protein, 715 aa, Arabidopsis thaliana
  peptide (1)..(715): Ceres Seq. ID no. 12700701
MLAKALAHYFESKLLLLDITDFSIKIQSKYGCVKKEPSHKRSISELTMDKMSNLMGSISVLSQKEATRGTLRRHTSGNDLHSRGFDVTSQPPRLKRNASAASDMSSISSRSATSVSASSKRSANLCFDERLFLQSLYKVLVSISETNPIIIYLRDVEKLCQSERFYKLFQRLLTKLSGPVLVLGSRLLEPEDDCQEVGEGISALFPYNIEIRPPEDENQLMSWKTRFEDDMKVIQFQDNKNHIAEVLAANDLECDDLGSICHADTMFLSSHIEEIVVSAISYHLMNNKEPEYKNGRLVISSNSLSHGLNILQEGQGCFEDSLKLDTNIDSKVEEGEGITKSESKSETTVPENKNESDTSIPAAKNECPLPPKAPVHEVAPDNEFEKRIRPEVIPANEIGVTFADIGSLDETKESLQELVMLPLRRPDLFKGGLLKPCRGILLFGPPGTGKTMMAKAIANEAGASFINVSMSTITSKWFGEDEKNVRALFTLAAKVSPTIIFVDEVDSMLGQRTRVGEHEAMRKIKNEFMTHWDGLMSNAGDRILVLAATNRPFDLDEAIIRRFERRIMVGLPSVESREKILRTLLSKEKTENLDFQELAQMTDGYSGSDLKNFCTTAAYRPVRELIKQECLKDQERRKREEAEKNSEEGSEAKEEVSEERGITLRPLSMEDMKVAKSQVAASFAAEGAGMNELKQWNDLYGEGGSRKKEQLSYFL

SEQ ID NO: 87408 - protein, 668 aa, Arabidopsis thaliana
  peptide (1)..(668): Ceres Seq. ID no. 12700702
MDKMSNLMGSISVLSQKEATRGTLRRHTSGNDLHSRGFDVTSQPPRLKRNASAASDMSSISSRSATSVSASSKRSANLCFDERLFLQSLYKVLVSISETNPIIIYLRDVEKLCQSERFYKLFQRLLTKLSGPVLVLGSRLLEPEDDCQEVGEGISALFPYNIEIRPPEDENQLMSWKTRFEDDMKVIQFQDNKNHIAEVLAANDLECDDLGSICHADTMFLSSHIEEIVVSAISYHLMNNKEPEYKNGRLVISSNSLSHGLNILQEGQGCFEDSLKLDTNIDSKVEEGEGITKSESKSETTVPENKNESDTSIPAAKNECPLPPKAPVHEVAPDNEFEKRIRPEVIPANEIGVTFADIGSLDETKESLQELVMLPLRRPDLFKGGLLKPCRGILLFGPPGTGKTMMAKAIANEAGASFINVSMSTITSKWFGEDEKNVRALFTLAAKVSPTIIFVDEVDSMLGQRTRVGEHEAMRKIKNEFMTHWDGLMSNAGDRILVLAATNRPFDLDEAIIRRFERRIMVGLPSVESREKILRTLLSKEKTENLDFQELAQMTDGYSGSDLKNFCTTAAYRPVRELIKQECLKDQERRKREEAEKNSEEGSEAKEEVSEERGITLRPLSMEDMKVAKSQVAASFAAEGAGMNELKQWNDLYGEGGSRKKEQLSYFL

SEQ ID NO: 87409 - DNA, 1764 bp, Arabidopsis thaliana
  misc_feature (1)..(1764): Ceres Seq. ID no. 12700734
  misc_feature (1)..(1764): Ortholog of  Ceres SEQ ID NO 13586970 as cited in SEQ ID NO 0
atgaggttaagctcgatgagctccctacggaggaaatcggtggcgcgtgtgactaagaagagaaagaagaaatcagtatctgatttcgccggtgtggctaggattgttgagatttatagattggcgacgatgaggtataaaggtgatatcaatttgtggtttaggtatctcgagttttgtaaacagaagaggcatggaagaatgaaaaaggcattggctcaagcaataaggtttcatccaaaagtggctggagtgtggatatatgctgcatcttgggaatttgatagaaacttgaatgttacagcagctcgtgctcttatgctgaatgggctgagagtgtgttcaaactctgaagacctgtgggttgagtatctgcgaatggaacttacttttctaaataagctgaaagctcgtaaagttgcccttggtgaagataaaggaagtttggtgcgtgacacgaaaaccgttgaggatgagcaatggaaagatgagaacaaagagttatttatgtcgctagatgagaaagaaggaaatgaaaaagaagagaatgacgaggactctattgtcgaagatgttgaggatgtgactgagaaagttgatttcttaaaagagaaagggtccaatgttcttcagaccatctatagtggagccgttgaggctattccatctagttttgacttgaggaagcgttttttggagattctagaggcaacagacttagcgcattcagatgaaatgcgcaataccattctaagtgacctgaagcgtgatttttgcaatgaacctgaatactggaattggcttgcaagacatgaaatgagtggttgtattagcaatgaggcaggcctagagtttgcaaatcctcaaatgcaaaaggctattcaggtttttgaagaaggcttgcaaactgttacgtcaagttctatgtttgagatttatataaattttctgatggaggctattgtacagtcaaacggcgacgagaatgaaatctcctctttgtctaatccgatcatttcacatatcataaacgtgtaccaaaaggctgatgaaactggctgtttgactgaagagcttgctgatgaatatgtttctctgtacttgaaactggaaaagactcatgaagctcagaagctagcagaaaagctctgctctgaaaaatttgctggatcagctaagttgtggctttcaagagtttccattgaaataagatcactttcagagaactcatctcctagtaaagcagattttcagacagtctttgagctcctttcaaatgctttgaggaaagtaccgatctcagaatctgagagcttgtggctaatggcttttaatttctttgctcatcagcgaacttatttggacaaacttgtagagatgtccatcctatcagcaaccaaaagccatgggagcgaccatgtgttttctcttgcttccacagtggtgaaatttgttcttgaaacaaaaggggcccacagtgcgaggaagatatacaagaggttcttggctcttcctggtcccagtcttgttctatacaaaggttgcattgaaatagagaccaacctcatatcagtaggtgataaagatggtctcagtaatgcccggaagctgtatgattctgctgttgcaagttacggtcaagacgtggagctgtggaagaattactactcattggagacaaagctgggaacatcagagacagccaatggagtgtattggcgtgcgagaaagactctgaatgaatccgcggatttcatagtttga

SEQ ID NO: 87410 - protein, 587 aa, Arabidopsis thaliana
  peptide (1)..(587): Ceres Seq. ID no. 12700735
MRLSSMSSLRRKSVARVTKKRKKKSVSDFAGVARIVEIYRLATMRYKGDINLWFRYLEFCKQKRHGRMKKALAQAIRFHPKVAGVWIYAASWEFDRNLNVTAARALMLNGLRVCSNSEDLWVEYLRMELTFLNKLKARKVALGEDKGSLVRDTKTVEDEQWKDENKELFMSLDEKEGNEKEENDEDSIVEDVEDVTEKVDFLKEKGSNVLQTIYSGAVEAIPSSFDLRKRFLEILEATDLAHSDEMRNTILSDLKRDFCNEPEYWNWLARHEMSGCISNEAGLEFANPQMQKAIQVFEEGLQTVTSSSMFEIYINFLMEAIVQSNGDENEISSLSNPIISHIINVYQKADETGCLTEELADEYVSLYLKLEKTHEAQKLAEKLCSEKFAGSAKLWLSRVSIEIRSLSENSSPSKADFQTVFELLSNALRKVPISESESLWLMAFNFFAHQRTYLDKLVEMSILSATKSHGSDHVFSLASTVVKFVLETKGAHSARKIYKRFLALPGPSLVLYKGCIEIETNLISVGDKDGLSNARKLYDSAVASYGQDVELWKNYYSLETKLGTSETANGVYWRARKTLNESADFIV

SEQ ID NO: 87411 - protein, 582 aa, Arabidopsis thaliana
  peptide (1)..(582): Ceres Seq. ID no. 12700736
MSSLRRKSVARVTKKRKKKSVSDFAGVARIVEIYRLATMRYKGDINLWFRYLEFCKQKRHGRMKKALAQAIRFHPKVAGVWIYAASWEFDRNLNVTAARALMLNGLRVCSNSEDLWVEYLRMELTFLNKLKARKVALGEDKGSLVRDTKTVEDEQWKDENKELFMSLDEKEGNEKEENDEDSIVEDVEDVTEKVDFLKEKGSNVLQTIYSGAVEAIPSSFDLRKRFLEILEATDLAHSDEMRNTILSDLKRDFCNEPEYWNWLARHEMSGCISNEAGLEFANPQMQKAIQVFEEGLQTVTSSSMFEIYINFLMEAIVQSNGDENEISSLSNPIISHIINVYQKADETGCLTEELADEYVSLYLKLEKTHEAQKLAEKLCSEKFAGSAKLWLSRVSIEIRSLSENSSPSKADFQTVFELLSNALRKVPISESESLWLMAFNFFAHQRTYLDKLVEMSILSATKSHGSDHVFSLASTVVKFVLETKGAHSARKIYKRFLALPGPSLVLYKGCIEIETNLISVGDKDGLSNARKLYDSAVASYGQDVELWKNYYSLETKLGTSETANGVYWRARKTLNESADFIV

SEQ ID NO: 87412 - protein, 544 aa, Arabidopsis thaliana
  peptide (1)..(544): Ceres Seq. ID no. 12700737
MRYKGDINLWFRYLEFCKQKRHGRMKKALAQAIRFHPKVAGVWIYAASWEFDRNLNVTAARALMLNGLRVCSNSEDLWVEYLRMELTFLNKLKARKVALGEDKGSLVRDTKTVEDEQWKDENKELFMSLDEKEGNEKEENDEDSIVEDVEDVTEKVDFLKEKGSNVLQTIYSGAVEAIPSSFDLRKRFLEILEATDLAHSDEMRNTILSDLKRDFCNEPEYWNWLARHEMSGCISNEAGLEFANPQMQKAIQVFEEGLQTVTSSSMFEIYINFLMEAIVQSNGDENEISSLSNPIISHIINVYQKADETGCLTEELADEYVSLYLKLEKTHEAQKLAEKLCSEKFAGSAKLWLSRVSIEIRSLSENSSPSKADFQTVFELLSNALRKVPISESESLWLMAFNFFAHQRTYLDKLVEMSILSATKSHGSDHVFSLASTVVKFVLETKGAHSARKIYKRFLALPGPSLVLYKGCIEIETNLISVGDKDGLSNARKLYDSAVASYGQDVELWKNYYSLETKLGTSETANGVYWRARKTLNESADFIV

SEQ ID NO: 87413 - DNA, 1251 bp, Arabidopsis thaliana
  misc_feature (1)..(1251): Ceres Seq. ID no. 12700747
  misc_feature (1)..(1251): Ortholog of  Ceres SEQ ID NO 14314068 as cited in SEQ ID NO 52242
  misc_feature (1)..(1251): Ortholog of  Ceres SEQ ID NO 14314999 as cited in SEQ ID NO 52342
  misc_feature (1)..(1251): Ortholog of  Ceres SEQ ID NO 15177057 as cited in SEQ ID NO 55817
  misc_feature (1)..(1251): Ortholog of  Ceres SEQ ID NO 13585458 as cited in SEQ ID NO 60907
  misc_feature (1)..(1251): Ortholog of  Ceres SEQ ID NO 13598678 as cited in SEQ ID NO 61508
  misc_feature (1)..(1251): Ortholog of  Ceres SEQ ID NO 12625392 as cited in SEQ ID NO 63315
  misc_feature (1)..(1251): Ortholog of  Ceres SEQ ID NO 13598319 as cited in SEQ ID NO 68758
  misc_feature (1)..(1251): Ortholog of  Ceres SEQ ID NO 12589816 as cited in SEQ ID NO 0
acacataaactcactctcactctctcactgtcggcaaactaacttattcacttttccggcactgattctgctcgggaaaaacaactccggcacaaaatgcagctttttccagtcatgttagccacactctgcattgtcctgcagcttctcattggctcgtcagctttggctacgacaaatcgccacgtgtcaaactctcattggcttcccgcagtagctacatggtacggaagccccaacggtgacggcagcgacggaggagcgtgtggttacggtacgttggtggatgtgaagccgttacatgcgagggttggagcggtgaatccaattctcttcaaaaatggtgaaggttgcggagcttgttacaaggttcgatgcttggacaagagcatttgttcccggagagccgttaccgtcataattaccgatgagtgtcccggctgctctaaaaccagcactcactttgacctcagtggtgccgtctttggccggttagctattgccggagagtcagggcctctccgtaaccgtggactaatcccagtcatttatcgccggactgcatgcaaatatagagggaagaacatagcattccatgtgaacgaaggatcaactgatttttggctatctctgctggtcgagtttgaagatggagaaggagacattggctccatgcacattcgccaagcaggagccagggaatggttagagatgaagcatgtatggggagccaactggtgcatcattggagggccactcaagggaccattctccatcaagctcaccactttgtctgccggtaaaacactctctgccaccgacgttgtccctagaaactgggctcccaaagcaacttacagttcccgcctcaacttctcccctgtcctttgaaccatctcttctacatagtcaaagactattatagttctattactactactactcgtgtgatcgtttttttttagagagaaacagagtgactgctggccgtaggatggaaacagtaagaaaagtacatccgaatcaacggctattgcgttctctcctcttccttcttgtgatgtggatttgtgtgtgtgtgatgtgtcggtgagtgtgttatagaagtcactatagccatcttcaaaggggagatagagctaggagtagtatttggtggtgtcacgtcgtttgttttttctatataatttttgtcactatgtctttctattatgggacatggcataatatatcatatgaataatttatcac

SEQ ID NO: 87414 - protein, 264 aa, Arabidopsis thaliana; identical to SEQ ID NO: 22268
  peptide (1)..(264): Ceres Seq. ID no. 12700748

SEQ ID NO: 87415 - protein, 258 aa, Arabidopsis thaliana; identical to SEQ ID NO: 22269
  peptide (1)..(258): Ceres Seq. ID no. 12700749

SEQ ID NO: 87416 - DNA, 1350 bp, Arabidopsis thaliana
  misc_feature (1)..(1350): Ceres Seq. ID no. 12700761
  misc_feature (1)..(1350): Ortholog of  Ceres SEQ ID NO 14306538 as cited in SEQ ID NO 53117
atgaaccacaacagcaacctcgttcttccttcccatcaaaccgagacgcagacgcaagatgaaaccgatatcagcgtttggcgtttcaggggaagcgacaacgcagccaaagcctccagcgtcacgatgagagtcatcgtctacaagctcttcgatgaatgcagcctggatgtgaaaaagcctcttttaccccttgctcacggtgacccttctgtctacccttgttaccgcacctccatcctcgtcgagaacgccgtggtcgacgtccttcgctccggcaagggtaactcttacggccccgccgccggaattctcccagccagacaggcggtcgcagattacgtgaaccgagacttgacgaacaaggtaaagcctaatgatgtattcataactgtcggatgcaaccaagggatagaagtagttcttcagtcactggctcgaccaaacgctaacatccttctcccaaggcctagttaccctcactacgaggctcgtgccgtctacagtggactcgaggtccgcaagttcgatctccttccagagaaagaatgggagattgatctcccaggcatcgaagccatggcagatgagaacacagttgcaatggttatcataaaccctaacaacccctgtggaaatgtttactcttacgatcatcttaagaaggtggcggagacggctaagaagctgggaataatggtaatcacagacgaagtttattgccaaacaatcttcggagacaaaccttttgtcccaatgggggagttttcttcgataactccggttatcactttgggcggtatatcgaaaggatggattgttcctggttggagaattggctggatcgctttgaatgaccccagaggaattctcaagtccacagggatggtacagtccattcaacagaaccttgacataactccagatgctacaactattgttcaagctgcacttcctgagattttagggaaagcgaataaagagttgtttgccaagaagaattcgatgctgaaacaaaacgtggaattggtctgtgataggctcaaggagattccttgcttggtctgcaacaagaaacctgagtcatgcacttacttattgacgaagctgaagcttccattgttggaggacatagaagacgacatggatttctgtatgaagctagccaaagaagaaaacctcgtcttactaccaggagtggctttgggattgaagaactggataaggataacaattggagtagaagctcagatgctggaagatgcacttgagaggctcaatggcttctgcaaacgccatctcaagaaaacagaatcttcttttcaagctctgagcaatggcaaaatctaa

SEQ ID NO: 87417 - protein, 449 aa, Arabidopsis thaliana
  peptide (1)..(449): Ceres Seq. ID no. 12700762
MNHNSNLVLPSHQTETQTQDETDISVWRFRGSDNAAKASSVTMRVIVYKLFDECSLDVKKPLLPLAHGDPSVYPCYRTSILVENAVVDVLRSGKGNSYGPAAGILPARQAVADYVNRDLTNKVKPNDVFITVGCNQGIEVVLQSLARPNANILLPRPSYPHYEARAVYSGLEVRKFDLLPEKEWEIDLPGIEAMADENTVAMVIINPNNPCGNVYSYDHLKKVAETAKKLGIMVITDEVYCQTIFGDKPFVPMGEFSSITPVITLGGISKGWIVPGWRIGWIALNDPRGILKSTGMVQSIQQNLDITPDATTIVQAALPEILGKANKELFAKKNSMLKQNVELVCDRLKEIPCLVCNKKPESCTYLLTKLKLPLLEDIEDDMDFCMKLAKEENLVLLPGVALGLKNWIRITIGVEAQMLEDALERLNGFCKRHLKKTESSFQALSNGKI

SEQ ID NO: 87418 - protein, 407 aa, Arabidopsis thaliana
  peptide (1)..(407): Ceres Seq. ID no. 12700763
MRVIVYKLFDECSLDVKKPLLPLAHGDPSVYPCYRTSILVENAVVDVLRSGKGNSYGPAAGILPARQAVADYVNRDLTNKVKPNDVFITVGCNQGIEVVLQSLARPNANILLPRPSYPHYEARAVYSGLEVRKFDLLPEKEWEIDLPGIEAMADENTVAMVIINPNNPCGNVYSYDHLKKVAETAKKLGIMVITDEVYCQTIFGDKPFVPMGEFSSITPVITLGGISKGWIVPGWRIGWIALNDPRGILKSTGMVQSIQQNLDITPDATTIVQAALPEILGKANKELFAKKNSMLKQNVELVCDRLKEIPCLVCNKKPESCTYLLTKLKLPLLEDIEDDMDFCMKLAKEENLVLLPGVALGLKNWIRITIGVEAQMLEDALERLNGFCKRHLKKTESSFQALSNGKI

SEQ ID NO: 87419 - protein, 256 aa, Arabidopsis thaliana
  peptide (1)..(256): Ceres Seq. ID no. 12700764
MADENTVAMVIINPNNPCGNVYSYDHLKKVAETAKKLGIMVITDEVYCQTIFGDKPFVPMGEFSSITPVITLGGISKGWIVPGWRIGWIALNDPRGILKSTGMVQSIQQNLDITPDATTIVQAALPEILGKANKELFAKKNSMLKQNVELVCDRLKEIPCLVCNKKPESCTYLLTKLKLPLLEDIEDDMDFCMKLAKEENLVLLPGVALGLKNWIRITIGVEAQMLEDALERLNGFCKRHLKKTESSFQALSNGKI

SEQ ID NO: 87420 - DNA, 1650 bp, Arabidopsis thaliana
  misc_feature (1)..(1650): Ceres Seq. ID no. 12700789
  misc_feature (1)..(1650): Ortholog of  Ceres SEQ ID NO 15176887 as cited in SEQ ID NO 58804
  misc_feature (1)..(1650): Ortholog of  Ceres SEQ ID NO 15174867 as cited in SEQ ID NO 67357
atgtttaaaccccaacatatgtatgacagggaatttggtaccggcaacggctacagcaacgggaacggctacaccaatggaaacggccacaccaacggaaacggcaattacaacggcaatggccacgttaatggtaacggaaaagctaacggagccaaggtggtaaagatgaaaccaatggacagtgagttgctgagagagcaaggtcacataatggttgattttattgctgattattacaaaaaccttcaagactcgcctcaagatttccctgttctgtcccaagttcagcctggttatctccgtgacatgttgcctgattcagcacctgaacgacctgaatcgttaaaagaacttctcgacgatgtttcgaagaagataatgccggggataactcattggcaaagcccgagttactttgcatactatgcatcaagcacgagtgtggctggattcttaggagagatgcttaacgccggcctgagcgtcgtcggttttacctggctcacttctcctgccgctactgagctcgaaatcatcgttcttgattggcttgctaaattgctacaactccccgaccattttctctccacaggaaaaggaaatggaggaggagtaatccaagggacaggatgtgaagcagtgcttgtggtagtattagctgctagagacagaattctgaagaaagttggcaaaacattacttcctcaacttgttgtctatggctctgaccaaacccattctagtttccgaaaagcttgtctgattggtgggatacatgaagaaaacattaggctgctcaaaactgattcttccacaaactatggaatgcctccagaatcacttgaggaagctatttctcatgatctcgctaagggttttatccctttcttcatttgtgccactgttggcacaacgtcttcagcagcggttgatcctttggtcccattggggaacatcgcaaagaaatatgggatatggttgcatgtggatgcagcttatgcagggaatgcatgtatatgtccagaatatcgaaaatttattgacgggattgaaaacgcagactcctttaacatgaatgctcataaatggttatttgctaatcaaacttgttcacctctttgggttaaggatcgatactctctcattgatgctctcaaaacaaatcccgagtatctagaattcaaggtcaaggtttccaaaaaagatacggtcgtaaattataaagattggcaaatttctctctctcggagattcagatcactgaagttatggatggttttacggctctatggttccgagaacttaagaaactttataagagaccatgtcaatctcgctaagcattttgaagattatgtagctcaagatccaagttttgaggttgtcactactcggtacttttcactcgtttgctttcgccttgcgccagttgacggcgatgaagaccaatgtaacgaacgtaaccgtgaactgcttgcggctgttaactccactggcaagatattcatctctcacacggctctatctggaaaattcgttttacgatttgctgttggtgcaccgttaacggaagagaagcatgtcactgaagcatggcagattatacagaaacatgcctccaaatttacacgcaacgaccattattaa

SEQ ID NO: 87421 - protein, 549 aa, Arabidopsis thaliana
  peptide (1)..(549): Ceres Seq. ID no. 12700790
MFKPQHMYDREFGTGNGYSNGNGYTNGNGHTNGNGNYNGNGHVNGNGKANGAKVVKMKPMDSELLREQGHIMVDFIADYYKNLQDSPQDFPVLSQVQPGYLRDMLPDSAPERPESLKELLDDVSKKIMPGITHWQSPSYFAYYASSTSVAGFLGEMLNAGLSVVGFTWLTSPAATELEIIVLDWLAKLLQLPDHFLSTGKGNGGGVIQGTGCEAVLVVVLAARDRILKKVGKTLLPQLVVYGSDQTHSSFRKACLIGGIHEENIRLLKTDSSTNYGMPPESLEEAISHDLAKGFIPFFICATVGTTSSAAVDPLVPLGNIAKKYGIWLHVDAAYAGNACICPEYRKFIDGIENADSFNMNAHKWLFANQTCSPLWVKDRYSLIDALKTNPEYLEFKVKVSKKDTVVNYKDWQISLSRRFRSLKLWMVLRLYGSENLRNFIRDHVNLAKHFEDYVAQDPSFEVVTTRYFSLVCFRLAPVDGDEDQCNERNRELLAAVNSTGKIFISHTALSGKFVLRFAVGAPLTEEKHVTEAWQIIQKHASKFTRNDHY

SEQ ID NO: 87422 - protein, 543 aa, Arabidopsis thaliana
  peptide (1)..(543): Ceres Seq. ID no. 12700791
MYDREFGTGNGYSNGNGYTNGNGHTNGNGNYNGNGHVNGNGKANGAKVVKMKPMDSELLREQGHIMVDFIADYYKNLQDSPQDFPVLSQVQPGYLRDMLPDSAPERPESLKELLDDVSKKIMPGITHWQSPSYFAYYASSTSVAGFLGEMLNAGLSVVGFTWLTSPAATELEIIVLDWLAKLLQLPDHFLSTGKGNGGGVIQGTGCEAVLVVVLAARDRILKKVGKTLLPQLVVYGSDQTHSSFRKACLIGGIHEENIRLLKTDSSTNYGMPPESLEEAISHDLAKGFIPFFICATVGTTSSAAVDPLVPLGNIAKKYGIWLHVDAAYAGNACICPEYRKFIDGIENADSFNMNAHKWLFANQTCSPLWVKDRYSLIDALKTNPEYLEFKVKVSKKDTVVNYKDWQISLSRRFRSLKLWMVLRLYGSENLRNFIRDHVNLAKHFEDYVAQDPSFEVVTTRYFSLVCFRLAPVDGDEDQCNERNRELLAAVNSTGKIFISHTALSGKFVLRFAVGAPLTEEKHVTEAWQIIQKHASKFTRNDHY

SEQ ID NO: 87423 - protein, 493 aa, Arabidopsis thaliana
  peptide (1)..(493): Ceres Seq. ID no. 12700792
MKPMDSELLREQGHIMVDFIADYYKNLQDSPQDFPVLSQVQPGYLRDMLPDSAPERPESLKELLDDVSKKIMPGITHWQSPSYFAYYASSTSVAGFLGEMLNAGLSVVGFTWLTSPAATELEIIVLDWLAKLLQLPDHFLSTGKGNGGGVIQGTGCEAVLVVVLAARDRILKKVGKTLLPQLVVYGSDQTHSSFRKACLIGGIHEENIRLLKTDSSTNYGMPPESLEEAISHDLAKGFIPFFICATVGTTSSAAVDPLVPLGNIAKKYGIWLHVDAAYAGNACICPEYRKFIDGIENADSFNMNAHKWLFANQTCSPLWVKDRYSLIDALKTNPEYLEFKVKVSKKDTVVNYKDWQISLSRRFRSLKLWMVLRLYGSENLRNFIRDHVNLAKHFEDYVAQDPSFEVVTTRYFSLVCFRLAPVDGDEDQCNERNRELLAAVNSTGKIFISHTALSGKFVLRFAVGAPLTEEKHVTEAWQIIQKHASKFTRNDHY

SEQ ID NO: 87424 - DNA, 663 bp, Arabidopsis thaliana
  misc_feature (1)..(663): Ceres Seq. ID no. 12700803
  misc_feature (1)..(663): Ortholog of  Ceres SEQ ID NO 15169703 as cited in SEQ ID NO 59628
atggcgagagagaagataaggataaagaagattgataacataacagcgagacaagttactttctcaaagagaagaagaggaatcttcaagaaagccgatgaactttcagttctttgcgatgctgatgttgctctcatcatcttctctgccaccggaaagctcttcgagttctccagctcaagaatgagagacatattgggaaggtatagtcttcatgcaagtaacatcaacaaattgatggatccaccttctactcatctccggcttgagaattgtaacctctccagactaagtaaggaagtcgaagacaaaaccaagcagctacggaaactgagaggagaggatcttgatggattgaacttagaagagttgcagcggctggagaaactacttgaatccggacttagccgtgtgtctgaaaagaagggcgagtgtgtgatgagccaaattttctcacttgagaaacggggatcggaattggtggatgagaataagagactgagggataaactagagacgttggaaagggcaaaactgacgacgcttaaagaggctttggagacagagtcggtgaccacaaatgtgtcaagctacgacagtggaactccccttgaggatgactccgacacttccctgaagcttgggtataatttgtttaactga

SEQ ID NO: 87425 - protein, 220 aa, Arabidopsis thaliana
  peptide (1)..(220): Ceres Seq. ID no. 12700804
MAREKIRIKKIDNITARQVTFSKRRRGIFKKADELSVLCDADVALIIFSATGKLFEFSSSRMRDILGRYSLHASNINKLMDPPSTHLRLENCNLSRLSKEVEDKTKQLRKLRGEDLDGLNLEELQRLEKLLESGLSRVSEKKGECVMSQIFSLEKRGSELVDENKRLRDKLETLERAKLTTLKEALETESVTTNVSSYDSGTPLEDDSDTSLKLGYNLFN

SEQ ID NO: 87426 - protein, 159 aa, Arabidopsis thaliana
  peptide (1)..(159): Ceres Seq. ID no. 12700805
MRDILGRYSLHASNINKLMDPPSTHLRLENCNLSRLSKEVEDKTKQLRKLRGEDLDGLNLEELQRLEKLLESGLSRVSEKKGECVMSQIFSLEKRGSELVDENKRLRDKLETLERAKLTTLKEALETESVTTNVSSYDSGTPLEDDSDTSLKLGYNLFN

SEQ ID NO: 87427 - protein, 141 aa, Arabidopsis thaliana
  peptide (1)..(141): Ceres Seq. ID no. 12700806
MDPPSTHLRLENCNLSRLSKEVEDKTKQLRKLRGEDLDGLNLEELQRLEKLLESGLSRVSEKKGECVMSQIFSLEKRGSELVDENKRLRDKLETLERAKLTTLKEALETESVTTNVSSYDSGTPLEDDSDTSLKLGYNLFN

SEQ ID NO: 87428 - DNA, 828 bp, Arabidopsis thaliana
  misc_feature (1)..(828): Ceres Seq. ID no. 12700930
  misc_feature (1)..(828): Ortholog of  Ceres SEQ ID NO 13595668 as cited in SEQ ID NO 56792
atggcagattataatgatcagatcgtcaatgagacctctttttacaaccgaatggttctgagtcaccttttgccggtgaatctatgggaacctttaccacatttcctccagacatggctccggaactacctcgccggaaacatactctacttcatctccggcttcctctggtgcttctacatctattaccttaaactcaacgtttacgtccccaaagaatccattcctacgagaaaggcaatgcttttgcaaatatacgtggcaatgaaggctatgccttggtacactcttcttccagctgtctctgagtatatgatcgagcatggttggaccaaatgttactctacacttgaccatttcaactggttcctctgtttcctctacatagctctctatcttgttttagttgagtttatgatttattgggttcacaaagagcttcatgacattaaatttctctataagcatctccatgctacccatcatatgtacaacaagcaaaacacactctctccatttgccgggctcgcattccatccgctggacgggatacttcaggctataccgcacgtgatagcgctgtttatagtgccgattcatctcataacacatctgagtcttttgtttttggaagggatatggacagcaagcatccatgattgcatacatggtaacatctggcctataatgggtgcaggataccataccatacaccatacaacatacaagcataactatggtcattataccatatggatggactggatgtttggctctcttatggttcctttagcagaaaaagacagtttcaaggagaaagaaaagtga

SEQ ID NO: 87429 - protein, 275 aa, Arabidopsis thaliana; identical to SEQ ID NO: 71843
  peptide (1)..(275): Ceres Seq. ID no. 12700931

SEQ ID NO: 87430 - protein, 258 aa, Arabidopsis thaliana; identical to SEQ ID NO: 71844
  peptide (1)..(258): Ceres Seq. ID no. 12700932

SEQ ID NO: 87431 - protein, 195 aa, Arabidopsis thaliana
  peptide (1)..(195): Ceres Seq. ID no. 12700933
MLLQIYVAMKAMPWYTLLPAVSEYMIEHGWTKCYSTLDHFNWFLCFLYIALYLVLVEFMIYWVHKELHDIKFLYKHLHATHHMYNKQNTLSPFAGLAFHPLDGILQAIPHVIALFIVPIHLITHLSLLFLEGIWTASIHDCIHGNIWPIMGAGYHTIHHTTYKHNYGHYTIWMDWMFGSLMVPLAEKDSFKEKEK

SEQ ID NO: 87432 - DNA, 1242 bp, Arabidopsis thaliana
  misc_feature (1)..(1242): Ceres Seq. ID no. 12700934
  misc_feature (1)..(1242): Ortholog of  Ceres SEQ ID NO 14302255 as cited in SEQ ID NO 65021
atgaagatggctcttctcttgaactcgacgataacggtggctatgaagcagaatccgctggtcgcggtatcttttccgcggactacttgcttgggatctagtttttctcctcctcgtcttcttcgagtttcgtgtgttgccacaaaccctagcaagacgagtgaagaaacagacaagaaaaagtttcgacccatcaaagaagtaccaaaccaagtgacccacacaataacacaagagaaactggagatcttcaaatcaatggagaattgggcccaagaaaacttattatcttacctcaaacccgtcgaagcttcctggcaaccacaagactttttgccggaaaccaacgacgaagaccgattctacgaacaagtaaaagagctaagagatcgaacaaaagagatccctgacgattactttgtagttcttgtcggagatatgatcaccgaagaagctttaccaacttatcaaactactttgaacactctcgacggcgtaaaagacgagaccggtggtagtctaacgccgtgggcggtttgggttcgagcatggacggcggaggaaaatcgacacggtgatttgttgaataagtatctttacttatcaggtcgtgttgacatgcgacatgttgaaaagactattcaatatcttatcggatccggcatggactccaaatttgagaacaatccctataatggcttcatctatacttcttttcaagagagagccactttcatctcccatggcaacacggcgaagctagccacaacctacggcgacacaactctcgccaaaatctgcggaacaatcgcggcggatgagaagcggcatgagacggcgtatacacggatcgtcgagaagcttttcgagatcgatcccgatggtaccgtacaagctctagcgagtatgatgaggaagcgaatcacgatgccggctcatctgatgcacgacggtcgcgacgacgatctgttcgatcattacgctgcggtggcgcagagaatcggagtttataccgcgacggattacgcagggattttggagtttttgttgcggcggtgggaggtggagaagttagggatgggtttgtccggcgaaggaaggagagcacaggattatctgtgtaccttgccgcagaggatcaggaggttagaggaaagagctaacgatagagtcaaacttgcgtcaaagtcaaaaccttctgtttccttcagctggatttatgggagagaagttgaactataa

SEQ ID NO: 87433 - protein, 413 aa, Arabidopsis thaliana
  peptide (1)..(413): Ceres Seq. ID no. 12700935
MKMALLLNSTITVAMKQNPLVAVSFPRTTCLGSSFSPPRLLRVSCVATNPSKTSEETDKKKFRPIKEVPNQVTHTITQEKLEIFKSMENWAQENLLSYLKPVEASWQPQDFLPETNDEDRFYEQVKELRDRTKEIPDDYFVVLVGDMITEEALPTYQTTLNTLDGVKDETGGSLTPWAVWVRAWTAEENRHGDLLNKYLYLSGRVDMRHVEKTIQYLIGSGMDSKFENNPYNGFIYTSFQERATFISHGNTAKLATTYGDTTLAKICGTIAADEKRHETAYTRIVEKLFEIDPDGTVQALASMMRKRITMPAHLMHDGRDDDLFDHYAAVAQRIGVYTATDYAGILEFLLRRWEVEKLGMGLSGEGRRAQDYLCTLPQRIRRLEERANDRVKLASKSKPSVSFSWIYGREVEL

SEQ ID NO: 87434 - protein, 411 aa, Arabidopsis thaliana; identical to SEQ ID NO: 71846
  peptide (1)..(411): Ceres Seq. ID no. 12700936

SEQ ID NO: 87435 - protein, 399 aa, Arabidopsis thaliana; identical to SEQ ID NO: 71847
  peptide (1)..(399): Ceres Seq. ID no. 12700937

SEQ ID NO: 87436 - DNA, 1191 bp, Arabidopsis thaliana
  misc_feature (1)..(1191): Ceres Seq. ID no. 12700938
  misc_feature (1)..(1191): Ortholog of  Ceres SEQ ID NO 14302255 as cited in SEQ ID NO 65021
atggctctgctcttgaactcgacgatgactgtggctatgaagcagaatcccgcgaccgcggtatcttttatgcagactacttgtttgggatctagtttttctcctcctcgtcatcttcaagtttccaagacgtttcgacccatcaaagaagtatcaaaccaagtgacacacacaataacacaagagaaactggagatcttcaaatcaatggagaattgggcccaagaaaacttattatcttacctcaaacccgtcgaaacttcatggcaaccacaagactttttgccagaaaccaaagacgaagaccgattctacgaacaagtgaaagagctaagagatcgaacaaaagagatccctgacgattactttgtagttcttgtcggagatatgatcaccgaagaagcattaccgacttatcaaacggttatgaacactctcgacggagccaaagacgagaccggtgttagtctaacaccgtgggcggtttggcttagagcatggacggcggaggaaaatcgacacggtgatttgttgaataagtacctttacttatcaggtcgtgttgatacgcgacatgttgaaaagactattcaatatcttatcggatccggcatggacaccaaatatgagaacaatccctacaacggctacatctacacttcttttcaagagagagcaacttttatctcccacgccaacacggcgaagctagccacgacatacggcgacacaactctcgccaaaatctgtggaacaatcgcggcggatgagaagcggcacgagatggcgtatacgcggatcgtcgagaagctattcgagattgatcccgatggtaccgtacaagctctagcgagtatgatgaggaagcgaatcacgatgccggctcagctgatgcacgacggtcgcgatgacaatctgttcgatcattacgctgctgtggcgcagagaatcggagtgtataccgcgacggattacgcagggattttggagtttttgttgcggcggtgggaggtggagaagttagggatgggtttgtccggtgaaggaaggagagcacaggattatctgtgtaccttgccgcagaggatcaggaggttagaggaaagagctgacgatagagtcaaacgtgcgtcaaagtctaaaccttctgtttcgttcagctggatttacgggagagaagttgaactctaa

SEQ ID NO: 87437 - protein, 396 aa, Arabidopsis thaliana
  peptide (1)..(396): Ceres Seq. ID no. 12700939
MALLLNSTMTVAMKQNPATAVSFMQTTCLGSSFSPPRHLQVSKTFRPIKEVSNQVTHTITQEKLEIFKSMENWAQENLLSYLKPVETSWQPQDFLPETKDEDRFYEQVKELRDRTKEIPDDYFVVLVGDMITEEALPTYQTVMNTLDGAKDETGVSLTPWAVWLRAWTAEENRHGDLLNKYLYLSGRVDTRHVEKTIQYLIGSGMDTKYENNPYNGYIYTSFQERATFISHANTAKLATTYGDTTLAKICGTIAADEKRHEMAYTRIVEKLFEIDPDGTVQALASMMRKRITMPAQLMHDGRDDNLFDHYAAVAQRIGVYTATDYAGILEFLLRRWEVEKLGMGLSGEGRRAQDYLCTLPQRIRRLEERADDRVKRASKSKPSVSFSWIYGREVEL

SEQ ID NO: 87438 - protein, 388 aa, Arabidopsis thaliana
  peptide (1)..(388): Ceres Seq. ID no. 12700940
MTVAMKQNPATAVSFMQTTCLGSSFSPPRHLQVSKTFRPIKEVSNQVTHTITQEKLEIFKSMENWAQENLLSYLKPVETSWQPQDFLPETKDEDRFYEQVKELRDRTKEIPDDYFVVLVGDMITEEALPTYQTVMNTLDGAKDETGVSLTPWAVWLRAWTAEENRHGDLLNKYLYLSGRVDTRHVEKTIQYLIGSGMDTKYENNPYNGYIYTSFQERATFISHANTAKLATTYGDTTLAKICGTIAADEKRHEMAYTRIVEKLFEIDPDGTVQALASMMRKRITMPAQLMHDGRDDNLFDHYAAVAQRIGVYTATDYAGILEFLLRRWEVEKLGMGLSGEGRRAQDYLCTLPQRIRRLEERADDRVKRASKSKPSVSFSWIYGREVEL

SEQ ID NO: 87439 - protein, 384 aa, Arabidopsis thaliana
  peptide (1)..(384): Ceres Seq. ID no. 12700941
MKQNPATAVSFMQTTCLGSSFSPPRHLQVSKTFRPIKEVSNQVTHTITQEKLEIFKSMENWAQENLLSYLKPVETSWQPQDFLPETKDEDRFYEQVKELRDRTKEIPDDYFVVLVGDMITEEALPTYQTVMNTLDGAKDETGVSLTPWAVWLRAWTAEENRHGDLLNKYLYLSGRVDTRHVEKTIQYLIGSGMDTKYENNPYNGYIYTSFQERATFISHANTAKLATTYGDTTLAKICGTIAADEKRHEMAYTRIVEKLFEIDPDGTVQALASMMRKRITMPAQLMHDGRDDNLFDHYAAVAQRIGVYTATDYAGILEFLLRRWEVEKLGMGLSGEGRRAQDYLCTLPQRIRRLEERADDRVKRASKSKPSVSFSWIYGREVEL

SEQ ID NO: 87440 - DNA, 1644 bp, Arabidopsis thaliana
  misc_feature (1)..(1644): Ceres Seq. ID no. 12700957
  misc_feature (1)..(1644): Ortholog of  Ceres SEQ ID NO 14302255 as cited in SEQ ID NO 65021
cttcttcaccttgtctcttttcacagtctcacacagcatagaaataatcgaaagatttctttttaaaatctgggatttgttttttttgttcattgatcattttcgattgttagagaagaatcaaatggcgatggctatggatcggatcgtcttctccccttcatcttacgtctatcgtccttgtcaagctaggggatccagatcttccagagtttccatggcttctacgattcgctctgcgactacagaggttacgaatggaaggaaactgtatatccctcccagagaggtgcatgtccaagtcaaacattcaatgccgccacaaaagttagagatctttaagtctttagaaggatgggctgatgaaaccctgttgacttatttaaaacctgttgagaaatcgtggcagcctaccgattttcttcccgaacctgagtcggaaggattctatgaccaagtcaaggagctaagggaaaggtgcaaggaacttcctgatgactattttgtggtgcttgttggggatatgatcactgaagaagcacttcctacttaccagaccatgttgaacacattggatggtgttagggatgagacaggagctagtcctactccttgggctatatggaccagggcttggactgctgaggagaatagacatggggatctccttaacaagtatctttatctgtctggtcgggtagacatgaggcagattgaaaagactattcagtacctgattggttctggaatggatccaaaaactgaaaacaacccttacttgggtttcatctacacatcatttcaagaaagagcgaccttcatctcccatggaaacactgccagactggcgaaagatcgtggagatttgaaacttgcgcagatatgcgggaccattgctgctgatgagaggcgtcatgagactgcttacaccaagattgtagagaagctctttgaaattgaccctgatggcacgatcttgggcctggctgatatgatgaagaaaaagatatcaatgcctgcacatttaatgtatgatggccaagatgataacctgtttgagcacttctcaaccgttgcccagaggctcggtgtctacactgccaaggactatgctgatattctggagtttcttgttgaacggtggaatgtggagactttgacagacctttctagtgaaggacacagggcccaggactttgtctgcggactacctgcaagaatccgtaaaattgaagagagagctcaaggaagagccaaagaagctgccaaaaacataccattcagctggatatttggtcgaaatatcagggcttaagaagtttactacacaattctctttccaattatcccaagtaagtcataaaggtcttcaccaaccatttcaccaatgaaggaccagtttttaagaccacgaaagttcatttgaatgtgttttgttttatacggaacattgtagataaagttatgtggttaggttatgtttcttgtttgaatcagtcaagaccaaagaaaatgtgtttgagtgttcttagatattgtatggtttaccaagaacaagacttaagattttcctttacctttttgattctctttttgttgtatcagtctaaagaatgttctctcttaaataaagagtggtttggc

SEQ ID NO: 87441 - protein, 437 aa, Arabidopsis thaliana
  peptide (1)..(437): Ceres Seq. ID no. 12700958
FFTLSLFTVSHSIEIIERFLFKIWDLFFLFIDHFRLLEKNQMAMAMDRIVFSPSSYVYRPCQARGSRSSRVSMASTIRSATTEVTNGRKLYIPPREVHVQVKHSMPPQKLEIFKSLEGWADETLLTYLKPVEKSWQPTDFLPEPESEGFYDQVKELRERCKELPDDYFVVLVGDMITEEALPTYQTMLNTLDGVRDETGASPTPWAIWTRAWTAEENRHGDLLNKYLYLSGRVDMRQIEKTIQYLIGSGMDPKTENNPYLGFIYTSFQERATFISHGNTARLAKDRGDLKLAQICGTIAADERRHETAYTKIVEKLFEIDPDGTILGLADMMKKKISMPAHLMYDGQDDNLFEHFSTVAQRLGVYTAKDYADILEFLVERWNVETLTDLSSEGHRAQDFVCGLPARIRKIEERAQGRAKEAAKNIPFSWIFGRNIRA

SEQ ID NO: 87442 - protein, 396 aa, Arabidopsis thaliana
  peptide (1)..(396): Ceres Seq. ID no. 12700959
MAMAMDRIVFSPSSYVYRPCQARGSRSSRVSMASTIRSATTEVTNGRKLYIPPREVHVQVKHSMPPQKLEIFKSLEGWADETLLTYLKPVEKSWQPTDFLPEPESEGFYDQVKELRERCKELPDDYFVVLVGDMITEEALPTYQTMLNTLDGVRDETGASPTPWAIWTRAWTAEENRHGDLLNKYLYLSGRVDMRQIEKTIQYLIGSGMDPKTENNPYLGFIYTSFQERATFISHGNTARLAKDRGDLKLAQICGTIAADERRHETAYTKIVEKLFEIDPDGTILGLADMMKKKISMPAHLMYDGQDDNLFEHFSTVAQRLGVYTAKDYADILEFLVERWNVETLTDLSSEGHRAQDFVCGLPARIRKIEERAQGRAKEAAKNIPFSWIFGRNIRA

SEQ ID NO: 87443 - protein, 394 aa, Arabidopsis thaliana
  peptide (1)..(394): Ceres Seq. ID no. 12700960
MAMDRIVFSPSSYVYRPCQARGSRSSRVSMASTIRSATTEVTNGRKLYIPPREVHVQVKHSMPPQKLEIFKSLEGWADETLLTYLKPVEKSWQPTDFLPEPESEGFYDQVKELRERCKELPDDYFVVLVGDMITEEALPTYQTMLNTLDGVRDETGASPTPWAIWTRAWTAEENRHGDLLNKYLYLSGRVDMRQIEKTIQYLIGSGMDPKTENNPYLGFIYTSFQERATFISHGNTARLAKDRGDLKLAQICGTIAADERRHETAYTKIVEKLFEIDPDGTILGLADMMKKKISMPAHLMYDGQDDNLFEHFSTVAQRLGVYTAKDYADILEFLVERWNVETLTDLSSEGHRAQDFVCGLPARIRKIEERAQGRAKEAAKNIPFSWIFGRNIRA

SEQ ID NO: 87444 - DNA, 1194 bp, Arabidopsis thaliana
  misc_feature (1)..(1194): Ceres Seq. ID no. 12700984
  misc_feature (1)..(1194): Ortholog of  Ceres SEQ ID NO 13597865 as cited in SEQ ID NO 64954
atggattttaatgccggagttcccatgtcttctctttcacctttgatgaatcaagatgcaatgtggcaaatgaatttgagttcagatgaaacaatggaaactggttcttaccctgaacgaccaggagagcctgattgttcttattacataagaactggtctttgtagatttggctctacttgtcggttcaaccatcctcgtgatcgggaactggttatagctactgcaaggatgagaggagaataccctgaaaggattggtcagcctgaatgcgagtactatttgaagacaggaacctgcaagtttggagtaacatgtaagtttcatcatccaaggaacaaagctgggattgctggaagagtctctctcaatatgttaggctatcctctacgctcgaatgaggttgattgtgcttatttcctaagaaccggacactgtaaatttggtggtacttgtaaattcaaccaccctcagcctcaaccaaccaacatgatggttcctacctcagggcaacagtcttatccttggtcaagagcttcttttattgccagccctcgttggcaagatccgtctagctacgcttccttaatcatgcctcaaggagttgtcccggttcaaggatggaacccttacagtggtcagctcggctcagtttctccttcaggtaccggaaatgatcaaaactacagaaatttacagcagaacgagacaatagagtcaggctctcagtctcaaggatcattctcgggttacaatccgggatcctctgttccgctaggagggtattatgcattgccgagggaaaatgtgttcccggagagaccaggacaacccgaatgccaattctacatgaagacaggtgactgcaaatttggcacagtttgcaaatttcaccatcctagagacagacaagctcctcctcctgattgtctcttaagctccattggcctccccttacgcccgggagaaccgttgtgtgtgttctatacacgctatggaatctgcaaatttggtccaagctgtaaatttgatcacccaatgcgagtattcacatacgacaacacagcttcagagacagatgaggtagtggaaacatcaacagggaaatctagaagactctctgtgtctgaaacaagacaagcagcaacaacatcctctggtaaagacactaccattgataatacacagcagtga

SEQ ID NO: 87445 - protein, 397 aa, Arabidopsis thaliana
  peptide (1)..(397): Ceres Seq. ID no. 12700985
MDFNAGVPMSSLSPLMNQDAMWQMNLSSDETMETGSYPERPGEPDCSYYIRTGLCRFGSTCRFNHPRDRELVIATARMRGEYPERIGQPECEYYLKTGTCKFGVTCKFHHPRNKAGIAGRVSLNMLGYPLRSNEVDCAYFLRTGHCKFGGTCKFNHPQPQPTNMMVPTSGQQSYPWSRASFIASPRWQDPSSYASLIMPQGVVPVQGWNPYSGQLGSVSPSGTGNDQNYRNLQQNETIESGSQSQGSFSGYNPGSSVPLGGYYALPRENVFPERPGQPECQFYMKTGDCKFGTVCKFHHPRDRQAPPPDCLLSSIGLPLRPGEPLCVFYTRYGICKFGPSCKFDHPMRVFTYDNTASETDEVVETSTGKSRRLSVSETRQAATTSSGKDTTIDNTQQ

SEQ ID NO: 87446 - protein, 389 aa, Arabidopsis thaliana
  peptide (1)..(389): Ceres Seq. ID no. 12700986
MSSLSPLMNQDAMWQMNLSSDETMETGSYPERPGEPDCSYYIRTGLCRFGSTCRFNHPRDRELVIATARMRGEYPERIGQPECEYYLKTGTCKFGVTCKFHHPRNKAGIAGRVSLNMLGYPLRSNEVDCAYFLRTGHCKFGGTCKFNHPQPQPTNMMVPTSGQQSYPWSRASFIASPRWQDPSSYASLIMPQGVVPVQGWNPYSGQLGSVSPSGTGNDQNYRNLQQNETIESGSQSQGSFSGYNPGSSVPLGGYYALPRENVFPERPGQPECQFYMKTGDCKFGTVCKFHHPRDRQAPPPDCLLSSIGLPLRPGEPLCVFYTRYGICKFGPSCKFDHPMRVFTYDNTASETDEVVETSTGKSRRLSVSETRQAATTSSGKDTTIDNTQQ

SEQ ID NO: 87447 - protein, 382 aa, Arabidopsis thaliana
  peptide (1)..(382): Ceres Seq. ID no. 12700987
MNQDAMWQMNLSSDETMETGSYPERPGEPDCSYYIRTGLCRFGSTCRFNHPRDRELVIATARMRGEYPERIGQPECEYYLKTGTCKFGVTCKFHHPRNKAGIAGRVSLNMLGYPLRSNEVDCAYFLRTGHCKFGGTCKFNHPQPQPTNMMVPTSGQQSYPWSRASFIASPRWQDPSSYASLIMPQGVVPVQGWNPYSGQLGSVSPSGTGNDQNYRNLQQNETIESGSQSQGSFSGYNPGSSVPLGGYYALPRENVFPERPGQPECQFYMKTGDCKFGTVCKFHHPRDRQAPPPDCLLSSIGLPLRPGEPLCVFYTRYGICKFGPSCKFDHPMRVFTYDNTASETDEVVETSTGKSRRLSVSETRQAATTSSGKDTTIDNTQQ

SEQ ID NO: 87448 - DNA, 489 bp, Arabidopsis thaliana
  misc_feature (1)..(489): Ceres Seq. ID no. 12701002
  misc_feature (1)..(489): Ortholog of  Ceres SEQ ID NO 15179206 as cited in SEQ ID NO 0
atggcgtccttggtagcagctcctatctctttctcaggtgactctcatgtcaaagcacaccgaaacttcaatgcgattcgcaagagctctacattgactgttcaaacaaaatcaaaccgcagtcacaaactctcggtttctgcaggttaccgtgggggaagtaagggtggtggaagtagtgattttgttaccggttttcttctaggaagtgctgtgttcggaactctggcttatatctttgctccacagatccgaagatcagtgctgagcgagaatgaatatggtttcaagaaaccggagcagccgatgtactatgacgaaggcctagaggagagaagagagatattgaatgagaaaatcggccaactcaattccgccattgacaaggtttcgtcgcgtctgaaaggaggtcgaagcggtagcagcaagaacacttcttcgccgtctgtcccagttgaaaccgacgcagaagcagaagctactgcatga

SEQ ID NO: 87449 - protein, 162 aa, Arabidopsis thaliana; identical to SEQ ID NO: 28061
  peptide (1)..(162): Ceres Seq. ID no. 12701003

SEQ ID NO: 87450 - DNA, 987 bp, Arabidopsis thaliana
  misc_feature (1)..(987): Ceres Seq. ID no. 12701028
  misc_feature (1)..(987): Ortholog of  Ceres SEQ ID NO 15175496 as cited in SEQ ID NO 56127
  misc_feature (1)..(987): Ortholog of  Ceres SEQ ID NO 13598714 as cited in SEQ ID NO 62656
  misc_feature (1)..(987): Ortholog of  Ceres SEQ ID NO 13597519 as cited in SEQ ID NO 64759
  misc_feature (1)..(987): Ortholog of  Ceres SEQ ID NO 13597870 as cited in SEQ ID NO 64982
  misc_feature (1)..(987): Ortholog of  Ceres SEQ ID NO 13656123 as cited in SEQ ID NO 65212
atgggagtgtacttaggtaagtattgttatataatgataataatgttagtgttggtgttgggaaaagaagtgagaagccagttgttaaaaaatggttattattcaacttcatgtccaaaagctgagtcgatagttagatccactgttgaatctcactttgattctgatcccacaatttcccctggcttgcttaggcttcatttccatgactgttttgttcagggttgtgatggttcggttttaatcaaagggaaatctgcggagcaagctgctctaccaaatcttggtctaagaggtttagaagtgatcgatgatgctaaagcccggcttgaggcggtgtgtccaggagttgtgtcatgtgcagatatacttgcacttgctgctcgtgactctgttgacttgagtgatgggccaagctggcgagtaccaacgggtcgtaaagacgggagaatctcgttggcaactgaagcatcgaatctaccttctccacttgactctgttgctgttcaaaagcaaaagtttcaagataaaggattggatactcatgatctagttactctactaggtgcacatacaattggacaaaccgactgtctcttcttccgttaccgtttatacaacttcacggtgaccggaaactccgatccaaccataagcccatcgtttcttacacagctcaagactctttgtcctcccaatggagacggttcgaaacgtgttgctcttgacattggtagcccctcaaaattcgatgaaagtttcttcaagaacttacgcgacggaaacgctattctagagtcggaccaacggctttggtcggacgccgagacaaatgccgtggtgaagaagtatgcgagtcgtcttagaggtttgttagggtttaggtttgattatgagtttggtaaagctatgattaagatgagttccattgatgtaaagactgacgttgatggcgaggttaggaaagtttgttccaaggtgaactag

SEQ ID NO: 87451 - protein, 328 aa, Arabidopsis thaliana; identical to SEQ ID NO: 36757
  peptide (1)..(328): Ceres Seq. ID no. 12701029

SEQ ID NO: 87452 - protein, 317 aa, Arabidopsis thaliana
  peptide (1)..(317): Ceres Seq. ID no. 12701030
MIIMLVLVLGKEVRSQLLKNGYYSTSCPKAESIVRSTVESHFDSDPTISPGLLRLHFHDCFVQGCDGSVLIKGKSAEQAALPNLGLRGLEVIDDAKARLEAVCPGVVSCADILALAARDSVDLSDGPSWRVPTGRKDGRISLATEASNLPSPLDSVAVQKQKFQDKGLDTHDLVTLLGAHTIGQTDCLFFRYRLYNFTVTGNSDPTISPSFLTQLKTLCPPNGDGSKRVALDIGSPSKFDESFFKNLRDGNAILESDQRLWSDAETNAVVKKYASRLRGLLGFRFDYEFGKAMIKMSSIDVKTDVDGEVRKVCSKVN

SEQ ID NO: 87453 - protein, 314 aa, Arabidopsis thaliana
  peptide (1)..(314): Ceres Seq. ID no. 12701031
MLVLVLGKEVRSQLLKNGYYSTSCPKAESIVRSTVESHFDSDPTISPGLLRLHFHDCFVQGCDGSVLIKGKSAEQAALPNLGLRGLEVIDDAKARLEAVCPGVVSCADILALAARDSVDLSDGPSWRVPTGRKDGRISLATEASNLPSPLDSVAVQKQKFQDKGLDTHDLVTLLGAHTIGQTDCLFFRYRLYNFTVTGNSDPTISPSFLTQLKTLCPPNGDGSKRVALDIGSPSKFDESFFKNLRDGNAILESDQRLWSDAETNAVVKKYASRLRGLLGFRFDYEFGKAMIKMSSIDVKTDVDGEVRKVCSKVN

SEQ ID NO: 87454 - DNA, 2448 bp, Arabidopsis thaliana
  misc_feature (1)..(2448): Ceres Seq. ID no. 12701073
  misc_feature (1)..(2448): Ortholog of  Ceres SEQ ID NO 13657677 as cited in SEQ ID NO 66119
atggctaccgttaccaatttcaagctcgtcactccgccggaatcttcccgcgccgataagccaggagctacgaaggcctccgacgcattccaggagaagaaatctgtgtctgtgaactacgaccgtggtgagcatgaggtctcggtcaacatcggcgggctcaggaaagctgatattccgagacgttaccgaattcgggttgagaacgaccggtttcagaaggattggagtgtatcggaggttgtggaccggcttatggctctcaatcgttgggaagaagttgatggcgttcttaattcctgggtcggccggtttgctaggaagaatttcccggttcttatcagggagcttagtagaagagggtgtattgagctttgtgtgaatgttttcaagtggatgaagattcagaagaactactgtgcaaggaatgatatatacaatatgatgattaggcttcatgctaggcataattgggttgatcaggctcgtggtctcttctttgaaatgcagaaatggagctgcaaaccggatgctgagacgtacgatgctcttatcaatgcccatggtcgagctggtcaatggcgctgggctatgaatcttatggatgacatgttacgtgctgctattgctcctagtcgttcaacctacaataacctgatcaatgcttgtggttctagtggaaactggagagaggctctggaagtatgcaagaaaatgacagataacggagttggaccggatttggtcactcataacattgtgttgtcagcatacaagagtggtcgtcagtattcaaaggcgctatcttattttgagctcatgaagggagctaaagttcgtcccgatactacaactttcaatatcattatatattgtctgtcaaagctcggtcaaagtagccaagcccttgatcttttcaattccatgagggagaagagagctgagtgcagacctgatgttgtgacatttacgagcatcatgcatttatactctgtcaagggagagatagaaaactgcagagccgtgttcgaagcaatggttgcagaaggtctaaagcctaatattgtttcctataatgccttaatgggtgcctatgctgttcatggaatgagtggaactgctctctcagtgttaggagatatcaagcagaatggtattatcccagatgtggtctcttatacatgcttgctcaattcttatggaagatcacgtcaacctgggaaggcaaaggaggtattcctcatgatgaggaaggaaaggagaaagccaaatgttgttacttacaatgcattgattgatgcttatgggtctaatgggtttctagctgaagctgtggaaatctttcggcagatggaacaagatggcattaagccaaatgttgtttcagtatgcactcttttggctgcttgtagtaggtctaaaaaaaaggtgaatgttgatactgtactttccgcagcacagtcgagaggcattaatctcaatacggcagcctataactcagccattggaagctatataaatgctgcagaacttgagaaggccattgcattgtatcagagtatgagaaaaaagaaagtcaaagctgattctgttactttcactatccttataagcggttcatgtaggatgtcaaaataccctgaagcaattagttacttgaaggagatggaagatctcagtattccattgacaaaggaggtgtactcttcggttctatgtgcttacagcaaacagggtcaagttacagaagcagaatccatattcaaccagatgaaaatggctgggtgcgaacctgatgtgattgcatacacttcaatgctccatgcttacaatgcttcagaaaagtggggaaaggcttgtgaactcttcctggaaatggaggcaaatggaatagagccagattcgattgcttgttcagctttgatgagagctttcaacaagggaggtcaaccgtcaaatgtctttgtcctgatggatttaatgcgggaaaaagaaatccccttcactggtgcggtcttctttgagatattttcggcttgtaacaccttgcaggaatggaaaagagcaatagacctcatccaaatgatggatccgtacctgccatcgctttctatcgggttaactaatcagatgctgcatcttttcgggaagagtggtaaagttgaagcaatgatgaagctgttctataagattattgcctctggtgttggaatcaacctcaagacttatgcaatactgttggaacatcttttagctgttggaaactggagaaaatacattgaggttttagaatggatgagtggtgctggtattcaaccctcgaaccaaatgtatcgtgacataatctcctttggtgaaagaagtgcagggatcgagttcgagcctctaatacgccaaaaattgggtgagatgagagaggaatgcaaaataaatgattctgtcacatga

SEQ ID NO: 87455 - protein, 815 aa, Arabidopsis thaliana
  peptide (1)..(815): Ceres Seq. ID no. 12701074
MATVTNFKLVTPPESSRADKPGATKASDAFQEKKSVSVNYDRGEHEVSVNIGGLRKADIPRRYRIRVENDRFQKDWSVSEVVDRLMALNRWEEVDGVLNSWVGRFARKNFPVLIRELSRRGCIELCVNVFKWMKIQKNYCARNDIYNMMIRLHARHNWVDQARGLFFEMQKWSCKPDAETYDALINAHGRAGQWRWAMNLMDDMLRAAIAPSRSTYNNLINACGSSGNWREALEVCKKMTDNGVGPDLVTHNIVLSAYKSGRQYSKALSYFELMKGAKVRPDTTTFNIIIYCLSKLGQSSQALDLFNSMREKRAECRPDVVTFTSIMHLYSVKGEIENCRAVFEAMVAEGLKPNIVSYNALMGAYAVHGMSGTALSVLGDIKQNGIIPDVVSYTCLLNSYGRSRQPGKAKEVFLMMRKERRKPNVVTYNALIDAYGSNGFLAEAVEIFRQMEQDGIKPNVVSVCTLLAACSRSKKKVNVDTVLSAAQSRGINLNTAAYNSAIGSYINAAELEKAIALYQSMRKKKVKADSVTFTILISGSCRMSKYPEAISYLKEMEDLSIPLTKEVYSSVLCAYSKQGQVTEAESIFNQMKMAGCEPDVIAYTSMLHAYNASEKWGKACELFLEMEANGIEPDSIACSALMRAFNKGGQPSNVFVLMDLMREKEIPFTGAVFFEIFSACNTLQEWKRAIDLIQMMDPYLPSLSIGLTNQMLHLFGKSGKVEAMMKLFYKIIASGVGINLKTYAILLEHLLAVGNWRKYIEVLEWMSGAGIQPSNQMYRDIISFGERSAGIEFEPLIRQKLGEMREECKINDSVT

SEQ ID NO: 87456 - protein, 730 aa, Arabidopsis thaliana
  peptide (1)..(730): Ceres Seq. ID no. 12701075
MALNRWEEVDGVLNSWVGRFARKNFPVLIRELSRRGCIELCVNVFKWMKIQKNYCARNDIYNMMIRLHARHNWVDQARGLFFEMQKWSCKPDAETYDALINAHGRAGQWRWAMNLMDDMLRAAIAPSRSTYNNLINACGSSGNWREALEVCKKMTDNGVGPDLVTHNIVLSAYKSGRQYSKALSYFELMKGAKVRPDTTTFNIIIYCLSKLGQSSQALDLFNSMREKRAECRPDVVTFTSIMHLYSVKGEIENCRAVFEAMVAEGLKPNIVSYNALMGAYAVHGMSGTALSVLGDIKQNGIIPDVVSYTCLLNSYGRSRQPGKAKEVFLMMRKERRKPNVVTYNALIDAYGSNGFLAEAVEIFRQMEQDGIKPNVVSVCTLLAACSRSKKKVNVDTVLSAAQSRGINLNTAAYNSAIGSYINAAELEKAIALYQSMRKKKVKADSVTFTILISGSCRMSKYPEAISYLKEMEDLSIPLTKEVYSSVLCAYSKQGQVTEAESIFNQMKMAGCEPDVIAYTSMLHAYNASEKWGKACELFLEMEANGIEPDSIACSALMRAFNKGGQPSNVFVLMDLMREKEIPFTGAVFFEIFSACNTLQEWKRAIDLIQMMDPYLPSLSIGLTNQMLHLFGKSGKVEAMMKLFYKIIASGVGINLKTYAILLEHLLAVGNWRKYIEVLEWMSGAGIQPSNQMYRDIISFGERSAGIEFEPLIRQKLGEMREECKINDSVT

SEQ ID NO: 87457 - protein, 683 aa, Arabidopsis thaliana
  peptide (1)..(683): Ceres Seq. ID no. 12701076
MKIQKNYCARNDIYNMMIRLHARHNWVDQARGLFFEMQKWSCKPDAETYDALINAHGRAGQWRWAMNLMDDMLRAAIAPSRSTYNNLINACGSSGNWREALEVCKKMTDNGVGPDLVTHNIVLSAYKSGRQYSKALSYFELMKGAKVRPDTTTFNIIIYCLSKLGQSSQALDLFNSMREKRAECRPDVVTFTSIMHLYSVKGEIENCRAVFEAMVAEGLKPNIVSYNALMGAYAVHGMSGTALSVLGDIKQNGIIPDVVSYTCLLNSYGRSRQPGKAKEVFLMMRKERRKPNVVTYNALIDAYGSNGFLAEAVEIFRQMEQDGIKPNVVSVCTLLAACSRSKKKVNVDTVLSAAQSRGINLNTAAYNSAIGSYINAAELEKAIALYQSMRKKKVKADSVTFTILISGSCRMSKYPEAISYLKEMEDLSIPLTKEVYSSVLCAYSKQGQVTEAESIFNQMKMAGCEPDVIAYTSMLHAYNASEKWGKACELFLEMEANGIEPDSIACSALMRAFNKGGQPSNVFVLMDLMREKEIPFTGAVFFEIFSACNTLQEWKRAIDLIQMMDPYLPSLSIGLTNQMLHLFGKSGKVEAMMKLFYKIIASGVGINLKTYAILLEHLLAVGNWRKYIEVLEWMSGAGIQPSNQMYRDIISFGERSAGIEFEPLIRQKLGEMREECKINDSVT

SEQ ID NO: 87458 - DNA, 3477 bp, Arabidopsis thaliana
  misc_feature (1)..(3477): Ceres Seq. ID no. 12701114
  misc_feature (1)..(3477): Ortholog of  Ceres SEQ ID NO 14313575 as cited in SEQ ID NO 58703
atggataatcacggtcctcgttatccatacccttacggtcagtacccatacccttacccatacccagctccttatagacctcccagttcagagccatacccacctcctccaaccaatcaatacagtgctccttattacccttacccaccacctccatacgcaacaccaccaccatatgcatcaccaccaccgcctcatcagcacacttcgggttcgcattctggaccattagactatagccacaacccacaaccatcatctctcgcggctgctcctccagagtatcacagacattcttttgactaccaaccttctccttacccttatcagccccaaggtaactttggtgcttatggtcctccgcctcctcactattcgtatcaagagccagctcaataccctccacctgaaactaaaccgcaagagcctctgcctcctccgcagcaaactcaaggttttcaagaatatcgtaggcaagattgtctcagtaccgggggaacaggtcatgataatgtaagcaattctggatcttcttatcctcctgtggatgaacttctaggtggtctgcatatttctactaaccaaccaggtccctcagttccacaactatcctcccttccttcgaactcttggcaaagccgccctggggacttgtatggttaccctaacagctcgtttccaagtaactctcatttgccacagttagggagagtagattcctcaagttcttattatgcatctaccgaatcgccacatagtgcggatatgcagatgacactgtttggtaaagggtcgttgaaggtcctgttgttgcatgggaatttggatatttggatctatcatgctaaaaatctccctaacatggatatgttccataagacactgggtgatatgtttggaagattgccagggaaaattgaagggcagcttactagtaagattaccagtgatccttatgtttctgtatcagttgctggtgctgtgattggaagaacgtatgtcatgagtaacagcgaaaatcctgtttggatgcaacatttttatgttcctgttgctcatcatgctgcagaagttcattttgttgttaaagacagtgatgttgtgggttcacagcttattggattggttacaatcccggtggagcagatatactcaggtgccaagatcgaaggaacttatccgattctaaacagtaatgggaagccttgtaaaccaggggcaaacttatcattatcgattcagtatactcctatggacaaactcagcgtttatcatcatggagttggggcaggtcctgattaccaaggggtacctggaacatattttcctcttagaaaaggcggaactgtgagattgtatcaagatgcacatgtcccagaagggatgctccctggtataagactggacaatggaatgtcttatgaacatgggaagtgttggcatgatatgtttgatgccatacgtcaggcgcggcgtttgatttatatcacaggttggtcagtgtggcacaaagttaagttgattcgtgataaattaggtcctgcatccgaatgtactcttggggagcttctaagatcaaagtcccaagaaggagtgagagtcctccttttgatatgggatgacccaacttcacgtagcattttgggttataaaacagatggggttatggcaacccatgatgaggaaacacgccgtttttttaagcattcctcagttcaagtcctgctttgcccccgaaatgctggaaagcgacatagttgggtcaagcagagggaagttgggacaatctatacacatcatcaaaaaaacgtaatagtagatgctgatgctggtggtaacagaaggaaaatcatagcttttgtcggtgggcttgatctatgtgatggccgatatgacactcctcagcatccgttgttcaggacactacagacaattcataaagatgattttcacaaccccacttttacgggaaatctttcaggatgtccaagagaaccgtggcatgacttacacagtaagattgatggcccggctgcatatgatgttctgaccaacttcgaagagagatggttgaaggctgcaaagcctagcgggatcaagaagtttaagacttcctatgacgatgcgttgttaaggattgataggattccagatatattaggagtttctgatactcctactgttagtgagaacgatcctgaggcttggcatgttcagattttccgttcaatcgattcaaactctgtgaaaggtttcccaaaggatccaaaagatgctacatgcaagaacttggtgtgtgggaagaacgtgctgattgatatgagcatacacacagcgtatgtcaaagccattcgtgcagcccaacacttcatctatattgagaatcagtatttcattgggtcttcatacaactggaatgcgcataaggacataggtgcgaataatttgattcctatggaaattgcgttgaagatagctgaaaagatcagggcgaatgaacggtttgctgcttatattgtcattccaatgtggccggaaggtgttccaaccggcgctgctacccagaggattctttattggcagcacaagacaatacagatgatgtatgagacaatctacaaggcgttagtggagacagggcttgaaggagcattctccccacaagattatctcaatttcttctgtcttgggaacagagaaatggtggatggaatagataactcaggaaccgggagtccaagcaatgcaaacactcctcaggcgttgagtcggaaaagcagaagatttatggtctatgttcactcgaaagggatggtagttgatgatgaatacgtagtaattggatctgcaaacataaaccaacgatcaatggaaggcacaagagatacagagattgcaatgggagcttaccagcctcaacatacatgggcaaggaaacattctggtcctcgtggtcagatctatggatacagaatgtcgctttgggcagagcatatggcaacattagatgactgtttcacacagccagagagtatagagtgtgtaaggaaagtgagaacaatgggagagaggaactggaaacagtttgcagctgaagaagtctcagacatgagaggacatttattaaagtatccagtggaagttgatcgaaaaggaaaagtccgaccacttcccgggagtgagacgttcccggacgtcggaggtaacattgtcggatcattcatagccatacaagagaatctaaccatttgataataaggaaggatcccagtggcacacttttgacattttttttgtgtggatattatatcttgagagttgataataagagggtgggagatttgattaatttgataaacttttcacattattaatcgtgtataaagtggtggcttataaaaatgaataaagttgttaatagtttggctgatatattatcactctaaattttcctaccaaaactaaattactcacact

SEQ ID NO: 87459 - protein, 1083 aa, Arabidopsis thaliana
  peptide (1)..(1083): Ceres Seq. ID no. 12701115
MDNHGPRYPYPYGQYPYPYPYPAPYRPPSSEPYPPPPTNQYSAPYYPYPPPPYATPPPYASPPPPHQHTSGSHSGPLDYSHNPQPSSLAAAPPEYHRHSFDYQPSPYPYQPQGNFGAYGPPPPHYSYQEPAQYPPPETKPQEPLPPPQQTQGFQEYRRQDCLSTGGTGHDNVSNSGSSYPPVDELLGGLHISTNQPGPSVPQLSSLPSNSWQSRPGDLYGYPNSSFPSNSHLPQLGRVDSSSSYYASTESPHSADMQMTLFGKGSLKVLLLHGNLDIWIYHAKNLPNMDMFHKTLGDMFGRLPGKIEGQLTSKITSDPYVSVSVAGAVIGRTYVMSNSENPVWMQHFYVPVAHHAAEVHFVVKDSDVVGSQLIGLVTIPVEQIYSGAKIEGTYPILNSNGKPCKPGANLSLSIQYTPMDKLSVYHHGVGAGPDYQGVPGTYFPLRKGGTVRLYQDAHVPEGMLPGIRLDNGMSYEHGKCWHDMFDAIRQARRLIYITGWSVWHKVKLIRDKLGPASECTLGELLRSKSQEGVRVLLLIWDDPTSRSILGYKTDGVMATHDEETRRFFKHSSVQVLLCPRNAGKRHSWVKQREVGTIYTHHQKNVIVDADAGGNRRKIIAFVGGLDLCDGRYDTPQHPLFRTLQTIHKDDFHNPTFTGNLSGCPREPWHDLHSKIDGPAAYDVLTNFEERWLKAAKPSGIKKFKTSYDDALLRIDRIPDILGVSDTPTVSENDPEAWHVQIFRSIDSNSVKGFPKDPKDATCKNLVCGKNVLIDMSIHTAYVKAIRAAQHFIYIENQYFIGSSYNWNAHKDIGANNLIPMEIALKIAEKIRANERFAAYIVIPMWPEGVPTGAATQRILYWQHKTIQMMYETIYKALVETGLEGAFSPQDYLNFFCLGNREMVDGIDNSGTGSPSNANTPQALSRKSRRFMVYVHSKGMVVDDEYVVIGSANINQRSMEGTRDTEIAMGAYQPQHTWARKHSGPRGQIYGYRMSLWAEHMATLDDCFTQPESIECVRKVRTMGERNWKQFAAEEVSDMRGHLLKYPVEVDRKGKVRPLPGSETFPDVGGNIVGSFIAIQENLTI

SEQ ID NO: 87460 - protein, 828 aa, Arabidopsis thaliana
  peptide (1)..(828): Ceres Seq. ID no. 12701116
MQMTLFGKGSLKVLLLHGNLDIWIYHAKNLPNMDMFHKTLGDMFGRLPGKIEGQLTSKITSDPYVSVSVAGAVIGRTYVMSNSENPVWMQHFYVPVAHHAAEVHFVVKDSDVVGSQLIGLVTIPVEQIYSGAKIEGTYPILNSNGKPCKPGANLSLSIQYTPMDKLSVYHHGVGAGPDYQGVPGTYFPLRKGGTVRLYQDAHVPEGMLPGIRLDNGMSYEHGKCWHDMFDAIRQARRLIYITGWSVWHKVKLIRDKLGPASECTLGELLRSKSQEGVRVLLLIWDDPTSRSILGYKTDGVMATHDEETRRFFKHSSVQVLLCPRNAGKRHSWVKQREVGTIYTHHQKNVIVDADAGGNRRKIIAFVGGLDLCDGRYDTPQHPLFRTLQTIHKDDFHNPTFTGNLSGCPREPWHDLHSKIDGPAAYDVLTNFEERWLKAAKPSGIKKFKTSYDDALLRIDRIPDILGVSDTPTVSENDPEAWHVQIFRSIDSNSVKGFPKDPKDATCKNLVCGKNVLIDMSIHTAYVKAIRAAQHFIYIENQYFIGSSYNWNAHKDIGANNLIPMEIALKIAEKIRANERFAAYIVIPMWPEGVPTGAATQRILYWQHKTIQMMYETIYKALVETGLEGAFSPQDYLNFFCLGNREMVDGIDNSGTGSPSNANTPQALSRKSRRFMVYVHSKGMVVDDEYVVIGSANINQRSMEGTRDTEIAMGAYQPQHTWARKHSGPRGQIYGYRMSLWAEHMATLDDCFTQPESIECVRKVRTMGERNWKQFAAEEVSDMRGHLLKYPVEVDRKGKVRPLPGSETFPDVGGNIVGSFIAIQENLTI

SEQ ID NO: 87461 - protein, 826 aa, Arabidopsis thaliana
  peptide (1)..(826): Ceres Seq. ID no. 12701117
MTLFGKGSLKVLLLHGNLDIWIYHAKNLPNMDMFHKTLGDMFGRLPGKIEGQLTSKITSDPYVSVSVAGAVIGRTYVMSNSENPVWMQHFYVPVAHHAAEVHFVVKDSDVVGSQLIGLVTIPVEQIYSGAKIEGTYPILNSNGKPCKPGANLSLSIQYTPMDKLSVYHHGVGAGPDYQGVPGTYFPLRKGGTVRLYQDAHVPEGMLPGIRLDNGMSYEHGKCWHDMFDAIRQARRLIYITGWSVWHKVKLIRDKLGPASECTLGELLRSKSQEGVRVLLLIWDDPTSRSILGYKTDGVMATHDEETRRFFKHSSVQVLLCPRNAGKRHSWVKQREVGTIYTHHQKNVIVDADAGGNRRKIIAFVGGLDLCDGRYDTPQHPLFRTLQTIHKDDFHNPTFTGNLSGCPREPWHDLHSKIDGPAAYDVLTNFEERWLKAAKPSGIKKFKTSYDDALLRIDRIPDILGVSDTPTVSENDPEAWHVQIFRSIDSNSVKGFPKDPKDATCKNLVCGKNVLIDMSIHTAYVKAIRAAQHFIYIENQYFIGSSYNWNAHKDIGANNLIPMEIALKIAEKIRANERFAAYIVIPMWPEGVPTGAATQRILYWQHKTIQMMYETIYKALVETGLEGAFSPQDYLNFFCLGNREMVDGIDNSGTGSPSNANTPQALSRKSRRFMVYVHSKGMVVDDEYVVIGSANINQRSMEGTRDTEIAMGAYQPQHTWARKHSGPRGQIYGYRMSLWAEHMATLDDCFTQPESIECVRKVRTMGERNWKQFAAEEVSDMRGHLLKYPVEVDRKGKVRPLPGSETFPDVGGNIVGSFIAIQENLTI

SEQ ID NO: 87462 - DNA, 1014 bp, Arabidopsis thaliana
  misc_feature (1)..(1014): Ceres Seq. ID no. 12701153
  misc_feature (1)..(1014): Ortholog of  Ceres SEQ ID NO 14302757 as cited in SEQ ID NO 56631
  misc_feature (1)..(1014): Ortholog of  Ceres SEQ ID NO 13662567 as cited in SEQ ID NO 62884
atgacgactgtgactccgtccgccggtcgtgagctctcgaatccgccgtccgacggcatttctaatctccgattttctaataacagtgatcatctcctcgtttcttcatgggataagcgtgtgagattgtatgatgtgagcaccaattcgttgaaaggagagttcttacatggcggagcagtactcgattgctgttttcacgatgacttctccggcttcagtgttggcgctgattacaaagtccgacggattgtattcaatgtcggcaaagaggacattttggggacacatgacaaagcagtgcgatgtgttgagtattcttacgctgcgggacaagtgatcactggatcttgggataaaacagttaaatgttgggatccaagaggcgctagtgggcctgaacgcacccaagtgggaacatatttgcaaccagaacgtgtttactctatgtctcttgttggacatcgtttggtagtggctacagcaggaaggcatgtaaacatctatgatctcagaaatatgtctcagcctgagcaaagaagggagtcttcactgaaataccagacgagatgtgtgcgttgttatcctaatggaacaggctatgctcttagctctgttgaaggaagggttgcaatggagttttttgatctgtcagaggctgctcaagctaaaaaatatgctttcaaatgtcatcggaaatcagaggctggaagggacattgtttaccctgtaaattccattaaggactatggcacctttgcaactggaggctgtgatggtttcgtcaacatttgggatggtaacaacaagaagaggctatatcagtactcaaagtatccaacgagtatctcggcactgtcattcagtcgagatggtcagctgctggctgttgcttcaagttacacatttgaagagggagagaaatcgcaagaaccggaggccatctttgtaagaagcgtgaatgaaatcgaagtgaaaccaaaaccgaaagtatacccgaatcctgcggcgtag

SEQ ID NO: 87463 - protein, 337 aa, Arabidopsis thaliana
  peptide (1)..(337): Ceres Seq. ID no. 12701154
MTTVTPSAGRELSNPPSDGISNLRFSNNSDHLLVSSWDKRVRLYDVSTNSLKGEFLHGGAVLDCCFHDDFSGFSVGADYKVRRIVFNVGKEDILGTHDKAVRCVEYSYAAGQVITGSWDKTVKCWDPRGASGPERTQVGTYLQPERVYSMSLVGHRLVVATAGRHVNIYDLRNMSQPEQRRESSLKYQTRCVRCYPNGTGYALSSVEGRVAMEFFDLSEAAQAKKYAFKCHRKSEAGRDIVYPVNSIKDYGTFATGGCDGFVNIWDGNNKKRLYQYSKYPTSISALSFSRDGQLLAVASSYTFEEGEKSQEPEAIFVRSVNEIEVKPKPKVYPNPAA

SEQ ID NO: 87464 - protein, 188 aa, Arabidopsis thaliana
  peptide (1)..(188): Ceres Seq. ID no. 12701155
MSLVGHRLVVATAGRHVNIYDLRNMSQPEQRRESSLKYQTRCVRCYPNGTGYALSSVEGRVAMEFFDLSEAAQAKKYAFKCHRKSEAGRDIVYPVNSIKDYGTFATGGCDGFVNIWDGNNKKRLYQYSKYPTSISALSFSRDGQLLAVASSYTFEEGEKSQEPEAIFVRSVNEIEVKPKPKVYPNPAA

SEQ ID NO: 87465 - DNA, 2859 bp, Arabidopsis thaliana
  misc_feature (1)..(2859): Ceres Seq. ID no. 12701178
  misc_feature (1)..(2859): Ortholog of  Ceres SEQ ID NO 13595870 as cited in SEQ ID NO 62101
  misc_feature (1)..(2859): Ortholog of  Ceres SEQ ID NO 13590241 as cited in SEQ ID NO 63878
  misc_feature (1)..(2859): Ortholog of  Ceres SEQ ID NO 13660597 as cited in SEQ ID NO 67655
atggaccctgaaattatattggaagagaagggactttgtgatgtatacaagggcattaaagaggaaccagagatggggtttggtattgcagcaagccaaaatagccagttgcgtagttttagttctgagggtgatggaaggaatgctagtgaggataaacatatctctttgaacaaagagaatggtgtagatgatggaaaaaccgggaaggagaaaagtaataacggtgttgggcatttggattctcatgctcaacttggagaacaagaccaaatagaatggctcaataatgagaagcttgctagtgaatgcaaaaagaaggagtcacctttcgttaatagacgagaaagattcaaaaacgagttcttacggagaatccaaccttgggaaaaaatacagctttcttgggagaccttcccttactacatccacgaccacacgaaagatattttggtggaatgtgttacctcacatataagacaaaagaatgccgcttccatatatggtgcccgtttagattcttcaagtggaagaatattgctccagagtgttccaggtactgagctttaccgggagaggttggtacgagcacttgctcgagatgtacaagttcccctgttggttcttgacagcagcgttcttgccccatatgattttgctgatgactacaatgaagaatctgaatctgatggtgagaacgcagaagcggaagcagatgaatccacgacagagtctgatgctgaggaagattctagtgctcagagcgaagaggattctgaagcgaaagcagatgggagtgacagtgaggaagcttgtctcgaggtttctgaggaagctatcaagaaaattgtgccaaaacttgaagagttcgaaaagctagtagcagaagaactacatggtgaagcttgcgaagcagcagctgttgagcattctgataaagccaggcgaccggcaaagaaaggagatcgtgtaaaatatgttggaccttctaagaaggctgatgcaaagcacaggccattatctagtggacaacgtggagaggtctatgaggtgaatgggaatcgtgttgcagtcatatttgacattggaggtgatacatcatcagagggaggtgacaagaaatcaacagaacactctcataagctacatatgcactggatagatgttggagacctaaagcatgatttggatatgcaggcagaagatggctatatcgccttggaggctttaagtgaggttttacactccacacaaccacttattgtctattttcccgactcgtcccagtggttgtctcgagctgtacctaagtcaaaacaaaatgagtttgtagacaaagttcaggaaatgtttgataaattgtcaagtcctgttgtaatgatctgtggacgaaacaagattgaaacaggctcaaaagagagagagaaatttacgatgatactcccaaactttggccgtcttgcgaaactgccccttccgttgaagcgtctcactgagggactcacgggaaggaaaacatcagaggataatgagatatacaagctcttcactaatgttatgaacctagtccctcctaaggaagaagagaacctcatagtattcaacaaacaacttggagaagatagaagaattgtgatgtcacggagcaatttaaatgagctacttaaggcgcttgaggaaaacgagttattgtgcactgacttgtaccaagtgaacaccgatggcgtgatattgacaaagcaaagagcggagaaagttatcggttgggccagaaaccactatttatcttcttgtcctagcccatcgattaaagagggccgcctgattctcccccgtgaaagcattgagatttcagttaaaaggttaaaggcacaagaagatatttctcgaaagcccacacaaaacttgaagaatattgcgaaggatgagtttgaaaccaattttgtctcagccgtggttgctcctggagaaattggggtaaagtttgacgacattggtgctcttgaacatgtgaaaaagacactaaatgagttagttattcttcccatgagaaggccagagcttttcacccgtggaaatctcttgcggccatgtaaaggcatattgctttttggtcctccgggtacgggtaaaacgctgcttgccaaggcgcttgcaacagaagctggggcaaacttcattagcataactggctcaacgcttacctcaaagtggtttggagatgcagagaagctcacgaaggctttgttctcttttgcaagcaaactagcccccgtcattatatttgttgatgaggttgacagtttgttgggtgctcgtggtggtgcttttgagcacgaggcaacacgaagaatgagaaatgagtttatggcagcttgggatggactcagatcaaaagatagccaaaggattctcattctcggtgccaccaaccgaccttttgatcttgatgacgctgtcattcgtaggctaccaagacggatatatgtggatttaccagatgcggaaaaccggttgaagatattgaagatatttctgacaccagaaaatcttgaaactggtttcgagtttgataaacttgcaaaggaaaccgaaggatattcaggaagcgatctaaagaatctatgcatagcagctgcatacagacctgttcaagaattgttacaagaagaaaacaaggactcggtaacaaatgcgtcccctgatctacgaccactgagtttggacgacttcattcaatccaaagctaaggtaagtccgtcagtggcatacgacgcgacgacaatgaacgaattgagaaaatggaacgagcaatacggtgaaggagggacccgaactaagtctcctttcggcttctaa

SEQ ID NO: 87466 - protein, 952 aa, Arabidopsis thaliana
  peptide (1)..(952): Ceres Seq. ID no. 12701179
MDPEIILEEKGLCDVYKGIKEEPEMGFGIAASQNSQLRSFSSEGDGRNASEDKHISLNKENGVDDGKTGKEKSNNGVGHLDSHAQLGEQDQIEWLNNEKLASECKKKESPFVNRRERFKNEFLRRIQPWEKIQLSWETFPYYIHDHTKDILVECVTSHIRQKNAASIYGARLDSSSGRILLQSVPGTELYRERLVRALARDVQVPLLVLDSSVLAPYDFADDYNEESESDGENAEAEADESTTESDAEEDSSAQSEEDSEAKADGSDSEEACLEVSEEAIKKIVPKLEEFEKLVAEELHGEACEAAAVEHSDKARRPAKKGDRVKYVGPSKKADAKHRPLSSGQRGEVYEVNGNRVAVIFDIGGDTSSEGGDKKSTEHSHKLHMHWIDVGDLKHDLDMQAEDGYIALEALSEVLHSTQPLIVYFPDSSQWLSRAVPKSKQNEFVDKVQEMFDKLSSPVVMICGRNKIETGSKEREKFTMILPNFGRLAKLPLPLKRLTEGLTGRKTSEDNEIYKLFTNVMNLVPPKEEENLIVFNKQLGEDRRIVMSRSNLNELLKALEENELLCTDLYQVNTDGVILTKQRAEKVIGWARNHYLSSCPSPSIKEGRLILPRESIEISVKRLKAQEDISRKPTQNLKNIAKDEFETNFVSAVVAPGEIGVKFDDIGALEHVKKTLNELVILPMRRPELFTRGNLLRPCKGILLFGPPGTGKTLLAKALATEAGANFISITGSTLTSKWFGDAEKLTKALFSFASKLAPVIIFVDEVDSLLGARGGAFEHEATRRMRNEFMAAWDGLRSKDSQRILILGATNRPFDLDDAVIRRLPRRIYVDLPDAENRLKILKIFLTPENLETGFEFDKLAKETEGYSGSDLKNLCIAAAYRPVQELLQEENKDSVTNASPDLRPLSLDDFIQSKAKVSPSVAYDATTMNELRKWNEQYGEGGTRTKSPFGF

SEQ ID NO: 87467 - protein, 928 aa, Arabidopsis thaliana
  peptide (1)..(928): Ceres Seq. ID no. 12701180
MGFGIAASQNSQLRSFSSEGDGRNASEDKHISLNKENGVDDGKTGKEKSNNGVGHLDSHAQLGEQDQIEWLNNEKLASECKKKESPFVNRRERFKNEFLRRIQPWEKIQLSWETFPYYIHDHTKDILVECVTSHIRQKNAASIYGARLDSSSGRILLQSVPGTELYRERLVRALARDVQVPLLVLDSSVLAPYDFADDYNEESESDGENAEAEADESTTESDAEEDSSAQSEEDSEAKADGSDSEEACLEVSEEAIKKIVPKLEEFEKLVAEELHGEACEAAAVEHSDKARRPAKKGDRVKYVGPSKKADAKHRPLSSGQRGEVYEVNGNRVAVIFDIGGDTSSEGGDKKSTEHSHKLHMHWIDVGDLKHDLDMQAEDGYIALEALSEVLHSTQPLIVYFPDSSQWLSRAVPKSKQNEFVDKVQEMFDKLSSPVVMICGRNKIETGSKEREKFTMILPNFGRLAKLPLPLKRLTEGLTGRKTSEDNEIYKLFTNVMNLVPPKEEENLIVFNKQLGEDRRIVMSRSNLNELLKALEENELLCTDLYQVNTDGVILTKQRAEKVIGWARNHYLSSCPSPSIKEGRLILPRESIEISVKRLKAQEDISRKPTQNLKNIAKDEFETNFVSAVVAPGEIGVKFDDIGALEHVKKTLNELVILPMRRPELFTRGNLLRPCKGILLFGPPGTGKTLLAKALATEAGANFISITGSTLTSKWFGDAEKLTKALFSFASKLAPVIIFVDEVDSLLGARGGAFEHEATRRMRNEFMAAWDGLRSKDSQRILILGATNRPFDLDDAVIRRLPRRIYVDLPDAENRLKILKIFLTPENLETGFEFDKLAKETEGYSGSDLKNLCIAAAYRPVQELLQEENKDSVTNASPDLRPLSLDDFIQSKAKVSPSVAYDATTMNELRKWNEQYGEGGTRTKSPFGF

SEQ ID NO: 87468 - protein, 569 aa, Arabidopsis thaliana
  peptide (1)..(569): Ceres Seq. ID no. 12701181
MHWIDVGDLKHDLDMQAEDGYIALEALSEVLHSTQPLIVYFPDSSQWLSRAVPKSKQNEFVDKVQEMFDKLSSPVVMICGRNKIETGSKEREKFTMILPNFGRLAKLPLPLKRLTEGLTGRKTSEDNEIYKLFTNVMNLVPPKEEENLIVFNKQLGEDRRIVMSRSNLNELLKALEENELLCTDLYQVNTDGVILTKQRAEKVIGWARNHYLSSCPSPSIKEGRLILPRESIEISVKRLKAQEDISRKPTQNLKNIAKDEFETNFVSAVVAPGEIGVKFDDIGALEHVKKTLNELVILPMRRPELFTRGNLLRPCKGILLFGPPGTGKTLLAKALATEAGANFISITGSTLTSKWFGDAEKLTKALFSFASKLAPVIIFVDEVDSLLGARGGAFEHEATRRMRNEFMAAWDGLRSKDSQRILILGATNRPFDLDDAVIRRLPRRIYVDLPDAENRLKILKIFLTPENLETGFEFDKLAKETEGYSGSDLKNLCIAAAYRPVQELLQEENKDSVTNASPDLRPLSLDDFIQSKAKVSPSVAYDATTMNELRKWNEQYGEGGTRTKSPFGF

SEQ ID NO: 87469 - DNA, 1581 bp, Arabidopsis thaliana
  misc_feature (1)..(1581): Ceres Seq. ID no. 12701210
  misc_feature (1)..(1581): Ortholog of  Ceres SEQ ID NO 12611726 as cited in SEQ ID NO 56740
  misc_feature (1)..(1581): Ortholog of  Ceres SEQ ID NO 13660693 as cited in SEQ ID NO 67411
atgcaccggcagggctcgtctccgattacgccttcaaactataacgccgccgtttcaattgcttctgatgtacctactggtttaaccaagtctcctttatctcacgcgattccagtttcgccgatttctgctgcttacccttccggtgatcctattttgatgatgtctgggactcctctcgctagggttcgattatctgaaattttgccttatgaaggagctccttctccggtgtatgcaaaagctgtggaggctttgtctgtgtctttgatgaggtataatgcgtctgtgatcgagatagggagtgaagacactgcactgatgcgatgtggccttgaagctgctcgtttgtattttagaactagaagccttactgtttctggtaaaggcaatcgtggcctctctatgtatagagccggaaggtctgttgaagatttagattcttcacctccatgcatggctgagattttcaggtgtttgggtaaagtagcacgagctgctttatctgcaatagcaaggcatctacgtttaagaagcgatgtttttaaccatatgcttgatgactttccactagctccgaacgaggtttcctcctcggtgctactggcttcctatgctcatgcatcgatacaaaatggaaaacatgcttctggaggtgggaacctatctgctaagattgaagttgagaagggtttgttgacactgttctgctcagatggcactggcattcaggtatgtgacccaaatggtcgttggtacacagcagataatggatgtggggtgggtgatctcttactgattaccggcaaagcgcttagtcatgctactgcaggtctccgtccagctgcctcttacagaactactaccgatcatttgtctgccactgacactcgaggaagggcatcattagcttttaggcttatgccgaaaagtaatgctatattagattgttccccaatagaagcagccggccatgtaattcctcaaagctatgtgccagtatctgttagtcagtttatggataacctcttagccgagaatgacactctagttaatccgcctgtgaaaaccaatgttccacgggatgatgtttgcaaagagccttccttaagaagtgttctctcggatccaatttctggtgcttttcttgaagatgcaatggttgtctcttgtggacattcatttggtggccttatgcttagaagagtccttgaaatgtctagatgtacgctctgcaatacagagatcgagtctgggtctctggttcctaaccatgcacttagagctgccgcttcagctatcaagcaacaggatgataaacgacttttccacaacgcagccatgagaaggcgtagaaaagaaatgagtgatcaaatggatgtgggaaaccggcgaactccagaaaagtttgttggaaaagaagcaatcgtgacatctcagtgtctcaatggctggtatctattaaagattgtcgaaagcggagacaatgtacggctgcaataccgatccctaaaaaagatggtgaacgatgacagaggaggaggcctacaggctcaaccggttgagagcaatagcttgtag

SEQ ID NO: 87470 - protein, 526 aa, Arabidopsis thaliana
  peptide (1)..(526): Ceres Seq. ID no. 12701211
MHRQGSSPITPSNYNAAVSIASDVPTGLTKSPLSHAIPVSPISAAYPSGDPILMMSGTPLARVRLSEILPYEGAPSPVYAKAVEALSVSLMRYNASVIEIGSEDTALMRCGLEAARLYFRTRSLTVSGKGNRGLSMYRAGRSVEDLDSSPPCMAEIFRCLGKVARAALSAIARHLRLRSDVFNHMLDDFPLAPNEVSSSVLLASYAHASIQNGKHASGGGNLSAKIEVEKGLLTLFCSDGTGIQVCDPNGRWYTADNGCGVGDLLLITGKALSHATAGLRPAASYRTTTDHLSATDTRGRASLAFRLMPKSNAILDCSPIEAAGHVIPQSYVPVSVSQFMDNLLAENDTLVNPPVKTNVPRDDVCKEPSLRSVLSDPISGAFLEDAMVVSCGHSFGGLMLRRVLEMSRCTLCNTEIESGSLVPNHALRAAASAIKQQDDKRLFHNAAMRRRRKEMSDQMDVGNRRTPEKFVGKEAIVTSQCLNGWYLLKIVESGDNVRLQYRSLKKMVNDDRGGGLQAQPVESNSL

SEQ ID NO: 87471 - protein, 473 aa, Arabidopsis thaliana
  peptide (1)..(473): Ceres Seq. ID no. 12701212
MMSGTPLARVRLSEILPYEGAPSPVYAKAVEALSVSLMRYNASVIEIGSEDTALMRCGLEAARLYFRTRSLTVSGKGNRGLSMYRAGRSVEDLDSSPPCMAEIFRCLGKVARAALSAIARHLRLRSDVFNHMLDDFPLAPNEVSSSVLLASYAHASIQNGKHASGGGNLSAKIEVEKGLLTLFCSDGTGIQVCDPNGRWYTADNGCGVGDLLLITGKALSHATAGLRPAASYRTTTDHLSATDTRGRASLAFRLMPKSNAILDCSPIEAAGHVIPQSYVPVSVSQFMDNLLAENDTLVNPPVKTNVPRDDVCKEPSLRSVLSDPISGAFLEDAMVVSCGHSFGGLMLRRVLEMSRCTLCNTEIESGSLVPNHALRAAASAIKQQDDKRLFHNAAMRRRRKEMSDQMDVGNRRTPEKFVGKEAIVTSQCLNGWYLLKIVESGDNVRLQYRSLKKMVNDDRGGGLQAQPVESNSL

SEQ ID NO: 87472 - protein, 472 aa, Arabidopsis thaliana
  peptide (1)..(472): Ceres Seq. ID no. 12701213
MSGTPLARVRLSEILPYEGAPSPVYAKAVEALSVSLMRYNASVIEIGSEDTALMRCGLEAARLYFRTRSLTVSGKGNRGLSMYRAGRSVEDLDSSPPCMAEIFRCLGKVARAALSAIARHLRLRSDVFNHMLDDFPLAPNEVSSSVLLASYAHASIQNGKHASGGGNLSAKIEVEKGLLTLFCSDGTGIQVCDPNGRWYTADNGCGVGDLLLITGKALSHATAGLRPAASYRTTTDHLSATDTRGRASLAFRLMPKSNAILDCSPIEAAGHVIPQSYVPVSVSQFMDNLLAENDTLVNPPVKTNVPRDDVCKEPSLRSVLSDPISGAFLEDAMVVSCGHSFGGLMLRRVLEMSRCTLCNTEIESGSLVPNHALRAAASAIKQQDDKRLFHNAAMRRRRKEMSDQMDVGNRRTPEKFVGKEAIVTSQCLNGWYLLKIVESGDNVRLQYRSLKKMVNDDRGGGLQAQPVESNSL

SEQ ID NO: 87473 - DNA, 2346 bp, Arabidopsis thaliana
  misc_feature (1)..(2346): Ceres Seq. ID no. 12701266
  misc_feature (1)..(2346): Ortholog of  Ceres SEQ ID NO 15169720 as cited in SEQ ID NO 54503
atgaatctatacgcgcacgatctttctcttctcgatttcaattacaacgtctccggtcccttcggcgagccactatctcaccgcttcctctctcctggccctttcttccaaggcgaagaagacgattaccgccgtaatacgagctacagtcacgacggagctaatggacgagaaccggacacagattcaagagcatctccgccgcatcgccacgacgggaggtctccgttacctctgggaatggattggagttctcctcctcgtcatttggaaggaagggacacggtttggccacatgatcatcgaactggttggagttactgtgtcactgtcccttcttgggttgaccttcccaagtcaagcgtttcagatcctgccgtgatatttgtaccaacctgttggtatagtcattctagctataatatgttagtcttaagattttacttgtgtccttatcagttttatagagtgcaagtagcgatacaatctcctgagggaatcacttctgctaggctggtacttaggaggttcaatgatttcttggagttatattcgtctattaaaaaggagtttgtgaagaaaagcttaccccaggcaccaccaaagaagattctgaggatgagaaaccagacacttttggaagagaggaggtgctctctggaagattggatgaatagacttttgtcagatattgatatatccagaagcgctcttatagctacatttcttgagcttgaagctgctgtcaggtcttattttaatgatgaatatcaagaaactgaagatacctctggggacattccgtcacttctacctaccaccatctctgatgtccctggtagttcatcagttaccatagatcatgacaatgattctgctgatgagacatctaatgcctcaacaatgaagcatgacgaagctaatctcaaaaatcttttctcaaggaattcaactgctgtagataatgtgactgattggcatgagttgatcacagaatatggacttctagatcaaagttcttttcaggaaaaagttgaacgtctttctagtactaatggagatgcagcaactggtaccgtaaccagagggggcatttctagtggagttggaattcagaggttggatggaagtgatagaaagtttcaagaactgaccattgaaagcattaaaaaaactcatgtaagcgattttgaggcgtcaactgctgtggaacctgatttagttaaccaaggcgctatggatattcatggtgaagcccatggaaacatgtatggtgcagtaggtggagatactgagactcagaaggatcttgctattgtatttcagtctgaggagcgacataaattaaagagggttattgatacattaaagcagagactggaaacagcaaaagctgacacggaagatcttatctcaaggctgaatcaggagttagccgttcgacaatttctgtcaacaaaggtaagagatttagaggttgaacttgaaacaactcgagagagctgcaagcaaggcatggagaaaacagtcctagatgaaaaggaaagatttactcaaattcagtgggatatggaggaactccgcaagcaatgcatggaaatggaatcgtttttaaactctataaaggacgagaaaacacatattgagactgcaaatgagtcacttgttcaagaaaatcagatgttgctgcagcagatcaatgatataagagaaaattttgagaattttcataaagaacacgaagagctggaagtgaaagcgaaagcagagctgaaagtcctcgttaaagaggtcaagtctctccgaaccactcaatcagatttgagacaagagcttagcggcataatgaaagaaaaactggagatggagagaattgttcaacgggagaaggatagagaagaaactgcaaaaaacgcagacaagaagttgctgcatgagtgtgatgttctacaaaaccggcttcaagaatgcaatgtcaagttcgacattgaagaggagggtaaattaataatggactcatcatctctatccgaagccatcgagctactagcaacatccgataaccgaataggtcttctaattgctgagacgcagcttctctcagaggaagtggaaaagctgaagctaacatcaggagggcatcgtggaacagacgatctagtaaggaagatgctgacagaggttctgattgataatgccagattaaggaagcaggttaactctgttcttcgttgctctttgtccggacatggaatatcagtcagagaagccggaacagaagtagatgacgaagaaggaagtattgatctagcaagaactgttatgagcaagatccttgagaaatga

SEQ ID NO: 87474 - protein, 781 aa, Arabidopsis thaliana
  peptide (1)..(781): Ceres Seq. ID no. 12701267
MNLYAHDLSLLDFNYNVSGPFGEPLSHRFLSPGPFFQGEEDDYRRNTSYSHDGANGREPDTDSRASPPHRHDGRSPLPLGMDWSSPPRHLEGRDTVWPHDHRTGWSYCVTVPSWVDLPKSSVSDPAVIFVPTCWYSHSSYNMLVLRFYLCPYQFYRVQVAIQSPEGITSARLVLRRFNDFLELYSSIKKEFVKKSLPQAPPKKILRMRNQTLLEERRCSLEDWMNRLLSDIDISRSALIATFLELEAAVRSYFNDEYQETEDTSGDIPSLLPTTISDVPGSSSVTIDHDNDSADETSNASTMKHDEANLKNLFSRNSTAVDNVTDWHELITEYGLLDQSSFQEKVERLSSTNGDAATGTVTRGGISSGVGIQRLDGSDRKFQELTIESIKKTHVSDFEASTAVEPDLVNQGAMDIHGEAHGNMYGAVGGDTETQKDLAIVFQSEERHKLKRVIDTLKQRLETAKADTEDLISRLNQELAVRQFLSTKVRDLEVELETTRESCKQGMEKTVLDEKERFTQIQWDMEELRKQCMEMESFLNSIKDEKTHIETANESLVQENQMLLQQINDIRENFENFHKEHEELEVKAKAELKVLVKEVKSLRTTQSDLRQELSGIMKEKLEMERIVQREKDREETAKNADKKLLHECDVLQNRLQECNVKFDIEEEGKLIMDSSSLSEAIELLATSDNRIGLLIAETQLLSEEVEKLKLTSGGHRGTDDLVRKMLTEVLIDNARLRKQVNSVLRCSLSGHGISVREAGTEVDDEEGSIDLARTVMSKILEK

SEQ ID NO: 87475 - protein, 701 aa, Arabidopsis thaliana
  peptide (1)..(701): Ceres Seq. ID no. 12701268
MDWSSPPRHLEGRDTVWPHDHRTGWSYCVTVPSWVDLPKSSVSDPAVIFVPTCWYSHSSYNMLVLRFYLCPYQFYRVQVAIQSPEGITSARLVLRRFNDFLELYSSIKKEFVKKSLPQAPPKKILRMRNQTLLEERRCSLEDWMNRLLSDIDISRSALIATFLELEAAVRSYFNDEYQETEDTSGDIPSLLPTTISDVPGSSSVTIDHDNDSADETSNASTMKHDEANLKNLFSRNSTAVDNVTDWHELITEYGLLDQSSFQEKVERLSSTNGDAATGTVTRGGISSGVGIQRLDGSDRKFQELTIESIKKTHVSDFEASTAVEPDLVNQGAMDIHGEAHGNMYGAVGGDTETQKDLAIVFQSEERHKLKRVIDTLKQRLETAKADTEDLISRLNQELAVRQFLSTKVRDLEVELETTRESCKQGMEKTVLDEKERFTQIQWDMEELRKQCMEMESFLNSIKDEKTHIETANESLVQENQMLLQQINDIRENFENFHKEHEELEVKAKAELKVLVKEVKSLRTTQSDLRQELSGIMKEKLEMERIVQREKDREETAKNADKKLLHECDVLQNRLQECNVKFDIEEEGKLIMDSSSLSEAIELLATSDNRIGLLIAETQLLSEEVEKLKLTSGGHRGTDDLVRKMLTEVLIDNARLRKQVNSVLRCSLSGHGISVREAGTEVDDEEGSIDLARTVMSKILEK

SEQ ID NO: 87476 - protein, 640 aa, Arabidopsis thaliana
  peptide (1)..(640): Ceres Seq. ID no. 12701269
MLVLRFYLCPYQFYRVQVAIQSPEGITSARLVLRRFNDFLELYSSIKKEFVKKSLPQAPPKKILRMRNQTLLEERRCSLEDWMNRLLSDIDISRSALIATFLELEAAVRSYFNDEYQETEDTSGDIPSLLPTTISDVPGSSSVTIDHDNDSADETSNASTMKHDEANLKNLFSRNSTAVDNVTDWHELITEYGLLDQSSFQEKVERLSSTNGDAATGTVTRGGISSGVGIQRLDGSDRKFQELTIESIKKTHVSDFEASTAVEPDLVNQGAMDIHGEAHGNMYGAVGGDTETQKDLAIVFQSEERHKLKRVIDTLKQRLETAKADTEDLISRLNQELAVRQFLSTKVRDLEVELETTRESCKQGMEKTVLDEKERFTQIQWDMEELRKQCMEMESFLNSIKDEKTHIETANESLVQENQMLLQQINDIRENFENFHKEHEELEVKAKAELKVLVKEVKSLRTTQSDLRQELSGIMKEKLEMERIVQREKDREETAKNADKKLLHECDVLQNRLQECNVKFDIEEEGKLIMDSSSLSEAIELLATSDNRIGLLIAETQLLSEEVEKLKLTSGGHRGTDDLVRKMLTEVLIDNARLRKQVNSVLRCSLSGHGISVREAGTEVDDEEGSIDLARTVMSKILEK

SEQ ID NO: 87477 - DNA, 2193 bp, Arabidopsis thaliana
  misc_feature (1)..(2193): Ceres Seq. ID no. 12701270
  misc_feature (1)..(2193): Ortholog of  Ceres SEQ ID NO 12586556 as cited in SEQ ID NO 64667
  misc_feature (1)..(2193): Ortholog of  Ceres SEQ ID NO 13660894 as cited in SEQ ID NO 67475
atgattctgcgaaacccactaaaatctccttttaactctgaactatcgatcttcaaggcactgctcatgtcaacgatcacagaatctatatccaatgattactctcgtttcatctctatccttggagtttgcaaaacgacggaccaattcaagcaattacattcacaaagcattacgagaggtgtagcaccaaacccaacattccaaaagaagctctttgtcttctggtgtagtcgtttaggtggccatgtgagttatgcatacaagctgtttgtgaaaatacctgaaccagacgtggttgtgtggaacaatatgatcaaaggttggtcaaaggtggattgtgatggtgaaggagttagattgtatttgaatatgttgaaggaaggtgtgactccggatagccacacgtttcctttcttgttgaacggtcttaagcgtgatggaggagctttggcttgtggtaagaagctgcattgccatgttgtgaaatttggattaggttctaatctttatgtgcagaatgctcttgtgaaaatgtactctttatgtggactaatggatatggctcgtggggttttcgacaggagatgcaaagaggatgtgttctcgtggaacttgatgatctctgggtacaacaggatgaaagagtatgaagaaagcattgagcttttagtggagatggagaggaacttggtttctccaacttctgttaccttacttcttgttctctcggcttgttctaaggtgaaagataaggatctctgtaaaagggttcatgagtatgttagtgagtgtaagactgaacccagtttgagattggaaaatgctctggtcaatgcatatgctgcgtgcggggaaatggatatagcggtgaggattttcaggagtatgaaagctagggatgtgatttcttggacatctatcgtgaaagggtatgttgagagagggaatctgaagttggcaaggacatattttgatcagatgccagtgagagacagaatttcgtggactattatgattgacggttacctacgagctggttgcttcaatgaatctctggaaatattccgagagatgcaaagtgcaggtatgatacccgatgaattcaccatggttagtgttctcacagcttgtgctcatctgggttccttggagataggtgaatggattaagacatacatagacaaaaacaagatcaagaacgatgttgttgtggggaatgctttgatcgatatgtatttcaaatgtgggtgttctgagaaagcacagaaggttttccatgacatggatcagagagacaaattcacatggacagccatggttgttggtcttgccaacaatggacaaggtcaagaggccattaaagttttctttcaaatgcaagacatgtcaatacaaccagatgacattacttaccttggcgtcctctctgcttgtaaccatagtggtatggtagaccaagcaaggaaattttttgccaagatgagaagcgaccatagaattgagccaagtttagtacattacggatgtatggttgacatgcttggtcgagctgggctagttaaggaagcatatgagatactaaggaaaatgccaatgaatccaaactcgattgtgtggggagctctacttggggcttctagacttcataatgatgaaccaatggctgaattggcggctaagaaaatccttgagttagaacctgataatggggctgtttatgctttgttatgcaatatatatgcaggttgcaaaagatggaaggatttgcgagaagtgagaagaaagatcgtggacgttgcaattaagaagacaccaggctttagtttaattgaggtaaacggttttgctcatgaatttgttgctggagacaaatcacatcttcaatctgaagagatttacatgaaactagaagaattagcccaagagtcgacatttgcagcatacttgcctgatacttccgaattattgttcgaggctggctcatggttcagttatatagtaagggatgcctacagtgtggctaacagatttgtccgattgtcgggacacccaggaacaaagaactggaagagcacagtcaggagcctgagatgtctcttcaataaccaaaaaagcttctggaactcagagccaagcctaaacattgagaacagccccaacatgcttcatatgatccacacagttatgtag

SEQ ID NO: 87478 - protein, 730 aa, Arabidopsis thaliana
  peptide (1)..(730): Ceres Seq. ID no. 12701271
MILRNPLKSPFNSELSIFKALLMSTITESISNDYSRFISILGVCKTTDQFKQLHSQSITRGVAPNPTFQKKLFVFWCSRLGGHVSYAYKLFVKIPEPDVVVWNNMIKGWSKVDCDGEGVRLYLNMLKEGVTPDSHTFPFLLNGLKRDGGALACGKKLHCHVVKFGLGSNLYVQNALVKMYSLCGLMDMARGVFDRRCKEDVFSWNLMISGYNRMKEYEESIELLVEMERNLVSPTSVTLLLVLSACSKVKDKDLCKRVHEYVSECKTEPSLRLENALVNAYAACGEMDIAVRIFRSMKARDVISWTSIVKGYVERGNLKLARTYFDQMPVRDRISWTIMIDGYLRAGCFNESLEIFREMQSAGMIPDEFTMVSVLTACAHLGSLEIGEWIKTYIDKNKIKNDVVVGNALIDMYFKCGCSEKAQKVFHDMDQRDKFTWTAMVVGLANNGQGQEAIKVFFQMQDMSIQPDDITYLGVLSACNHSGMVDQARKFFAKMRSDHRIEPSLVHYGCMVDMLGRAGLVKEAYEILRKMPMNPNSIVWGALLGASRLHNDEPMAELAAKKILELEPDNGAVYALLCNIYAGCKRWKDLREVRRKIVDVAIKKTPGFSLIEVNGFAHEFVAGDKSHLQSEEIYMKLEELAQESTFAAYLPDTSELLFEAGSWFSYIVRDAYSVANRFVRLSGHPGTKNWKSTVRSLRCLFNNQKSFWNSEPSLNIENSPNMLHMIHTVM

SEQ ID NO: 87479 - protein, 708 aa, Arabidopsis thaliana
  peptide (1)..(708): Ceres Seq. ID no. 12701272
MSTITESISNDYSRFISILGVCKTTDQFKQLHSQSITRGVAPNPTFQKKLFVFWCSRLGGHVSYAYKLFVKIPEPDVVVWNNMIKGWSKVDCDGEGVRLYLNMLKEGVTPDSHTFPFLLNGLKRDGGALACGKKLHCHVVKFGLGSNLYVQNALVKMYSLCGLMDMARGVFDRRCKEDVFSWNLMISGYNRMKEYEESIELLVEMERNLVSPTSVTLLLVLSACSKVKDKDLCKRVHEYVSECKTEPSLRLENALVNAYAACGEMDIAVRIFRSMKARDVISWTSIVKGYVERGNLKLARTYFDQMPVRDRISWTIMIDGYLRAGCFNESLEIFREMQSAGMIPDEFTMVSVLTACAHLGSLEIGEWIKTYIDKNKIKNDVVVGNALIDMYFKCGCSEKAQKVFHDMDQRDKFTWTAMVVGLANNGQGQEAIKVFFQMQDMSIQPDDITYLGVLSACNHSGMVDQARKFFAKMRSDHRIEPSLVHYGCMVDMLGRAGLVKEAYEILRKMPMNPNSIVWGALLGASRLHNDEPMAELAAKKILELEPDNGAVYALLCNIYAGCKRWKDLREVRRKIVDVAIKKTPGFSLIEVNGFAHEFVAGDKSHLQSEEIYMKLEELAQESTFAAYLPDTSELLFEAGSWFSYIVRDAYSVANRFVRLSGHPGTKNWKSTVRSLRCLFNNQKSFWNSEPSLNIENSPNMLHMIHTVM

SEQ ID NO: 87480 - protein, 626 aa, Arabidopsis thaliana
  peptide (1)..(626): Ceres Seq. ID no. 12701273
MIKGWSKVDCDGEGVRLYLNMLKEGVTPDSHTFPFLLNGLKRDGGALACGKKLHCHVVKFGLGSNLYVQNALVKMYSLCGLMDMARGVFDRRCKEDVFSWNLMISGYNRMKEYEESIELLVEMERNLVSPTSVTLLLVLSACSKVKDKDLCKRVHEYVSECKTEPSLRLENALVNAYAACGEMDIAVRIFRSMKARDVISWTSIVKGYVERGNLKLARTYFDQMPVRDRISWTIMIDGYLRAGCFNESLEIFREMQSAGMIPDEFTMVSVLTACAHLGSLEIGEWIKTYIDKNKIKNDVVVGNALIDMYFKCGCSEKAQKVFHDMDQRDKFTWTAMVVGLANNGQGQEAIKVFFQMQDMSIQPDDITYLGVLSACNHSGMVDQARKFFAKMRSDHRIEPSLVHYGCMVDMLGRAGLVKEAYEILRKMPMNPNSIVWGALLGASRLHNDEPMAELAAKKILELEPDNGAVYALLCNIYAGCKRWKDLREVRRKIVDVAIKKTPGFSLIEVNGFAHEFVAGDKSHLQSEEIYMKLEELAQESTFAAYLPDTSELLFEAGSWFSYIVRDAYSVANRFVRLSGHPGTKNWKSTVRSLRCLFNNQKSFWNSEPSLNIENSPNMLHMIHTVM

SEQ ID NO: 87481 - DNA, 1203 bp, Arabidopsis thaliana
  misc_feature (1)..(1203): Ceres Seq. ID no. 12701316
  misc_feature (1)..(1203): Ortholog of  Ceres SEQ ID NO 13637939 as cited in SEQ ID NO 54930
  misc_feature (1)..(1203): Ortholog of  Ceres SEQ ID NO 13584164 as cited in SEQ ID NO 63681
atcattctcggtttaactgtgaaacacataaataaaacaaagagaaagagagagaatatgggtgggtgggcaatcgcagtacacggtggtgccggtatcgaccctaatcttccggcggagagacaagaagaggctaaacagcttttaactcgttgtctcaacctcggcataatagctttgcgttccaatgtctccgccattgacgtcgttgagctcgtcattagagaattggagacggatcctctgtttaattcaggccgtggatctgctttgacggaaaaaggaacggttgagatggaagctagcattatggacggtacgaagagacgatgcggtgccgtttcggggataaccaccgtgaaaaatcctatatctcttgctcgtctcgtcatggacaaatctccccactcttaccttgctttctcaggtgcagaggatttcgcccgcaaacagggagttgaaattgtggacaacgagtactttgtcacggacgacaacgtaggaatgctcaagttggccaaggaagctaactccatcttgtttgattaccggattccgccgatgggatgtgccggtgcagctgcgaccgacagtccaatccaaatgaacggtcttccgatcagcatttacgcaccggagacagtcgggtgcgttgtggttgacgggaaaggacattgtgccgccgggacatccacgggtggtttaatgaacaagatgatgggaaggattggtgactcgccgctgataggagccgggacgtatgcgtcggagttttgtggtgtgtcgtgtaccggagaaggagaagccattataagagcaaccctagctcgtgatgtgtcagctgttatggagtataaaggacttaacctccaagaagcggttgattacgtcatcaagcatcgacttgacgaagggttcgctggactcattgctgtctcgaataaaggagaggtggtttgtggttttaactctaatgggatgttcaggggatgtgcaactgaggatggattcatggaggttgctatttgggagtgagaaatattttagattaagaaaatgtcttactagtatttaatcagtcatcgctctattaatttggttattcattatcataaagctggaggagtaaatttagttatgtcgttatcaccagtcctatattgatttgtgtttaatgcggtttcaaatggttagttcgtgttt

SEQ ID NO: 87482 - protein, 344 aa, Arabidopsis thaliana
  peptide (1)..(344): Ceres Seq. ID no. 12701317
IILGLTVKHINKTKRKRENMGGWAIAVHGGAGIDPNLPAERQEEAKQLLTRCLNLGIIALRSNVSAIDVVELVIRELETDPLFNSGRGSALTEKGTVEMEASIMDGTKRRCGAVSGITTVKNPISLARLVMDKSPHSYLAFSGAEDFARKQGVEIVDNEYFVTDDNVGMLKLAKEANSILFDYRIPPMGCAGAAATDSPIQMNGLPISIYAPETVGCVVVDGKGHCAAGTSTGGLMNKMMGRIGDSPLIGAGTYASEFCGVSCTGEGEAIIRATLARDVSAVMEYKGLNLQEAVDYVIKHRLDEGFAGLIAVSNKGEVVCGFNSNGMFRGCATEDGFMEVAIWE

SEQ ID NO: 87483 - protein, 325 aa, Arabidopsis thaliana; identical to SEQ ID NO: 35089
  peptide (1)..(325): Ceres Seq. ID no. 12701318

SEQ ID NO: 87484 - protein, 246 aa, Arabidopsis thaliana; identical to SEQ ID NO: 35090
  peptide (1)..(246): Ceres Seq. ID no. 12701319

SEQ ID NO: 87485 - DNA, 747 bp, Arabidopsis thaliana
  misc_feature (1)..(747): Ceres Seq. ID no. 12701339
  misc_feature (1)..(747): Ortholog of  Ceres SEQ ID NO 15225465 as cited in SEQ ID NO 53147
atggagaatttaaatcataagtgggatcgttgttcctcttctcatcaaactcctctttctttcaaaggcaatcagaagcagattggacaaggtcagagagaagtgttcacacattttgtgtcacttccattagccatataccctgacttgacgaaaaatatcgaggcttttcagaattctgtattgggaaacaatgataaggatccattgaagtttcagagtactttagctgaaatgggaatagaaaaatcgatctttgtaactcccaaaactttccatttgactgtggttatgttaaagttagagaacaatgaatctgtggttaaagctcagaatatccttcagagtattttttctaatgtgaggcaagctttgaaaaacagacctgtcttcataagactcagaggattggaatgtatgagtggatctttagacaaaactcgcgttctctatgctcctgttgaagaagttggtcatgttatcattgatgcatttgagaatgttggatttgctggtaaagatgcaaagtcacgcttgaagctacacgccacgttgatgaatgcaagctacagaaaagataaaagcaaaaagatggatacttttgatgctcgagagatacacaaagagtttgagaacaaggattggggaacatatctaatcagagaagctcacatctcacaacgttataagtatgaccccaatggctacttccattgctgcgcttcactaccttttccacataagtga

SEQ ID NO: 87486 - protein, 248 aa, Arabidopsis thaliana
  peptide (1)..(248): Ceres Seq. ID no. 12701340
MENLNHKWDRCSSSHQTPLSFKGNQKQIGQGQREVFTHFVSLPLAIYPDLTKNIEAFQNSVLGNNDKDPLKFQSTLAEMGIEKSIFVTPKTFHLTVVMLKLENNESVVKAQNILQSIFSNVRQALKNRPVFIRLRGLECMSGSLDKTRVLYAPVEEVGHVIIDAFENVGFAGKDAKSRLKLHATLMNASYRKDKSKKMDTFDAREIHKEFENKDWGTYLIREAHISQRYKYDPNGYFHCCASLPFPHK

SEQ ID NO: 87487 - protein, 170 aa, Arabidopsis thaliana
  peptide (1)..(170): Ceres Seq. ID no. 12701341
MGIEKSIFVTPKTFHLTVVMLKLENNESVVKAQNILQSIFSNVRQALKNRPVFIRLRGLECMSGSLDKTRVLYAPVEEVGHVIIDAFENVGFAGKDAKSRLKLHATLMNASYRKDKSKKMDTFDAREIHKEFENKDWGTYLIREAHISQRYKYDPNGYFHCCASLPFPHK

SEQ ID NO: 87488 - protein, 151 aa, Arabidopsis thaliana
  peptide (1)..(151): Ceres Seq. ID no. 12701342
MLKLENNESVVKAQNILQSIFSNVRQALKNRPVFIRLRGLECMSGSLDKTRVLYAPVEEVGHVIIDAFENVGFAGKDAKSRLKLHATLMNASYRKDKSKKMDTFDAREIHKEFENKDWGTYLIREAHISQRYKYDPNGYFHCCASLPFPHK

SEQ ID NO: 87489 - DNA, 711 bp, Arabidopsis thaliana
  misc_feature (1)..(711): Ceres Seq. ID no. 12701351
  misc_feature (1)..(711): Ortholog of  Ceres SEQ ID NO 14304408 as cited in SEQ ID NO 58051
  misc_feature (1)..(711): Ortholog of  Ceres SEQ ID NO 14314759 as cited in SEQ ID NO 59915
  misc_feature (1)..(711): Ortholog of  Ceres SEQ ID NO 13661769 as cited in SEQ ID NO 61435
  misc_feature (1)..(711): Ortholog of  Ceres SEQ ID NO 13600585 as cited in SEQ ID NO 0
atgacgtcactcaacagctctgcatcaccaacatcatcgtcatcagaccaatctgatgcaactactacaacaagcacccacttgtctgaagaagaagctccacccagaaacaacaacacaagaaagagaaggagagattcttcttctgcttcttcatcttcttcaatgcaacatcctgtttacagaggtgtgcggatgagaagttggggcaaatgggtctccgagatccgacaacctcgtaagaaaactcgtatttggctcggcacttttgtcaccgctgatatggctgctcgtgctcacgacgtcgctgctctcaccatcaaaggctcctccgccgtcttaaatttccctgagcttgcttctctcttccctcgtccggcgtcatcatcgccgcatgatatccagacagccgccgcagaagccgccgccatggtggtcgaagaaaaactgttagagaaggatgaggctccggaggccccaccttcgtcggaatcttcttacgtggcggcggagtcagaggatgaggagaggttggagaaaattgtggagctgcctaacattgaagaaggaagttatgacgagagtgtgacatcacgtgctgatctggcttattctgagccgttcgattgttgggtgtatcctccggttatggatttttatgaagaaatatcggagtttaatttcgtggaattgtggagctttaatcactaa

SEQ ID NO: 87490 - protein, 236 aa, Arabidopsis thaliana
  peptide (1)..(236): Ceres Seq. ID no. 12701352
MTSLNSSASPTSSSSDQSDATTTTSTHLSEEEAPPRNNNTRKRRRDSSSASSSSSMQHPVYRGVRMRSWGKWVSEIRQPRKKTRIWLGTFVTADMAARAHDVAALTIKGSSAVLNFPELASLFPRPASSSPHDIQTAAAEAAAMVVEEKLLEKDEAPEAPPSSESSYVAAESEDEERLEKIVELPNIEEGSYDESVTSRADLAYSEPFDCWVYPPVMDFYEEISEFNFVELWSFNH

SEQ ID NO: 87491 - protein, 181 aa, Arabidopsis thaliana
  peptide (1)..(181): Ceres Seq. ID no. 12701353
MQHPVYRGVRMRSWGKWVSEIRQPRKKTRIWLGTFVTADMAARAHDVAALTIKGSSAVLNFPELASLFPRPASSSPHDIQTAAAEAAAMVVEEKLLEKDEAPEAPPSSESSYVAAESEDEERLEKIVELPNIEEGSYDESVTSRADLAYSEPFDCWVYPPVMDFYEEISEFNFVELWSFNH

SEQ ID NO: 87492 - protein, 171 aa, Arabidopsis thaliana
  peptide (1)..(171): Ceres Seq. ID no. 12701354
MRSWGKWVSEIRQPRKKTRIWLGTFVTADMAARAHDVAALTIKGSSAVLNFPELASLFPRPASSSPHDIQTAAAEAAAMVVEEKLLEKDEAPEAPPSSESSYVAAESEDEERLEKIVELPNIEEGSYDESVTSRADLAYSEPFDCWVYPPVMDFYEEISEFNFVELWSFNH

SEQ ID NO: 87493 - DNA, 1046 bp, Arabidopsis thaliana
  misc_feature (1)..(1046): Ceres Seq. ID no. 12701372
  misc_feature (1)..(1046): Ortholog of  Ceres SEQ ID NO 13503499 as cited in SEQ ID NO 68684
attacacatctctctttctctctctcgctctcagttttgtgggattgtttctttaaaaggggttcttagggtttagtgaagctatagatttcaatttcatacatagttaacgtatagaaggaatcttgggttgatcaatggaaggttgtccaagaaacagagaaatcggtccaaaacttcttgatttgattccacaaggaaggaaatggtaccaagaagacaagaacaacacagatcaggagaagaaacttgagctaaggcttggaccacccggtggtgatgaagaagatcattcagcaatcaagaagaagaacacagagataagaaacatcaagaaggaaacagaagacaaatctttccactgttttaatggcaatcacttctctccttccaacaaaaccacttctgttcctcacatctcacagaaaagaactgctcctggtccagtggtgggttggcctccggttcgttcgttcagaaagaatctagcgagcacaagctcttcaaagctaggtaacgaatcctctcatggaggtcaaatcaacaagagtgatgatggtgaaaaacaagttgaaaccaagaaggaaggaatgtttgtcaagatcaacatggatggtgttcctattggtcgtaaagttgatctcaatgcttacaacagctacgaacagctctcttttgtcgttgacaaactcttcagaggtctactcgcagctcaaagagatatctctgatggtcaaggagaagagaaacctatcattggattattagatgggaaaggagaatttactttaacctatgaagacaatgaaggggacaagatgcttgttggggatgttccatggcaaatgtttgtttcatctgtgaagagactgcgtgtgattaaaagctctgagatttcatctgccttgacatttggatgcagtaagcaagagaagatgatgcactgaagagtctttttagaaacttttatttcagacagagagtctcaaagctttataaatgtacatctggtttttgttatatataagagttaatcattggttttt

SEQ ID NO: 87494 - protein, 269 aa, Arabidopsis thaliana; identical to SEQ ID NO: 24345
  peptide (1)..(269): Ceres Seq. ID no. 12701373

SEQ ID NO: 87495 - DNA, 2373 bp, Arabidopsis thaliana
  misc_feature (1)..(2373): Ceres Seq. ID no. 12701394
  misc_feature (1)..(2373): Ortholog of  Ceres SEQ ID NO 15172491 as cited in SEQ ID NO 58719
atgcagcaaaacaatgctgcggctgcgacggcgctttacgatggggctttacccactaatgacgcaggagatgcagtcatggcacggtggcttcaatccgctggtttgcagcatttggcgtctcctgttgcttctacaggcaatgatcagcgtcacctcccaaaccttctcatgcagggttatggagctcagactgctgaagagaaacaaagactgttccaactaatgagaaatctcaattttaatggggagtcgacttctgaatcatatacaccaactgctcacacatcagcagctatgccctcttcggaaggatttttttcacctgagttcagaggtgattttggagcaggattattggatcttcatgcaatggatgatacagagcttctatctgagcatgtgattaccgaaccctttgagccgtcacctttcatgcctagtgtaaataaagaatttgaagaagactataatttggcagctaatcgtcaacagcggcaacagacagaagctgaacctttgggtttattgcctaaaagtgataaagaaaataacagtgtagccaagattaaagtagtggtaaggaaaagacccctaaacaagaaagaaacagctaaaaaggaggaggatgtcgtgacggtatctgataattctttgactgtccatgagcccagagtgaaggttgatttgactgcttatgtggaaaagcatgagttctgctttgatgctgttctagatgaggatgtttcaaatgacgaggtgtatcgggccacaattgagccaataattcccattattttccagagaactaaagctacatgctttgcatatggccaaacaggtagtggtaagacatttacaatgaaaccattacctatacgagcagttgaagatcttatgaggttgttgcgtcaaccagtatacagcaatcagaggtttaaattgtggctcagctattttgagatatatggtggaaagctgttcgatcttctcagtgagagaaagaaactttgcatgcgagaagatggtagacagcaagtttgcattgttggcctgcaagaatatgaagtttcagatgtacaaattgtaaaggattttatcgagaaaggaaatgccgaaaggagcacaggttcaactggagcaaatgaggaatcttctagatcgcatgccatcctacagcttgttgtaaaaaagcatgttgaggtaaaagacactagacggaggaataatgatagtaatgaattgcctgggaaagttgtgggaaagatttctttcattgaccttgctggcagtgaaagaggtgcagacaccacagacaatgatcgccagacaaggattgaaggcgcagaaatcaacaagagtctcttggctcttaaggaatgtatacgtgcactggacaatgaccagctacatataccatttcgtggaagcaaactaacggaagtgctccgtgactcatttgttggaaactcaagaacggtgatgatttcctgcatctctccaaatgcaggatcgtgtgaacataccctcaatactctaagatatgctgatcgagtcaaaagtctatctaaaagtggaaatagcaagaaagatcaaactgcgaattcaatgcctccggttaataaggatcctttgttgggcccaaatgatgtagaagatgtctttgagcctccacaggaagtgaatgtaccagaaaccaggaggagggtggtcgagaaggacagcaacagcagtacgtcgggtattgacttcagacagcctacaaattatcgagaggaaagtggaatcccatcattctcaatggacaagggaagatcagagccgaacagttcttttgctggctccactagtcagagaaacaacatttcttcatatccccaagaaacttcagaccgtgaagagaaagtaaagaaagtgtcaccacctcgtgggaaagggttgcgggaagaaaaaccagacagaccacaaaattggtctaaaagagatgtcagttcgtcggatatccctaccttgacaaattttagacagaacgcaagtgaaactgcttcaaggcaatatgaaaccgcttcaaggcaatatgaaaccgacccttcgcttgatgaaaacctcgatgcactgcttgaggaagaagaagctctgattgcagcgcacagaaaagaaattgaggatacaatggagattgttcgcgaggaaatgaaacttctagcggaggtggaccaaccgggaagcatgatagaaaactatgtgacgcaactgagctttgtgttgtcccggaaagcagcagggctagtcagtcttcaagccaggcttgctcggttccaacaccgtctcaaggaacaagaaatactgagccgtaagagagttcctcggtag

SEQ ID NO: 87496 - protein, 790 aa, Arabidopsis thaliana; identical to SEQ ID NO: 21548
  peptide (1)..(790): Ceres Seq. ID no. 12701395

SEQ ID NO: 87497 - protein, 764 aa, Arabidopsis thaliana; identical to SEQ ID NO: 21549
  peptide (1)..(764): Ceres Seq. ID no. 12701396

SEQ ID NO: 87498 - protein, 733 aa, Arabidopsis thaliana
  peptide (1)..(733): Ceres Seq. ID no. 12701397
MQGYGAQTAEEKQRLFQLMRNLNFNGESTSESYTPTAHTSAAMPSSEGFFSPEFRGDFGAGLLDLHAMDDTELLSEHVITEPFEPSPFMPSVNKEFEEDYNLAANRQQRQQTEAEPLGLLPKSDKENNSVAKIKVVVRKRPLNKKETAKKEEDVVTVSDNSLTVHEPRVKVDLTAYVEKHEFCFDAVLDEDVSNDEVYRATIEPIIPIIFQRTKATCFAYGQTGSGKTFTMKPLPIRAVEDLMRLLRQPVYSNQRFKLWLSYFEIYGGKLFDLLSERKKLCMREDGRQQVCIVGLQEYEVSDVQIVKDFIEKGNAERSTGSTGANEESSRSHAILQLVVKKHVEVKDTRRRNNDSNELPGKVVGKISFIDLAGSERGADTTDNDRQTRIEGAEINKSLLALKECIRALDNDQLHIPFRGSKLTEVLRDSFVGNSRTVMISCISPNAGSCEHTLNTLRYADRVKSLSKSGNSKKDQTANSMPPVNKDPLLGPNDVEDVFEPPQEVNVPETRRRVVEKDSNSSTSGIDFRQPTNYREESGIPSFSMDKGRSEPNSSFAGSTSQRNNISSYPQETSDREEKVKKVSPPRGKGLREEKPDRPQNWSKRDVSSSDIPTLTNFRQNASETASRQYETASRQYETDPSLDENLDALLEEEEALIAAHRKEIEDTMEIVREEMKLLAEVDQPGSMIENYVTQLSFVLSRKAAGLVSLQARLARFQHRLKEQEILSRKRVPR

SEQ ID NO: 87499 - DNA, 588 bp, Arabidopsis thaliana
  misc_feature (1)..(588): Ceres Seq. ID no. 12701403
  misc_feature (1)..(588): Ortholog of  Ceres SEQ ID NO 13598160 as cited in SEQ ID NO 61317
  misc_feature (1)..(588): Ortholog of  Ceres SEQ ID NO 13579986 as cited in SEQ ID NO 64562
atggctctaatggacgaagagatcaaacgactgttcctagtccagaggacattgatgcagatgctgaaggatcgtggctacttaatcgacggttctgaaattacaatgaccctagaagagtttattgagaaatatggcgacaatatgaaaaggactaagaaaaatgatgacaatgataagctttatattttcttccccaatgcttccaaagttggaattacggagatgaagaaatacatagaccagttaaaatcggcaaacgttttcagagcaattttagtggtgcaagatataaaggcattttctcgccaggctctggtttttttaggtgcggtctatccaatatttcatattgaagttttccaggagaaggaattgatagtgaacgttaaggaacatgtttttgttcctgagcatcaagctcttactactgaagagaagcaaaagtttctagagagaaagagaaccaggattcacgtgactgatccaattgcgagatactttggactaaaacgtggcgaagtcgtcaagatctctcgactgagtgaaacatctggtcgttatattacttatcgctatgttatataa

SEQ ID NO: 87500 - protein, 195 aa, Arabidopsis thaliana
  peptide (1)..(195): Ceres Seq. ID no. 12701404
MALMDEEIKRLFLVQRTLMQMLKDRGYLIDGSEITMTLEEFIEKYGDNMKRTKKNDDNDKLYIFFPNASKVGITEMKKYIDQLKSANVFRAILVVQDIKAFSRQALVFLGAVYPIFHIEVFQEKELIVNVKEHVFVPEHQALTTEEKQKFLERKRTRIHVTDPIARYFGLKRGEVVKISRLSETSGRYITYRYVI

SEQ ID NO: 87501 - protein, 192 aa, Arabidopsis thaliana
  peptide (1)..(192): Ceres Seq. ID no. 12701405
MDEEIKRLFLVQRTLMQMLKDRGYLIDGSEITMTLEEFIEKYGDNMKRTKKNDDNDKLYIFFPNASKVGITEMKKYIDQLKSANVFRAILVVQDIKAFSRQALVFLGAVYPIFHIEVFQEKELIVNVKEHVFVPEHQALTTEEKQKFLERKRTRIHVTDPIARYFGLKRGEVVKISRLSETSGRYITYRYVI

SEQ ID NO: 87502 - protein, 177 aa, Arabidopsis thaliana
  peptide (1)..(177): Ceres Seq. ID no. 12701406
MQMLKDRGYLIDGSEITMTLEEFIEKYGDNMKRTKKNDDNDKLYIFFPNASKVGITEMKKYIDQLKSANVFRAILVVQDIKAFSRQALVFLGAVYPIFHIEVFQEKELIVNVKEHVFVPEHQALTTEEKQKFLERKRTRIHVTDPIARYFGLKRGEVVKISRLSETSGRYITYRYVI

SEQ ID NO: 87503 - DNA, 1756 bp, Arabidopsis thaliana
  misc_feature (1)..(1756): Ceres Seq. ID no. 12701433
  misc_feature (1)..(1756): Ortholog of  Ceres SEQ ID NO 13581563 as cited in SEQ ID NO 58942
  misc_feature (1)..(1756): Ortholog of  Ceres SEQ ID NO 13658707 as cited in SEQ ID NO 66286
  misc_feature (1)..(1756): Ortholog of  Ceres SEQ ID NO 13654528 as cited in SEQ ID NO 68080
cttcctctggtctttttttcttttgttgcgacttttcttcttcttcttcctcaggaacttaagtttctgagtccatgaagatgccagtggcattggtctggctactggcattcactattctactgatcagtggggaaggcaataatgccatctgcaaggagaattttaagttagaccctagacctcatagtgtttcgatcctcgagtttggagcggttggtgatgggaagacgctcaacactattgctttccagaacgctgttttctatctcaagtcttttgcggataaaggcggtgctcagctttatgttccaccagggaaatggctcaccggaagcttcaatctcacaagccatctcactctcttcttggagaaaggagcaacaattcttgcatcaccggatccgtcgcattgggacgttgtcagtcctctaccgtcctatggtcgcggaattgaacttcctggaaagcggtacagaagtttgatcaatggagacaatctaatagacgtagtcatcaccggtgaaaatgggacatttgacggtcaaggtgcggcatggtgggagtggcttgagtccgggtccttgaactatagccgacctcatatcatcgaattcgtctcctctaaacacatcctcatatcgaatctaaccttcttaaacgcgcccgcaatcaacattcaccctgtttattgcagtcagattcatatccgcaaagttttgatcgaaacatccgttgattctccccacgttcttggagttgccccagattcttcggacaatgtttgtatcgaggactcaacaatcaacgttggccacgacgcggtttctctcaagagtggttgggaccaatacggtatacactacggccgtccaaccaccgctgttcatattcggaatctcagattaaagtctcccaccggtgctggaatctccttcgggagcgagatgtcaggcggagtctcggatgtgaccgttgagcgtcttaacatacacagctcactcataggtgtagccttcagaaccaccagaggcagaggaggatacatccgtaatatcacaatctccgacgtcgatctcacaagcgttgacacagccatagtagccaacggacacaccgggtcacacccggatgataaattcgaccgggacgcactcccagtcgtgacacacattgttatgcggaatttcaccggagttgatataggagtagccgggaatctcaccgggatcggagaatctcccttcacgtcgatatgcctcgcggatattcatttacaaacgcgatcagaagaatcttggatatgctccaacgtctctggtttctcagacgacgtatcaccggagccttgtcaagaactcatgagttctccttcgtcttgcttcgccggtggtagcatatacgagggtgatgcgacggctcagtcgtattacagttggtaattatagtaaaataaaatggtgatgaagaagaagaagaagaaaaagaagaagagagtgcatgaggttacgatacgattggattttcgaattttttttgtcaataagttcataaaatttgttgtcagagagcgagaggaagaagataaaaaaagaaaaattacgttttaaggtggtgagtttcaagaacagagcgagcttttctattgtattaatgtacagcttccatttctttcattcatggtgtaacaaaattcatctttttttctttctgtgaagaagaaaataaaaaattatatgtgaaatgattagttatg

SEQ ID NO: 87504 - protein, 455 aa, Arabidopsis thaliana; identical to SEQ ID NO: 30248
  peptide (1)..(455): Ceres Seq. ID no. 12701434

SEQ ID NO: 87505 - protein, 453 aa, Arabidopsis thaliana; identical to SEQ ID NO: 30249
  peptide (1)..(453): Ceres Seq. ID no. 12701435

SEQ ID NO: 87506 - DNA, 1395 bp, Arabidopsis thaliana
  misc_feature (1)..(1395): Ceres Seq. ID no. 12701484
  misc_feature (1)..(1395): Ortholog of  Ceres SEQ ID NO 12618563 as cited in SEQ ID NO 65025
gtttccgaaacgttgggctttgcttagctgcgacattttcagtgaacgaagaaaaccacggtagtagactagtagttgtagaaaaaaacaaaacgaaatcgaagaagaagagaggaaggatgaagaagatcccggtgcttctcatgggctgcggaggcgttggccgccaccttcttcaacacatcgtctcttgccgatcgcttcacgccaaaatgggagttcatatacgggtgattggagtatgtgatagtaaatccttagttgctccaatggatgtgctcaaagaggaactgaatgatgaactcttgtcagaagtttgccttatcaaatcaactggttctgcattatcgaagttgggtgctttgggtggatatcgagtcgtccatgattccgagttaagcacggaaacagaagagattgcaaaacttcttggtaaatctacaggcttagctgtggtggattgctcagccagcatggagacgattgaaatattgatgaaggcagttgacttgggttgctgtattgtcctggcaaataagaagcctgttacttcaacgctggaacattacgacaaattggctttgcatccgcgattcatccgccatgaatctactgttggtgctggtcttcctgtcatcgcatccttgaaccgcataatttcgtctggagatcctgttcataggattgtcggtagtttgagcggtaccttgggatatgtaatgagtgagcttgaagatggcaagcctctaagccaagttgttcaagctgccaaaaagctggggtacactgaaccagatccacgtgacgacctcggtggcatggatgttgctagaaagggtttgattcttgctcgacttcttgggaagaggataattatggacagcattaagatagagagcttgtatccagaagagatgggacctggactcatgtctgtggatgatttcctccataatggaatagtaaaacttgatcagaatatagaggagagagttaaaaaagcttcatcaaaagggtgtgtgcttcgttatgtctgtgtgattgagggttcaagcgttcaagttggcattcgagaagtttcaaaagattcaccattgggacggctaagaggcagtgacaatatagtagagatatatagccgttgctacaaggagcagcctttggtgattcaaggtgccggagccgggaacgacacaactgcagccggtgttcttgcagacatcatcgacttgcaggatctttttcactgagaggaggctgtggtatttagtttttatcaaaataataataacacaattcataattgatctcttctctgatcttgtcaaggcagaaaattagccaacaagaacgtggcctctccttaacattaccaaaaagagatttttttttttt

SEQ ID NO: 87507 - protein, 415 aa, Arabidopsis thaliana; identical to SEQ ID NO: 41730
  peptide (1)..(415): Ceres Seq. ID no. 12701485

SEQ ID NO: 87508 - protein, 376 aa, Arabidopsis thaliana; identical to SEQ ID NO: 41731
  peptide (1)..(376): Ceres Seq. ID no. 12701486

SEQ ID NO: 87509 - protein, 368 aa, Arabidopsis thaliana; identical to SEQ ID NO: 41732
  peptide (1)..(368): Ceres Seq. ID no. 12701487

SEQ ID NO: 87510 - DNA, 1137 bp, Arabidopsis thaliana
  misc_feature (1)..(1137): Ceres Seq. ID no. 12701488
  misc_feature (1)..(1137): Ortholog of  Ceres SEQ ID NO 15179305 as cited in SEQ ID NO 0
ctcagaacctcagatcttattcttagaagtttccccatgaaatccgagaagattcaaatgtaaattcagcctccgattcatatattttgctcaccggaaacttcagatcgagctactgcaatttgcggatcgtgtttttttttttctttcaattcacggtgtatttatctcgggagaagaagaatggatactttcacggcggaggatctgtcgacgatcggcggaatagcgacagtatcgctccttcactcgtttattccgacgcattggctacctttctccatcgtcggacgtgcgcagaaatggacgctttcgagaacactcctcgtcactgcatttggagcagtcctacatgttatatccacttctctccttggtataacagcaatcacaatggcgaataccatcgctggtgaagagactgttcacaaacttgcttcccttttgcttgtatttctcggtggaagctatgttttgctgtttttggctggtaaaggtggtcacactcattctcataaccaacccatggagaaaatggctgttgctggacttgtccttgttcctgcattatctccttgtgcaacaactctcccggttttcctcgctgttggaaattccaagtccatgatggttctcgccatcatagttctgctcttcagcaccatattggttatgacatcgctggttgctctatcgttctatggtgcaagccagctcaagtttcactgggtggagcggtacgacaaactactggttggttcagtcctgtgtttggtaggtatcttaacccttctcttccatgatcatgaccatggcggtcatgaagcacatcaactccacaggaaaatcattactctttagataccgtttcgagtctctgttttgcctatctgtcatgtctgtttgttgtagagcgtcttaaggtctattaatctttctgcttcgcgttgtatgtctataactagttgtaacgctctctgttgcacgtgaagaaacatatggaagcattaaattccttaaatagaacaactctttggaggtctagtgtaaggcttgtagcttttacataattttgtagttgttccgttgataaagttgggtttaatttttgtaatacaacatagttgtcttcgagtc

SEQ ID NO: 87511 - protein, 225 aa, Arabidopsis thaliana; identical to SEQ ID NO: 26717
  peptide (1)..(225): Ceres Seq. ID no. 12701489

SEQ ID NO: 87512 - protein, 155 aa, Arabidopsis thaliana; identical to SEQ ID NO: 26718
  peptide (1)..(155): Ceres Seq. ID no. 12701490

SEQ ID NO: 87513 - DNA, 945 bp, Arabidopsis thaliana
  misc_feature (1)..(945): Ceres Seq. ID no. 12701495
  misc_feature (1)..(945): Ortholog of  Ceres SEQ ID NO 15178931 as cited in SEQ ID NO 1125
  misc_feature (1)..(945): Ortholog of  Ceres SEQ ID NO 13596648 as cited in SEQ ID NO 63080
atggcgtctcgaaactatcggtgggagctcttcgcagcttcgttaaccctaaccttagctttgattcacctggtcgaagcaaactccgaaggagatgctctctacgctcttcgccggagtttgacagatccagaccatgtcctccagagctgggatccaactcttgttaatccttgtacctggttccatgtcacctgtaaccaagacaaccgcgtcactcgtgtggatttgggaaattcaaacctctctggacatcttgcgcctgagcttgggaagcttgaacatttacagtatctagagctctacaaaaacaacatccaaggaactataccttccgaacttggaaatctgaagaatctcatcagcttggatctgtacaacaacaatcttacagggatagttcccacttctttgggaaaattgaagtctctggtctttttacggcttaatgacaaccgattgaccggtccaatccctagagcactcacggcaatcccaagccttaaagttgttgacgtctcaagcaatgatttgtgtggaacaatcccaacaaacggaccctttgctcacattcctttacagaactttgagaacaacccgagattggagggaccggaattactcggtcttgcaagctacgacactaactgcacctgaaacaactggcaaaacctgaaaatgaagaattggggggtgaccttgtaagaacacttcaccactttatcaaatatcacatctattatgtaataagtatatatatgtagtaaaaacaaaaaaaatgaagaatcgaatcggtaatatcatctggtctcaattgagaacttcgaggtctgtatgtaaaatttctaaatgcgattttcgcttactgtaatgttcggttgtgggattctgagaagtaacatttgtattggtatggtatcaagttgttctgccttgtctgcattt

SEQ ID NO: 87514 - protein, 218 aa, Arabidopsis thaliana; identical to SEQ ID NO: 21774
  peptide (1)..(218): Ceres Seq. ID no. 12701496

SEQ ID NO: 87515 - DNA, 774 bp, Arabidopsis thaliana
  misc_feature (1)..(774): Ceres Seq. ID no. 12701507
  misc_feature (1)..(774): Ortholog of  Ceres SEQ ID NO 15179206 as cited in SEQ ID NO 0
atgtctacatattcttcttctagctcagatctctcttttgttcgtcttcagttccaatggcgtcgtgtattgctactgctcctctttctctatctggcgtgtctcaatctcattatgtgaaagctaatggattgtctacaacaacaaaactcagttctatttgtaaaacctctgatttgactattcacaagaaatcaaaccggactcgcaagttttctgtttctgcagggtatcgagatggaagtagaagcggaagcagtggtgatttcattgctggttttcttctaggaggtgctgtctttggcgctgttgcttatatctttgctccacagatccgaagatcggttctaaatgaagaagacgagtacggttttgagaagccgaaacagccaacgtactacgatgaaggtttagagaaaacaagagagacactgaatgagaaaataggacaacttaattcagcgatagacaatgtctcttcgcgtttacgaggtcgagaaaagaacacttcttccctaaatgtaccggtcgaaactgacccagaggttgaagctacgacttgaaggaagaaacaaacagctttcttcttctgtgtttcatttgtaaactagagttaaaaaaccattacttatatgtttgatttggttcttttctttctggtttgcctttgtgctcagtccttagtagaaagaactcttgcaaagtgaaatgtatacgtcttttggttttagtgtgaatttggttcaatttaattcgaaaaaatctttgttctct

SEQ ID NO: 87516 - protein, 168 aa, Arabidopsis thaliana; identical to SEQ ID NO: 22165
  peptide (1)..(168): Ceres Seq. ID no. 12701508

SEQ ID NO: 87517 - DNA, 2214 bp, Arabidopsis thaliana
  misc_feature (1)..(2214): Ceres Seq. ID no. 12701509
  misc_feature (1)..(2214): Ortholog of  Ceres SEQ ID NO 14303500 as cited in SEQ ID NO 54123
  misc_feature (1)..(2214): Ortholog of  Ceres SEQ ID NO 13584593 as cited in SEQ ID NO 65340
  misc_feature (1)..(2214): Ortholog of  Ceres SEQ ID NO 14303141 as cited in SEQ ID NO 65752
atggcgagatccttctatttttgtttattcttcttattcatttcttcaacatcaaagctaaccacaagctatcctctctccacaaagtcacgatggatcgtggacgagaaaggtcaaagggtgaagctagcatgcgtgaactggccggctcatctccagcccacggtggctgaagggctaagcaaacaaccattagactctatctccaagaagattgtgtcaatgggatttaactgcgttaggcttacttggcctcttgatttggtgactaatgacacattggctcttaaagttaccgttaaacagtctttcgaaagcttgaagttgtttgaagatgttcttgggattcaaactcacaatcccaaattacttcatcttccccttttcaatgcattccaggaagtggtgtcgaacttaggagaaaacggagtaatggtgatactagataaccacttgacaacgccaggctggtgctgcggcgataatgacctcgatgctttctttggctaccctcactttgatcccctcgtctgggccaagggcttgaggaagatggctactcttttccgcaatttcactcacgttattggcatgagccttaggaacgagccacgtggtgctagagattaccctgacctttggttcaggcatatgccgcaaggagcagaggcggtgcacgccgcaaaccctaaattactagtcatcctctcaggcattgacttcgatacaaacctctctttcctccgtgaccgttccgtgaacgtcagcttcacggacaaacttgtcttcgagctccattggtacagtttctccgacggccgagattcgtggagaaaacacaactctaatgatttctgcgtcaaaattatcgaaaaggttacacacaacggaggattcttgcttggaagaggctttcctttgatcttgagtgagtttgggacggaccagagaggcggtgacatgagcggaaaccggtatatgaattgtttggtggcttgggcggccgagaatgatttggattgggcggtttgggccttaaccggagattattatttgagaaccggacctggattgcgacccaacaagaaccttctcttccatccatcaacaggactctgcgtcactaataatccatcagacaatataccaacacttcgattaggaccatgccctaaatccgacccatggacctttaatcccagtgaaggcattctttggatcaacaaaatgtgcgtcgaagctccaaatgttgttggacaaaaggtgaagctcggagttggtaccaagtgttctaagttgggacaaatctcagctacaaagatgcatttgtcgttcaagacaagtaatggtttgttgctatgtcttgacgtagacgaacgtgacaacagcgtcgtagctaaccgttgcaagtttttgaccatggatgcttcttgtgatccagcgagccaatggtttcaaccaagcaccaccgccggtgttttatcggcgtcagtgagccgcgccggttttatcaagcggtgcggttcgactaaaccgggaagggttggccggtttgttacaatggcgacggcggcgagtcctcttgaaatctgcgttaaagcttctatcaccactcccaacaagctcggagactgccctttttgccaaaaggtgttactgacaatggaggagaagaatgttccttatgacatgaaaatggtggatttgagtaacaaaccagaatggttcttgaagattagtccagaaggtaaagtcccagttgtgaagtttgatgagaaatgggttccggattcagatgttataacacaggctttagaagagaagtatcctgagcctcctcttgctaccccacctgaaaaggcttcagttggatcgaagatcttttccacatttgtcggttttctgaagagcaaagattcaggagatggaactgagcaagttttgttggatgagcttactacattcaacgattatatcaaggacaatggccctttcataaatggagagaagatctcggcagcagatttgtccttggcaccaaagttataccacatgaagattgcattgggacattacaagaactggtctgttccagattcacttcctttcgtcaaatcctacatggagaatgttttctcgagggaatcattcacgaacacacgggcggaaacagaggatgtaattgctggttggagaccaaaggttatgggttaa

SEQ ID NO: 87518 - protein, 737 aa, Arabidopsis thaliana
  peptide (1)..(737): Ceres Seq. ID no. 12701510
MARSFYFCLFFLFISSTSKLTTSYPLSTKSRWIVDEKGQRVKLACVNWPAHLQPTVAEGLSKQPLDSISKKIVSMGFNCVRLTWPLDLVTNDTLALKVTVKQSFESLKLFEDVLGIQTHNPKLLHLPLFNAFQEVVSNLGENGVMVILDNHLTTPGWCCGDNDLDAFFGYPHFDPLVWAKGLRKMATLFRNFTHVIGMSLRNEPRGARDYPDLWFRHMPQGAEAVHAANPKLLVILSGIDFDTNLSFLRDRSVNVSFTDKLVFELHWYSFSDGRDSWRKHNSNDFCVKIIEKVTHNGGFLLGRGFPLILSEFGTDQRGGDMSGNRYMNCLVAWAAENDLDWAVWALTGDYYLRTGPGLRPNKNLLFHPSTGLCVTNNPSDNIPTLRLGPCPKSDPWTFNPSEGILWINKMCVEAPNVVGQKVKLGVGTKCSKLGQISATKMHLSFKTSNGLLLCLDVDERDNSVVANRCKFLTMDASCDPASQWFQPSTTAGVLSASVSRAGFIKRCGSTKPGRVGRFVTMATAASPLEICVKASITTPNKLGDCPFCQKVLLTMEEKNVPYDMKMVDLSNKPEWFLKISPEGKVPVVKFDEKWVPDSDVITQALEEKYPEPPLATPPEKASVGSKIFSTFVGFLKSKDSGDGTEQVLLDELTTFNDYIKDNGPFINGEKISAADLSLAPKLYHMKIALGHYKNWSVPDSLPFVKSYMENVFSRESFTNTRAETEDVIAGWRPKVMG

SEQ ID NO: 87519 - protein, 663 aa, Arabidopsis thaliana
  peptide (1)..(663): Ceres Seq. ID no. 12701511
MGFNCVRLTWPLDLVTNDTLALKVTVKQSFESLKLFEDVLGIQTHNPKLLHLPLFNAFQEVVSNLGENGVMVILDNHLTTPGWCCGDNDLDAFFGYPHFDPLVWAKGLRKMATLFRNFTHVIGMSLRNEPRGARDYPDLWFRHMPQGAEAVHAANPKLLVILSGIDFDTNLSFLRDRSVNVSFTDKLVFELHWYSFSDGRDSWRKHNSNDFCVKIIEKVTHNGGFLLGRGFPLILSEFGTDQRGGDMSGNRYMNCLVAWAAENDLDWAVWALTGDYYLRTGPGLRPNKNLLFHPSTGLCVTNNPSDNIPTLRLGPCPKSDPWTFNPSEGILWINKMCVEAPNVVGQKVKLGVGTKCSKLGQISATKMHLSFKTSNGLLLCLDVDERDNSVVANRCKFLTMDASCDPASQWFQPSTTAGVLSASVSRAGFIKRCGSTKPGRVGRFVTMATAASPLEICVKASITTPNKLGDCPFCQKVLLTMEEKNVPYDMKMVDLSNKPEWFLKISPEGKVPVVKFDEKWVPDSDVITQALEEKYPEPPLATPPEKASVGSKIFSTFVGFLKSKDSGDGTEQVLLDELTTFNDYIKDNGPFINGEKISAADLSLAPKLYHMKIALGHYKNWSVPDSLPFVKSYMENVFSRESFTNTRAETEDVIAGWRPKVMG

SEQ ID NO: 87520 - protein, 593 aa, Arabidopsis thaliana
  peptide (1)..(593): Ceres Seq. ID no. 12701512
MVILDNHLTTPGWCCGDNDLDAFFGYPHFDPLVWAKGLRKMATLFRNFTHVIGMSLRNEPRGARDYPDLWFRHMPQGAEAVHAANPKLLVILSGIDFDTNLSFLRDRSVNVSFTDKLVFELHWYSFSDGRDSWRKHNSNDFCVKIIEKVTHNGGFLLGRGFPLILSEFGTDQRGGDMSGNRYMNCLVAWAAENDLDWAVWALTGDYYLRTGPGLRPNKNLLFHPSTGLCVTNNPSDNIPTLRLGPCPKSDPWTFNPSEGILWINKMCVEAPNVVGQKVKLGVGTKCSKLGQISATKMHLSFKTSNGLLLCLDVDERDNSVVANRCKFLTMDASCDPASQWFQPSTTAGVLSASVSRAGFIKRCGSTKPGRVGRFVTMATAASPLEICVKASITTPNKLGDCPFCQKVLLTMEEKNVPYDMKMVDLSNKPEWFLKISPEGKVPVVKFDEKWVPDSDVITQALEEKYPEPPLATPPEKASVGSKIFSTFVGFLKSKDSGDGTEQVLLDELTTFNDYIKDNGPFINGEKISAADLSLAPKLYHMKIALGHYKNWSVPDSLPFVKSYMENVFSRESFTNTRAETEDVIAGWRPKVMG

SEQ ID NO: 87521 - DNA, 2058 bp, Arabidopsis thaliana
  misc_feature (1)..(2058): Ceres Seq. ID no. 12701513
  misc_feature (1)..(2058): Ortholog of  Ceres SEQ ID NO 15226186 as cited in SEQ ID NO 0
atggcggccaacaattttgcgacgaagctaagcagaaacaccaatagaattaccgtaatcttggtctacgcattccttgaatggcttctcatgttctttatcttcctcaattcctttttcacttactttatcgtcaaattcgcctctttcttcggtcttaagcaagtatgtcttctctgtccgaagctagatcgaatcttcgagcgaaagccagaaaacagattcacttacaaagagcttttatgtcaaaatcacatcgccgagctcgctagtctgagtttttgcagaactcacgggaaattatccgaatcggcgaacttatgctcagattgctctaatcgcgaagaagaacagagcaacattggtttaggtttttgcacatgttgtcagaagagcttagcggataaaccataccctaattacttgcttctcaagtcatcaatttgggggaaaactttgggtgacagagaagatggaggattgatcttagagatgatcgatgatgataaatttggagatgggtttgagatagatagagaatcttatcccttagggttcttcagagataaagcagaagaaggaaagaagcaagaccagcagcaaaatggtgaagtgatttcagatgttgagagttatggattaagcttgagagaagtgtctgaagaggatgggttaagatctatcatcagcaataattctcctgggaacgaagctaaatcaagagtttcagaggatgaacaaaggaatgatgacacaagcaatgttgccacatatggggaagatcaaatttcaggtagaattcctcattgtgatcaaacaacagggcgtgtagaagaaaaagaagaagaaacaggagtagcagatttgttgtatgaccagtttgagagcaagaatttcactggtagccaaatcgaagaagaagaagaagatagagaagaaacgactaaggagcttgatccggaaactccaacttcagtcagtactttgtttaacaagaaacttcattttcttgctagaaatgagtatgcagctgctgaagatgcaggagatgggaatgtattagtgagtgagatggacggtggcgatcctttaaggactattgaaaggttgagagagacagtgagagcagaacaagaagcactgagagatttatatgcagagctggaagaagaaagaagcgcgtctgcaatatcggctaaccagacaatggcaatgatcacgaggctacaagaagagaaagcgaaagttcagatggaagcgttgcagtatcagagaatgatggaggaacaagccgagtatgatcaagaagccttgcagctattgaatcatttgatggtgaaacgagagaaagagaaggaacaactccagagagaacttgaggtttatcgggcaaaggttttggagtatgaatcgaaagctaagaacaagatcatcgttgtggaaaacgattgtgaggctgatgatgatgataaagaggaggagaatagagaagaggataattcttctgagatggatgtggatttggagaagataacattagattgcgtacaacatatgagcatgcttggtgaatctttatcagagtttgaggaagagaggttagtgattttggatcagcttaaggtgttagaggataggctagtaacaatgcaggacaaggaatctgctgaggatccgggagaattcagcaatagttatgaagaagcgagtaatggacatggaggactaacaatggcatcaatggcaaagagtctgctacctcttctagacgcagcagagaacgaatcagaagacgggtctcaaggactaccagaatcagatgaaaagaactttggttcggacagtgagaaactggagataatcaaacaagttgatagtgtctatgagaggttacaggagctggaaacagatggagagtttctgaaaaactgtatgagttcagcgaagaaaggtgacaaaggaacagatattcttaaagatatattgcaacatctccgcgatctcagaaccattgaactcactaacacaattgaaaaccagacgacacaggaagagtga

SEQ ID NO: 87522 - protein, 685 aa, Arabidopsis thaliana
  peptide (1)..(685): Ceres Seq. ID no. 12701514
MAANNFATKLSRNTNRITVILVYAFLEWLLMFFIFLNSFFTYFIVKFASFFGLKQVCLLCPKLDRIFERKPENRFTYKELLCQNHIAELASLSFCRTHGKLSESANLCSDCSNREEEQSNIGLGFCTCCQKSLADKPYPNYLLLKSSIWGKTLGDREDGGLILEMIDDDKFGDGFEIDRESYPLGFFRDKAEEGKKQDQQQNGEVISDVESYGLSLREVSEEDGLRSIISNNSPGNEAKSRVSEDEQRNDDTSNVATYGEDQISGRIPHCDQTTGRVEEKEEETGVADLLYDQFESKNFTGSQIEEEEEDREETTKELDPETPTSVSTLFNKKLHFLARNEYAAAEDAGDGNVLVSEMDGGDPLRTIERLRETVRAEQEALRDLYAELEEERSASAISANQTMAMITRLQEEKAKVQMEALQYQRMMEEQAEYDQEALQLLNHLMVKREKEKEQLQRELEVYRAKVLEYESKAKNKIIVVENDCEADDDDKEEENREEDNSSEMDVDLEKITLDCVQHMSMLGESLSEFEEERLVILDQLKVLEDRLVTMQDKESAEDPGEFSNSYEEASNGHGGLTMASMAKSLLPLLDAAENESEDGSQGLPESDEKNFGSDSEKLEIIKQVDSVYERLQELETDGEFLKNCMSSAKKGDKGTDILKDILQHLRDLRTIELTNTIENQTTQEE

SEQ ID NO: 87523 - protein, 655 aa, Arabidopsis thaliana
  peptide (1)..(655): Ceres Seq. ID no. 12701515
MFFIFLNSFFTYFIVKFASFFGLKQVCLLCPKLDRIFERKPENRFTYKELLCQNHIAELASLSFCRTHGKLSESANLCSDCSNREEEQSNIGLGFCTCCQKSLADKPYPNYLLLKSSIWGKTLGDREDGGLILEMIDDDKFGDGFEIDRESYPLGFFRDKAEEGKKQDQQQNGEVISDVESYGLSLREVSEEDGLRSIISNNSPGNEAKSRVSEDEQRNDDTSNVATYGEDQISGRIPHCDQTTGRVEEKEEETGVADLLYDQFESKNFTGSQIEEEEEDREETTKELDPETPTSVSTLFNKKLHFLARNEYAAAEDAGDGNVLVSEMDGGDPLRTIERLRETVRAEQEALRDLYAELEEERSASAISANQTMAMITRLQEEKAKVQMEALQYQRMMEEQAEYDQEALQLLNHLMVKREKEKEQLQRELEVYRAKVLEYESKAKNKIIVVENDCEADDDDKEEENREEDNSSEMDVDLEKITLDCVQHMSMLGESLSEFEEERLVILDQLKVLEDRLVTMQDKESAEDPGEFSNSYEEASNGHGGLTMASMAKSLLPLLDAAENESEDGSQGLPESDEKNFGSDSEKLEIIKQVDSVYERLQELETDGEFLKNCMSSAKKGDKGTDILKDILQHLRDLRTIELTNTIENQTTQEE

SEQ ID NO: 87524 - protein, 521 aa, Arabidopsis thaliana
  peptide (1)..(521): Ceres Seq. ID no. 12701516
MIDDDKFGDGFEIDRESYPLGFFRDKAEEGKKQDQQQNGEVISDVESYGLSLREVSEEDGLRSIISNNSPGNEAKSRVSEDEQRNDDTSNVATYGEDQISGRIPHCDQTTGRVEEKEEETGVADLLYDQFESKNFTGSQIEEEEEDREETTKELDPETPTSVSTLFNKKLHFLARNEYAAAEDAGDGNVLVSEMDGGDPLRTIERLRETVRAEQEALRDLYAELEEERSASAISANQTMAMITRLQEEKAKVQMEALQYQRMMEEQAEYDQEALQLLNHLMVKREKEKEQLQRELEVYRAKVLEYESKAKNKIIVVENDCEADDDDKEEENREEDNSSEMDVDLEKITLDCVQHMSMLGESLSEFEEERLVILDQLKVLEDRLVTMQDKESAEDPGEFSNSYEEASNGHGGLTMASMAKSLLPLLDAAENESEDGSQGLPESDEKNFGSDSEKLEIIKQVDSVYERLQELETDGEFLKNCMSSAKKGDKGTDILKDILQHLRDLRTIELTNTIENQTTQEE

SEQ ID NO: 87525 - DNA, 1560 bp, Arabidopsis thaliana
  misc_feature (1)..(1560): Ceres Seq. ID no. 12701521
  misc_feature (1)..(1560): Ortholog of  Ceres SEQ ID NO 15171606 as cited in SEQ ID NO 57214
  misc_feature (1)..(1560): Ortholog of  Ceres SEQ ID NO 13596921 as cited in SEQ ID NO 62368
atggccatgcctgcttttcttcaatatttgagcttgagaagaacagaagaaacttccaggatcaatcaatcgatcaactttagtgaactaactcttgatttttcattcgaagttatggaatcggttcccgaatccgtaccatcgccgaactcgaatacaccgtcaataccaccgccggtgaactccgtaccgcctttcttgagtaaaacctacgacatggttgatgatccgttgaccaatgaggtcgtttcgtggagcagcgggaacaacagcttcgtcgtctggagtgccccggagttctcgaaggtgctcttgcccaagtatttcaagcacaacaacttctccagcttcgtcagacagttaaatacttatggtttcagaaaagttgatcctgaccgatgggaatttgcaaatgaaggatttcttagaggccgaaaacaactactgaagagtattgtcaggagaaaaccttcgcatgtgcagcagaatcagcaacaaactcaagttcagagctcatctgttggtgcttgtgtcgaggtggggaagtttggaatagaagaagaagtggaaagacttaagcgggataagaatgttcttatgcaagaactcgtcaggttaaggcagcaacagcaagctactgaaaaccaactgcagaatgtgggacagaaagttcaggtgatggagcaaaggcaacaacaaatgatgtcgtttttagcaaaggctgttcaaagtccaggtttcttaaaccagttagtacaacagaataataatgatggcaacagacaaattccaggaagcaacaaaaagaggagacttcctgtagatgagcaggagaatcgtggtgacaatgtggctaatggtcttaaccgccagattgttagatatcagccgtcgataaacgaagcagcacaaaatatgcttcgacagttcttaaatactagtacctcacctcggtatgaatcagtttcaaacaatcctgacagtttcctattgggtgatgttcccagttctacctctgtagacaatgggaacccttcaagtagagtttctggagtaacattggccgagttttcacccaacacagttcagtcagcaacgaatcaagtacccgaagcaagtttggctcatcatcctcaagctggtctggttcagccaaatataggtcaaagtccggctcaaggagcagcacctgcagactcttggagccctgaatttgatttagttggatgcgagacagatagtggagagtgttttgatccaataatggctgttttagatgagtcagaaggcgatgcaatttctcctgaaggtgagggcaagatgaatgagttactggagggagtccctaagctgcccggaatccaagatccattctgggaacagttcttttctgttgaactcccagcgattgcagatacagacgatattctatcaggatcagtggagaataatgacttggtattggaacaagaaccaaacgagtggacccgtaatgaacaacaaatgaagtatcttactgaacaaatgggactgctttcctcagaagcacagaggaaataa

SEQ ID NO: 87526 - protein, 519 aa, Arabidopsis thaliana
  peptide (1)..(519): Ceres Seq. ID no. 12701522
MAMPAFLQYLSLRRTEETSRINQSINFSELTLDFSFEVMESVPESVPSPNSNTPSIPPPVNSVPPFLSKTYDMVDDPLTNEVVSWSSGNNSFVVWSAPEFSKVLLPKYFKHNNFSSFVRQLNTYGFRKVDPDRWEFANEGFLRGRKQLLKSIVRRKPSHVQQNQQQTQVQSSSVGACVEVGKFGIEEEVERLKRDKNVLMQELVRLRQQQQATENQLQNVGQKVQVMEQRQQQMMSFLAKAVQSPGFLNQLVQQNNNDGNRQIPGSNKKRRLPVDEQENRGDNVANGLNRQIVRYQPSINEAAQNMLRQFLNTSTSPRYESVSNNPDSFLLGDVPSSTSVDNGNPSSRVSGVTLAEFSPNTVQSATNQVPEASLAHHPQAGLVQPNIGQSPAQGAAPADSWSPEFDLVGCETDSGECFDPIMAVLDESEGDAISPEGEGKMNELLEGVPKLPGIQDPFWEQFFSVELPAIADTDDILSGSVENNDLVLEQEPNEWTRNEQQMKYLTEQMGLLSSEAQRK

SEQ ID NO: 87527 - protein, 517 aa, Arabidopsis thaliana
  peptide (1)..(517): Ceres Seq. ID no. 12701523
MPAFLQYLSLRRTEETSRINQSINFSELTLDFSFEVMESVPESVPSPNSNTPSIPPPVNSVPPFLSKTYDMVDDPLTNEVVSWSSGNNSFVVWSAPEFSKVLLPKYFKHNNFSSFVRQLNTYGFRKVDPDRWEFANEGFLRGRKQLLKSIVRRKPSHVQQNQQQTQVQSSSVGACVEVGKFGIEEEVERLKRDKNVLMQELVRLRQQQQATENQLQNVGQKVQVMEQRQQQMMSFLAKAVQSPGFLNQLVQQNNNDGNRQIPGSNKKRRLPVDEQENRGDNVANGLNRQIVRYQPSINEAAQNMLRQFLNTSTSPRYESVSNNPDSFLLGDVPSSTSVDNGNPSSRVSGVTLAEFSPNTVQSATNQVPEASLAHHPQAGLVQPNIGQSPAQGAAPADSWSPEFDLVGCETDSGECFDPIMAVLDESEGDAISPEGEGKMNELLEGVPKLPGIQDPFWEQFFSVELPAIADTDDILSGSVENNDLVLEQEPNEWTRNEQQMKYLTEQMGLLSSEAQRK

SEQ ID NO: 87528 - protein, 481 aa, Arabidopsis thaliana; identical to SEQ ID NO: 77771
  peptide (1)..(481): Ceres Seq. ID no. 12701524

SEQ ID NO: 87529 - DNA, 3000 bp, Arabidopsis thaliana
  misc_feature (1)..(3000): Ceres Seq. ID no. 12701539
  misc_feature (1)..(3000): Ortholog of  Ceres SEQ ID NO 13658778 as cited in SEQ ID NO 66511
atggctggctctaaaggatcgtcttgcgcgatccctggctgtgatgctaaggttatgagcgatgagagaggtcaagaccttcttccttgtgaatgtgactttaaaatttgtagggattgcttcatagatgctgtcaaaaccggaggtgggatttgccccgggtgtaaagaaccgtacaagaacacgcatttgaccgatcaggttgatgaaaacggtcagcaaaggcctatgctgcctgggggtggcgggtcaaagatggagagaagattgtcgatggtgaagtcaactaataaatcagctttgatgaggagtcagactggagattttgatcacaacaggtggttatttgagacgactggaacttatggttatgggaatgctttttggacaaaggacggggatttcgggagcggtaaggatggagatggagatggtgacggtatgggtatggaggcccaagatttgatgagcagaccgtggagaccgcttactcggaagctgaaaattcctgctggtgttattagtccatacaggcttttgatatttatccgtatagttgttcttgcattgttcttgacttggagggttaaacatcaaaacccagacgctgtatggttatggggaatgtctgtggtttgtgagctatggtttgccttgtcttggcttcttgatcagctccctaagctatgcccgattaatcgtgccaccgatcttcaagtcttgaaggaaaagtttgaaacaccgacagccagcaacccgaccggcaaatccgaccttcctggattcgatgtctttgtctctactgcggatccggagaaagaacctcctctggtcactgctaataccattttatctattcttgctgcggaatatcctgttgagaagctttcttgctatgtatctgatgatggaggggcgcttcttacgtttgaagcaatggctgaagctgctagctttgccaacatttgggttcctttttgtcgtaaacatgcgatcgagccgaggaatcctgattcctactttagcttaaagagagatccttacaagaacaaagtgaagtctgatttcgtgaaggatcgtagacgggttaagcgtgagtttgatgagtttaaagtcaggaggcagaacagggacgatgagcctatggagcccgtgaagattcctaaagctacatggatggctgatggtactcactggcctggaacttggttgacttctgccagtgatcatgccaagggagaccacgcgggtatcattcaggtgatgttgaagccacctagtgatgaaccactacacggagtatccgaagggtttcttgatctaaccgacgtggacattcgactcccgctccttgtgtatgtttctcgtgagaagcgacctggttatgatcataacaagaaggctggagccatgaacgccttagtcagagcttctgcgattatgtcaaatggaccgttcatactcaatcttgactgtgatcattacatatacaactctgaggctctgagagaaggcatgtgtttcatgatggatagaggcggggatcgtctttgctacgttcagtttccgcagcggtttgaaggtattgacccatctgatagatatgctaatcacaacactgtcttctttgacgtcaacatgagagctcttgatgggcttatgggtccggtttatgtcggaaccggttgtctcttccgaagaatcgcgctttatggattcaatccgcctcgaagcaaggacttttccccaagttgctggagttgttgtttccctcgtagcaagaagaagaatattcctgaagaaaaccgagctctgcgtatgagtgattatgatgacgaagagatgaatctctctctagtcccgaagaagttcggtaactcaacattcctcattgattcaattcccgttgctgagttccaaggccggcctctcgcggaccaccctgcggttaaaaacgggcgtccaccgggtgcactcaccattcctcgagaacttcttgatgcatcgactgtagcagaagccattgctgttatctcttgctggtacgaggataaaactgagtggggatcacgtatcggatggatttacggttcagtcactgaagatgttgtcacaggttatagaatgcataaccgaggctggaaatcggtttactgtgtgacgaaacgggatgctttccgtggcacagctcctattaacttgacggataggcttcaccaggttctccgttgggctactggctcggtggagatctttttctcccgtaacaacgctcttctcgcaagctcgaaaatgaaaatactccagagaattgcctacttaaacgtcggtatctacccgttcacatcgatcttcctcatcgtatactgtttcctaccagcgctctccctcttctctggtcagttcatcgtccagacgctcaacgtcactttcctagtctaccttctcatcatctccatcactctctgcttactggccctcctcgagatcaaatggtcaggaatctcactcgaggaatggtggagaaacgaacagttttggctcattggaggaacaagtgctcatctcgcagctgtgcttcaaggtttgctcaaagttgtagcaggagtcgaaatctccttcacgctcacgagtaaatccggaggagatgatatagacgacgagtttgcggatttgtacatggtgaaatggacttcacttatgatccctccgattaccatcattatggtgaatctgatagcgattgcggttggattcagcaggacgatttacagtgtggttcctcagtggagtaaactgattggaggagtgttcttcagtttttgggttttggcacatctttatccatttgctaaaggtctaatgggaagaagaggaagaacaccaacgattgtgtatgtttggtctggtcttgtggccattaccatttctcttctttgggtcgccattaatccaccggctggtaatactgagatcggaggaaacttcagttttccatga

SEQ ID NO: 87530 - protein, 999 aa, Arabidopsis thaliana
  peptide (1)..(999): Ceres Seq. ID no. 12701540
MAGSKGSSCAIPGCDAKVMSDERGQDLLPCECDFKICRDCFIDAVKTGGGICPGCKEPYKNTHLTDQVDENGQQRPMLPGGGGSKMERRLSMVKSTNKSALMRSQTGDFDHNRWLFETTGTYGYGNAFWTKDGDFGSGKDGDGDGDGMGMEAQDLMSRPWRPLTRKLKIPAGVISPYRLLIFIRIVVLALFLTWRVKHQNPDAVWLWGMSVVCELWFALSWLLDQLPKLCPINRATDLQVLKEKFETPTASNPTGKSDLPGFDVFVSTADPEKEPPLVTANTILSILAAEYPVEKLSCYVSDDGGALLTFEAMAEAASFANIWVPFCRKHAIEPRNPDSYFSLKRDPYKNKVKSDFVKDRRRVKREFDEFKVRRQNRDDEPMEPVKIPKATWMADGTHWPGTWLTSASDHAKGDHAGIIQVMLKPPSDEPLHGVSEGFLDLTDVDIRLPLLVYVSREKRPGYDHNKKAGAMNALVRASAIMSNGPFILNLDCDHYIYNSEALREGMCFMMDRGGDRLCYVQFPQRFEGIDPSDRYANHNTVFFDVNMRALDGLMGPVYVGTGCLFRRIALYGFNPPRSKDFSPSCWSCCFPRSKKKNIPEENRALRMSDYDDEEMNLSLVPKKFGNSTFLIDSIPVAEFQGRPLADHPAVKNGRPPGALTIPRELLDASTVAEAIAVISCWYEDKTEWGSRIGWIYGSVTEDVVTGYRMHNRGWKSVYCVTKRDAFRGTAPINLTDRLHQVLRWATGSVEIFFSRNNALLASSKMKILQRIAYLNVGIYPFTSIFLIVYCFLPALSLFSGQFIVQTLNVTFLVYLLIISITLCLLALLEIKWSGISLEEWWRNEQFWLIGGTSAHLAAVLQGLLKVVAGVEISFTLTSKSGGDDIDDEFADLYMVKWTSLMIPPITIIMVNLIAIAVGFSRTIYSVVPQWSKLIGGVFFSFWVLAHLYPFAKGLMGRRGRTPTIVYVWSGLVAITISLLWVAINPPAGNTEIGGNFSFP

SEQ ID NO: 87531 - protein, 981 aa, Arabidopsis thaliana
  peptide (1)..(981): Ceres Seq. ID no. 12701541
MSDERGQDLLPCECDFKICRDCFIDAVKTGGGICPGCKEPYKNTHLTDQVDENGQQRPMLPGGGGSKMERRLSMVKSTNKSALMRSQTGDFDHNRWLFETTGTYGYGNAFWTKDGDFGSGKDGDGDGDGMGMEAQDLMSRPWRPLTRKLKIPAGVISPYRLLIFIRIVVLALFLTWRVKHQNPDAVWLWGMSVVCELWFALSWLLDQLPKLCPINRATDLQVLKEKFETPTASNPTGKSDLPGFDVFVSTADPEKEPPLVTANTILSILAAEYPVEKLSCYVSDDGGALLTFEAMAEAASFANIWVPFCRKHAIEPRNPDSYFSLKRDPYKNKVKSDFVKDRRRVKREFDEFKVRRQNRDDEPMEPVKIPKATWMADGTHWPGTWLTSASDHAKGDHAGIIQVMLKPPSDEPLHGVSEGFLDLTDVDIRLPLLVYVSREKRPGYDHNKKAGAMNALVRASAIMSNGPFILNLDCDHYIYNSEALREGMCFMMDRGGDRLCYVQFPQRFEGIDPSDRYANHNTVFFDVNMRALDGLMGPVYVGTGCLFRRIALYGFNPPRSKDFSPSCWSCCFPRSKKKNIPEENRALRMSDYDDEEMNLSLVPKKFGNSTFLIDSIPVAEFQGRPLADHPAVKNGRPPGALTIPRELLDASTVAEAIAVISCWYEDKTEWGSRIGWIYGSVTEDVVTGYRMHNRGWKSVYCVTKRDAFRGTAPINLTDRLHQVLRWATGSVEIFFSRNNALLASSKMKILQRIAYLNVGIYPFTSIFLIVYCFLPALSLFSGQFIVQTLNVTFLVYLLIISITLCLLALLEIKWSGISLEEWWRNEQFWLIGGTSAHLAAVLQGLLKVVAGVEISFTLTSKSGGDDIDDEFADLYMVKWTSLMIPPITIIMVNLIAIAVGFSRTIYSVVPQWSKLIGGVFFSFWVLAHLYPFAKGLMGRRGRTPTIVYVWSGLVAITISLLWVAINPPAGNTEIGGNFSFP

SEQ ID NO: 87532 - protein, 923 aa, Arabidopsis thaliana
  peptide (1)..(923): Ceres Seq. ID no. 12701542
MLPGGGGSKMERRLSMVKSTNKSALMRSQTGDFDHNRWLFETTGTYGYGNAFWTKDGDFGSGKDGDGDGDGMGMEAQDLMSRPWRPLTRKLKIPAGVISPYRLLIFIRIVVLALFLTWRVKHQNPDAVWLWGMSVVCELWFALSWLLDQLPKLCPINRATDLQVLKEKFETPTASNPTGKSDLPGFDVFVSTADPEKEPPLVTANTILSILAAEYPVEKLSCYVSDDGGALLTFEAMAEAASFANIWVPFCRKHAIEPRNPDSYFSLKRDPYKNKVKSDFVKDRRRVKREFDEFKVRRQNRDDEPMEPVKIPKATWMADGTHWPGTWLTSASDHAKGDHAGIIQVMLKPPSDEPLHGVSEGFLDLTDVDIRLPLLVYVSREKRPGYDHNKKAGAMNALVRASAIMSNGPFILNLDCDHYIYNSEALREGMCFMMDRGGDRLCYVQFPQRFEGIDPSDRYANHNTVFFDVNMRALDGLMGPVYVGTGCLFRRIALYGFNPPRSKDFSPSCWSCCFPRSKKKNIPEENRALRMSDYDDEEMNLSLVPKKFGNSTFLIDSIPVAEFQGRPLADHPAVKNGRPPGALTIPRELLDASTVAEAIAVISCWYEDKTEWGSRIGWIYGSVTEDVVTGYRMHNRGWKSVYCVTKRDAFRGTAPINLTDRLHQVLRWATGSVEIFFSRNNALLASSKMKILQRIAYLNVGIYPFTSIFLIVYCFLPALSLFSGQFIVQTLNVTFLVYLLIISITLCLLALLEIKWSGISLEEWWRNEQFWLIGGTSAHLAAVLQGLLKVVAGVEISFTLTSKSGGDDIDDEFADLYMVKWTSLMIPPITIIMVNLIAIAVGFSRTIYSVVPQWSKLIGGVFFSFWVLAHLYPFAKGLMGRRGRTPTIVYVWSGLVAITISLLWVAINPPAGNTEIGGNFSFP

SEQ ID NO: 87533 - DNA, 1145 bp, Arabidopsis thaliana
  misc_feature (1)..(1145): Ceres Seq. ID no. 12701571
  misc_feature (1)..(1145): Ortholog of  Ceres SEQ ID NO 13589868 as cited in SEQ ID NO 55521
  misc_feature (1)..(1145): Ortholog of  Ceres SEQ ID NO 12617659 as cited in SEQ ID NO 65286
  misc_feature (1)..(1145): Ortholog of  Ceres SEQ ID NO 12780566 as cited in SEQ ID NO 65822
aaaataatttgaaaggaatatgaatattccgttgaagaagacttgctcctgaaatcctttggaccgaaactcgtaaaattatttcccttcaatttctctgaaatctattcaccgtctcctttgtctcctcctccaaatcgatcgttcctcgtcgtcgtctgattttctctacgattgctttttctgtctagctcgataagataaaacaaaactaatttttgaagagtttttttttttgggtttgggagcgatgggtcaagcttttcgtaagctattcgatactttcttcggcaatcaagaaatgagggtcgttatgctggggctggatgctgctggaaaaacaactattctctacaagcttcatattggagaagttttgtctactgttcccaccattggattcaatgttgagaaagttcagtacaagaatgtgatgttcacagtttgggatgttggtggccaagagaaactgagacctctttggaggcattacttcaataatactgatggacttatatacgtggtggattccttagatcgagagaggatcgggaaagcaaagcaagaatttcaggagatcataaaagacccattcatgctaaacagtatcattctggtgtttgcaaacaaacaggacatgagaggagccatgtcaccgagagaagtatgtgaagggttaggcttatttgatctcaagaacaggaaatggcacatacaaggtacttgtgctcttcgtggagacgggctttatgaaggcttggactggttatcatctactcttaaggatgttaaagccgctggattcacatcggttggccactcgttttaaatcttccaggtatactttgatatcaatggccagtgtcttcttcttggctttatcacgaaatcagaatctctgaagactttttttgttaaggaaagaatgatcttctcattgtggcaatattagactccattagactatttttgaattttgatcatgctgccatgaaagcttctttgtatattctgctgatgaagagttgtatcatctgaaaaaccttctctttggggtcatctttgtccgattaagactttggtagatgtatatacattccttcgaaatcatgatatatttttttataacaattataagttttccc

SEQ ID NO: 87534 - protein, 192 aa, Arabidopsis thaliana
  peptide (1)..(192): Ceres Seq. ID no. 12701572
MGQAFRKLFDTFFGNQEMRVVMLGLDAAGKTTILYKLHIGEVLSTVPTIGFNVEKVQYKNVMFTVWDVGGQEKLRPLWRHYFNNTDGLIYVVDSLDRERIGKAKQEFQEIIKDPFMLNSIILVFANKQDMRGAMSPREVCEGLGLFDLKNRKWHIQGTCALRGDGLYEGLDWLSSTLKDVKAAGFTSVGHSF

SEQ ID NO: 87535 - protein, 175 aa, Arabidopsis thaliana
  peptide (1)..(175): Ceres Seq. ID no. 12701573
MRVVMLGLDAAGKTTILYKLHIGEVLSTVPTIGFNVEKVQYKNVMFTVWDVGGQEKLRPLWRHYFNNTDGLIYVVDSLDRERIGKAKQEFQEIIKDPFMLNSIILVFANKQDMRGAMSPREVCEGLGLFDLKNRKWHIQGTCALRGDGLYEGLDWLSSTLKDVKAAGFTSVGHSF

SEQ ID NO: 87536 - protein, 171 aa, Arabidopsis thaliana
  peptide (1)..(171): Ceres Seq. ID no. 12701574
MLGLDAAGKTTILYKLHIGEVLSTVPTIGFNVEKVQYKNVMFTVWDVGGQEKLRPLWRHYFNNTDGLIYVVDSLDRERIGKAKQEFQEIIKDPFMLNSIILVFANKQDMRGAMSPREVCEGLGLFDLKNRKWHIQGTCALRGDGLYEGLDWLSSTLKDVKAAGFTSVGHSF

SEQ ID NO: 87537 - DNA, 1528 bp, Arabidopsis thaliana
  misc_feature (1)..(1528): Ceres Seq. ID no. 12701624
  misc_feature (1)..(1528): Ortholog of  Ceres SEQ ID NO 14307123 as cited in SEQ ID NO 54182
atcaaaaacccaaatctctctgttcgcagagaggatcaattcgtgattcagagaatcaaacttactgtgagagagagataacgaagatggacgctatgaggaagcaactcgatgtgctcatgggagctaacagaaacggcgatgtcactgaggtcaatcgcaaatactacgaccgcgatgtttgccgtctttacctctctggtctctgccctcacgagcttttccaattgacgaaaatggatatgggtccttgcccaaaggtgcactctttgcagctgaggaaagaatataaagatgcaaaggcaaaaggtgttgacaactatgatagggaattggaagatgcgatagataggcttattgttgagtgtgataggaagattggtagggctcttaatcgtcttcaagaagaggatgccaaagctgccattgcaatttctgtcacagaatttactcagtcacctgaaattcttgaattatcgaagcaaatcaaagaaaagatgaaggaagcagacctgcacgatcttgaaggcaaaacagatctgaagattagagctcttgagttagttgaagagatgaggacgaagagagctgacctacaggctgtgctactgttggatgcctttaacaaagataggacatccttgcaacaggcagttccagctcagcaaccagctgcaactttacctccgcccgatcctcgtactcaagaaatgatcaatgaaaaactaaagaaagcagaagagcttggtgaacaagggatggttgatgaagcgcagaaagcactagaagaggcggaagctcttaagaagcttactgctagacaagaacctgtagtggattcaaccaagtacactgctgctgacgtgcgcattacagaccagaagctgcgtctatgtgacatatgcggagcatttttgagcgtctatgacagtgatcgtcggttagctgatcattttggagggaagcttcacttgggttacatgctgatccgcgacaaattggcagagcttcaggaggagaagaacaaagttcacaaggaacgggtcgaagaaaggagatcaaaggagaggagtagagagcgagaatcaagtaaagacagagacggaggagataaccgtgaccgaggaagagatgttgaccgcaggagtagagatcgtgacaggcaccatgaccaccgagaacatgacagaaactataatcagtcacgtggctatgactcaagaagccggcgcagttcacggtcccggtctagggaaagaccgagggatcatgatcgccgcagacgccatgaccgctactaaaaccctgccaaagatggttgcacctggtttaagaggttcttacagatgcgtttaggatctatttggagttacaaacactttcttttttctttgctcaagtgttttaaggatttttgagattgtaacttactttaagtttgtaagaggagcttcttcagatatctttaatttgttttttatgttgttgacatcaaagacttgcgagtagaaagaagattttgttgatc

SEQ ID NO: 87538 - protein, 432 aa, Arabidopsis thaliana; identical to SEQ ID NO: 40645
  peptide (1)..(432): Ceres Seq. ID no. 12701625

SEQ ID NO: 87539 - protein, 404 aa, Arabidopsis thaliana; identical to SEQ ID NO: 40646
  peptide (1)..(404): Ceres Seq. ID no. 12701626

SEQ ID NO: 87540 - protein, 401 aa, Arabidopsis thaliana; identical to SEQ ID NO: 40647
  peptide (1)..(401): Ceres Seq. ID no. 12701627

SEQ ID NO: 87541 - DNA, 1062 bp, Arabidopsis thaliana
  misc_feature (1)..(1062): Ceres Seq. ID no. 12701657
  misc_feature (1)..(1062): Ortholog of  Ceres SEQ ID NO 13638097 as cited in SEQ ID NO 57043
  misc_feature (1)..(1062): Ortholog of  Ceres SEQ ID NO 13596416 as cited in SEQ ID NO 62177
  misc_feature (1)..(1062): Ortholog of  Ceres SEQ ID NO 13659338 as cited in SEQ ID NO 66875
atggatgaaccgtttgccctctctctctctatcttccttatctctctccgccactctccttctctttctccgaactcttcgatggccggtctactcaaaacgccgtctttacatctcacaccaactcttcttcatgctccttctgtaccctttaagcccttttgcgtatctttcgccggaggaagaaacgttagcgtctcactctctcgccgagcttctctccggtctgtctctagcggctatcctctccgcttactaaacctcgtaccctttgcttcgggagaagctgagacgacggagacggaggtggaatcgaacgaacccgaagttcaggagacggatggtgctgttgatgtcgagaatgaaaatgccagtgctgaggagggtgaagctgaggaagaagaagcagctgttatcacagcgttgctgaaatcctataaagaagctttagcagacaacaacgaggggaagattgctgagatagaagcatctttaaagtccatagaagatgaaaaatttctgcttgcggataaagtagcgtctttatccaatgagttatcggtggagagggatcggcttataagaatcagtgcagatttcgacaacttcaggaagaggactgagagggaaaggctaaaccttgtttcaaatgctcaaggagaggttgtagagaatcttttggctgttttggataatttcgagagagctaaatcccaaattaaggtggagactgagggagaagagaaagtcactaatagctatcagagcatatacaaacagtttgtagaaattctgggatcacttggtgttatccatgtggagacagtcggcaagcagtttgatccaatgctacatgaggcaataatgagagaagactctgcggaatacgaagagggtatagtactagaagaatacaggaaaggtttcttgctaggtgaaaggcttttacgtccttcaatggtgaaagtatcagctggacctggaccagaaaagccccttgaagctgaaggagaagaagccacagcacaaggaagcgcagaagaagaatcatcttcatcttga

SEQ ID NO: 87542 - protein, 353 aa, Arabidopsis thaliana
  peptide (1)..(353): Ceres Seq. ID no. 12701658
MDEPFALSLSIFLISLRHSPSLSPNSSMAGLLKTPSLHLTPTLLHAPSVPFKPFCVSFAGGRNVSVSLSRRASLRSVSSGYPLRLLNLVPFASGEAETTETEVESNEPEVQETDGAVDVENENASAEEGEAEEEEAAVITALLKSYKEALADNNEGKIAEIEASLKSIEDEKFLLADKVASLSNELSVERDRLIRISADFDNFRKRTERERLNLVSNAQGEVVENLLAVLDNFERAKSQIKVETEGEEKVTNSYQSIYKQFVEILGSLGVIHVETVGKQFDPMLHEAIMREDSAEYEEGIVLEEYRKGFLLGERLLRPSMVKVSAGPGPEKPLEAEGEEATAQGSAEEESSSS

SEQ ID NO: 87543 - protein, 326 aa, Arabidopsis thaliana; identical to SEQ ID NO: 39697
  peptide (1)..(326): Ceres Seq. ID no. 12701659

SEQ ID NO: 87544 - DNA, 1587 bp, Arabidopsis thaliana
  misc_feature (1)..(1587): Ceres Seq. ID no. 12701676
  misc_feature (1)..(1587): Ortholog of  Ceres SEQ ID NO 14314096 as cited in SEQ ID NO 63279
atgggattttcattttcttcaaaccgttttggttacttgacagtcacattccttctcgttatctcttgtcttctgttgggtttcttcacgaatcctgttgattcaagtgctctaagacctaaatcagagcatgattgtagtgccctgaagcactttcatgactacaaatcaaagtgtgcttacctgaaatcgattgatccatgtgctagtcaaggtttcttcgattacctctcttttctctactgtaatttcgaaggtttcccaattttgggtcagtttcttctcttcctctggttgcttctcttgttctatctattgggtcatacggcctctgagtacttttgttcatctcttgaaagtctctcaaagctgcttaatttgtcaccaactgttgctggtgttactcttttgtcgcttggtaatggtgctcctgatttgtttgcaagtttggtctctttcatgggagaatctaaaggtacttatgatgttggtctcaacactgttgtgggaggttctggttttgttacctgtgttgttgttgggatcattagcatttcgttgcataagagacgtgtgaggattgagagagctgcgtttataagagacatttgcttcttctgtgctgctattggttctttggctttgattttggtctatggaaagatcaatttctggggtgctcttgggttttgttcattgtatgctgtttatgttgcctttgtgagagacggtcttgaggaaattgaagatggtgttgttaatggagagcatcagattgttgatgatgatgatgatcaccagagatattattactggaaaagattggtcatttgggctatcactctgcctctcaacttgccaaggatattaacaattcctgtagtgagtgaagacaaatggtctaaaccattagctgttgcctcggtcacatttgccccggttctgttgtcgtttttatggaactggaagcggaaaccgacgagttttgaggcgggggttgtttatctcatcgggtgtttgatcggtatagctcttggtttcattgcaggagccacgacgaagaaattaaccccaccaaagaaatggttgttgccttggttagcaggagggtttgtaatgagcatgacatggagttacatatcagcacaagagctagttgcgcttttgacctcactaggatacattttcggtgtaagcccttcgatcttaggcttaacggtcctcgcttggggtaattcaattggagatctaataaccaacttgacaatggcgctacacgatgggaacgaaggagctcaagtggctgtatcgggatgttacgccggtccgatcttcaatacattgtttgctctcgggatatcgcttgtgggatgtgcatgggaggcttatccgttgagcattgtgattaagacagatcctcgtttgttggagagtcttggatttctggtcgcaggactggtatggtcgttcttggttctgtttagtaaccgtatgaggcttggtggtgtgatgggcatagggcttttggttatttacttggcttcattgtctctaagaattatgcaaaccgttggagatgctcactaa

SEQ ID NO: 87545 - protein, 528 aa, Arabidopsis thaliana
  peptide (1)..(528): Ceres Seq. ID no. 12701677
MGFSFSSNRFGYLTVTFLLVISCLLLGFFTNPVDSSALRPKSEHDCSALKHFHDYKSKCAYLKSIDPCASQGFFDYLSFLYCNFEGFPILGQFLLFLWLLLLFYLLGHTASEYFCSSLESLSKLLNLSPTVAGVTLLSLGNGAPDLFASLVSFMGESKGTYDVGLNTVVGGSGFVTCVVVGIISISLHKRRVRIERAAFIRDICFFCAAIGSLALILVYGKINFWGALGFCSLYAVYVAFVRDGLEEIEDGVVNGEHQIVDDDDDHQRYYYWKRLVIWAITLPLNLPRILTIPVVSEDKWSKPLAVASVTFAPVLLSFLWNWKRKPTSFEAGVVYLIGCLIGIALGFIAGATTKKLTPPKKWLLPWLAGGFVMSMTWSYISAQELVALLTSLGYIFGVSPSILGLTVLAWGNSIGDLITNLTMALHDGNEGAQVAVSGCYAGPIFNTLFALGISLVGCAWEAYPLSIVIKTDPRLLESLGFLVAGLVWSFLVLFSNRMRLGGVMGIGLLVIYLASLSLRIMQTVGDAH

SEQ ID NO: 87546 - protein, 375 aa, Arabidopsis thaliana
  peptide (1)..(375): Ceres Seq. ID no. 12701678
MGESKGTYDVGLNTVVGGSGFVTCVVVGIISISLHKRRVRIERAAFIRDICFFCAAIGSLALILVYGKINFWGALGFCSLYAVYVAFVRDGLEEIEDGVVNGEHQIVDDDDDHQRYYYWKRLVIWAITLPLNLPRILTIPVVSEDKWSKPLAVASVTFAPVLLSFLWNWKRKPTSFEAGVVYLIGCLIGIALGFIAGATTKKLTPPKKWLLPWLAGGFVMSMTWSYISAQELVALLTSLGYIFGVSPSILGLTVLAWGNSIGDLITNLTMALHDGNEGAQVAVSGCYAGPIFNTLFALGISLVGCAWEAYPLSIVIKTDPRLLESLGFLVAGLVWSFLVLFSNRMRLGGVMGIGLLVIYLASLSLRIMQTVGDAH

SEQ ID NO: 87547 - DNA, 4647 bp, Arabidopsis thaliana
  misc_feature (1)..(4647): Ceres Seq. ID no. 12701683
  misc_feature (1)..(4647): Ortholog of  Ceres SEQ ID NO 13646221 as cited in SEQ ID NO 20310
  misc_feature (1)..(4647): Ortholog of  Ceres SEQ ID NO 14311423 as cited in SEQ ID NO 53911
atggaaccaccagctgctcgtgtaacgccgtcgattaaggccgactgtagtcacagcgtcaacatcatctgcgaggaaacagtactgcactcccttgtcagccacctctcggccgctttacgccgggaaggcatatctgtgtttgtggatgcgtgcggattgcaggaaaccaagttcttctccattaaacagaatcagccgttgacagatggggctagggttttggtggtggttatttccgacgaggtggagttctacgatccttggtttcctaagttcttaaaggttatccagggttggcaaaacaacggccacgtggtggttccagtcttctacggcgtcgattcgttgacccgagtttacgggtgggccaatagttggctggaggccgaaaaattaaccagccaccaatcaaagatcttaagcaataatgtactcacggactccgaactagtggaagagatcgtcagagatgtttatgggaagctttatcctgcagaacgagttggaatttacgcgaggctactagagatagaaaagttgctttacaagcaacatagggacatccgaagcataggaatttggggtatgcctggcataggcaagacgacgcttgctaaagcagtctttaatcacatgtccactgattatgatgcttcttgcttcatcgagaactttgatgaagcttttcataaggagggactccaccgtttgctcaaagaaagaattggtaaaattctaaaggatgagtttgacatagaaagttcgtatattatgagaccgaccctccatagggacaaattatacgataaaaggattcttgttgttttagatgatgtgcgcgattcccttgctgcagagtccttccttaaaaggcttgattggtttggttccggaagccttataatcataacctccgttgataaacaagtgtttgccttttgtcagatcaatcaaatatacacggttcaaggtttaaatgtgcacgaggctctgcagcttttctcccaaagcgtatttggaataaacgagccagagcagaatgacaggaaactgtcaatgaaggtgattgactatgttaatggaaacccgttagctctcagcatttacggccgagagctaatggggaagaagtcagaaatggagactgcattcttcgagctcaagcattgtcctcccttaaagattcaggatgtgctaaaaaacgcttatagtgcacttagcgacaatgagaagaacattgttttggacattgcttttttcttcaagggagaaactgtcaattatgtgatgcagctgcttgaggaatctcattactttccacgtcttgcaatagatgttcttgtggacaagtgtgtgttaactatctcagaaaacacagtgcaaatgaataatttgatccaagacacctgccaagaaatcttcaatggagaaattgagacctgcaccagaatgtgggaaccttccagaatcagatatctgctagaatatgatgaacttgaaggaagtggagaaaccaaagcaatgcctaaatctggtctggtcgctgaacacatcgaaagcatattcctggacacttcaaacgtgaaatttgatgtcaaacacgatgcattcaagaatatgtttaatctcaaattcctaaagatatacaattcatgctctaaatatatttctggactcaattttccaaagggcctcgattctctgccttatgagctaaggctcctccactgggagaactaccctttgcaatccttgcctcaagattttgactttggacaccttgttaagctcagtatgccttacagccagcttcataaactcgggacaagagtcaaggaccttgtgatgttaaagaggctcattctttctcattctttacagctagttgaatgtgacatactaatatatgctcaaaatatcgagctaattgatcttcaaggctgtacaggattgcaaagatttccagacacgagtcaattacagaatctccgggtagtaaatctctcaggttgcacagagatcaaatgtttctcaggggttccaccaaatattgaggaattacatctccaaggaactcgtataagggaaataccaatattcaatcttgtctgcttgaatatgaaatattgttccaatttgcgaggccttcctgacatggtcagtttagaatctctcaaagttctttatctgtcgggctgttcagagcttgagaaaattatgggtttcccgagaaacttgaaaaaactatatgttggtggaaccgccatacgagaattgccacagcttcccaacagtctagaattcctgaatgctcatggttgtaagcatctgaagtcaattaatttggattttgagcagcttcctaggcacttcatcttcagtaattgttatagattttcttcacaagtgatcgctgagttcgtagagaaaggtcttgtagcaagtttagcaagagcaaaacaagaggaactcatcaaagcacctgaagtcatcatctgtattcctatggacacacggcagagatcctcctttcgcttgcaagcaggtcgaaatgcaatgacagacttagttccgtggatgcaaaaacctatctcaggcttttctatgtcagttgtagtatcatttcaagatgattaccacaatgatgtaggtcttcgcattaggtgtgtaggtacatggaagacctggaacaaccagcctgatagaatagttgagagattttttcaatgttgggctcctaccgaagctccaaaagttgtagcggatcacatttttgtcttgtatgataccaaaatgcatcctagtgatagtgaagaaaaccacatcagtatgtgggctcatgaagtcaaatttgaattccacacagtgagtggggaaaacaatcctctaggtgctagttgcaaggtgactgaatgtggtgtcgaggtaattacagctgcaacaggtgatactagtgttagtggaattataagagaaagtgaaactataactattatcgagaaggaggatactattattgatgaggaggatactcctcttttgtccagaaagccagaggaaacgaatcgttctcgttcatctagcgaattacagaagctttctagtacgtcaagtaagccaaaaaacttgagatctagaagtaggcgcacaacagcgttagaagaagcgttagaagaagcattaaaagaaagagaaaaattagaggacaccagagagttacaaatagcattaatagagtcaaagaagataaaaaaaataaagcaagcagacgaaagggatcaaataaagcacgcagacgaaagggaacaaagaaagcattccaaagatcatgaggaagaagaaatagagtcaaatgagaaagaagaaagaaggcattccaaagattatgtgatagaagaattagtgttaaaggggaaaggtaaaagaaagcaactggatgatgataaagccgacgaaaaggaacaaataaagcattccaaagatcatgtggaagaagaagtgaatcctcctcttagcaaatgcaaggattgcaaatctgcaattgaagatggaatatctatcaatgcctacggttctgtttggcatcctcaatgtttctgttgccttcgttgtcgggagcctattgctatgaacgagatttcagacttaagaggaatgtatcacaaaccttgctacaaggagctccgtcatccgaattgctatgtctgcgaaaaaaagattcctcgtactgcggaaggtttaaagtaccatgagcatccgttctggatggaaacatactgcccttctcatgatggtgatggaactcccaaatgttgtagctgtgaaagattagagcattgcggaacacagtatgtaatgcttgcagattttcgatggctatgtcgagaatgtatggacagcgcgattatggattctgatgaatgccaacctttgcactttgaaatccgtgaattctttgagggcttacacatgaagattgaggaagaatttcctgtttatttggtggagaaaaatgctctgaataaagctgagaaggaagagaagattgacaaacagggggatcagtgtctgatggtagtcagaggtatttgcctatctgaagagcagattgtcacaagtgtctcacaaggagtaaggaggatgttgaataagcagatactagatacggttacagagtctcaaagggttgttcgcaagtgcgaggtcactgcaattctcatcttatatgggcttcctaggttactcacaggatatatcttggcccatgagatgatgcatgcttatcttagactcaatggttacaggaatcttaacatggttcttgaagaaggattatgccaagtgttaggctacatgtggttggagtgtcagacatacgtttttgatactgccacaatagcttcttcttcttcttcttcccgcactcctctatctacaaccacatcaaagaaagttgacccatctgattttgagaagaggctggtaaatttctgcaagcatcagatagaaacagatgagtcaccattcttcggtgacgggttcaggaaagttaacaaaatgatggcctcaaataatcacagccttaaggataccctgaaagagatcatcagcatttccaagactccacaatattcaaagttatga

SEQ ID NO: 87548 - protein, 1548 aa, Arabidopsis thaliana
  peptide (1)..(1548): Ceres Seq. ID no. 12701684
MEPPAARVTPSIKADCSHSVNIICEETVLHSLVSHLSAALRREGISVFVDACGLQETKFFSIKQNQPLTDGARVLVVVISDEVEFYDPWFPKFLKVIQGWQNNGHVVVPVFYGVDSLTRVYGWANSWLEAEKLTSHQSKILSNNVLTDSELVEEIVRDVYGKLYPAERVGIYARLLEIEKLLYKQHRDIRSIGIWGMPGIGKTTLAKAVFNHMSTDYDASCFIENFDEAFHKEGLHRLLKERIGKILKDEFDIESSYIMRPTLHRDKLYDKRILVVLDDVRDSLAAESFLKRLDWFGSGSLIIITSVDKQVFAFCQINQIYTVQGLNVHEALQLFSQSVFGINEPEQNDRKLSMKVIDYVNGNPLALSIYGRELMGKKSEMETAFFELKHCPPLKIQDVLKNAYSALSDNEKNIVLDIAFFFKGETVNYVMQLLEESHYFPRLAIDVLVDKCVLTISENTVQMNNLIQDTCQEIFNGEIETCTRMWEPSRIRYLLEYDELEGSGETKAMPKSGLVAEHIESIFLDTSNVKFDVKHDAFKNMFNLKFLKIYNSCSKYISGLNFPKGLDSLPYELRLLHWENYPLQSLPQDFDFGHLVKLSMPYSQLHKLGTRVKDLVMLKRLILSHSLQLVECDILIYAQNIELIDLQGCTGLQRFPDTSQLQNLRVVNLSGCTEIKCFSGVPPNIEELHLQGTRIREIPIFNLVCLNMKYCSNLRGLPDMVSLESLKVLYLSGCSELEKIMGFPRNLKKLYVGGTAIRELPQLPNSLEFLNAHGCKHLKSINLDFEQLPRHFIFSNCYRFSSQVIAEFVEKGLVASLARAKQEELIKAPEVIICIPMDTRQRSSFRLQAGRNAMTDLVPWMQKPISGFSMSVVVSFQDDYHNDVGLRIRCVGTWKTWNNQPDRIVERFFQCWAPTEAPKVVADHIFVLYDTKMHPSDSEENHISMWAHEVKFEFHTVSGENNPLGASCKVTECGVEVITAATGDTSVSGIIRESETITIIEKEDTIIDEEDTPLLSRKPEETNRSRSSSELQKLSSTSSKPKNLRSRSRRTTALEEALEEALKEREKLEDTRELQIALIESKKIKKIKQADERDQIKHADEREQRKHSKDHEEEEIESNEKEERRHSKDYVIEELVLKGKGKRKQLDDDKADEKEQIKHSKDHVEEEVNPPLSKCKDCKSAIEDGISINAYGSVWHPQCFCCLRCREPIAMNEISDLRGMYHKPCYKELRHPNCYVCEKKIPRTAEGLKYHEHPFWMETYCPSHDGDGTPKCCSCERLEHCGTQYVMLADFRWLCRECMDSAIMDSDECQPLHFEIREFFEGLHMKIEEEFPVYLVEKNALNKAEKEEKIDKQGDQCLMVVRGICLSEEQIVTSVSQGVRRMLNKQILDTVTESQRVVRKCEVTAILILYGLPRLLTGYILAHEMMHAYLRLNGYRNLNMVLEEGLCQVLGYMWLECQTYVFDTATIASSSSSSRTPLSTTTSKKVDPSDFEKRLVNFCKHQIETDESPFFGDGFRKVNKMMASNNHSLKDTLKEIISISKTPQYSKL

SEQ ID NO: 87549 - protein, 1352 aa, Arabidopsis thaliana
  peptide (1)..(1352): Ceres Seq. ID no. 12701685
MPGIGKTTLAKAVFNHMSTDYDASCFIENFDEAFHKEGLHRLLKERIGKILKDEFDIESSYIMRPTLHRDKLYDKRILVVLDDVRDSLAAESFLKRLDWFGSGSLIIITSVDKQVFAFCQINQIYTVQGLNVHEALQLFSQSVFGINEPEQNDRKLSMKVIDYVNGNPLALSIYGRELMGKKSEMETAFFELKHCPPLKIQDVLKNAYSALSDNEKNIVLDIAFFFKGETVNYVMQLLEESHYFPRLAIDVLVDKCVLTISENTVQMNNLIQDTCQEIFNGEIETCTRMWEPSRIRYLLEYDELEGSGETKAMPKSGLVAEHIESIFLDTSNVKFDVKHDAFKNMFNLKFLKIYNSCSKYISGLNFPKGLDSLPYELRLLHWENYPLQSLPQDFDFGHLVKLSMPYSQLHKLGTRVKDLVMLKRLILSHSLQLVECDILIYAQNIELIDLQGCTGLQRFPDTSQLQNLRVVNLSGCTEIKCFSGVPPNIEELHLQGTRIREIPIFNLVCLNMKYCSNLRGLPDMVSLESLKVLYLSGCSELEKIMGFPRNLKKLYVGGTAIRELPQLPNSLEFLNAHGCKHLKSINLDFEQLPRHFIFSNCYRFSSQVIAEFVEKGLVASLARAKQEELIKAPEVIICIPMDTRQRSSFRLQAGRNAMTDLVPWMQKPISGFSMSVVVSFQDDYHNDVGLRIRCVGTWKTWNNQPDRIVERFFQCWAPTEAPKVVADHIFVLYDTKMHPSDSEENHISMWAHEVKFEFHTVSGENNPLGASCKVTECGVEVITAATGDTSVSGIIRESETITIIEKEDTIIDEEDTPLLSRKPEETNRSRSSSELQKLSSTSSKPKNLRSRSRRTTALEEALEEALKEREKLEDTRELQIALIESKKIKKIKQADERDQIKHADEREQRKHSKDHEEEEIESNEKEERRHSKDYVIEELVLKGKGKRKQLDDDKADEKEQIKHSKDHVEEEVNPPLSKCKDCKSAIEDGISINAYGSVWHPQCFCCLRCREPIAMNEISDLRGMYHKPCYKELRHPNCYVCEKKIPRTAEGLKYHEHPFWMETYCPSHDGDGTPKCCSCERLEHCGTQYVMLADFRWLCRECMDSAIMDSDECQPLHFEIREFFEGLHMKIEEEFPVYLVEKNALNKAEKEEKIDKQGDQCLMVVRGICLSEEQIVTSVSQGVRRMLNKQILDTVTESQRVVRKCEVTAILILYGLPRLLTGYILAHEMMHAYLRLNGYRNLNMVLEEGLCQVLGYMWLECQTYVFDTATIASSSSSSRTPLSTTTSKKVDPSDFEKRLVNFCKHQIETDESPFFGDGFRKVNKMMASNNHSLKDTLKEIISISKTPQYSKL

SEQ ID NO: 87550 - protein, 1336 aa, Arabidopsis thaliana
  peptide (1)..(1336): Ceres Seq. ID no. 12701686
MSTDYDASCFIENFDEAFHKEGLHRLLKERIGKILKDEFDIESSYIMRPTLHRDKLYDKRILVVLDDVRDSLAAESFLKRLDWFGSGSLIIITSVDKQVFAFCQINQIYTVQGLNVHEALQLFSQSVFGINEPEQNDRKLSMKVIDYVNGNPLALSIYGRELMGKKSEMETAFFELKHCPPLKIQDVLKNAYSALSDNEKNIVLDIAFFFKGETVNYVMQLLEESHYFPRLAIDVLVDKCVLTISENTVQMNNLIQDTCQEIFNGEIETCTRMWEPSRIRYLLEYDELEGSGETKAMPKSGLVAEHIESIFLDTSNVKFDVKHDAFKNMFNLKFLKIYNSCSKYISGLNFPKGLDSLPYELRLLHWENYPLQSLPQDFDFGHLVKLSMPYSQLHKLGTRVKDLVMLKRLILSHSLQLVECDILIYAQNIELIDLQGCTGLQRFPDTSQLQNLRVVNLSGCTEIKCFSGVPPNIEELHLQGTRIREIPIFNLVCLNMKYCSNLRGLPDMVSLESLKVLYLSGCSELEKIMGFPRNLKKLYVGGTAIRELPQLPNSLEFLNAHGCKHLKSINLDFEQLPRHFIFSNCYRFSSQVIAEFVEKGLVASLARAKQEELIKAPEVIICIPMDTRQRSSFRLQAGRNAMTDLVPWMQKPISGFSMSVVVSFQDDYHNDVGLRIRCVGTWKTWNNQPDRIVERFFQCWAPTEAPKVVADHIFVLYDTKMHPSDSEENHISMWAHEVKFEFHTVSGENNPLGASCKVTECGVEVITAATGDTSVSGIIRESETITIIEKEDTIIDEEDTPLLSRKPEETNRSRSSSELQKLSSTSSKPKNLRSRSRRTTALEEALEEALKEREKLEDTRELQIALIESKKIKKIKQADERDQIKHADEREQRKHSKDHEEEEIESNEKEERRHSKDYVIEELVLKGKGKRKQLDDDKADEKEQIKHSKDHVEEEVNPPLSKCKDCKSAIEDGISINAYGSVWHPQCFCCLRCREPIAMNEISDLRGMYHKPCYKELRHPNCYVCEKKIPRTAEGLKYHEHPFWMETYCPSHDGDGTPKCCSCERLEHCGTQYVMLADFRWLCRECMDSAIMDSDECQPLHFEIREFFEGLHMKIEEEFPVYLVEKNALNKAEKEEKIDKQGDQCLMVVRGICLSEEQIVTSVSQGVRRMLNKQILDTVTESQRVVRKCEVTAILILYGLPRLLTGYILAHEMMHAYLRLNGYRNLNMVLEEGLCQVLGYMWLECQTYVFDTATIASSSSSSRTPLSTTTSKKVDPSDFEKRLVNFCKHQIETDESPFFGDGFRKVNKMMASNNHSLKDTLKEIISISKTPQYSKL

SEQ ID NO: 87551 - DNA, 659 bp, Arabidopsis thaliana
  misc_feature (1)..(659): Ceres Seq. ID no. 12701734
  misc_feature (1)..(659): Ortholog of  Ceres SEQ ID NO 15171813 as cited in SEQ ID NO 57309
aaaccctacgacccaaaaacaaaagagacgaaacaaaacaaaacaaaaagtctggtttgggtttctcgagctcttcttcttcttacaaagaaaatgacggattctgggcatgatattgaaatcagatgccatcactgcgcaggccctcttaccagaaatttggaaaccagtaaatggactgttgatccgttcatcagggatagcttttctatgattggatcagctgttggaggtactgcaagtgcattcattggatttaaccatgcaatgccaattgtacgcaagtggatcaaaggacccatgtggttacattttcttgttggggcaccacctgttatagttctttcatcagcatgtgctggactagcaggtggcactgtaccggcactggcacagctcgcttcatcttcataccgagctgcagtccattcgtctcagccaccacaagcacaaaaggataacaaaatgcagaagtctacgacttctcctttgtaaacgacacacacagcacagctctctcttttgttcttatttatttctcttcattttgtatgtcaaatcttttctttgaaagagagagcttcttggtgtaaattcttcttatcttatacaactatctggtgctaaagaaagcttaatccgtgtcacgggctttatgt

SEQ ID NO: 87552 - protein, 164 aa, Arabidopsis thaliana
  peptide (1)..(164): Ceres Seq. ID no. 12701735
KPYDPKTKETKQNKTKSLVWVSRALLLLTKKMTDSGHDIEIRCHHCAGPLTRNLETSKWTVDPFIRDSFSMIGSAVGGTASAFIGFNHAMPIVRKWIKGPMWLHFLVGAPPVIVLSSACAGLAGGTVPALAQLASSSYRAAVHSSQPPQAQKDNKMQKSTTSPL

SEQ ID NO: 87553 - protein, 133 aa, Arabidopsis thaliana
  peptide (1)..(133): Ceres Seq. ID no. 12701736
MTDSGHDIEIRCHHCAGPLTRNLETSKWTVDPFIRDSFSMIGSAVGGTASAFIGFNHAMPIVRKWIKGPMWLHFLVGAPPVIVLSSACAGLAGGTVPALAQLASSSYRAAVHSSQPPQAQKDNKMQKSTTSPL

SEQ ID NO: 87554 - protein, 94 aa, Arabidopsis thaliana; identical to SEQ ID NO: 26106
  peptide (1)..(94): Ceres Seq. ID no. 12701737

SEQ ID NO: 87555 - DNA, 879 bp, Arabidopsis thaliana
  misc_feature (1)..(879): Ceres Seq. ID no. 12701742
  misc_feature (1)..(879): Ortholog of  Ceres SEQ ID NO 13624571 as cited in SEQ ID NO 0
atggagtctctatctcttcccgttctaaatcctctgttagcttctggttctaatctttttagaaaccagcactcgaggatgacctcttcaatggtatcttcacttaaatcccccattggaggcacatcgctctccactgttcgtcgctttggagtaggtgttgttaggatgcaagctgttgatgaagatattgatttgaagcaaatgagagacatagctgctgctaaaaagcgttgggatggtttgttaagggaaggaaaagtgaagcttcttacaccaagagaagcaggctatgctatttctctttcaaacaaacctctccttgatgttcgtccctctagcgagcgcaacaaggcatggattaaaggctccacttgggttcctatcttcgacaatgatgacaaccttgacgctggaactctttccaaaaaagtcactagttttgctatggggggatggtggagtggagcacctacactatcttttaataggctcttcttgtcaaaggttgaggagaaattcccaaaagactcagagctgattgttgcttgccaaaaaggattgagatccttagctgcttgcgagctactatataatgcagggtatgagaatctgttctgggtacaaggtggtttagaatctgctcaagacgaggatctagtgacagaaggtgtccaacccttgaagcttgctggtattggaggtttttcagagttcctcggttggacagaccagcaaagagctcaagctgcgaaagaaggttgggggtaccgtttggtatatactgctcgtctgtttggagttgttctggctgctgatgctttgttcgttggggctcagcaactaggccattatattcaggagttaagaggccattag

SEQ ID NO: 87556 - protein, 292 aa, Arabidopsis thaliana
  peptide (1)..(292): Ceres Seq. ID no. 12701743
MESLSLPVLNPLLASGSNLFRNQHSRMTSSMVSSLKSPIGGTSLSTVRRFGVGVVRMQAVDEDIDLKQMRDIAAAKKRWDGLLREGKVKLLTPREAGYAISLSNKPLLDVRPSSERNKAWIKGSTWVPIFDNDDNLDAGTLSKKVTSFAMGGWWSGAPTLSFNRLFLSKVEEKFPKDSELIVACQKGLRSLAACELLYNAGYENLFWVQGGLESAQDEDLVTEGVQPLKLAGIGGFSEFLGWTDQQRAQAAKEGWGYRLVYTARLFGVVLAADALFVGAQQLGHYIQELRGH

SEQ ID NO: 87557 - protein, 266 aa, Arabidopsis thaliana
  peptide (1)..(266): Ceres Seq. ID no. 12701744
MTSSMVSSLKSPIGGTSLSTVRRFGVGVVRMQAVDEDIDLKQMRDIAAAKKRWDGLLREGKVKLLTPREAGYAISLSNKPLLDVRPSSERNKAWIKGSTWVPIFDNDDNLDAGTLSKKVTSFAMGGWWSGAPTLSFNRLFLSKVEEKFPKDSELIVACQKGLRSLAACELLYNAGYENLFWVQGGLESAQDEDLVTEGVQPLKLAGIGGFSEFLGWTDQQRAQAAKEGWGYRLVYTARLFGVVLAADALFVGAQQLGHYIQELRGH

SEQ ID NO: 87558 - protein, 262 aa, Arabidopsis thaliana
  peptide (1)..(262): Ceres Seq. ID no. 12701745
MVSSLKSPIGGTSLSTVRRFGVGVVRMQAVDEDIDLKQMRDIAAAKKRWDGLLREGKVKLLTPREAGYAISLSNKPLLDVRPSSERNKAWIKGSTWVPIFDNDDNLDAGTLSKKVTSFAMGGWWSGAPTLSFNRLFLSKVEEKFPKDSELIVACQKGLRSLAACELLYNAGYENLFWVQGGLESAQDEDLVTEGVQPLKLAGIGGFSEFLGWTDQQRAQAAKEGWGYRLVYTARLFGVVLAADALFVGAQQLGHYIQELRGH

SEQ ID NO: 87559 - DNA, 2550 bp, Arabidopsis thaliana
  misc_feature (1)..(2550): Ceres Seq. ID no. 12701783
  misc_feature (1)..(2550): Ortholog of  Ceres SEQ ID NO 13581686 as cited in SEQ ID NO 57695
  misc_feature (1)..(2550): Ortholog of  Ceres SEQ ID NO 15224315 as cited in SEQ ID NO 66131
atgcagagagtgagctttgaagtaaaggacacagaggcggagaagagcagcagcgagatactgagcggatctttgccgtcgacctaccgaaatccggcgatggaaaacgttggaaacgcggtggatgatggatcgagcgtgaagaacaatccgaaacttgatatgcagaaacagaacggtttggtgaagtggttcaagaagtgcttgacaatggtatctggagagagtaaggcacctcgattggaccggtcgaagtcaacggccggtcaggccttgaaagggctcaagatcatcagtaagaccgacggtaacgctgcctggaccgtcgtggagaagcggtacttgaagatcacggccaatactgatggattgctgcttcggtcgaaattcggtgaatgcatagggatgaactcaaaagaatttgccttggaattgtttgacgccttagctagaaaaagtcacttgaaaggggatgtgattactgagaccgagttgaagaaattttgggaacaaataaatgataaaagctttgattcaaggcttatcacgttctttgacttgatggataaagactcggatggtagacttacggaagacgaagttagagagatcatcaagcttagttcttctgccaatcatctgtcatgcatccaaaacaaggcagatgaatatgcagcaatgataatggaagagcttgaccctgatcatatgggatacatcatgatggagagtctaaagaaattgcttctgcaagcggaaacaaaatctgtaagcacagatattaatagtgaagaaagaaaggagctgagcgacatgctaactgagagtctcaagcctacacgtgaccctaaccatttgaggagatggtattgtcaactaagattctttgtattggatagttggcaaagagtttgggtgatagcgttatggctcacgattatggccatcctcttcgcgtacaagtatattcaatacaagaatagagcagtgtatgaagtgttggggccttgtgtgtgcttggctaaaggtgcagcagagacgctgaagctaaacatggccctaattctgttacctgtttgcagaaataccatcacatggcttagaaataagactaggttgggtgtttttgttccttttgatgacaacctcaattttcacaaggttatagcggtgggaattgcgataggagtagccatacactctgtgtcccacttggcgtgtgattttccactgctaatcgcggcaactccagcggaatacatgcctctcggaaaattcttcggagaggagcaaccaaagagatacttgcattttgtgaagtcaacagaaggaataacagggcttgtaatggttttcttgatggttattgcttttacactggctatgccttggtttagacgggggaagctagagaaaaagctaccagggccactaaagaaacttgcgagcttcaatgccttctggtacactcaccatttgttcgttatagtctacattctccttgtccttcacggatactacatatatctcaacaaggaatggtacaagaaaacgacgtggatgtacttggcagtaccagtagctctttatgcatacgagagattgatacgagcattcaggtccagcatcaggacagtaaaagtccttaagatggcagcttatcctggaaaagtattgactttgcagatgtcaaagcctacaaacttcaaatacatgagcggccaatacatgtttgtaaattgtccagcagtttcaccgtttgagtggcatccattttcaataacttctacaccacaagacgactatctgagcgttcatataaaagcattgggagattggacagaggctatccaaggagttttctcagaggtgtctaagccacctccggtcggagacatgttgaatggtgcaaatagtccccgtttccccaaaattatgattgatggtccgtacggcgcaccagctcaagactacaagaagtacgaggtggtcctgctgataggtcttggcattggagccaccccgatgatcagcattatcaaggacattattaacaatacggagaccaaggaacaactcagccaaatggagaagggatcgccacaagagcaacaaggtaataaagaaactttcaagactcgaagggcttacttctactgggtaacaaaggagcagggcacatttgattggttcaagaacatcatgaacgagatcgcagaacgggacaaaagtaaagtcatagaactacacaatcattgcactagtgtctacgaagaaggagacgttcgttccgcgctcatacggatgcttcagtctcttaattatgccaagaatggtttagacattgttgctgggacaagggtcatgtcccatttcgcccgacctaattggaaaaacgtctacaaacagatagccatggatcaccctggcgctaatgttggagtgttctattgtggagcaccggtattgacgaaggagttaaggcaattagctttggaattcacacacaagaccagtactagattctctttccacaaagagaacttctaa

SEQ ID NO: 87560 - protein, 849 aa, Arabidopsis thaliana
  peptide (1)..(849): Ceres Seq. ID no. 12701784
MQRVSFEVKDTEAEKSSSEILSGSLPSTYRNPAMENVGNAVDDGSSVKNNPKLDMQKQNGLVKWFKKCLTMVSGESKAPRLDRSKSTAGQALKGLKIISKTDGNAAWTVVEKRYLKITANTDGLLLRSKFGECIGMNSKEFALELFDALARKSHLKGDVITETELKKFWEQINDKSFDSRLITFFDLMDKDSDGRLTEDEVREIIKLSSSANHLSCIQNKADEYAAMIMEELDPDHMGYIMMESLKKLLLQAETKSVSTDINSEERKELSDMLTESLKPTRDPNHLRRWYCQLRFFVLDSWQRVWVIALWLTIMAILFAYKYIQYKNRAVYEVLGPCVCLAKGAAETLKLNMALILLPVCRNTITWLRNKTRLGVFVPFDDNLNFHKVIAVGIAIGVAIHSVSHLACDFPLLIAATPAEYMPLGKFFGEEQPKRYLHFVKSTEGITGLVMVFLMVIAFTLAMPWFRRGKLEKKLPGPLKKLASFNAFWYTHHLFVIVYILLVLHGYYIYLNKEWYKKTTWMYLAVPVALYAYERLIRAFRSSIRTVKVLKMAAYPGKVLTLQMSKPTNFKYMSGQYMFVNCPAVSPFEWHPFSITSTPQDDYLSVHIKALGDWTEAIQGVFSEVSKPPPVGDMLNGANSPRFPKIMIDGPYGAPAQDYKKYEVVLLIGLGIGATPMISIIKDIINNTETKEQLSQMEKGSPQEQQGNKETFKTRRAYFYWVTKEQGTFDWFKNIMNEIAERDKSKVIELHNHCTSVYEEGDVRSALIRMLQSLNYAKNGLDIVAGTRVMSHFARPNWKNVYKQIAMDHPGANVGVFYCGAPVLTKELRQLALEFTHKTSTRFSFHKENF

SEQ ID NO: 87561 - protein, 816 aa, Arabidopsis thaliana
  peptide (1)..(816): Ceres Seq. ID no. 12701785
MENVGNAVDDGSSVKNNPKLDMQKQNGLVKWFKKCLTMVSGESKAPRLDRSKSTAGQALKGLKIISKTDGNAAWTVVEKRYLKITANTDGLLLRSKFGECIGMNSKEFALELFDALARKSHLKGDVITETELKKFWEQINDKSFDSRLITFFDLMDKDSDGRLTEDEVREIIKLSSSANHLSCIQNKADEYAAMIMEELDPDHMGYIMMESLKKLLLQAETKSVSTDINSEERKELSDMLTESLKPTRDPNHLRRWYCQLRFFVLDSWQRVWVIALWLTIMAILFAYKYIQYKNRAVYEVLGPCVCLAKGAAETLKLNMALILLPVCRNTITWLRNKTRLGVFVPFDDNLNFHKVIAVGIAIGVAIHSVSHLACDFPLLIAATPAEYMPLGKFFGEEQPKRYLHFVKSTEGITGLVMVFLMVIAFTLAMPWFRRGKLEKKLPGPLKKLASFNAFWYTHHLFVIVYILLVLHGYYIYLNKEWYKKTTWMYLAVPVALYAYERLIRAFRSSIRTVKVLKMAAYPGKVLTLQMSKPTNFKYMSGQYMFVNCPAVSPFEWHPFSITSTPQDDYLSVHIKALGDWTEAIQGVFSEVSKPPPVGDMLNGANSPRFPKIMIDGPYGAPAQDYKKYEVVLLIGLGIGATPMISIIKDIINNTETKEQLSQMEKGSPQEQQGNKETFKTRRAYFYWVTKEQGTFDWFKNIMNEIAERDKSKVIELHNHCTSVYEEGDVRSALIRMLQSLNYAKNGLDIVAGTRVMSHFARPNWKNVYKQIAMDHPGANVGVFYCGAPVLTKELRQLALEFTHKTSTRFSFHKENF

SEQ ID NO: 87562 - protein, 795 aa, Arabidopsis thaliana
  peptide (1)..(795): Ceres Seq. ID no. 12701786
MQKQNGLVKWFKKCLTMVSGESKAPRLDRSKSTAGQALKGLKIISKTDGNAAWTVVEKRYLKITANTDGLLLRSKFGECIGMNSKEFALELFDALARKSHLKGDVITETELKKFWEQINDKSFDSRLITFFDLMDKDSDGRLTEDEVREIIKLSSSANHLSCIQNKADEYAAMIMEELDPDHMGYIMMESLKKLLLQAETKSVSTDINSEERKELSDMLTESLKPTRDPNHLRRWYCQLRFFVLDSWQRVWVIALWLTIMAILFAYKYIQYKNRAVYEVLGPCVCLAKGAAETLKLNMALILLPVCRNTITWLRNKTRLGVFVPFDDNLNFHKVIAVGIAIGVAIHSVSHLACDFPLLIAATPAEYMPLGKFFGEEQPKRYLHFVKSTEGITGLVMVFLMVIAFTLAMPWFRRGKLEKKLPGPLKKLASFNAFWYTHHLFVIVYILLVLHGYYIYLNKEWYKKTTWMYLAVPVALYAYERLIRAFRSSIRTVKVLKMAAYPGKVLTLQMSKPTNFKYMSGQYMFVNCPAVSPFEWHPFSITSTPQDDYLSVHIKALGDWTEAIQGVFSEVSKPPPVGDMLNGANSPRFPKIMIDGPYGAPAQDYKKYEVVLLIGLGIGATPMISIIKDIINNTETKEQLSQMEKGSPQEQQGNKETFKTRRAYFYWVTKEQGTFDWFKNIMNEIAERDKSKVIELHNHCTSVYEEGDVRSALIRMLQSLNYAKNGLDIVAGTRVMSHFARPNWKNVYKQIAMDHPGANVGVFYCGAPVLTKELRQLALEFTHKTSTRFSFHKENF

SEQ ID NO: 87563 - DNA, 813 bp, Arabidopsis thaliana
  misc_feature (1)..(813): Ceres Seq. ID no. 12701798
  misc_feature (1)..(813): Ortholog of  Ceres SEQ ID NO 13637842 as cited in SEQ ID NO 54650
  misc_feature (1)..(813): Ortholog of  Ceres SEQ ID NO 12608127 as cited in SEQ ID NO 57579
  misc_feature (1)..(813): Ortholog of  Ceres SEQ ID NO 12634558 as cited in SEQ ID NO 0
  misc_feature (1)..(813): Ortholog of  Ceres SEQ ID NO 15180294 as cited in SEQ ID NO 0
atgcggattctcgtgaatctcattctcttctccttgattcctctggcgttctccaatgaaaactccagctcgtatctcattgcgcgaccattgatcttcgaaacccagctcaagaacataaacgacaatgtcaatctacattgcacgagctggagattcgcggcggagacaaacaatctcgctccatggaaaaccattccagctgaatgcgccgattacgtgaaagattacctgatgggtgaaggttacgtcgtcgatgtggagagagtctccgaagaagctaaggtttacgcgagcagcttcgaatctaacggtgacgggaaagacatttggattttcgatattgatgagacgttattgtcgaatcttccttattacatggaacacggttgtgggttggaagtttttgatcattcaaagtttgatatgtgggtagagaaagggatagcacctgctatagcaccaagcttgaagctttaccaaaaggttatacatttggggtacaaagttatcttgcttacagggcgtagagagaaccaccgggttatcactgtcgaaaacctgcgcaatgccggtttccataactgggacaagcttattctgagatcgttggatgatcggaacaaaacagcgaccatgtacaagtcagagaagagagaggagatggtgaaagaagggtataggatcagaggcaattcaggtgaccaatggagtgatttgttgggttctgcaatgtcagaaagatccttcaaacttccaaatccaatgtattatatcccctgaaggggatcaactagaatcaggaggcaattc

SEQ ID NO: 87564 - protein, 260 aa, Arabidopsis thaliana; identical to SEQ ID NO: 21236
  peptide (1)..(260): Ceres Seq. ID no. 12701799

SEQ ID NO: 87565 - protein, 182 aa, Arabidopsis thaliana; identical to SEQ ID NO: 21237
  peptide (1)..(182): Ceres Seq. ID no. 12701800

SEQ ID NO: 87566 - protein, 134 aa, Arabidopsis thaliana; identical to SEQ ID NO: 21238
  peptide (1)..(134): Ceres Seq. ID no. 12701801

SEQ ID NO: 87567 - DNA, 2415 bp, Arabidopsis thaliana
  misc_feature (1)..(2415): Ceres Seq. ID no. 12701802
  misc_feature (1)..(2415): Ortholog of  Ceres SEQ ID NO 13654989 as cited in SEQ ID NO 63117
  misc_feature (1)..(2415): Ortholog of  Ceres SEQ ID NO 13584744 as cited in SEQ ID NO 69137
atgagtagatcaccagacaagcttgctcttcctcctcctcctcctcctcccccatctcgtaccgtcgttgtggctctaagtgggagcagtaaaagcaaatatgtagttacatgggcgatcgaaaaatttgctactgaaggaaatgttggcttcaagctgcttcacatccatccaatgattacttctgtacctacaccaatgggaaatgcaatcccgatttccgaggtacgagatgatgtagtaactgcatatagacaggaaatactgtggcagtctgaagaaatgcttaaaccttacacaaaactgttcgtgcggagaaaggttgcagtagaagttcttgtgatcgaatcagataatgtggcagccgcaatagctgaagaagtgactcgggattcaatagacagaattgtcattggaggctcatcccgtagttttttctcaaggaaagctgatatttgctcggtgatatcagctttgatgccaaacttttgtacagtctatgttgtttcaaaaggtaaattgtcatgcgtccgaccatcagactcagacggaaatgctactataagagaagatggtagtgagagaacaaattcttcaagcggttcttctggtcccacctcaggacaggcatcagttccaatggaaacgagttctgttggctcggatgaaaccaggtgcatgtctttggatgcagaggaagctagagatgtttcaagtatcaatagaagcagcacagatactacatcacgttggactcctcggcgtagagattatgaggagagaaaagaagctatgagttcttcttcgagcaaccgtgaatacgggaattttggtactaggtttagttggagtggcatgggtgtcgatactacacactctcgggcttctcaacaagcttccaacatgtctgatgctctaagtgaacaatcctatacagacaaccaggtaaacctaaactttgaggttgagaagttgagagctgagcttagacacgttcaagaaatgtatgctgtggctcaaaccgaaacctttgatgcttctcgaaagcttggtgaacttaaccaacgtcggttagaagaagccataaagcttgaagagctaaagctgaaggagtatgaagctcgagagttagcagaaaaggaaaagcagaattttgagaaggcaaggagagatgcagagagcatgagagaaagagcagagagagaaattgcgcagagaagagaagccgaaaggaaatccgcacgtgatactaaagagaaagagaagctcgagggcactctcgggtctcctcagctgcaatatcagcactttgcttgggaagaaattatggctgccacttcatcattctcagaagaactgaagatcggaatgggagcttacggagctgtttacaagtgtaatctgcatcatacaactgcagttgtcaaagttttgcagtcagctgaaaatcaactttccaaacaattccaacaagagctcgaaatcttgagcaagattaggcatccacatttggttctccttctaggagcgtgcccggagcaaggtgctttagtttatgagtacatggaaaacggtagcttggaggacagacttttccaggtcaacaacagtccgccactcccgtggtttgagcggtttaggattgcttgggaagttgcagcggctcttgtcttcctccacaaatcaaagcctaaaccaatcattcaccgtgatcttaaacctgcaaacatcttacttgatcacaactttgtcagcaaagttggagacgtgggactctcaacgatggttcaagtcgatcctctatcaactaaattcactatatacaaacaaacaagccccgtgggaacgttatgctatattgatccggaatatcagcgcactggaaggatatcatcgaaatcagatatctactcctttggaatgattcttcttcagcttctcacagcaaaacctgctattgcattgacacatttcgttgagagcgcaatggatagtaatgatgagttccttaagatcttagatcagaaagccggtaactggccgattgaagaaacccgggaattggccgcattagctttgtgttgtacagagctacgcgggaaagatagacctgatttgaaagatcagattcttccagcgctcgaaaacctaaagaaagtagctgaaaaggcaaggaactcattttccggcgtatcgacacagcctcccactcatttcatctgcccattacttaaggacgtgatgaacgagccgtgcgttgcagcagacggatacacatacgaccgtcatgcgatagaggagtggcttaaggagcacaacacatcgccgatgacggattcaccgttgcatagcaagaaccttttacccaattatactctttacacagccatcatggaatggaggtctacacgatag

SEQ ID NO: 87568 - protein, 804 aa, Arabidopsis thaliana
  peptide (1)..(804): Ceres Seq. ID no. 12701803
MSRSPDKLALPPPPPPPPSRTVVVALSGSSKSKYVVTWAIEKFATEGNVGFKLLHIHPMITSVPTPMGNAIPISEVRDDVVTAYRQEILWQSEEMLKPYTKLFVRRKVAVEVLVIESDNVAAAIAEEVTRDSIDRIVIGGSSRSFFSRKADICSVISALMPNFCTVYVVSKGKLSCVRPSDSDGNATIREDGSERTNSSSGSSGPTSGQASVPMETSSVGSDETRCMSLDAEEARDVSSINRSSTDTTSRWTPRRRDYEERKEAMSSSSSNREYGNFGTRFSWSGMGVDTTHSRASQQASNMSDALSEQSYTDNQVNLNFEVEKLRAELRHVQEMYAVAQTETFDASRKLGELNQRRLEEAIKLEELKLKEYEARELAEKEKQNFEKARRDAESMRERAEREIAQRREAERKSARDTKEKEKLEGTLGSPQLQYQHFAWEEIMAATSSFSEELKIGMGAYGAVYKCNLHHTTAVVKVLQSAENQLSKQFQQELEILSKIRHPHLVLLLGACPEQGALVYEYMENGSLEDRLFQVNNSPPLPWFERFRIAWEVAAALVFLHKSKPKPIIHRDLKPANILLDHNFVSKVGDVGLSTMVQVDPLSTKFTIYKQTSPVGTLCYIDPEYQRTGRISSKSDIYSFGMILLQLLTAKPAIALTHFVESAMDSNDEFLKILDQKAGNWPIEETRELAALALCCTELRGKDRPDLKDQILPALENLKKVAEKARNSFSGVSTQPPTHFICPLLKDVMNEPCVAADGYTYDRHAIEEWLKEHNTSPMTDSPLHSKNLLPNYTLYTAIMEWRSTR

SEQ ID NO: 87569 - protein, 746 aa, Arabidopsis thaliana
  peptide (1)..(746): Ceres Seq. ID no. 12701804
MITSVPTPMGNAIPISEVRDDVVTAYRQEILWQSEEMLKPYTKLFVRRKVAVEVLVIESDNVAAAIAEEVTRDSIDRIVIGGSSRSFFSRKADICSVISALMPNFCTVYVVSKGKLSCVRPSDSDGNATIREDGSERTNSSSGSSGPTSGQASVPMETSSVGSDETRCMSLDAEEARDVSSINRSSTDTTSRWTPRRRDYEERKEAMSSSSSNREYGNFGTRFSWSGMGVDTTHSRASQQASNMSDALSEQSYTDNQVNLNFEVEKLRAELRHVQEMYAVAQTETFDASRKLGELNQRRLEEAIKLEELKLKEYEARELAEKEKQNFEKARRDAESMRERAEREIAQRREAERKSARDTKEKEKLEGTLGSPQLQYQHFAWEEIMAATSSFSEELKIGMGAYGAVYKCNLHHTTAVVKVLQSAENQLSKQFQQELEILSKIRHPHLVLLLGACPEQGALVYEYMENGSLEDRLFQVNNSPPLPWFERFRIAWEVAAALVFLHKSKPKPIIHRDLKPANILLDHNFVSKVGDVGLSTMVQVDPLSTKFTIYKQTSPVGTLCYIDPEYQRTGRISSKSDIYSFGMILLQLLTAKPAIALTHFVESAMDSNDEFLKILDQKAGNWPIEETRELAALALCCTELRGKDRPDLKDQILPALENLKKVAEKARNSFSGVSTQPPTHFICPLLKDVMNEPCVAADGYTYDRHAIEEWLKEHNTSPMTDSPLHSKNLLPNYTLYTAIMEWRSTR

SEQ ID NO: 87570 - protein, 738 aa, Arabidopsis thaliana
  peptide (1)..(738): Ceres Seq. ID no. 12701805
MGNAIPISEVRDDVVTAYRQEILWQSEEMLKPYTKLFVRRKVAVEVLVIESDNVAAAIAEEVTRDSIDRIVIGGSSRSFFSRKADICSVISALMPNFCTVYVVSKGKLSCVRPSDSDGNATIREDGSERTNSSSGSSGPTSGQASVPMETSSVGSDETRCMSLDAEEARDVSSINRSSTDTTSRWTPRRRDYEERKEAMSSSSSNREYGNFGTRFSWSGMGVDTTHSRASQQASNMSDALSEQSYTDNQVNLNFEVEKLRAELRHVQEMYAVAQTETFDASRKLGELNQRRLEEAIKLEELKLKEYEARELAEKEKQNFEKARRDAESMRERAEREIAQRREAERKSARDTKEKEKLEGTLGSPQLQYQHFAWEEIMAATSSFSEELKIGMGAYGAVYKCNLHHTTAVVKVLQSAENQLSKQFQQELEILSKIRHPHLVLLLGACPEQGALVYEYMENGSLEDRLFQVNNSPPLPWFERFRIAWEVAAALVFLHKSKPKPIIHRDLKPANILLDHNFVSKVGDVGLSTMVQVDPLSTKFTIYKQTSPVGTLCYIDPEYQRTGRISSKSDIYSFGMILLQLLTAKPAIALTHFVESAMDSNDEFLKILDQKAGNWPIEETRELAALALCCTELRGKDRPDLKDQILPALENLKKVAEKARNSFSGVSTQPPTHFICPLLKDVMNEPCVAADGYTYDRHAIEEWLKEHNTSPMTDSPLHSKNLLPNYTLYTAIMEWRSTR

SEQ ID NO: 87571 - DNA, 729 bp, Arabidopsis thaliana
  misc_feature (1)..(729): Ceres Seq. ID no. 12701814
  misc_feature (1)..(729): Ortholog of  Ceres SEQ ID NO 13661801 as cited in SEQ ID NO 61655
  misc_feature (1)..(729): Ortholog of  Ceres SEQ ID NO 13596450 as cited in SEQ ID NO 68838
atgtggagacgcgtggctttactttctccgatgatttcatcatcatcgcgatcccttaagctcagccaggcagcttctgggctcaaagttggggaatcttttgcaacagacataattagtcaggaagaacgagtttcaccgccgaaagagaaagctccatttattacatttgtactagggggacctggaagtggaaaaggtacacaatgcgaaaagattgttgagacttttggattacaacatctaagtgctggagatttgctcaggagagagatcgcaatgcacacggaaaatggggctatgattctgaacttgattaaagatgggaagattgttccttcagaagttacagtaaaattaatacagaaagagctggaatcgagtgacaatcgcaagtttctcattgatggttttccacgaactgaggagaaccgtgttgcatttgagcgcataataagagcagaccctgatgtagtactgttcttcgattgccctgaagaagagatggtgaaacgcgtcttgaatcgtaatcagggccgaattgatgataatataactacaatgaaaaagcgtctgaaaatcttcaatgccttaaatcgtcctgttattgactactacaaaaataaaggaaaactctacaccattaatgcagtaggaacagtagacgacatattccaacatgtcctacctattttcaattcatttgagatcactccatattttgagtag

SEQ ID NO: 87572 - protein, 242 aa, Arabidopsis thaliana
  peptide (1)..(242): Ceres Seq. ID no. 12701815
MWRRVALLSPMISSSSRSLKLSQAASGLKVGESFATDIISQEERVSPPKEKAPFITFVLGGPGSGKGTQCEKIVETFGLQHLSAGDLLRREIAMHTENGAMILNLIKDGKIVPSEVTVKLIQKELESSDNRKFLIDGFPRTEENRVAFERIIRADPDVVLFFDCPEEEMVKRVLNRNQGRIDDNITTMKKRLKIFNALNRPVIDYYKNKGKLYTINAVGTVDDIFQHVLPIFNSFEITPYFE

SEQ ID NO: 87573 - protein, 232 aa, Arabidopsis thaliana
  peptide (1)..(232): Ceres Seq. ID no. 12701816
MISSSSRSLKLSQAASGLKVGESFATDIISQEERVSPPKEKAPFITFVLGGPGSGKGTQCEKIVETFGLQHLSAGDLLRREIAMHTENGAMILNLIKDGKIVPSEVTVKLIQKELESSDNRKFLIDGFPRTEENRVAFERIIRADPDVVLFFDCPEEEMVKRVLNRNQGRIDDNITTMKKRLKIFNALNRPVIDYYKNKGKLYTINAVGTVDDIFQHVLPIFNSFEITPYFE

SEQ ID NO: 87574 - protein, 149 aa, Arabidopsis thaliana
  peptide (1)..(149): Ceres Seq. ID no. 12701817
MHTENGAMILNLIKDGKIVPSEVTVKLIQKELESSDNRKFLIDGFPRTEENRVAFERIIRADPDVVLFFDCPEEEMVKRVLNRNQGRIDDNITTMKKRLKIFNALNRPVIDYYKNKGKLYTINAVGTVDDIFQHVLPIFNSFEITPYFE

SEQ ID NO: 87575 - DNA, 1243 bp, Arabidopsis thaliana
  misc_feature (1)..(1243): Ceres Seq. ID no. 12701822
  misc_feature (1)..(1243): Ortholog of  Ceres SEQ ID NO 12636774 as cited in SEQ ID NO 372
  misc_feature (1)..(1243): Ortholog of  Ceres SEQ ID NO 13582350 as cited in SEQ ID NO 56734
  misc_feature (1)..(1243): Ortholog of  Ceres SEQ ID NO 12582113 as cited in SEQ ID NO 58349
  misc_feature (1)..(1243): Ortholog of  Ceres SEQ ID NO 15175861 as cited in SEQ ID NO 59381
  misc_feature (1)..(1243): Ortholog of  Ceres SEQ ID NO 12615466 as cited in SEQ ID NO 62761
  misc_feature (1)..(1243): Ortholog of  Ceres SEQ ID NO 14314080 as cited in SEQ ID NO 63105
  misc_feature (1)..(1243): Ortholog of  Ceres SEQ ID NO 13597295 as cited in SEQ ID NO 63743
  misc_feature (1)..(1243): Ortholog of  Ceres SEQ ID NO 12617090 as cited in SEQ ID NO 64005
  misc_feature (1)..(1243): Ortholog of  Ceres SEQ ID NO 15226458 as cited in SEQ ID NO 64042
  misc_feature (1)..(1243): Ortholog of  Ceres SEQ ID NO 13597439 as cited in SEQ ID NO 64081
  misc_feature (1)..(1243): Ortholog of  Ceres SEQ ID NO 13597233 as cited in SEQ ID NO 64370
  misc_feature (1)..(1243): Ortholog of  Ceres SEQ ID NO 13598327 as cited in SEQ ID NO 68040
  misc_feature (1)..(1243): Ortholog of  Ceres SEQ ID NO 13599438 as cited in SEQ ID NO 0
agatttgagactatctatttacattctgattatttcttaagaagaagcggccatggaagtcaaaggagcaacccggagctctatcatagttccttctgttcaagagatggtgaaggagaagatgatcacgacggttcctccgaggtatgtacggtctgatcaagacgtagctgagatagccgttgattctggtctaagaaaccagatcccaatcatagacatgagtcttctgtgttcttcaacctccatggattctgagattgacaagcttgactctgcttgcaaagagtggggattttttcagcttgtaaaccatggaatggagtcaagtttcttgaacaaagtaaagtcagaggttcaagacttcttcaaccttcccatggaagagaagaagaatttgtggcaacaacccgatgagatcgaagggtttggacaagtatttgtggtttcagaagagcagaaactcgattgggcagatatgttcttccttacaatgcaacctgttcgattacgcaagcctcacttgttccccaagttacctctgccctttagagatacactagacatgtattcggctgaagtgaaaagcattgctaagatcttacttgggaaaatagcggtagctctgaagatcaaacccgaggaaatggataagttgtttgatgatgagttagggcagagaattaggctgaattactacccgcgttgtccagagcccgataaggttattggtctaactccgcattctgattctacaggactcaccatactgttgcaggctaatgaagttgaaggtctccaaatcaagaaaaatgccaagtgggtttctgtcaaacctctcccaaatgctttggttgtcaatgtcggagacatcttagagataataacgaatgggacataccgaagtatagagcatcgtggagttgtgaactcagagaaagagagactttcggtggcggcattccacaatataggattgggtaaagaaattggtcctatgagaagtctcgtggaaaggcacaaggctgcatttttcaaaagcgtgactactgaagagtatttcaatggcttgttttcccgtgagctcgatggaaaagcttaccttgatgttatgagactctaaaaggaaacaattcataaaaatattggcttgtgccccaagaaaccaatcacattttctgacccttcctattgtagtgtatatactctgtttctcctctgtttcatgcttttgcaaatagcc

SEQ ID NO: 87576 - protein, 356 aa, Arabidopsis thaliana
  peptide (1)..(356): Ceres Seq. ID no. 12701823
MEVKGATRSSIIVPSVQEMVKEKMITTVPPRYVRSDQDVAEIAVDSGLRNQIPIIDMSLLCSSTSMDSEIDKLDSACKEWGFFQLVNHGMESSFLNKVKSEVQDFFNLPMEEKKNLWQQPDEIEGFGQVFVVSEEQKLDWADMFFLTMQPVRLRKPHLFPKLPLPFRDTLDMYSAEVKSIAKILLGKIAVALKIKPEEMDKLFDDELGQRIRLNYYPRCPEPDKVIGLTPHSDSTGLTILLQANEVEGLQIKKNAKWVSVKPLPNALVVNVGDILEIITNGTYRSIEHRGVVNSEKERLSVAAFHNIGLGKEIGPMRSLVERHKAAFFKSVTTEEYFNGLFSRELDGKAYLDVMRL

SEQ ID NO: 87577 - protein, 338 aa, Arabidopsis thaliana
  peptide (1)..(338): Ceres Seq. ID no. 12701824
MVKEKMITTVPPRYVRSDQDVAEIAVDSGLRNQIPIIDMSLLCSSTSMDSEIDKLDSACKEWGFFQLVNHGMESSFLNKVKSEVQDFFNLPMEEKKNLWQQPDEIEGFGQVFVVSEEQKLDWADMFFLTMQPVRLRKPHLFPKLPLPFRDTLDMYSAEVKSIAKILLGKIAVALKIKPEEMDKLFDDELGQRIRLNYYPRCPEPDKVIGLTPHSDSTGLTILLQANEVEGLQIKKNAKWVSVKPLPNALVVNVGDILEIITNGTYRSIEHRGVVNSEKERLSVAAFHNIGLGKEIGPMRSLVERHKAAFFKSVTTEEYFNGLFSRELDGKAYLDVMRL

SEQ ID NO: 87578 - protein, 333 aa, Arabidopsis thaliana
  peptide (1)..(333): Ceres Seq. ID no. 12701825
MITTVPPRYVRSDQDVAEIAVDSGLRNQIPIIDMSLLCSSTSMDSEIDKLDSACKEWGFFQLVNHGMESSFLNKVKSEVQDFFNLPMEEKKNLWQQPDEIEGFGQVFVVSEEQKLDWADMFFLTMQPVRLRKPHLFPKLPLPFRDTLDMYSAEVKSIAKILLGKIAVALKIKPEEMDKLFDDELGQRIRLNYYPRCPEPDKVIGLTPHSDSTGLTILLQANEVEGLQIKKNAKWVSVKPLPNALVVNVGDILEIITNGTYRSIEHRGVVNSEKERLSVAAFHNIGLGKEIGPMRSLVERHKAAFFKSVTTEEYFNGLFSRELDGKAYLDVMRL

SEQ ID NO: 87579 - DNA, 1197 bp, Arabidopsis thaliana
  misc_feature (1)..(1197): Ceres Seq. ID no. 12701826
  misc_feature (1)..(1197): Ortholog of  Ceres SEQ ID NO 14314567 as cited in SEQ ID NO 52335
  misc_feature (1)..(1197): Ortholog of  Ceres SEQ ID NO 13595437 as cited in SEQ ID NO 56562
  misc_feature (1)..(1197): Ortholog of  Ceres SEQ ID NO 14315985 as cited in SEQ ID NO 57720
atggaggagagagaaggaaccaacatcaacaacaacatcactagcagtttcggcttgaagcagcaacatgaagctgctgcttctgatggtggttactcaatggacccaccaccaagacccgaaaaccctaacccgtttttagtcccacccactactgtccccgcggccgccaccgtagcagcagctgttactgagaatgcggctactccgtttagcttaacaatgccgacggagaacacttcagctgagcagctgaaaaagaagagaggtaggccgagaaagtataatcccgatgggactcttgtcgtgactttatcgccgatgccaatctcgtcctctgttccgttgacgtcggagtttcctccaaggaaacgaggaagaggacgtggcaagtctaatcgatggctcaagaagtctcaaatgttccaattcgatagaagtcctggtgtaggaactgctgattttgttggtgccaactttacacctcatgtactgatcgtcaacgccggagaggatgtgacgatgaagataatgacattctctcaacaaggatctcgtgctatctgcatcctttcagctaatggtcccatctccaatgttacgcttcgtcaatctatgacatccggtggtactctaacttatgagggtcgttttgagattctctctttgacgggttcgtttatgcaaaatgactctggaggaactcgaagtagagctggtggtatgagtgtttgccttgcaggaccagatggtcgtgtctttggtggaggactcgctggtctctttcttgctgctggtcctgtccaggtaatggtagggacttttatagctggtcaagagcagtcacagctggagctagcaaaagaaagacggctaagatttggggctcaaccatcttctatctcctttaacatatccgcagaagaacggaaggcgagattcgagaggcttaacaagtctgttgctattcctgcaccaaccacttcatacacgcatgtaaacacaacaaatgcggttcacagttactatacaaactcggttaaccatgtcaaggatcccttctcgtctatcccagtaggaggaggaggaggtggagaggtaggagaagaagagggtgaagaagatgatgatgaattagaaggtgaagacgaagaattcggaggcgatagccaatctgacaacgagattccgagctga

SEQ ID NO: 87580 - protein, 398 aa, Arabidopsis thaliana
  peptide (1)..(398): Ceres Seq. ID no. 12701827
MEEREGTNINNNITSSFGLKQQHEAAASDGGYSMDPPPRPENPNPFLVPPTTVPAAATVAAAVTENAATPFSLTMPTENTSAEQLKKKRGRPRKYNPDGTLVVTLSPMPISSSVPLTSEFPPRKRGRGRGKSNRWLKKSQMFQFDRSPGVGTADFVGANFTPHVLIVNAGEDVTMKIMTFSQQGSRAICILSANGPISNVTLRQSMTSGGTLTYEGRFEILSLTGSFMQNDSGGTRSRAGGMSVCLAGPDGRVFGGGLAGLFLAAGPVQVMVGTFIAGQEQSQLELAKERRLRFGAQPSSISFNISAEERKARFERLNKSVAIPAPTTSYTHVNTTNAVHSYYTNSVNHVKDPFSSIPVGGGGGGEVGEEEGEEDDDELEGEDEEFGGDSQSDNEIPS

SEQ ID NO: 87581 - protein, 365 aa, Arabidopsis thaliana
  peptide (1)..(365): Ceres Seq. ID no. 12701828
MDPPPRPENPNPFLVPPTTVPAAATVAAAVTENAATPFSLTMPTENTSAEQLKKKRGRPRKYNPDGTLVVTLSPMPISSSVPLTSEFPPRKRGRGRGKSNRWLKKSQMFQFDRSPGVGTADFVGANFTPHVLIVNAGEDVTMKIMTFSQQGSRAICILSANGPISNVTLRQSMTSGGTLTYEGRFEILSLTGSFMQNDSGGTRSRAGGMSVCLAGPDGRVFGGGLAGLFLAAGPVQVMVGTFIAGQEQSQLELAKERRLRFGAQPSSISFNISAEERKARFERLNKSVAIPAPTTSYTHVNTTNAVHSYYTNSVNHVKDPFSSIPVGGGGGGEVGEEEGEEDDDELEGEDEEFGGDSQSDNEIPS

SEQ ID NO: 87582 - protein, 324 aa, Arabidopsis thaliana
  peptide (1)..(324): Ceres Seq. ID no. 12701829
MPTENTSAEQLKKKRGRPRKYNPDGTLVVTLSPMPISSSVPLTSEFPPRKRGRGRGKSNRWLKKSQMFQFDRSPGVGTADFVGANFTPHVLIVNAGEDVTMKIMTFSQQGSRAICILSANGPISNVTLRQSMTSGGTLTYEGRFEILSLTGSFMQNDSGGTRSRAGGMSVCLAGPDGRVFGGGLAGLFLAAGPVQVMVGTFIAGQEQSQLELAKERRLRFGAQPSSISFNISAEERKARFERLNKSVAIPAPTTSYTHVNTTNAVHSYYTNSVNHVKDPFSSIPVGGGGGGEVGEEEGEEDDDELEGEDEEFGGDSQSDNEIPS

SEQ ID NO: 87583 - DNA, 1776 bp, Arabidopsis thaliana
  misc_feature (1)..(1776): Ceres Seq. ID no. 12701840
  misc_feature (1)..(1776): Ortholog of  Ceres SEQ ID NO 13655640 as cited in SEQ ID NO 63844
  misc_feature (1)..(1776): Ortholog of  Ceres SEQ ID NO 13657138 as cited in SEQ ID NO 65923
  misc_feature (1)..(1776): Ortholog of  Ceres SEQ ID NO 13584744 as cited in SEQ ID NO 69137
atgccgtcacgatcaatctcggcaccggttccggttcttgctccggctccgatcgtttcctctttagtcccagcagcgccgtcaggacatcagaataagacaacgcgaatctttccaccgttcgtggtggctggagccggcgccggtttctctcttttcatcactctctccgtctgtttctgtaaattcagccggaaacgttcatcacctccggcggaaaacgcttcctcttcgcctcggagaccgtcgccacgtgagttttcatattcgtctctccgtcgcgccaccggttctttctcgcaggcgaatagactaggtcagggcggatttggcgtcgtgtttcgtggaactatctccggcggcgagaatgtagctgttaaagtaatggattcaggatctcttcaaggagaaggtgagtttcagaacgagttgttcttcgccgccaagcttgactcgcctcacgttgtccctgttattggtttctctcatgatcgaaaacgacgacgtttgcttcttgtttacaagcttatggacaatggtaatctccaagacgccttgcttcaccggagatgccctgagcttatggattggaatcggaggtttttggttgccgttaacattgccgatgggattaagcatcttcatagtcttgaaccacctgtgattcatggtgatattaagcctagcaatgttctattagatagtctcttctctgccaaaatcgctgattttggtttggctaggttgaaagcagagcaagtggagattagtgtagctccggagcgtgatggtgatggatctatggttgaagaagtagagagtgtggtaactactgtgactggttatgaagattttaactttgggttggagagcaatgttgaaagagggagagtgaaagagtatgtaatgcaatggattggttcagaggtaaagaaggagagaccaagcagaagtgattggattgaggcggcagctttgtcttcttcgtcaagtaagaaacttgagaagaagactagcaagagactagattggtggttgtcattggaggaagaggatgagaataagaagaagaagaagcggaggatggttagagagtggtggaaagatgagtatcgtagagaactcgctaagaaaaggaagaagaagaagaagatgactttagaagccgagttttgtagtgatgatgggagtagtagtgtgagtcaatggcggcgtggtagtggtagtggtagcagcatagattggtggttagatgggttaagtggtgaacgatggttgagagcaaggggaaatagccatgactcggtgagcggtgagatagctaagagctgcggaattagtagcacgccgagcatgagagggactgtgtgctatgcagctcctgagtactgtaacttggacaacaacgtgtcagagaaatgtgatgtctatagctacggtgttctgttgttagttctgatttccgggaggcgcccgttggagatgacgggctccgcgagtgagatacaacgggcaaacctcatgtcttgggcgaggaagttggcgagaagaggaaaacttgttgatcttgtggatcaaaagttgcaaaacttagaccaagaacaagcagtgttgtgcataaaggtggctttgttgtgtctgcaaagattaccgatttcacgaccgtcaatgaaagaggtcttgggaatgcttaaaggagaagtgaatctaccagagttgcctagtgagttctcaccatcgccaccattaaagacaacgaggaagcagcgccgttga

SEQ ID NO: 87584 - protein, 591 aa, Arabidopsis thaliana
  peptide (1)..(591): Ceres Seq. ID no. 12701841
MPSRSISAPVPVLAPAPIVSSLVPAAPSGHQNKTTRIFPPFVVAGAGAGFSLFITLSVCFCKFSRKRSSPPAENASSSPRRPSPREFSYSSLRRATGSFSQANRLGQGGFGVVFRGTISGGENVAVKVMDSGSLQGEGEFQNELFFAAKLDSPHVVPVIGFSHDRKRRRLLLVYKLMDNGNLQDALLHRRCPELMDWNRRFLVAVNIADGIKHLHSLEPPVIHGDIKPSNVLLDSLFSAKIADFGLARLKAEQVEISVAPERDGDGSMVEEVESVVTTVTGYEDFNFGLESNVERGRVKEYVMQWIGSEVKKERPSRSDWIEAAALSSSSSKKLEKKTSKRLDWWLSLEEEDENKKKKKRRMVREWWKDEYRRELAKKRKKKKKMTLEAEFCSDDGSSSVSQWRRGSGSGSSIDWWLDGLSGERWLRARGNSHDSVSGEIAKSCGISSTPSMRGTVCYAAPEYCNLDNNVSEKCDVYSYGVLLLVLISGRRPLEMTGSASEIQRANLMSWARKLARRGKLVDLVDQKLQNLDQEQAVLCIKVALLCLQRLPISRPSMKEVLGMLKGEVNLPELPSEFSPSPPLKTTRKQRR

SEQ ID NO: 87585 - protein, 463 aa, Arabidopsis thaliana
  peptide (1)..(463): Ceres Seq. ID no. 12701842
MDSGSLQGEGEFQNELFFAAKLDSPHVVPVIGFSHDRKRRRLLLVYKLMDNGNLQDALLHRRCPELMDWNRRFLVAVNIADGIKHLHSLEPPVIHGDIKPSNVLLDSLFSAKIADFGLARLKAEQVEISVAPERDGDGSMVEEVESVVTTVTGYEDFNFGLESNVERGRVKEYVMQWIGSEVKKERPSRSDWIEAAALSSSSSKKLEKKTSKRLDWWLSLEEEDENKKKKKRRMVREWWKDEYRRELAKKRKKKKKMTLEAEFCSDDGSSSVSQWRRGSGSGSSIDWWLDGLSGERWLRARGNSHDSVSGEIAKSCGISSTPSMRGTVCYAAPEYCNLDNNVSEKCDVYSYGVLLLVLISGRRPLEMTGSASEIQRANLMSWARKLARRGKLVDLVDQKLQNLDQEQAVLCIKVALLCLQRLPISRPSMKEVLGMLKGEVNLPELPSEFSPSPPLKTTRKQRR

SEQ ID NO: 87586 - protein, 415 aa, Arabidopsis thaliana
  peptide (1)..(415): Ceres Seq. ID no. 12701843
MDNGNLQDALLHRRCPELMDWNRRFLVAVNIADGIKHLHSLEPPVIHGDIKPSNVLLDSLFSAKIADFGLARLKAEQVEISVAPERDGDGSMVEEVESVVTTVTGYEDFNFGLESNVERGRVKEYVMQWIGSEVKKERPSRSDWIEAAALSSSSSKKLEKKTSKRLDWWLSLEEEDENKKKKKRRMVREWWKDEYRRELAKKRKKKKKMTLEAEFCSDDGSSSVSQWRRGSGSGSSIDWWLDGLSGERWLRARGNSHDSVSGEIAKSCGISSTPSMRGTVCYAAPEYCNLDNNVSEKCDVYSYGVLLLVLISGRRPLEMTGSASEIQRANLMSWARKLARRGKLVDLVDQKLQNLDQEQAVLCIKVALLCLQRLPISRPSMKEVLGMLKGEVNLPELPSEFSPSPPLKTTRKQRR

SEQ ID NO: 87587 - DNA, 1467 bp, Arabidopsis thaliana
  misc_feature (1)..(1467): Ceres Seq. ID no. 12701860
  misc_feature (1)..(1467): Ortholog of  Ceres SEQ ID NO 13660287 as cited in SEQ ID NO 67316
atggatccgacggcgccgttgcttacacacggtggcgaagtagaggaggattatgctccggcgaggagctggaccgatgtgaaacgagtcttatctacagagtcggccaagttgtggatgatagctgctcctgtggggttcaacatcatctgccaatacggagttagctcagtcactaatatctttgtcggtcacatcggcgaagtcgagctctccgccgtctctatctctctttccgtcatcggtaccttctccttcggtttcttgcttggtatgggaagtgctcttgaaacattatgtggtcaagcatatggagctggtcaagtcaatatgttaggagtttatatgcagagatcttggattatcttgttcgtttcttgtttcttcctccttcctatttacatctttgccacgccggttctgagactactcggtcaagcagaggagatcgctgttccagctggacagttcactcttctaaccataccacagctcttctcactggcctttaatttcccaacctctaagttccttcaagcacagagcaaagtggttgctattgcttggattggatttgtggctctttcccttcacgttattatgctctggttgtttataatcgagtttggttgggggacaaatggtgctgctttggcgtttaatattacaaactggggaactgcaattgctcaaattgtttatgtgattggttggtgtaatgaaggctggactggtttatcttggttggcttttaaagagatttgggctttcgttagactctccattgcatctgctgttatgctttgtcttgagatctggtatatgatgagtatcattgttcttactggccgtcttgacaatgcagttatcgctgttgattccctttctatatgcatgaatatcaacggcttggaggctatgttattcatcggaataaatgcagctataagtgtccgtgtatccaatgagcttggcctaggccgtccacgagcagctaagtactctgtctatgtcacggtcttccagtctctcctcattggtcttgtctttatggtggctatcatcatagccagagaccattttgctatcatcttcacaagcagtaaagtacttcagcgtgcagtgtctaagctagcttatcttcttggtataaccatggttctcaacagtgtgcagccggttgtttctggtgtggctgttggaggcggttggcaaggcttagtggcctatatcaacttgggctgttactacatttttggccttccctttggatatcttcttggttacattgcaaactttggagtgatgggactttggtctggaatgatagccgggacagcgcttcaaacgttgttactgttgattgttctgtataagacaaactggaataaagaggtggaggagacgatggaacgtatgaagaaatggggagggagtgagacgacatccaaggatatacttgcgtga

SEQ ID NO: 87588 - protein, 488 aa, Arabidopsis thaliana
  peptide (1)..(488): Ceres Seq. ID no. 12701861
MDPTAPLLTHGGEVEEDYAPARSWTDVKRVLSTESAKLWMIAAPVGFNIICQYGVSSVTNIFVGHIGEVELSAVSISLSVIGTFSFGFLLGMGSALETLCGQAYGAGQVNMLGVYMQRSWIILFVSCFFLLPIYIFATPVLRLLGQAEEIAVPAGQFTLLTIPQLFSLAFNFPTSKFLQAQSKVVAIAWIGFVALSLHVIMLWLFIIEFGWGTNGAALAFNITNWGTAIAQIVYVIGWCNEGWTGLSWLAFKEIWAFVRLSIASAVMLCLEIWYMMSIIVLTGRLDNAVIAVDSLSICMNINGLEAMLFIGINAAISVRVSNELGLGRPRAAKYSVYVTVFQSLLIGLVFMVAIIIARDHFAIIFTSSKVLQRAVSKLAYLLGITMVLNSVQPVVSGVAVGGGWQGLVAYINLGCYYIFGLPFGYLLGYIANFGVMGLWSGMIAGTALQTLLLLIVLYKTNWNKEVEETMERMKKWGGSETTSKDILA

SEQ ID NO: 87589 - protein, 449 aa, Arabidopsis thaliana
  peptide (1)..(449): Ceres Seq. ID no. 12701862
MIAAPVGFNIICQYGVSSVTNIFVGHIGEVELSAVSISLSVIGTFSFGFLLGMGSALETLCGQAYGAGQVNMLGVYMQRSWIILFVSCFFLLPIYIFATPVLRLLGQAEEIAVPAGQFTLLTIPQLFSLAFNFPTSKFLQAQSKVVAIAWIGFVALSLHVIMLWLFIIEFGWGTNGAALAFNITNWGTAIAQIVYVIGWCNEGWTGLSWLAFKEIWAFVRLSIASAVMLCLEIWYMMSIIVLTGRLDNAVIAVDSLSICMNINGLEAMLFIGINAAISVRVSNELGLGRPRAAKYSVYVTVFQSLLIGLVFMVAIIIARDHFAIIFTSSKVLQRAVSKLAYLLGITMVLNSVQPVVSGVAVGGGWQGLVAYINLGCYYIFGLPFGYLLGYIANFGVMGLWSGMIAGTALQTLLLLIVLYKTNWNKEVEETMERMKKWGGSETTSKDILA

SEQ ID NO: 87590 - protein, 397 aa, Arabidopsis thaliana
  peptide (1)..(397): Ceres Seq. ID no. 12701863
MGSALETLCGQAYGAGQVNMLGVYMQRSWIILFVSCFFLLPIYIFATPVLRLLGQAEEIAVPAGQFTLLTIPQLFSLAFNFPTSKFLQAQSKVVAIAWIGFVALSLHVIMLWLFIIEFGWGTNGAALAFNITNWGTAIAQIVYVIGWCNEGWTGLSWLAFKEIWAFVRLSIASAVMLCLEIWYMMSIIVLTGRLDNAVIAVDSLSICMNINGLEAMLFIGINAAISVRVSNELGLGRPRAAKYSVYVTVFQSLLIGLVFMVAIIIARDHFAIIFTSSKVLQRAVSKLAYLLGITMVLNSVQPVVSGVAVGGGWQGLVAYINLGCYYIFGLPFGYLLGYIANFGVMGLWSGMIAGTALQTLLLLIVLYKTNWNKEVEETMERMKKWGGSETTSKDILA

SEQ ID NO: 87591 - DNA, 1743 bp, Arabidopsis thaliana
  misc_feature (1)..(1743): Ceres Seq. ID no. 12701864
  misc_feature (1)..(1743): Ortholog of  Ceres SEQ ID NO 13582285 as cited in SEQ ID NO 59817
gcttcgtctctccggttgttaccaccacacaacgccatggaagctgctcttgctgcatgcgctcttccatcgctccgaattctcaatacgaaacctcgtttcagatgttccttctccaatccaagcctacccatttctcctaattcccttatcacccgcaaatcaagtcgattcacaaccgcagtatcatcaccaccatcatcatcagccgctacgtcaacgaattctccaccggaacctgaagccctattcgaacccgggtcggataagttcgattggtacgctaattggtacccagtgatgccaatttgcgatcttgacaagaaggttcctcatgggaagaaagttatggggattgatttggttgtttggtgggataggaacgagaagcaatggaaagtgatggatgacacgtgtcctcatcgtcttgctcctttgtctgatggaaggattgatcaatgggggaggttgcaatgtgtttatcatggatggtgctttaatggttccggtgactgtaaactcattcctcaagctcctcctgatggtcctccggtccacactttcaagcaagcttgtgtagctgtttacccgagtactgtgcagcatgagatcatttggttttggccaaacagtgatccaaagtacaaaaacattattgaaaccaacaagcctccttacattccagagttagaagacccatcattcactaagttgatggggaatcgtgatattccttacgggtacgatgtcttggtggaaaacctcatggacccggctcatgttccttatgcacattatggactgatgcggtttcctaaaccaaaagagaagattgacagagaaggggggaaaccactcgaaatcaacgttaaaaaactagacaacaaagggttcttttcaaaacaagaatggggttattctaattttattgcaccatgtgtgtatcgctcttccacagaccctctaccagagcaggaacatgagtatcccgcaccagctgcttctgacaaggcggcattgtcaaagcggagattgtctttgatctttatatgtattccggtcagtccaggtcgtagtaggctgatatggacgttcccgaggaattttggtgtatttattgataagattgtccctagatgggtgtttcacattggtcaaaatacgattctagactcagatttgcacctccttcatgtagaggagcggaagatactggagagaggccctgaaaactggcaaaaagcttgctttatcccaacaaaatcagacgctaatgtggttacattcaggagatggtttaacaagtacagcgaggctcgagtcgattggagaggaaagtttgatccatttcttcttcctcctacgcctccccgagaacagctcttcgacaggtattggtcgcatgttgagaactgcagcagctgcaagaaagctcacaaatatctcaatgcgctagaggtgatcttacaaatcgcatccgttgctatgatcggagtcatggcggtgttgaagcaaacgacaatgtcgaatgtggctagaattgcagtgcttgtggcggctgttttaagttttgcagcttcaaagtggctatcacacttcatctacaagacattccattaccatgactacaaccatgctgttgtttgaaatgtatattggtgtttgtacttcgtatatatactcatcggatgtattcagtccacatggtgttgtacataacagttatacagaaactaattcttg

SEQ ID NO: 87592 - protein, 548 aa, Arabidopsis thaliana
  peptide (1)..(548): Ceres Seq. ID no. 12701865
ASSLRLLPPHNAMEAALAACALPSLRILNTKPRFRCSFSNPSLPISPNSLITRKSSRFTTAVSSPPSSSAATSTNSPPEPEALFEPGSDKFDWYANWYPVMPICDLDKKVPHGKKVMGIDLVVWWDRNEKQWKVMDDTCPHRLAPLSDGRIDQWGRLQCVYHGWCFNGSGDCKLIPQAPPDGPPVHTFKQACVAVYPSTVQHEIIWFWPNSDPKYKNIIETNKPPYIPELEDPSFTKLMGNRDIPYGYDVLVENLMDPAHVPYAHYGLMRFPKPKEKIDREGGKPLEINVKKLDNKGFFSKQEWGYSNFIAPCVYRSSTDPLPEQEHEYPAPAASDKAALSKRRLSLIFICIPVSPGRSRLIWTFPRNFGVFIDKIVPRWVFHIGQNTILDSDLHLLHVEERKILERGPENWQKACFIPTKSDANVVTFRRWFNKYSEARVDWRGKFDPFLLPPTPPREQLFDRYWSHVENCSSCKKAHKYLNALEVILQIASVAMIGVMAVLKQTTMSNVARIAVLVAAVLSFAASKWLSHFIYKTFHYHDYNHAVV

SEQ ID NO: 87593 - protein, 536 aa, Arabidopsis thaliana
  peptide (1)..(536): Ceres Seq. ID no. 12701866
MEAALAACALPSLRILNTKPRFRCSFSNPSLPISPNSLITRKSSRFTTAVSSPPSSSAATSTNSPPEPEALFEPGSDKFDWYANWYPVMPICDLDKKVPHGKKVMGIDLVVWWDRNEKQWKVMDDTCPHRLAPLSDGRIDQWGRLQCVYHGWCFNGSGDCKLIPQAPPDGPPVHTFKQACVAVYPSTVQHEIIWFWPNSDPKYKNIIETNKPPYIPELEDPSFTKLMGNRDIPYGYDVLVENLMDPAHVPYAHYGLMRFPKPKEKIDREGGKPLEINVKKLDNKGFFSKQEWGYSNFIAPCVYRSSTDPLPEQEHEYPAPAASDKAALSKRRLSLIFICIPVSPGRSRLIWTFPRNFGVFIDKIVPRWVFHIGQNTILDSDLHLLHVEERKILERGPENWQKACFIPTKSDANVVTFRRWFNKYSEARVDWRGKFDPFLLPPTPPREQLFDRYWSHVENCSSCKKAHKYLNALEVILQIASVAMIGVMAVLKQTTMSNVARIAVLVAAVLSFAASKWLSHFIYKTFHYHDYNHAVV

SEQ ID NO: 87594 - protein, 448 aa, Arabidopsis thaliana
  peptide (1)..(448): Ceres Seq. ID no. 12701867
MPICDLDKKVPHGKKVMGIDLVVWWDRNEKQWKVMDDTCPHRLAPLSDGRIDQWGRLQCVYHGWCFNGSGDCKLIPQAPPDGPPVHTFKQACVAVYPSTVQHEIIWFWPNSDPKYKNIIETNKPPYIPELEDPSFTKLMGNRDIPYGYDVLVENLMDPAHVPYAHYGLMRFPKPKEKIDREGGKPLEINVKKLDNKGFFSKQEWGYSNFIAPCVYRSSTDPLPEQEHEYPAPAASDKAALSKRRLSLIFICIPVSPGRSRLIWTFPRNFGVFIDKIVPRWVFHIGQNTILDSDLHLLHVEERKILERGPENWQKACFIPTKSDANVVTFRRWFNKYSEARVDWRGKFDPFLLPPTPPREQLFDRYWSHVENCSSCKKAHKYLNALEVILQIASVAMIGVMAVLKQTTMSNVARIAVLVAAVLSFAASKWLSHFIYKTFHYHDYNHAVV

SEQ ID NO: 87595 - DNA, 2253 bp, Arabidopsis thaliana
  misc_feature (1)..(2253): Ceres Seq. ID no. 12701931
  misc_feature (1)..(2253): Ortholog of  Ceres SEQ ID NO 13600595 as cited in SEQ ID NO 629
atggggttaaatttcagggaaaaggcatggatacttctggggattctttgttgttcatctttgatttgttcagttaaagcaattgtcacttacgatcgtaaagctgtgatcatcaatggtcagagaaggatccttctctctggctccattcactacccaagaagcacacctgagatgtggcctgaccttatacaaaaagccaaagatggagggttggatgttatacagacttatgttttctggaatgggcatgaaccttctcctggacaatattattttgaggacagatatgatctagttaagttcatcaaggtggtacaacaagctggtctttacgttcatctcaggattggtccctatgtttgcgctgaatggaactttggagggtttcctgtgtggctcaaatatgttcccggtatggtatttaggaccgacaatgaacctttcaaggctgcaatgcaaaaattcactgagaagattgtgaggatgatgaaagaagaaaaattatttgagactcaaggaggacccatcattctgtcacagatagagaatgagtatggaccaatagagtgggagataggagcaccagggaaggcatacacaaaatgggtagctgaaatggcacaaggactctccactggtgtcccatggattatgtgcaagcaagatgatgctcctaactctattataaacacatgtaatgggttttattgtgagaatttcaaaccaaactcggacaataagccgaaaatgtggacagagaactggactggttggtttacagagtttggaggtgcagtaccatacaggccagccgaagacattgccttatccgtggctcgcttcatacagaacggtggctctttcatcaactattatatgtaccatggaggaaccaacttcgacagaacagccggtgaattcatcgccaccagctatgactatgatgctcctcttgatgaatacgggttaccgagagaacctaagtatagtcacttgaaaaggctgcataaggtcatcaagctctgcgaaccggcattggtctctgctgatcctacagtcacatcactcggggataaacaagaagctcacgtgttcaagtctaagtcatcttgcgctgcttttctctcaaactacaacacaagttctgctgcaagagtcttgtttggcggatctacatatgatctgcctccttggtctgtcagtattctacccgactgcaaaactgagtattacaacactgccaaggtccgtacatcaagcatacacatgaagatggttcctacaaacacaccattctcttggggttcatacaacgaagagattccttctgcaaatgacaatggtaccttttcacaagatgggcttgtggaacagataagtatcaccagagacaagacagactatttctggtatctgacagatattacaatcagtcctgatgaaaagttcctaactggtgaagaccctcttcttactattgggtcagctgggcatgctcttcatgtattcgttaatggccagcttgcaggaactgcatatggatcactggagaagccaaagctaacatttagtcagaagatcaaattacatgcaggggtcaacaaacttgctctattgagtactgcagcgggtctgccgaacgttggcgtgcattatgagacttggaatactggagttcttggcccagtgacactgaatggagttaactccggaacatgggacatgactaaatggaaatggtcttacaagattggtactaagggtgaagctctgagcgttcataccttagccgggagttcaacggtagaatggaaagaaggatcattagtggctaaaaagcagcccttgacctggtacaaggtaagagaaacagaggaatcaatgaatcatgaccaccaacaaaggcagaattttcaccatctctttttgcagtctacttttgactcaccaacaggcaatgaaccattggctttagacatgaacacaatggggaaaggtcaaatgtggataaatgggcagaacatcggacgccactggccagcatatacagctcgtgggaaatgcgaacgctgcagctatgccgggactttcacagagaagaaatgtttgagtaactgtggagaagcttcacaaagatggtaccatgtgcctcgttcatggctgaagccaactaataaccttgtcattgtacttgaagaatggggtggtgaacccaatgggatctctcttgtaaaaagaacagccaaataa

SEQ ID NO: 87596 - protein, 750 aa, Arabidopsis thaliana
  peptide (1)..(750): Ceres Seq. ID no. 12701932
MGLNFREKAWILLGILCCSSLICSVKAIVTYDRKAVIINGQRRILLSGSIHYPRSTPEMWPDLIQKAKDGGLDVIQTYVFWNGHEPSPGQYYFEDRYDLVKFIKVVQQAGLYVHLRIGPYVCAEWNFGGFPVWLKYVPGMVFRTDNEPFKAAMQKFTEKIVRMMKEEKLFETQGGPIILSQIENEYGPIEWEIGAPGKAYTKWVAEMAQGLSTGVPWIMCKQDDAPNSIINTCNGFYCENFKPNSDNKPKMWTENWTGWFTEFGGAVPYRPAEDIALSVARFIQNGGSFINYYMYHGGTNFDRTAGEFIATSYDYDAPLDEYGLPREPKYSHLKRLHKVIKLCEPALVSADPTVTSLGDKQEAHVFKSKSSCAAFLSNYNTSSAARVLFGGSTYDLPPWSVSILPDCKTEYYNTAKVRTSSIHMKMVPTNTPFSWGSYNEEIPSANDNGTFSQDGLVEQISITRDKTDYFWYLTDITISPDEKFLTGEDPLLTIGSAGHALHVFVNGQLAGTAYGSLEKPKLTFSQKIKLHAGVNKLALLSTAAGLPNVGVHYETWNTGVLGPVTLNGVNSGTWDMTKWKWSYKIGTKGEALSVHTLAGSSTVEWKEGSLVAKKQPLTWYKVRETEESMNHDHQQRQNFHHLFLQSTFDSPTGNEPLALDMNTMGKGQMWINGQNIGRHWPAYTARGKCERCSYAGTFTEKKCLSNCGEASQRWYHVPRSWLKPTNNLVIVLEEWGGEPNGISLVKRTAK

SEQ ID NO: 87597 - protein, 692 aa, Arabidopsis thaliana
  peptide (1)..(692): Ceres Seq. ID no. 12701933
MWPDLIQKAKDGGLDVIQTYVFWNGHEPSPGQYYFEDRYDLVKFIKVVQQAGLYVHLRIGPYVCAEWNFGGFPVWLKYVPGMVFRTDNEPFKAAMQKFTEKIVRMMKEEKLFETQGGPIILSQIENEYGPIEWEIGAPGKAYTKWVAEMAQGLSTGVPWIMCKQDDAPNSIINTCNGFYCENFKPNSDNKPKMWTENWTGWFTEFGGAVPYRPAEDIALSVARFIQNGGSFINYYMYHGGTNFDRTAGEFIATSYDYDAPLDEYGLPREPKYSHLKRLHKVIKLCEPALVSADPTVTSLGDKQEAHVFKSKSSCAAFLSNYNTSSAARVLFGGSTYDLPPWSVSILPDCKTEYYNTAKVRTSSIHMKMVPTNTPFSWGSYNEEIPSANDNGTFSQDGLVEQISITRDKTDYFWYLTDITISPDEKFLTGEDPLLTIGSAGHALHVFVNGQLAGTAYGSLEKPKLTFSQKIKLHAGVNKLALLSTAAGLPNVGVHYETWNTGVLGPVTLNGVNSGTWDMTKWKWSYKIGTKGEALSVHTLAGSSTVEWKEGSLVAKKQPLTWYKVRETEESMNHDHQQRQNFHHLFLQSTFDSPTGNEPLALDMNTMGKGQMWINGQNIGRHWPAYTARGKCERCSYAGTFTEKKCLSNCGEASQRWYHVPRSWLKPTNNLVIVLEEWGGEPNGISLVKRTAK

SEQ ID NO: 87598 - protein, 611 aa, Arabidopsis thaliana
  peptide (1)..(611): Ceres Seq. ID no. 12701934
MVFRTDNEPFKAAMQKFTEKIVRMMKEEKLFETQGGPIILSQIENEYGPIEWEIGAPGKAYTKWVAEMAQGLSTGVPWIMCKQDDAPNSIINTCNGFYCENFKPNSDNKPKMWTENWTGWFTEFGGAVPYRPAEDIALSVARFIQNGGSFINYYMYHGGTNFDRTAGEFIATSYDYDAPLDEYGLPREPKYSHLKRLHKVIKLCEPALVSADPTVTSLGDKQEAHVFKSKSSCAAFLSNYNTSSAARVLFGGSTYDLPPWSVSILPDCKTEYYNTAKVRTSSIHMKMVPTNTPFSWGSYNEEIPSANDNGTFSQDGLVEQISITRDKTDYFWYLTDITISPDEKFLTGEDPLLTIGSAGHALHVFVNGQLAGTAYGSLEKPKLTFSQKIKLHAGVNKLALLSTAAGLPNVGVHYETWNTGVLGPVTLNGVNSGTWDMTKWKWSYKIGTKGEALSVHTLAGSSTVEWKEGSLVAKKQPLTWYKVRETEESMNHDHQQRQNFHHLFLQSTFDSPTGNEPLALDMNTMGKGQMWINGQNIGRHWPAYTARGKCERCSYAGTFTEKKCLSNCGEASQRWYHVPRSWLKPTNNLVIVLEEWGGEPNGISLVKRTAK

SEQ ID NO: 87599 - DNA, 985 bp, Arabidopsis thaliana
  misc_feature (1)..(985): Ceres Seq. ID no. 12701946
  misc_feature (1)..(985): Ortholog of  Ceres SEQ ID NO 14303355 as cited in SEQ ID NO 59746
  misc_feature (1)..(985): Ortholog of  Ceres SEQ ID NO 14302415 as cited in SEQ ID NO 62781
atgacgatctctgttgagaagccgatttttgaagaggtttctgcattcgagaagagtggggacaatatcggagagttgaaattggacggaggattttcgatgccgaaaatggacaccaatgacgacgaagcttttttggctcctgagatgaatgcatttggccgccaattcagggactacgatgttgagagtgagaggcaaaagggcgtcgaagagttttacagattacaacacatcaaccaaactgtcgactttgtgaaaaagatgagggctgaatatggaaaattagataaaatggtgatgagcatttgggaatgttgtgagcttctcaatgaggttgtggatgagagtgatccagatcttgacgagccccagattcagcatttgcttcaatctgccgaagccatccgcaaagattaccctaatgaagattggcttcatctgaccgctcttatccatgatcttgggaaagttattactcttccacaattcggaggacttcctcaatgggctgttgttggtgacacattccctgttggatgtgcatttgatgaatctaacgtacatcacaagtactttgtggaaaacccagattttcacaacgaaacctacaacactaaaaatgggatttactctgaagggtgtggattaaacaatgtcatgatgtcttggggccatgacgactacatgtacctggtggctaaagaaaacggaagtaccttgccgtcggctggacagtttatcataagataccattccttttaccctttgcacacggctggagaatacacccatcttatgaacgaggaagacaaggagaatctgaagtggctacacgttttcaacaagtacgacttgtacagtaagagcaaagttcacgttgatgtggagaaggtcaagccttactacatgtctcttatcaagaaatatttcccggaaaacttgaggtggtgaattcggtggagtaaaaaagtgcccatggagg

SEQ ID NO: 87600 - protein, 317 aa, Arabidopsis thaliana
  peptide (1)..(317): Ceres Seq. ID no. 12701947
MTISVEKPIFEEVSAFEKSGDNIGELKLDGGFSMPKMDTNDDEAFLAPEMNAFGRQFRDYDVESERQKGVEEFYRLQHINQTVDFVKKMRAEYGKLDKMVMSIWECCELLNEVVDESDPDLDEPQIQHLLQSAEAIRKDYPNEDWLHLTALIHDLGKVITLPQFGGLPQWAVVGDTFPVGCAFDESNVHHKYFVENPDFHNETYNTKNGIYSEGCGLNNVMMSWGHDDYMYLVAKENGSTLPSAGQFIIRYHSFYPLHTAGEYTHLMNEEDKENLKWLHVFNKYDLYSKSKVHVDVEKVKPYYMSLIKKYFPENLRW

SEQ ID NO: 87601 - protein, 284 aa, Arabidopsis thaliana; identical to SEQ ID NO: 49373
  peptide (1)..(284): Ceres Seq. ID no. 12701948

SEQ ID NO: 87602 - protein, 281 aa, Arabidopsis thaliana; identical to SEQ ID NO: 49374
  peptide (1)..(281): Ceres Seq. ID no. 12701949

SEQ ID NO: 87603 - DNA, 927 bp, Arabidopsis thaliana
  misc_feature (1)..(927): Ceres Seq. ID no. 12701970
  misc_feature (1)..(927): Ortholog of  Ceres SEQ ID NO 14312208 as cited in SEQ ID NO 54845
  misc_feature (1)..(927): Ortholog of  Ceres SEQ ID NO 15171755 as cited in SEQ ID NO 57047
  misc_feature (1)..(927): Ortholog of  Ceres SEQ ID NO 13597613 as cited in SEQ ID NO 65334
  misc_feature (1)..(927): Ortholog of  Ceres SEQ ID NO 15178832 as cited in SEQ ID NO 0
atgtcagctaggtattggtgtcacatgtgttcacaaatggtgaatccagttattggtgccgagatcaaatgccccttttgccaaagcgggtttgtcgaggaaatgagccgtgagattaatggcggcagcagtagcagtctaagggaggttcaagaccctgagattgattttggtacagaccgtgcattgtctctatggggtccaatcttgcttggaatgatgagtaatcctcgtagacgtagaagagagtttgagtctatccttaggaggagacggagaagctcagctactatattgcagttgcttcagggtattcgtgcagggattgcttctgagtatgagagctcggatcgagacctgttaaatcaatcagctgttgttcagggttcaacgagtttgaatcaaaaccggaacaatacttctctttctgcaattggagattactttgttggatccagtttagaccatttgcttgaacatctagctgataatgattcaatcaggcacgggagtcttccagcacgtaaagaagttgtggataatctcccaacggttaagataagtgaatcattgcagtgctcgatttgtttggatgattttgacaaaggaagtgaagctaaagagatgccgtgtaagcacaagtttcacatccggtgtatagtaccgtggctcgagcttcacagttcatgtcccgtgtgccgatatgaactccctcctgatgatgagaccaaggttaatcctgtaagaccgagaacaagaactctagagatcaacgtaagtaatgagaatgtggaagatgatgcaaggaacagtaatgtgagcgagagaaggttctcttttccatggccgttcagcggattattctcttcatcctcttcgtcatccgcatcggcctcggggtcatctcatctcggtgagaactcgtaa

SEQ ID NO: 87604 - protein, 308 aa, Arabidopsis thaliana
  peptide (1)..(308): Ceres Seq. ID no. 12701971
MSARYWCHMCSQMVNPVIGAEIKCPFCQSGFVEEMSREINGGSSSSLREVQDPEIDFGTDRALSLWGPILLGMMSNPRRRRREFESILRRRRRSSATILQLLQGIRAGIASEYESSDRDLLNQSAVVQGSTSLNQNRNNTSLSAIGDYFVGSSLDHLLEHLADNDSIRHGSLPARKEVVDNLPTVKISESLQCSICLDDFDKGSEAKEMPCKHKFHIRCIVPWLELHSSCPVCRYELPPDDETKVNPVRPRTRTLEINVSNENVEDDARNSNVSERRFSFPWPFSGLFSSSSSSSASASGSSHLGENS

SEQ ID NO: 87605 - protein, 300 aa, Arabidopsis thaliana
  peptide (1)..(300): Ceres Seq. ID no. 12701972
MCSQMVNPVIGAEIKCPFCQSGFVEEMSREINGGSSSSLREVQDPEIDFGTDRALSLWGPILLGMMSNPRRRRREFESILRRRRRSSATILQLLQGIRAGIASEYESSDRDLLNQSAVVQGSTSLNQNRNNTSLSAIGDYFVGSSLDHLLEHLADNDSIRHGSLPARKEVVDNLPTVKISESLQCSICLDDFDKGSEAKEMPCKHKFHIRCIVPWLELHSSCPVCRYELPPDDETKVNPVRPRTRTLEINVSNENVEDDARNSNVSERRFSFPWPFSGLFSSSSSSSASASGSSHLGENS

SEQ ID NO: 87606 - protein, 296 aa, Arabidopsis thaliana
  peptide (1)..(296): Ceres Seq. ID no. 12701973
MVNPVIGAEIKCPFCQSGFVEEMSREINGGSSSSLREVQDPEIDFGTDRALSLWGPILLGMMSNPRRRRREFESILRRRRRSSATILQLLQGIRAGIASEYESSDRDLLNQSAVVQGSTSLNQNRNNTSLSAIGDYFVGSSLDHLLEHLADNDSIRHGSLPARKEVVDNLPTVKISESLQCSICLDDFDKGSEAKEMPCKHKFHIRCIVPWLELHSSCPVCRYELPPDDETKVNPVRPRTRTLEINVSNENVEDDARNSNVSERRFSFPWPFSGLFSSSSSSSASASGSSHLGENS

SEQ ID NO: 87607 - DNA, 1467 bp, Arabidopsis thaliana
  misc_feature (1)..(1467): Ceres Seq. ID no. 12701978
  misc_feature (1)..(1467): Ortholog of  Ceres SEQ ID NO 15171693 as cited in SEQ ID NO 60124
atgttcatcctcagagttcattccgttgactccgagagaccaatctccgttgaagaagaagaatcaggtttcacttacgcatcgaaaagagctcagcctcctcttaaactcatacaaccatctctcaaactcaccgaccgcaaaggcttgatccatctctatcgcaaatcttcacatagctctctgcctaaccctagctcccgatccaccactctcttcatcgtcgctgttcccaattatctctcctctctcgattttatccgtttctgtgattcccgcatctcccaagtctccgacatcctcttcatcaggaacgatggaatggaagatagatatagtgttcttatcacattttctgatcaatccgaagctgatggtttctacaacaacttgaatgggaaaaagttcgcaccatctgaggctgaggtttgtcatattctatatgtaatgtcggtggaacacacagaatttgatgaggttgctgcagaagcacctactggatttaccgagttacctacgtgtccaatatgtcttgagagattagatcctgacaccagtggtatagttagcactctttgtgatcactcgtttcagtgttcttgcacttcgaaatggacttatctgtcttgtcaggtttgtcgattgtgtcaacagcaagatgagatattaaactgttctatttgtggaaaaactgagaatgtatgggcatgccttgtctgtggcttcgtaggttgtggaagatacaaggaagggcattctattaggcactggaaagaaacgcatcactgctattctcttgatttgcgaacacaacaaatctgggattatgttggtgacagctatgttcatcggttaaaccattcaaaaattgatggaaagtcagtagagatgagcaccagttgtctgtcacaccagggggactgtggcctctgtgagtgtagtgaggatacaggaattagcggagctatctttaacagcaaagttgattcaattgtaatcgagtataatgaccttcttgcaagtcaactaaagggacagcgacagtactatgaatctctcattgttgaggcgagaagcaagcaagaaagtagtattgccgaagcagtagagcaaattgttgttaacacaatgcaggagcttcagaataagattgaaaaatgtgaagaggaaaaaagtggtatcactgaagttaacacaaaacttataaaagagcaggatacttggcggaagaaggccaaagaaatagaagagagggaagctgcattgctaggatcaaaagacgagatgataactgatcttcaagaacagataagagatattacggtcttcattgaagccaagaaaaccttaaagaagatgtcatcagatacggatggtatacgcgaaggaaccgtcttaccagtgcctatcagtcccgagccagtttcctcagttagaaggcaaaagaagtcaaaccggagaaagtaa

SEQ ID NO: 87608 - protein, 488 aa, Arabidopsis thaliana
  peptide (1)..(488): Ceres Seq. ID no. 12701979
MFILRVHSVDSERPISVEEEESGFTYASKRAQPPLKLIQPSLKLTDRKGLIHLYRKSSHSSLPNPSSRSTTLFIVAVPNYLSSLDFIRFCDSRISQVSDILFIRNDGMEDRYSVLITFSDQSEADGFYNNLNGKKFAPSEAEVCHILYVMSVEHTEFDEVAAEAPTGFTELPTCPICLERLDPDTSGIVSTLCDHSFQCSCTSKWTYLSCQVCRLCQQQDEILNCSICGKTENVWACLVCGFVGCGRYKEGHSIRHWKETHHCYSLDLRTQQIWDYVGDSYVHRLNHSKIDGKSVEMSTSCLSHQGDCGLCECSEDTGISGAIFNSKVDSIVIEYNDLLASQLKGQRQYYESLIVEARSKQESSIAEAVEQIVVNTMQELQNKIEKCEEEKSGITEVNTKLIKEQDTWRKKAKEIEEREAALLGSKDEMITDLQEQIRDITVFIEAKKTLKKMSSDTDGIREGTVLPVPISPEPVSSVRRQKKSNRRK

SEQ ID NO: 87609 - protein, 381 aa, Arabidopsis thaliana
  peptide (1)..(381): Ceres Seq. ID no. 12701980
MEDRYSVLITFSDQSEADGFYNNLNGKKFAPSEAEVCHILYVMSVEHTEFDEVAAEAPTGFTELPTCPICLERLDPDTSGIVSTLCDHSFQCSCTSKWTYLSCQVCRLCQQQDEILNCSICGKTENVWACLVCGFVGCGRYKEGHSIRHWKETHHCYSLDLRTQQIWDYVGDSYVHRLNHSKIDGKSVEMSTSCLSHQGDCGLCECSEDTGISGAIFNSKVDSIVIEYNDLLASQLKGQRQYYESLIVEARSKQESSIAEAVEQIVVNTMQELQNKIEKCEEEKSGITEVNTKLIKEQDTWRKKAKEIEEREAALLGSKDEMITDLQEQIRDITVFIEAKKTLKKMSSDTDGIREGTVLPVPISPEPVSSVRRQKKSNRRK

SEQ ID NO: 87610 - protein, 339 aa, Arabidopsis thaliana
  peptide (1)..(339): Ceres Seq. ID no. 12701981
MSVEHTEFDEVAAEAPTGFTELPTCPICLERLDPDTSGIVSTLCDHSFQCSCTSKWTYLSCQVCRLCQQQDEILNCSICGKTENVWACLVCGFVGCGRYKEGHSIRHWKETHHCYSLDLRTQQIWDYVGDSYVHRLNHSKIDGKSVEMSTSCLSHQGDCGLCECSEDTGISGAIFNSKVDSIVIEYNDLLASQLKGQRQYYESLIVEARSKQESSIAEAVEQIVVNTMQELQNKIEKCEEEKSGITEVNTKLIKEQDTWRKKAKEIEEREAALLGSKDEMITDLQEQIRDITVFIEAKKTLKKMSSDTDGIREGTVLPVPISPEPVSSVRRQKKSNRRK

SEQ ID NO: 87611 - DNA, 2042 bp, Arabidopsis thaliana
  misc_feature (1)..(2042): Ceres Seq. ID no. 12702041
  misc_feature (1)..(2042): Ortholog of  Ceres SEQ ID NO 13656177 as cited in SEQ ID NO 64997
atgagtgcatcatgggctgatgtagctgactcagagaacacgggttctgggtcttctaatcagaattctcatccttcacgacctgcttatgttcctccacatctaaggaacaggccagcagcttctgagcctgttgctccattgccagctaatgatcgtgtaggttatggtggtccaccttctggctctcgatgggctcctggtggtagtggtgttggtgttggaggtggtggtggttatagggctgatgcaggtcgtcctggctctggctctggctatggtggacgaggaggtggtggttggaacaacagaagcggagggtgggaccgtagggaacgtgaagtaaacccctttgaaaatgatgattccgaaccagaaccagcttttactgagcaggataatacggttattaattttgatgcctatgaagatattccgattgagaccagtggggataatgtgcctcctcctgttaacacattcgcagagatagatctcggggaggcattgaatctaaatatccgtagatgcaaatatgttaagccaacacctgttcagcgtcatgcgattccgatattgcttgaagggagggatttgatggcctgtgctcagacagggtcggggaagacagctgctttttgctttccaatcattagtggaataatgaaagatcagcatgtacagagaccccgtggttcacgaacagtctaccctcttgcagttattctctcaccaacaagagagttggcaagtcagatacatgatgaggctaaaaagttctcttaccaaactggtgtgaaggtggttgttgcatatggaggaacacctattaaccagcagctccgggaacttgagaggggagtcgatattcttgtggcaacgcctggtcgattaaatgatttgctcgagagagctagagtctcaatgcagatgattagatttttagctcttgatgaggccgatagaatgcttgacatgggttttgaaccacaaattagaaagattgtcgaacaaatggacatgcctccacgtggagttagacagacactgttgtttagtgctacatttccaagagaaattcagagactcgcagctgacttcctagcaaattatatatttttggctgtgggtagagtgggttcaagtaccgatttaattgtccaaagggttgagtttgtccttgactctgacaaaagaagtcatctcatggacctgcttcacgctcagagagagaatggcatccaaggcaagcaagccctgaccttagtttttgtggagacaaagagaggagctgactctttggaaaattggttgtgcatcaatgggtttccagcaacctccattcacggtgacagaacacagcaggaaagagaagtggcattgaaagccttcaagagtgggagaacaccgattttggttgcaactgatgtagcagcacgtggccttgacattccccacgtggctcatgtggtcaacttcgatctgccaaatgacattgatgactatgtccaccgtattggacgaacaggacgtgctggcaaatcaggactagcaactgccttcttcaacgatggcaacacctcactggccagaccgctcgctgagctgatgcaagaagctaaccaagaagtccctgagtggctcactcggtatgcgtcacggtcctcttttggtggtggtaagaaccggcggtctggtggtcgatttggtggccgtgactttagaagggaagggtctttcggtagcggtagaggaggctatggcggtggaggaggagggtatggcggcggaggaggctatggtggtggaggaggctatggcggcggaggaggctatggtggtggatatggtggtgcttcaagtggtggatatggtggagaacctccaagtgcttgggactaagcttccaatgttctttttgttttggttacaacttttgacaaaaaaaatatttcttctacattcacaaagagagtatgtattgccccttacacctatgagatttcactcaggagatggatatataacaattgttgatgttt

SEQ ID NO: 87612 - protein, 633 aa, Arabidopsis thaliana
  peptide (1)..(633): Ceres Seq. ID no. 12702042
MSASWADVADSENTGSGSSNQNSHPSRPAYVPPHLRNRPAASEPVAPLPANDRVGYGGPPSGSRWAPGGSGVGVGGGGGYRADAGRPGSGSGYGGRGGGGWNNRSGGWDRREREVNPFENDDSEPEPAFTEQDNTVINFDAYEDIPIETSGDNVPPPVNTFAEIDLGEALNLNIRRCKYVKPTPVQRHAIPILLEGRDLMACAQTGSGKTAAFCFPIISGIMKDQHVQRPRGSRTVYPLAVILSPTRELASQIHDEAKKFSYQTGVKVVVAYGGTPINQQLRELERGVDILVATPGRLNDLLERARVSMQMIRFLALDEADRMLDMGFEPQIRKIVEQMDMPPRGVRQTLLFSATFPREIQRLAADFLANYIFLAVGRVGSSTDLIVQRVEFVLDSDKRSHLMDLLHAQRENGIQGKQALTLVFVETKRGADSLENWLCINGFPATSIHGDRTQQEREVALKAFKSGRTPILVATDVAARGLDIPHVAHVVNFDLPNDIDDYVHRIGRTGRAGKSGLATAFFNDGNTSLARPLAELMQEANQEVPEWLTRYASRSSFGGGKNRRSGGRFGGRDFRREGSFGSGRGGYGGGGGGYGGGGGYGGGGGYGGGGGYGGGYGGASSGGYGGEPPSAWD

SEQ ID NO: 87613 - protein, 434 aa, Arabidopsis thaliana
  peptide (1)..(434): Ceres Seq. ID no. 12702043
MACAQTGSGKTAAFCFPIISGIMKDQHVQRPRGSRTVYPLAVILSPTRELASQIHDEAKKFSYQTGVKVVVAYGGTPINQQLRELERGVDILVATPGRLNDLLERARVSMQMIRFLALDEADRMLDMGFEPQIRKIVEQMDMPPRGVRQTLLFSATFPREIQRLAADFLANYIFLAVGRVGSSTDLIVQRVEFVLDSDKRSHLMDLLHAQRENGIQGKQALTLVFVETKRGADSLENWLCINGFPATSIHGDRTQQEREVALKAFKSGRTPILVATDVAARGLDIPHVAHVVNFDLPNDIDDYVHRIGRTGRAGKSGLATAFFNDGNTSLARPLAELMQEANQEVPEWLTRYASRSSFGGGKNRRSGGRFGGRDFRREGSFGSGRGGYGGGGGGYGGGGGYGGGGGYGGGGGYGGGYGGASSGGYGGEPPSAWD

SEQ ID NO: 87614 - protein, 412 aa, Arabidopsis thaliana
  peptide (1)..(412): Ceres Seq. ID no. 12702044
MKDQHVQRPRGSRTVYPLAVILSPTRELASQIHDEAKKFSYQTGVKVVVAYGGTPINQQLRELERGVDILVATPGRLNDLLERARVSMQMIRFLALDEADRMLDMGFEPQIRKIVEQMDMPPRGVRQTLLFSATFPREIQRLAADFLANYIFLAVGRVGSSTDLIVQRVEFVLDSDKRSHLMDLLHAQRENGIQGKQALTLVFVETKRGADSLENWLCINGFPATSIHGDRTQQEREVALKAFKSGRTPILVATDVAARGLDIPHVAHVVNFDLPNDIDDYVHRIGRTGRAGKSGLATAFFNDGNTSLARPLAELMQEANQEVPEWLTRYASRSSFGGGKNRRSGGRFGGRDFRREGSFGSGRGGYGGGGGGYGGGGGYGGGGGYGGGGGYGGGYGGASSGGYGGEPPSAWD

SEQ ID NO: 87615 - DNA, 1455 bp, Arabidopsis thaliana
  misc_feature (1)..(1455): Ceres Seq. ID no. 12702090
  misc_feature (1)..(1455): Ortholog of  Ceres SEQ ID NO 13596392 as cited in SEQ ID NO 62136
  misc_feature (1)..(1455): Ortholog of  Ceres SEQ ID NO 15226223 as cited in SEQ ID NO 65500
  misc_feature (1)..(1455): Ortholog of  Ceres SEQ ID NO 13596394 as cited in SEQ ID NO 68561
atggagaccaagaatgagaattctgatgtttcacgggcagaggagtttaaaagtcaggccaacgaagcttttaaaggtcacaaatactccagtgctattgatctatatacaaaagctattgaactcaacagcaacaacgctgtgtattgggcaaatcgtgcatttgctcacacaaaactggaggaatatggcagtgcaatacaggatgcatcgaaggccattgaagttgattcaagatactctaagggctattacaggcgtggtgctgcgtatcttgccatgggaaaatttaaggatgccttgaaggacttccaacaggtaaaaaggctttctcctaatgaccctgatgccacaagaaagctaaaggaatgtgagaaagcagtgatgaaactcaaatttgaagaagcaatctctgtgccagtatctgaaaggcgttcagtagctgagtccattgacttccatacaatagaggttgagccacaatattctggtgctagaattgagggagaggaagttaccttagattttgtgaaaacgatgatggaggattttaagaaccaaaaaacattgcataaacggtatgcctatcaaatcgtcttacagactaggcaaatcttgctagcactgccttctcttgttgatataagtgttccacatggcaaacatatcactgtttgcggtgacgttcatggtcagttctacgatcttctcaatatctttgagcttaatggcctcccttcggaggagaacccatacctatttaatggcgactttgtggacagaggctcattctccgttgagatcatcctcactttgtttgctttcaagtgcatgtgcccatcatccatatatctagccagaggaaaccatgaaagcaagagcatgaacaaaatttatggttttgagggtgaggttcggtccaagttgagtgaaaaattcgtggatctctttgctgaagttttctgttacctcccgttggctcatgttataaatgggaaggtcttcgtggtacatggaggtcttttcagtgttgacggcgtgaaactctcagacatcagagccattgacagattctgtgagccaccagaggaaggactaatgtgtgaactattgtggagtgatcctcaacctctccctggaagaggcccaagcaagcgaggagttggtctatcatttggtggagatgtgacaaagaggtttttgcaagataacaatttagatttgttggtccggtcacatgaagtaaaagatgaaggttatgaggttgaacatgacggtaaactcataactgtcttctctgcgccaaattactgtgatcagatgggtaataagggagccttcattcgttttgaagctcctgatatgaagccaaacattgttacattctcagcagtgcctcatccggatgtgaagcctatggcatatgcaaacaactttctcaggatgttcaactaa

SEQ ID NO: 87616 - protein, 484 aa, Arabidopsis thaliana; identical to SEQ ID NO: 76043
  peptide (1)..(484): Ceres Seq. ID no. 12702091

SEQ ID NO: 87617 - protein, 391 aa, Arabidopsis thaliana; identical to SEQ ID NO: 76044
  peptide (1)..(391): Ceres Seq. ID no. 12702092

SEQ ID NO: 87618 - protein, 356 aa, Arabidopsis thaliana; identical to SEQ ID NO: 76045
  peptide (1)..(356): Ceres Seq. ID no. 12702093

SEQ ID NO: 87619 - DNA, 471 bp, Arabidopsis thaliana
  misc_feature (1)..(471): Ceres Seq. ID no. 12702094
  misc_feature (1)..(471): Ortholog of  Ceres SEQ ID NO 12590595 as cited in SEQ ID NO 0
atgggtttcattattgcgattgcaaaacgttttgatgctctagttgggcctggagtcatgcttctctatcctctgtatgcatcatttcgagcaatagagagtccaacaatgttagatgatcaacaatggcttacatattggatcatttactctttaataacgatattcgagctatccgtttggagagtccttgcctggctaccattttggccatacttgaagcttttgttctgtatgtggttggtgctaccaatgttcagtggtgcagcttacatttactccaattttgttagacaatacgtcaaaattgggatgaatgttggaggaggaacgaattatacagacgaacaaagaagagttttacagatgatgagtcttgatgctagaaaatcggttcaagactacgttgaccggtttggatgggattctgttgagaaagcaatcaaagcggtatatgatttctcttgttga

SEQ ID NO: 87620 - protein, 156 aa, Arabidopsis thaliana
  peptide (1)..(156): Ceres Seq. ID no. 12702095
MGFIIAIAKRFDALVGPGVMLLYPLYASFRAIESPTMLDDQQWLTYWIIYSLITIFELSVWRVLAWLPFWPYLKLLFCMWLVLPMFSGAAYIYSNFVRQYVKIGMNVGGGTNYTDEQRRVLQMMSLDARKSVQDYVDRFGWDSVEKAIKAVYDFSC

SEQ ID NO: 87621 - protein, 137 aa, Arabidopsis thaliana
  peptide (1)..(137): Ceres Seq. ID no. 12702096
MLLYPLYASFRAIESPTMLDDQQWLTYWIIYSLITIFELSVWRVLAWLPFWPYLKLLFCMWLVLPMFSGAAYIYSNFVRQYVKIGMNVGGGTNYTDEQRRVLQMMSLDARKSVQDYVDRFGWDSVEKAIKAVYDFSC

SEQ ID NO: 87622 - protein, 120 aa, Arabidopsis thaliana
  peptide (1)..(120): Ceres Seq. ID no. 12702097
MLDDQQWLTYWIIYSLITIFELSVWRVLAWLPFWPYLKLLFCMWLVLPMFSGAAYIYSNFVRQYVKIGMNVGGGTNYTDEQRRVLQMMSLDARKSVQDYVDRFGWDSVEKAIKAVYDFSC

SEQ ID NO: 87623 - DNA, 768 bp, Arabidopsis thaliana
  misc_feature (1)..(768): Ceres Seq. ID no. 12702104
  misc_feature (1)..(768): Ortholog of  Ceres SEQ ID NO 13581804 as cited in SEQ ID NO 51424
  misc_feature (1)..(768): Ortholog of  Ceres SEQ ID NO 14310890 as cited in SEQ ID NO 54290
  misc_feature (1)..(768): Ortholog of  Ceres SEQ ID NO 13663874 as cited in SEQ ID NO 67003
atggagggtggtgcgagtaatgaagtagcagagagcagcaagaagatagggagagggaagatagagataaagaggatagagaacactacgaatcgtcaagtcactttctgcaaacgacgcaatggtttactcaagaaagcttatgagctctctgtcttgtgtgacgctgaggttgctcttgtcatcttctccactcgaggccgtctctacgagtacgccaacaacagtgtgagaggaacaatagaaaggtacaagaaagcttgctccgacgccgttaaccctccgaccatcaccgaagctaatactcagtactatcagcaagaggcgtctaaactccggagacagattcgggacattcagaatttgaacagacacattcttggtgaatctcttggttccttgaactttaaggaactcaagaaccttgaaagtaggcttgagaaaggaatcagtcgtgtccgatccaagaagcacgagatgttagttgcagagattgaatacatgcaaaaaagggaaatcgagctgcaaaacgataacatgtatctccgctccaagattactgaaagaacaggtctacagcaacaagaatcgagtgtgatacatcaagggacagtttacgagtcgggtgttacttcttctcaccagtcggggcagtataaccggaattatattgcggttaaccttcttgaaccgaatcagaattcctccaaccaagaccaaccacctctggacctaataatttacatatatcttgattatgtaagttaa

SEQ ID NO: 87624 - protein, 255 aa, Arabidopsis thaliana
  peptide (1)..(255): Ceres Seq. ID no. 12702105
MEGGASNEVAESSKKIGRGKIEIKRIENTTNRQVTFCKRRNGLLKKAYELSVLCDAEVALVIFSTRGRLYEYANNSVRGTIERYKKACSDAVNPPTITEANTQYYQQEASKLRRQIRDIQNLNRHILGESLGSLNFKELKNLESRLEKGISRVRSKKHEMLVAEIEYMQKREIELQNDNMYLRSKITERTGLQQQESSVIHQGTVYESGVTSSHQSGQYNRNYIAVNLLEPNQNSSNQDQPPLDLIIYIYLDYVS

SEQ ID NO: 87625 - DNA, 1404 bp, Arabidopsis thaliana
  misc_feature (1)..(1404): Ceres Seq. ID no. 12702139
  misc_feature (1)..(1404): Ortholog of  Ceres SEQ ID NO 13654583 as cited in SEQ ID NO 68599
atggcggcacttagcttttgcagctcttctcctcctcgaattcttcataaacaatccaaatcgagttttttcccttcttctgcctcttcttctttcacacaaaccgtcggagaattatttgcgaaccccttctctgtctcaagacgatttcgtggcgccgttaactccaccgtagtttccgatgaatcgggaaacgcgaaacttccatcttctccggcgaagaagctaaggaatattatgcaatcccctggtgttcttcagggtccatgttgcttcgatgctcttagtgccaaactcatcgaacgagctgggtttccttactgtatcacctctgggttctcgatttcagcgtctcggcttggtttaccggataagggtctaatttcttatggagaaatggttgatcaaggtcaacaaattactcaatctgtatcaattccggtgattggagacggtggcaatggatacggtaatgccatgaatgttaagagaaccgtcaaaggatatattaaagctggctttgcaggaattatcatcaatgatgaagtttgttgtgaaaatactaagagtgagagaagagtggtttctagagaggaagcagtgatgcgtgttaaagctgcggttgatgcacgtagagagtgtgattcggacattgtaattgtagctcaaactgattcccgtgaagcgatatctctggaggaatcactcattagggcaagagcttttacagatgctggagctgatgttctctccgttgattctcttgtttctagagaagagatgaaagcattctgcaatgtctatccactagttcctaaattggctaatatgcttgaaagcggaggaaaaattccaattctaaacccgctggagctagaagagattggatataagctagtggcgtatccaatttcattgattggagtatctattcaagcaatgcaggacgctctattggcaatcaagggtgggcgaattcctccaccaggaagcatggcgtctttagaagaaattggagagattcttggttttgacacttacgaggaagaagagaagcggtacgctacctcgtcatcagatagagaagtgagcagcagtagcgtctatcgtaatcaacgggtggctaaagatgatccagaacagagagaggacctgattgttgaagtcataacacctgaggtttataatgaaccaagaaaccccttttcgcggatctggtcacgatctttgaggatcaaaatcatcggacgcgatgggtttgagaaactcgatgtcagaattccggtaagtccactttcgagggccatttttcgtgttttatctgagctgatgcaaaacttgtcttatggttggaacaggccggattcttggaaggtgtcacaaacattgttccagttttcttag

SEQ ID NO: 87626 - protein, 467 aa, Arabidopsis thaliana
  peptide (1)..(467): Ceres Seq. ID no. 12702140
MAALSFCSSSPPRILHKQSKSSFFPSSASSSFTQTVGELFANPFSVSRRFRGAVNSTVVSDESGNAKLPSSPAKKLRNIMQSPGVLQGPCCFDALSAKLIERAGFPYCITSGFSISASRLGLPDKGLISYGEMVDQGQQITQSVSIPVIGDGGNGYGNAMNVKRTVKGYIKAGFAGIIINDEVCCENTKSERRVVSREEAVMRVKAAVDARRECDSDIVIVAQTDSREAISLEESLIRARAFTDAGADVLSVDSLVSREEMKAFCNVYPLVPKLANMLESGGKIPILNPLELEEIGYKLVAYPISLIGVSIQAMQDALLAIKGGRIPPPGSMASLEEIGEILGFDTYEEEEKRYATSSSDREVSSSSVYRNQRVAKDDPEQREDLIVEVITPEVYNEPRNPFSRIWSRSLRIKIIGRDGFEKLDVRIPVSPLSRAIFRVLSELMQNLSYGWNRPDSWKVSQTLFQFS

SEQ ID NO: 87627 - protein, 388 aa, Arabidopsis thaliana
  peptide (1)..(388): Ceres Seq. ID no. 12702141
MQSPGVLQGPCCFDALSAKLIERAGFPYCITSGFSISASRLGLPDKGLISYGEMVDQGQQITQSVSIPVIGDGGNGYGNAMNVKRTVKGYIKAGFAGIIINDEVCCENTKSERRVVSREEAVMRVKAAVDARRECDSDIVIVAQTDSREAISLEESLIRARAFTDAGADVLSVDSLVSREEMKAFCNVYPLVPKLANMLESGGKIPILNPLELEEIGYKLVAYPISLIGVSIQAMQDALLAIKGGRIPPPGSMASLEEIGEILGFDTYEEEEKRYATSSSDREVSSSSVYRNQRVAKDDPEQREDLIVEVITPEVYNEPRNPFSRIWSRSLRIKIIGRDGFEKLDVRIPVSPLSRAIFRVLSELMQNLSYGWNRPDSWKVSQTLFQFS

SEQ ID NO: 87628 - protein, 335 aa, Arabidopsis thaliana
  peptide (1)..(335): Ceres Seq. ID no. 12702142
MVDQGQQITQSVSIPVIGDGGNGYGNAMNVKRTVKGYIKAGFAGIIINDEVCCENTKSERRVVSREEAVMRVKAAVDARRECDSDIVIVAQTDSREAISLEESLIRARAFTDAGADVLSVDSLVSREEMKAFCNVYPLVPKLANMLESGGKIPILNPLELEEIGYKLVAYPISLIGVSIQAMQDALLAIKGGRIPPPGSMASLEEIGEILGFDTYEEEEKRYATSSSDREVSSSSVYRNQRVAKDDPEQREDLIVEVITPEVYNEPRNPFSRIWSRSLRIKIIGRDGFEKLDVRIPVSPLSRAIFRVLSELMQNLSYGWNRPDSWKVSQTLFQFS

SEQ ID NO: 87629 - DNA, 822 bp, Arabidopsis thaliana
  misc_feature (1)..(822): Ceres Seq. ID no. 12702189
  misc_feature (1)..(822): Ortholog of  Ceres SEQ ID NO 14312277 as cited in SEQ ID NO 58836
atgtcggaatctgtactcacggcgatgtatagttggttcactccgacagttctcttcgtcttcctcaaccttatgattggtaccatcgccattagctcatctttctcttccaaatccaacgacccaaatcaaactcagatccaacgctctccttccatgattcatcgtctcaaatccataaacttctcttctttcacttctccagacaagtctcatctcgagtttcctccttcaacacctgaagacaacagcaacaacaactttcaccaaccagcttcaatcgaacagaatcaaccattcttgtctagatctccttctgttcttcacagaatcaaatctttcaatctttataactacatttctcaagaacccaccaatataatcgaagcttcaccaccgtcggtgaccgtagagacaaaacaagaacaagtacaagaacaagaagtaaaagaagaacaagaagaagaagaacagagtcttgaagaggtttatagtaaacttaatctaaaccatgtcgctaggacaaaatctgacactgaaccagctgctggaattagacctccgaagcttccaaagaagatgaaaaaatctgctagtaccaaatctccgttctctcactttcaagaagatgaaatctccgtggaggctcgccgtcctgcgacggtgaaagtgccgagagttacgacggtggaagaagctgatgaagaagtagatgcaaaagctgatgactttatcaatcgattcaagcatcagttgaagttacagagaattgattccatcactaagtataaggagatggtgaagaaaagaaacgacaagtga

SEQ ID NO: 87630 - protein, 273 aa, Arabidopsis thaliana; identical to SEQ ID NO: 38582
  peptide (1)..(273): Ceres Seq. ID no. 12702190

SEQ ID NO: 87631 - protein, 265 aa, Arabidopsis thaliana
  peptide (1)..(265): Ceres Seq. ID no. 12702191
MYSWFTPTVLFVFLNLMIGTIAISSSFSSKSNDPNQTQIQRSPSMIHRLKSINFSSFTSPDKSHLEFPPSTPEDNSNNNFHQPASIEQNQPFLSRSPSVLHRIKSFNLYNYISQEPTNIIEASPPSVTVETKQEQVQEQEVKEEQEEEEQSLEEVYSKLNLNHVARTKSDTEPAAGIRPPKLPKKMKKSASTKSPFSHFQEDEISVEARRPATVKVPRVTTVEEADEEVDAKADDFINRFKHQLKLQRIDSITKYKEMVKKRNDK

SEQ ID NO: 87632 - protein, 249 aa, Arabidopsis thaliana
  peptide (1)..(249): Ceres Seq. ID no. 12702192
MIGTIAISSSFSSKSNDPNQTQIQRSPSMIHRLKSINFSSFTSPDKSHLEFPPSTPEDNSNNNFHQPASIEQNQPFLSRSPSVLHRIKSFNLYNYISQEPTNIIEASPPSVTVETKQEQVQEQEVKEEQEEEEQSLEEVYSKLNLNHVARTKSDTEPAAGIRPPKLPKKMKKSASTKSPFSHFQEDEISVEARRPATVKVPRVTTVEEADEEVDAKADDFINRFKHQLKLQRIDSITKYKEMVKKRNDK

SEQ ID NO: 87633 - DNA, 504 bp, Arabidopsis thaliana
  misc_feature (1)..(504): Ceres Seq. ID no. 12702209
  misc_feature (1)..(504): Ortholog of  Ceres SEQ ID NO 12611994 as cited in SEQ ID NO 54063
atgggacttggaggtagtgaaacaatggaatgcaagtgtggtatgcctctgtgtatctgtgtagctcctcccaaatcaactgataaaccaaacccacctgctaccattgctcctgtggttcttcctcagttgaagtcagaggcttcagcaaaaagtaaaggttccacttccagcagcaatgctagatcagctctaaatgctggactagacaccccccaaagagactatgaagccagtggggagggattaagagaagcgattaagaatggtgacagtgctggtgcgaaaaagcttctaaaagagggcgtagatgcaaattaccgagacaggcaaggaatgtcggtgcttcatctggctgtcctgttcaaccaaactgatattgcgttgatgttgatggatcatggagcaagccttgagtacaagaatgcacaaggagaaacaccgctagattgtgccccggcaacactgcaatacaagatgcgggaaaagatgaagtccacttaa

SEQ ID NO: 87634 - protein, 167 aa, Arabidopsis thaliana; identical to SEQ ID NO: 38793
  peptide (1)..(167): Ceres Seq. ID no. 12702210

SEQ ID NO: 87635 - protein, 159 aa, Arabidopsis thaliana; identical to SEQ ID NO: 38794
  peptide (1)..(159): Ceres Seq. ID no. 12702211

SEQ ID NO: 87636 - protein, 153 aa, Arabidopsis thaliana
  peptide (1)..(153): Ceres Seq. ID no. 12702212
MPLCICVAPPKSTDKPNPPATIAPVVLPQLKSEASAKSKGSTSSSNARSALNAGLDTPQRDYEASGEGLREAIKNGDSAGAKKLLKEGVDANYRDRQGMSVLHLAVLFNQTDIALMLMDHGASLEYKNAQGETPLDCAPATLQYKMREKMKST

SEQ ID NO: 87637 - DNA, 498 bp, Arabidopsis thaliana
  misc_feature (1)..(498): Ceres Seq. ID no. 12702260
  misc_feature (1)..(498): Ortholog of  Ceres SEQ ID NO 15179952 as cited in SEQ ID NO 1063
atgacgcatgttgaagatgataaggaattcaaggagaaacctttggttcaggttctgagcgacgacgacagtgaagtgaaggaagccaaagacggaggaggtgaagaagttaccggcggcgacggtgaaggagaggctaatgtagaagaggaagacgacgaagcagaaaatgaagacgatgatgatgatgatgatgatgatgatgacgacgacgaggacgaggacgatgaagaaggggaggaggatcttgggacagagtacctagtgaggccggttggtgaggttgaagatgaggatgatgcaagtgattttgaccctgaggagaatggcttggatgaagaagaaggtgatgaagagattgaagaagatgatgttgatgaggacatcagcttgagtgctggcaaatctgagcctctgtccaagaggaagagggttgctaaggaccacagtgagcaaggagatgtcactggtgataacattaggccttctaaacggtag

SEQ ID NO: 87638 - protein, 165 aa, Arabidopsis thaliana
  peptide (1)..(165): Ceres Seq. ID no. 12702261
MTHVEDDKEFKEKPLVQVLSDDDSEVKEAKDGGGEEVTGGDGEGEANVEEEDDEAENEDDDDDDDDDDDDDEDEDDEEGEEDLGTEYLVRPVGEVEDEDDASDFDPEENGLDEEEGDEEIEEDDVDEDISLSAGKSEPLSKRKRVAKDHSEQGDVTGDNIRPSKR

SEQ ID NO: 87639 - DNA, 1564 bp, Arabidopsis thaliana
  misc_feature (1)..(1564): Ceres Seq. ID no. 12702280
  misc_feature (1)..(1564): Ortholog of  Ceres SEQ ID NO 12609146 as cited in SEQ ID NO 52118
  misc_feature (1)..(1564): Ortholog of  Ceres SEQ ID NO 13638136 as cited in SEQ ID NO 58644
  misc_feature (1)..(1564): Ortholog of  Ceres SEQ ID NO 15225826 as cited in SEQ ID NO 64774
  misc_feature (1)..(1564): Ortholog of  Ceres SEQ ID NO 13599119 as cited in SEQ ID NO 0
atgcgtacaagcaaagcttcagtgacccaaacatggctgctttacacacagctttgtctttggaaagatctcataatccgctatgtccgtcagatcataagaagagcaaaatcgatgcttttcagtcaaaacatggtcgctgattccgccgagatcagtgttatcgatgtcaagtctcatctctccgttgcgaaagatcctagtaactttcagattgccgaaattcgaattcatgattcaatttgtattgatattccgagctctgaagaaacgcctcttttagaatcgatcaagagttgttctgcaactactattgaagagcatgttactgagtttgtaccaaatataagctcagggagttatgcagataagggtgactaccgggagtacatggaagatgaacacatatgcatagacgacctttcagatcatcttgggtcttccttttacagatttccggtgcctatggctttctacggtgtgtttgatggccatggtggatctgacgcatcacagtatataaaagagaatgctatgagcttgttctttgaagatgctgtttttcgacaatcgccctctgttgtggactctcttttcttgaaagaactggagacatctcaccgggaagcttataggcttgctgatcttgcaatggaggacgaaagaatagttagtagttcgtgcggaacaaccgcattgactgctcttgtaatcggaagacatttaatggtcgctaatgttggtgattgtcgtgcggtgctctgcagaaaaggaaaagctgttgatatgtcatttgatcacaaatctacatttgagccagaacggagacgagtagaggatttaggagggtactttgaaggcgagtatctctatggtgaccttgctgttacaagagctcttggagactggtcaataaagaggttttcaccccttggtgaatctttgtcacctctgatctcagacccggacattcaacagatgattctaactgaggaagacgagttcttgattatgggatgtgacggtgtttgggacgtgatgacaagccagtatgctgttactttcgtcaggcaaggacttaggagacacggtgatcctagaaggtgcgctatggaacttggaagggaagcgttaaggctagactcatcagataacgttacagtggtggtcatctgcttctcatcatccccagctcctcagagaagaaggatacggttctgtgtttccgatgaagctcgagcccggttacagacaatgctagaaggctaactgatgaaggttttttagcggtcttgaggagggcacaatgtatatattatagcaacaaagatggggttttgagataacaaccctcccaaggccaaattatttgatgacattattacatctctctgatattggatgaaataaaaggaaggcaaaaagagaagatgaaggacttcttctttatgttgttaaaatgttcataagtgttatagccattttttatctatttattctgtaggattattgagcacttatgtacaaaaactgattaagattaaggaattcaggtgattaagtt

SEQ ID NO: 87640 - protein, 422 aa, Arabidopsis thaliana
  peptide (1)..(422): Ceres Seq. ID no. 12702281
MRTSKASVTQTWLLYTQLCLWKDLIIRYVRQIIRRAKSMLFSQNMVADSAEISVIDVKSHLSVAKDPSNFQIAEIRIHDSICIDIPSSEETPLLESIKSCSATTIEEHVTEFVPNISSGSYADKGDYREYMEDEHICIDDLSDHLGSSFYRFPVPMAFYGVFDGHGGSDASQYIKENAMSLFFEDAVFRQSPSVVDSLFLKELETSHREAYRLADLAMEDERIVSSSCGTTALTALVIGRHLMVANVGDCRAVLCRKGKAVDMSFDHKSTFEPERRRVEDLGGYFEGEYLYGDLAVTRALGDWSIKRFSPLGESLSPLISDPDIQQMILTEEDEFLIMGCDGVWDVMTSQYAVTFVRQGLRRHGDPRRCAMELGREALRLDSSDNVTVVVICFSSSPAPQRRRIRFCVSDEARARLQTMLEG

SEQ ID NO: 87641 - protein, 384 aa, Arabidopsis thaliana; identical to SEQ ID NO: 41845
  peptide (1)..(384): Ceres Seq. ID no. 12702282

SEQ ID NO: 87642 - protein, 378 aa, Arabidopsis thaliana; identical to SEQ ID NO: 41846
  peptide (1)..(378): Ceres Seq. ID no. 12702283

SEQ ID NO: 87643 - DNA, 741 bp, Arabidopsis thaliana
  misc_feature (1)..(741): Ceres Seq. ID no. 12702335
  misc_feature (1)..(741): Ortholog of  Ceres SEQ ID NO 13596398 as cited in SEQ ID NO 68611
atgaacaggaaggcctctgtttccaaggagctcaacgccaagcattcaaagatattggaagcacttttgaagcatccagacaatcgagaatgtgcagattgtagatcaaaggcaccaagatgggcaagtgtgaaccttgggatattcatttgtatgcaatgttctggaatccatcgtagccttggcgtccacatctctcaggtaaggtctataactctggatacatggcttccagatcaggttgctttcatgaaatctaccggtaatgctaagggaaatgagtattgggaatcagaattgcctcaacatttcgagagaagttcaagcgacacgtttataagagccaaatacagtgagaagagatgggtttcaccgggagcgattcaaccggctcctatagttagccagctaagctgcaaagttagtcacttggtagagagtggatataaacctgaaactccaaagaaagctagaactctttcacttgacgaagagatccttcttcatcatgttcttcaagtaacacctccagaaacgagaactcgtgcgggttcggtagatatgaaggagaatgtatatgttgtacctctaccagaattcaagaaaccaaatcaaaagaatgagaatttctccagtgaagtaaaccagaatagaagaaccaccatagcaccaccgtcgagctgggctactttcgactgtaaggccatgattcaggcttttcttttttttatcttctgttag

SEQ ID NO: 87644 - protein, 246 aa, Arabidopsis thaliana
  peptide (1)..(246): Ceres Seq. ID no. 12702336
MNRKASVSKELNAKHSKILEALLKHPDNRECADCRSKAPRWASVNLGIFICMQCSGIHRSLGVHISQVRSITLDTWLPDQVAFMKSTGNAKGNEYWESELPQHFERSSSDTFIRAKYSEKRWVSPGAIQPAPIVSQLSCKVSHLVESGYKPETPKKARTLSLDEEILLHHVLQVTPPETRTRAGSVDMKENVYVVPLPEFKKPNQKNENFSSEVNQNRRTTIAPPSSWATFDCKAMIQAFLFFIFC

SEQ ID NO: 87645 - protein, 195 aa, Arabidopsis thaliana
  peptide (1)..(195): Ceres Seq. ID no. 12702337
MQCSGIHRSLGVHISQVRSITLDTWLPDQVAFMKSTGNAKGNEYWESELPQHFERSSSDTFIRAKYSEKRWVSPGAIQPAPIVSQLSCKVSHLVESGYKPETPKKARTLSLDEEILLHHVLQVTPPETRTRAGSVDMKENVYVVPLPEFKKPNQKNENFSSEVNQNRRTTIAPPSSWATFDCKAMIQAFLFFIFC

SEQ ID NO: 87646 - protein, 163 aa, Arabidopsis thaliana
  peptide (1)..(163): Ceres Seq. ID no. 12702338
MKSTGNAKGNEYWESELPQHFERSSSDTFIRAKYSEKRWVSPGAIQPAPIVSQLSCKVSHLVESGYKPETPKKARTLSLDEEILLHHVLQVTPPETRTRAGSVDMKENVYVVPLPEFKKPNQKNENFSSEVNQNRRTTIAPPSSWATFDCKAMIQAFLFFIFC

SEQ ID NO: 87647 - DNA, 1122 bp, Arabidopsis thaliana
  misc_feature (1)..(1122): Ceres Seq. ID no. 12702339
  misc_feature (1)..(1122): Ortholog of  Ceres SEQ ID NO 14309116 as cited in SEQ ID NO 0
atggcggtgaacgcgtgtctatctccgccggagatgatggctgtccggccaggggaaggcgttccgaattcaaaatctacgcagggaaaaactaggctctatctcaccaaaccttcatggatagtcagaactcagtctggagctaagacgtgtatgaagtcgaaggcgaaaggacgatgcgtaatctgccatggaagtggaagagtcgattgtttcaattgttgtgggaaagggaggactaattgtgtggatgtggaaatgcttccaagaggagaatggcctaaatggtgcaagagttgtggagggagtggattaagtgactgttctcgctgtcttggcaccggagagtacagatacatcatggtcaggcgcgcatctttcttcttcttgtggttcgatattcttatcgttatgtcttccgtcgctttgccggcgatgagctgccggagctcaggtgaacaagtgaaggagattcgcgtttgtacgaatcgcacctgccgaagacaaggctccttccagattctcgagactttaacagctctcgcacctcccgaactccgagtcactcactgcgcttgcctcggccgatgcggctccggtccaaacctcgtggctctccctcaaggtctcatcctacgtcactgcgccacgccttctcgagctgctgaaattttgttcagcctatgtggtgacggtcgtgaagcttcttcatcctccgccgtcacagacgctctcacggctttagcgttaaccaacaatgctctctctcaaatcgatgcgggaaatttctctgaagccgaagcacttctcactcaggctttagagctgaaaccctacggtggcttgcatagaatattcaaacacagatcagtagcaaaattgggaatgcttgattactctggggctcttgaagatataagccaagctctagctttagctcctaactattctgagccctacatatgccaaggggatgtctacgtagcaaaaggtcaatatgatcttgcagagaagtcatacttgacatgtctagagatagatccttctcttcgcagatcgaaaccattcaaggcccggattgcgaaacttcaacagaaagttgttgaactagatgtaacatag

SEQ ID NO: 87648 - protein, 373 aa, Arabidopsis thaliana
  peptide (1)..(373): Ceres Seq. ID no. 12702340
MAVNACLSPPEMMAVRPGEGVPNSKSTQGKTRLYLTKPSWIVRTQSGAKTCMKSKAKGRCVICHGSGRVDCFNCCGKGRTNCVDVEMLPRGEWPKWCKSCGGSGLSDCSRCLGTGEYRYIMVRRASFFFLWFDILIVMSSVALPAMSCRSSGEQVKEIRVCTNRTCRRQGSFQILETLTALAPPELRVTHCACLGRCGSGPNLVALPQGLILRHCATPSRAAEILFSLCGDGREASSSSAVTDALTALALTNNALSQIDAGNFSEAEALLTQALELKPYGGLHRIFKHRSVAKLGMLDYSGALEDISQALALAPNYSEPYICQGDVYVAKGQYDLAEKSYLTCLEIDPSLRRSKPFKARIAKLQQKVVELDVT

SEQ ID NO: 87649 - protein, 362 aa, Arabidopsis thaliana
  peptide (1)..(362): Ceres Seq. ID no. 12702341
MMAVRPGEGVPNSKSTQGKTRLYLTKPSWIVRTQSGAKTCMKSKAKGRCVICHGSGRVDCFNCCGKGRTNCVDVEMLPRGEWPKWCKSCGGSGLSDCSRCLGTGEYRYIMVRRASFFFLWFDILIVMSSVALPAMSCRSSGEQVKEIRVCTNRTCRRQGSFQILETLTALAPPELRVTHCACLGRCGSGPNLVALPQGLILRHCATPSRAAEILFSLCGDGREASSSSAVTDALTALALTNNALSQIDAGNFSEAEALLTQALELKPYGGLHRIFKHRSVAKLGMLDYSGALEDISQALALAPNYSEPYICQGDVYVAKGQYDLAEKSYLTCLEIDPSLRRSKPFKARIAKLQQKVVELDVT

SEQ ID NO: 87650 - protein, 361 aa, Arabidopsis thaliana
  peptide (1)..(361): Ceres Seq. ID no. 12702342
MAVRPGEGVPNSKSTQGKTRLYLTKPSWIVRTQSGAKTCMKSKAKGRCVICHGSGRVDCFNCCGKGRTNCVDVEMLPRGEWPKWCKSCGGSGLSDCSRCLGTGEYRYIMVRRASFFFLWFDILIVMSSVALPAMSCRSSGEQVKEIRVCTNRTCRRQGSFQILETLTALAPPELRVTHCACLGRCGSGPNLVALPQGLILRHCATPSRAAEILFSLCGDGREASSSSAVTDALTALALTNNALSQIDAGNFSEAEALLTQALELKPYGGLHRIFKHRSVAKLGMLDYSGALEDISQALALAPNYSEPYICQGDVYVAKGQYDLAEKSYLTCLEIDPSLRRSKPFKARIAKLQQKVVELDVT

SEQ ID NO: 87651 - DNA, 1455 bp, Arabidopsis thaliana
  misc_feature (1)..(1455): Ceres Seq. ID no. 12702369
  misc_feature (1)..(1455): Ortholog of  Ceres SEQ ID NO 13639663 as cited in SEQ ID NO 57850
atggctgcaatggctcgctgtgctttgattccatctataaacccagctcatagcttccgtcatcagtttccgcaacccaatgcgtcattctatttacctcccactcttccgattttttcgcgtgttcggagatttggaatttccggcggatatcgccgccgtgtgatcaccatggccgccggaactgatcactactcgactttgaatgtgaaccgcaatgccaccttgcaggagatcaagagctcgtatagaaaactcgctcgcaagtatcacccagatatgaacaagaaccctggtgcagaagataagttcaaacagataagtgctgcttacgaggtattatctgatgaggagaagagatctgcctatgatcggttcggcgaggctggtttagaaggtgattttaatggatcacaggatacttcaccaggggtggatccatttgacttgtacagtgcattctttggaggttctgatggattctttgggggaatgggtgaatcaggagggatgggttttgatttcatgaataagagaagcctagaccttgacattcgatatgacctgcggttgagctttgaagaggcagtttttggagtaaaacgggagattgaggtttcttatttagaaacatgtgatggttgtggaggaactggtgctaaatccagtaactccattaaacagtgtagtagttgtgatggtaaaggacgtgtgatgaattctcagagaacaccctttggaatcatgtctcaggtgtccacttgctccaaatgtggtggtgaaggaaaaactatcactgataagtgtcgaaagtgcattggcaacgggagactacgggctaggaaaaagatggatgttgtagtccctcctggtgtcagcgatagagccacaatgcgaattcaaggagaaggtaacatggacaagagaagtggaagagctggtgacttgttcatcgtacttcaagttgatgagaagcgtggaattcggcgggaagggcttaatttatactccaatatcaacatagatttcacagatgctatacttggggcgaccacaaaggtggcacatgacatctttctttgtcaggtagaaacggttgagggatcaatggatcttcggattccgccaggaactcaacctggcgacaccgtaaaattacctaggaaaggagttccagacacggatagaccttcaatccggggagaccattgctttgtagtgaaaatttcgatccccaaaaaactgagcgagagggagcgcaagttggtagaggaattctcgtcgctcagaagatctagtagtagtactggacctactgaaactcgtcaagaggagcagagttttggctcagagcccagaaaagaaccatctttgtggcataaaatgaagaatttcataagtcttggctctgtgcgttataacctcggctgttgcattggtacagaagaagggtaa

SEQ ID NO: 87652 - protein, 484 aa, Arabidopsis thaliana
  peptide (1)..(484): Ceres Seq. ID no. 12702370
MAAMARCALIPSINPAHSFRHQFPQPNASFYLPPTLPIFSRVRRFGISGGYRRRVITMAAGTDHYSTLNVNRNATLQEIKSSYRKLARKYHPDMNKNPGAEDKFKQISAAYEVLSDEEKRSAYDRFGEAGLEGDFNGSQDTSPGVDPFDLYSAFFGGSDGFFGGMGESGGMGFDFMNKRSLDLDIRYDLRLSFEEAVFGVKREIEVSYLETCDGCGGTGAKSSNSIKQCSSCDGKGRVMNSQRTPFGIMSQVSTCSKCGGEGKTITDKCRKCIGNGRLRARKKMDVVVPPGVSDRATMRIQGEGNMDKRSGRAGDLFIVLQVDEKRGIRREGLNLYSNINIDFTDAILGATTKVAHDIFLCQVETVEGSMDLRIPPGTQPGDTVKLPRKGVPDTDRPSIRGDHCFVVKISIPKKLSERERKLVEEFSSLRRSSSSTGPTETRQEEQSFGSEPRKEPSLWHKMKNFISLGSVRYNLGCCIGTEEG

SEQ ID NO: 87653 - protein, 481 aa, Arabidopsis thaliana
  peptide (1)..(481): Ceres Seq. ID no. 12702371
MARCALIPSINPAHSFRHQFPQPNASFYLPPTLPIFSRVRRFGISGGYRRRVITMAAGTDHYSTLNVNRNATLQEIKSSYRKLARKYHPDMNKNPGAEDKFKQISAAYEVLSDEEKRSAYDRFGEAGLEGDFNGSQDTSPGVDPFDLYSAFFGGSDGFFGGMGESGGMGFDFMNKRSLDLDIRYDLRLSFEEAVFGVKREIEVSYLETCDGCGGTGAKSSNSIKQCSSCDGKGRVMNSQRTPFGIMSQVSTCSKCGGEGKTITDKCRKCIGNGRLRARKKMDVVVPPGVSDRATMRIQGEGNMDKRSGRAGDLFIVLQVDEKRGIRREGLNLYSNINIDFTDAILGATTKVAHDIFLCQVETVEGSMDLRIPPGTQPGDTVKLPRKGVPDTDRPSIRGDHCFVVKISIPKKLSERERKLVEEFSSLRRSSSSTGPTETRQEEQSFGSEPRKEPSLWHKMKNFISLGSVRYNLGCCIGTEEG

SEQ ID NO: 87654 - protein, 427 aa, Arabidopsis thaliana
  peptide (1)..(427): Ceres Seq. ID no. 12702372
MAAGTDHYSTLNVNRNATLQEIKSSYRKLARKYHPDMNKNPGAEDKFKQISAAYEVLSDEEKRSAYDRFGEAGLEGDFNGSQDTSPGVDPFDLYSAFFGGSDGFFGGMGESGGMGFDFMNKRSLDLDIRYDLRLSFEEAVFGVKREIEVSYLETCDGCGGTGAKSSNSIKQCSSCDGKGRVMNSQRTPFGIMSQVSTCSKCGGEGKTITDKCRKCIGNGRLRARKKMDVVVPPGVSDRATMRIQGEGNMDKRSGRAGDLFIVLQVDEKRGIRREGLNLYSNINIDFTDAILGATTKVAHDIFLCQVETVEGSMDLRIPPGTQPGDTVKLPRKGVPDTDRPSIRGDHCFVVKISIPKKLSERERKLVEEFSSLRRSSSSTGPTETRQEEQSFGSEPRKEPSLWHKMKNFISLGSVRYNLGCCIGTEEG

SEQ ID NO: 87655 - DNA, 2085 bp, Arabidopsis thaliana
  misc_feature (1)..(2085): Ceres Seq. ID no. 12702385
  misc_feature (1)..(2085): Ortholog of  Ceres SEQ ID NO 13646955 as cited in SEQ ID NO 20654
atgtctaacagaagcctccatttgaagaaaatatcatggctttcttctcggattctctcaggtttccgaattttgatcgtcttcttcgattctagctttctgggttcccactgtttaagcgttcttaacgatcttttttggttgtcgttttgctcactagacaatgttcacggtcgatttcgccgatcaatcactactccagccacttgtttagctccttcactcgatggagacatgaacattggatccaagacattggtcgaacaacgtttctctcgcggatttgcatcagtacgacgagtatctcgagcttcttcttcttcttcttcttctccttcctctccacatgttgatttgctctcttttattaaagcttcacttgataaacttgaaggtccttcccatcattggttgaatcgagactttgggaataaacagcttttcaaggacaaaggaacttatgtagttctagctggacatttgctagacggaacaagtgatctgagtggtttctttgagaaactaaagttgcttcagcagaggtctccgggtgtctgtttcatgggcatccacttcagtgatcaagctcgaatcgctgatgatcgaactgctctagctgagttgattttgaaggaatacctcacttttcctgtgctactttccgaaaaagaatttcccaagacaagtggggaagtacgttacatcgtgtttaaagattttaagaatcctctaatctacgaagagaaggatcttgatattgcttctgtagttaaagctcttgacagcctcctcactcaagatactgagaaatccaagtctgtcagacttttcacgaacacttggtcaaaacaagcagaggctatcaaggaatcacatttcccttctttctttcaggatttgttactttactttccaggttgtatctctgcagacgaagttggagaccgtctgtttctttctgataccaaccatcatcgtattattattttcgaaaacagtgggaagattgtagacagtattggttgtttcccaggttttgaggatggagattttgaatctgcaaagatgttacgtcctacagggaccctttacgacgaagcggaggattgtctttacattgtagattctgagaatcacgccattagaagagcaaatataaatagccgggtcctggaaacagtatatccaaaggttattaagaaaactggtggcttatggtcttggataatggagaaaatgggtcttggaaaagatgacgatacaacagttgatgctgataccaaatcagaagaatttgatgcacgctctcttttgtttccatggcatatactgaagcgtgacgatgagagtcttttagtcattaacaaaaggagagatcgaagaagttgtggaagatatagagctaatggagttcaggaagcacatctcagtcatactcaggaactccggttattgccaggtaaaattagcatacggttgaacatagagattcctccatgcacggagcttgttgaaccgatacaagaaagctgcatatggcgacagacaagaggcgcaatcagtgaattctcgagtgctggaagtgcagttgaaccttcagaaaagattggagtttcacaacaatggtatgatgaattagacagcctcgccaaagaaatagccaaccctgaagcagctgaggaagaggaagaagaagatgttaacccctctgaggttgacagagaagaagatggacgtatccacattgattgtcctgtcaaaacaagtcctggctcaagtgagcttattgtttatgcagctttgtatttaagactagcgagaaacgaagagacagaaagtgcgacccaggaagaactggcgagaaaaatagcaaagattttaaagccagtacggaacattacaactatgaaggaagatttgtttgtgaatttgttgtccaagtcaaagagagaattgagagacattgtcttcataaagccgatgcatgtgcggataaggttagactcgaaggatcatccaaaagccgataactcaagagacgtaatcttgactgactcctctgttgaggttgatgtctctctctga

SEQ ID NO: 87656 - protein, 694 aa, Arabidopsis thaliana
  peptide (1)..(694): Ceres Seq. ID no. 12702386
MSNRSLHLKKISWLSSRILSGFRILIVFFDSSFLGSHCLSVLNDLFWLSFCSLDNVHGRFRRSITTPATCLAPSLDGDMNIGSKTLVEQRFSRGFASVRRVSRASSSSSSSPSSPHVDLLSFIKASLDKLEGPSHHWLNRDFGNKQLFKDKGTYVVLAGHLLDGTSDLSGFFEKLKLLQQRSPGVCFMGIHFSDQARIADDRTALAELILKEYLTFPVLLSEKEFPKTSGEVRYIVFKDFKNPLIYEEKDLDIASVVKALDSLLTQDTEKSKSVRLFTNTWSKQAEAIKESHFPSFFQDLLLYFPGCISADEVGDRLFLSDTNHHRIIIFENSGKIVDSIGCFPGFEDGDFESAKMLRPTGTLYDEAEDCLYIVDSENHAIRRANINSRVLETVYPKVIKKTGGLWSWIMEKMGLGKDDDTTVDADTKSEEFDARSLLFPWHILKRDDESLLVINKRRDRRSCGRYRANGVQEAHLSHTQELRLLPGKISIRLNIEIPPCTELVEPIQESCIWRQTRGAISEFSSAGSAVEPSEKIGVSQQWYDELDSLAKEIANPEAAEEEEEEDVNPSEVDREEDGRIHIDCPVKTSPGSSELIVYAALYLRLARNEETESATQEELARKIAKILKPVRNITTMKEDLFVNLLSKSKRELRDIVFIKPMHVRIRLDSKDHPKADNSRDVILTDSSVEVDVSL

SEQ ID NO: 87657 - protein, 616 aa, Arabidopsis thaliana
  peptide (1)..(616): Ceres Seq. ID no. 12702387
MNIGSKTLVEQRFSRGFASVRRVSRASSSSSSSPSSPHVDLLSFIKASLDKLEGPSHHWLNRDFGNKQLFKDKGTYVVLAGHLLDGTSDLSGFFEKLKLLQQRSPGVCFMGIHFSDQARIADDRTALAELILKEYLTFPVLLSEKEFPKTSGEVRYIVFKDFKNPLIYEEKDLDIASVVKALDSLLTQDTEKSKSVRLFTNTWSKQAEAIKESHFPSFFQDLLLYFPGCISADEVGDRLFLSDTNHHRIIIFENSGKIVDSIGCFPGFEDGDFESAKMLRPTGTLYDEAEDCLYIVDSENHAIRRANINSRVLETVYPKVIKKTGGLWSWIMEKMGLGKDDDTTVDADTKSEEFDARSLLFPWHILKRDDESLLVINKRRDRRSCGRYRANGVQEAHLSHTQELRLLPGKISIRLNIEIPPCTELVEPIQESCIWRQTRGAISEFSSAGSAVEPSEKIGVSQQWYDELDSLAKEIANPEAAEEEEEEDVNPSEVDREEDGRIHIDCPVKTSPGSSELIVYAALYLRLARNEETESATQEELARKIAKILKPVRNITTMKEDLFVNLLSKSKRELRDIVFIKPMHVRIRLDSKDHPKADNSRDVILTDSSVEVDVSL

SEQ ID NO: 87658 - protein, 507 aa, Arabidopsis thaliana
  peptide (1)..(507): Ceres Seq. ID no. 12702388
MGIHFSDQARIADDRTALAELILKEYLTFPVLLSEKEFPKTSGEVRYIVFKDFKNPLIYEEKDLDIASVVKALDSLLTQDTEKSKSVRLFTNTWSKQAEAIKESHFPSFFQDLLLYFPGCISADEVGDRLFLSDTNHHRIIIFENSGKIVDSIGCFPGFEDGDFESAKMLRPTGTLYDEAEDCLYIVDSENHAIRRANINSRVLETVYPKVIKKTGGLWSWIMEKMGLGKDDDTTVDADTKSEEFDARSLLFPWHILKRDDESLLVINKRRDRRSCGRYRANGVQEAHLSHTQELRLLPGKISIRLNIEIPPCTELVEPIQESCIWRQTRGAISEFSSAGSAVEPSEKIGVSQQWYDELDSLAKEIANPEAAEEEEEEDVNPSEVDREEDGRIHIDCPVKTSPGSSELIVYAALYLRLARNEETESATQEELARKIAKILKPVRNITTMKEDLFVNLLSKSKRELRDIVFIKPMHVRIRLDSKDHPKADNSRDVILTDSSVEVDVSL

SEQ ID NO: 87659 - DNA, 756 bp, Arabidopsis thaliana
  misc_feature (1)..(756): Ceres Seq. ID no. 12702438
  misc_feature (1)..(756): Ortholog of  Ceres SEQ ID NO 13647678 as cited in SEQ ID NO 20358
atgaactttgtcgtcagacgggtaggctccattttgccgtcgatacgtcacggcggcgtttcccagattcgactcgcgagaacagaggcaggtcagccgagacggcgaaacaagttgccttctcttccgctaaagaagaaggaagagaaatccgagtggtggatagtagacggagagatgcacgagatcggtgatcacgtccctcctcgtgagcgtttcacaatccccagggacaacattccgaacaaacgccgtaagcagctccgtgaccagttcatgcgccgcactcgcctcgtccttaaagaatcggaacatgagccatggtgcaaaaagtatatggaactatataacgagcttagagaaaactgggagaggctttattgggatgaagggtattcaaagaaactcgcaagtgatcatgcaaattatgaatccgctgaagaagacgatgaagattttaatccatacaggaacaggcggtctttcagcgatcaaacaaaggagcaagggtttaatagaactacacaaggtgataattgggagaaagtcagtcaaatcagggataagtttgagtatgatagagaaaggaggatgagagataaagaaaattggggaaatgctttaaaacatgtcgtttgcaaattgaagagagcctttgcaccaatgaatgcagcaccagaatctcaagaatctagggacttgaattggaatgcacaaagacggccatttgatcctgatagattcgcaagggattga

SEQ ID NO: 87660 - protein, 251 aa, Arabidopsis thaliana
  peptide (1)..(251): Ceres Seq. ID no. 12702439
MNFVVRRVGSILPSIRHGGVSQIRLARTEAGQPRRRNKLPSLPLKKKEEKSEWWIVDGEMHEIGDHVPPRERFTIPRDNIPNKRRKQLRDQFMRRTRLVLKESEHEPWCKKYMELYNELRENWERLYWDEGYSKKLASDHANYESAEEDDEDFNPYRNRRSFSDQTKEQGFNRTTQGDNWEKVSQIRDKFEYDRERRMRDKENWGNALKHVVCKLKRAFAPMNAAPESQESRDLNWNAQRRPFDPDRFARD

SEQ ID NO: 87661 - protein, 192 aa, Arabidopsis thaliana
  peptide (1)..(192): Ceres Seq. ID no. 12702440
MHEIGDHVPPRERFTIPRDNIPNKRRKQLRDQFMRRTRLVLKESEHEPWCKKYMELYNELRENWERLYWDEGYSKKLASDHANYESAEEDDEDFNPYRNRRSFSDQTKEQGFNRTTQGDNWEKVSQIRDKFEYDRERRMRDKENWGNALKHVVCKLKRAFAPMNAAPESQESRDLNWNAQRRPFDPDRFARD

SEQ ID NO: 87662 - protein, 159 aa, Arabidopsis thaliana
  peptide (1)..(159): Ceres Seq. ID no. 12702441
MRRTRLVLKESEHEPWCKKYMELYNELRENWERLYWDEGYSKKLASDHANYESAEEDDEDFNPYRNRRSFSDQTKEQGFNRTTQGDNWEKVSQIRDKFEYDRERRMRDKENWGNALKHVVCKLKRAFAPMNAAPESQESRDLNWNAQRRPFDPDRFARD

SEQ ID NO: 87663 - DNA, 865 bp, Arabidopsis thaliana
  misc_feature (1)..(865): Ceres Seq. ID no. 12702449
  misc_feature (1)..(865): Ortholog of  Ceres SEQ ID NO 15180555 as cited in SEQ ID NO 1214
ctctctcttccctaaaatcaatctatcttttttttaaccattgcgtttctttttttccctttccgagcagatctgagccgaaggttaactacatgaccggcgctgagaacggcgtgagaatgacgtcaccagaggcgtcttcaacatcctccctcgccaccacaagtgtccacgtaagcgctctcgacggactcgtgaacgtgaactctctcttcaccatcgccgtcttcgttggtctttccttagcgactccaggacaacacagcctcgaacaacgatccagctgcgacgcaagtgctgacgtcgccaagaagctactggtcttcgaagtcgtctccttcagcttcttcctcttctcctctcttgtagctcagggtcttaagcttgccttaaaccttcttaatagcaaagacgtcaacgagattttcagagctcacatcaatatcaaggttttgagatggggaatgatggcttctgctgtcggatctgtaatgggctgtctcttcttgatgctctctatggttaatgtgattcagatccgtcttggtttgctctcttgcggcagcaaatcggcggctcaagctgttgcaacgctcgtcactctggtttcctctgctctgctgatttacatctctaccgccatttacgctttctggcattgatgctatgtcaaaattggataatgtccatggctttgttttgattagccaatgtgtaatttcatcatcaatgccttccaatctagttttttgtttttttgtttcggagaatgaagaatcaatcacaagatacagaacattggattatgagaatttgatgttaagcttttatgaacagaaatgaagcattatgtttgttgtttggt

SEQ ID NO: 87664 - protein, 219 aa, Arabidopsis thaliana
  peptide (1)..(219): Ceres Seq. ID no. 12702450
LSSLKSIYLFFNHCVSFFPFPSRSEPKVNYMTGAENGVRMTSPEASSTSSLATTSVHVSALDGLVNVNSLFTIAVFVGLSLATPGQHSLEQRSSCDASADVAKKLLVFEVVSFSFFLFSSLVAQGLKLALNLLNSKDVNEIFRAHINIKVLRWGMMASAVGSVMGCLFLMLSMVNVIQIRLGLLSCGSKSAAQAVATLVTLVSSALLIYISTAIYAFWH

SEQ ID NO: 87665 - protein, 189 aa, Arabidopsis thaliana; identical to SEQ ID NO: 77712
  peptide (1)..(189): Ceres Seq. ID no. 12702451

SEQ ID NO: 87666 - protein, 180 aa, Arabidopsis thaliana; identical to SEQ ID NO: 77713
  peptide (1)..(180): Ceres Seq. ID no. 12702452

SEQ ID NO: 87667 - DNA, 5685 bp, Arabidopsis thaliana
  misc_feature (1)..(5685): Ceres Seq. ID no. 12702512
  misc_feature (1)..(5685): Ortholog of  Ceres SEQ ID NO 14303434 as cited in SEQ ID NO 53963
atggaagaatcttcatctttgtcattgcagtcttgcaattggagacaccatgtgtttccaagcttcagcggcaaagatgtccgcagaacctttctcagccaccttctcaaggagttccggcgtaagggaatccgtactttcatagataatgatatcaagagaagccaaatgatcagttctgagcttgtacgagctatcagagaatctaggattgcggttgtagtgttgtcgcggacctatgcatcttcaagctggtgtttgaatgagttggtggagataaagaaagtaagccagatgatcatgccggttttctacgaggtggatccatctgatgtgaggaaacgaacgggagaatttggaaaggcgtttgaggaagcatgtgaaagacaaccagatgaggaagtgaagcagaaatggagagaagcattggtctatatagctaatatagccggcgagtcttctcaaaactgggacaatgaagcagatctgattgacaagattgctatgagcatttcatatgaattgaattctacattatcacgagattcctacaatctggttggaatcgacaatcatatgagagagctggattctttgttatgtctggaatcaactgaagtgaaaatggtggggatttggggtcctgcaggtattggcaagacaacaattgccagagctttattcaaccggctatctgaaaacttccaacacactatttttatggagaatgttaagggaagttctaggacctcggagctcgatgcctatggcttccagttgcgtttgcaagaacagtttctgtctgaagttattgatcataagcatatgaagatacatgatttaggtttggtaaaagaaagattgcaggatctgaaagttcttgttgttcttgatgatgttgataaactagaacaacttgatgccttagtgaaacaatctcagtggtttggttctggaagtaggatcattgtgaccacggaaaacaaacagctattgagagcgcatgggatcacttgcatatatgagttgggttttccatctagaagtgattctcttcagattttctgccaatatgcatttggagagagttctgcaccagatggttgtatcgagcttgctactgaaataacaaagcttgctggctatcttcccctagctctaaaggttttggggtcctctctgcgagggatgagcaaagatgagcaaaaatcagcattgcctcgactcagaaccagtcttaatgaggatattagaaatgttttacgagtcggttatgatggtatacatgacaaggataaggtcatattccttcatattgcttgtttattcaatggtgagaacgttgattatgtgaagcaaatacttgcaagttctggcttggatgtcacatttgggcttcaagtccttaccagtaggtctctcatacacatatcgagatgcaatcgtactattacgatgcacaatttgctagaacaattgggtcgagaaattgtttgcgaacaatctattgccgagcctggcaaacgtcaattcttgatggatgcttcagagatttatgatgtacttgctgataacactggtactggagctgttttgggcatatctttggacatatctaagatcaatgagttgtttctgaatgaaagagcttttggtgggatgcataatctgttgtttctaagattctacaagtcctcttcgagtaaagatcaacctgagcttcatttacctcgaggcttggattatttaccccgtaaacttaggctgctgcattgggatgcattccccatgacatcaatgcctctgagtttttgtccacagtttcttgttgtgataaacataagggagagccagcttgagaagctgtgggaaggaacacaacctcttagaagtctaaagcagatggatttaagtaagtctgagaatctaaaagagattcctgatctttcgaaagcggtaaatatcgaggaactctgtctcagttattgtggaagtttggtgatgttaccttcctcgatcaagaacctcaacaaattggttgttcttgacatgaagtattgctcaaagctagagattatcccctgcaatatggacttagagtcccttagcatcctcaatcttgatggatgctcacgattggagagttttccagaaatttcttcgaagattggatttctctctctgtcagaaactgcaatagaagaaattcccacaacagtcgcgtcttggccatgtctggcagcattggacatgtcaggcttctgttgcgattggtttcttcaaacttttttcaaagaaaactcaaattctcaacaagaaatgcaacctaatcgagcctcgtcgtctctttcatctactccaacccgaacctggacacaccacgtgttcctgagcttccgcggggaagacgtacgcaaaggttttctgagtcatattcagaaggagttcgaacgcaaaggaatttttccattcgttgatactaagatgaagagaggtagctcgatcggtcctgtactctctgatgcaattatagtatcaaagattgcgattgtcttgctctcaaagaattacgcttcgtcgacctggtgcctcaacgaattggtgaatattatgaagtgcagggaagagtttggtcaaactgtgatgaccgttttctatgaagtggatccatctgatgtgagaaagcagaccggagatttcgggatagcctttgagacaacctgtgtgggcaaaacggaagaggtgaagcagagttggaggcaagcgttgatagacgtctcgaatatagtcggagaggtttatcgcatatggagcaaagagtcagacttgattgacaaaattgcagaagatgtattggacgagttgaactatacgatgtcgagagattttgatggctatgttggaatcggacgtcatatgagaaagatgaaatccttgttatgcctagagtctggtgatgtgagaatgatagggatagtgggtcctcctgggattgggaagaccaccattgcaagagctttacgtgatcaaatctctgaaaattttcagttgactgcgtttatagacgatatcagactaacctacccgagacgttgctacggtgagagtggtctgaaaccgccaactgcgttcatgaatgatgaccgaaggaagattgtcttacaaacgaactttttgtctgaaatattaaaccaaaaagatatcgtaattcataatctaaatgcggcgccgaattggctcaaagaccgaaaagttcttgtcattcttgatgacgtggatcatttagagcaactagatgcaatggcgaaagaaactgggtggttcggctatgggagtaggattatcatcacaacacaagatcgaaaacttttgaaggcacataatatcgactatatctacgaggtgggacttccacgtaaggatgatgctctacagatcttctgtctttctgcttttggtcaaaacttcccacatgatgattttcagtaccttgcttgcgaagttacacaacttgcgggtgaacttcctcttggtctgaaagttttgggatcttatctgaaaggaatgtccctggaggagtggaaaaatgcactaccacggttaaagacttgccttgacggtgacattgagaaaactctaagatatagctacgatgccttaagccgtaaagatcaagctctctttctgcacatagcatgtttgtttcgtggttatgaagtcggtcatgtgaaacagtggcttggtaagagtgatttggatgtcgaccatgggcttgatgttctaagacagaaatcactcatatctatcgatatgggtttcctaaatatgcattctttgctgcaacaactgggtgtcgaaattgttcgtaaccaatctagtcaagagcctagagaacgtcagtttttagtagatgttaacgacatttctgatgttttcacctacaataccgcgggcactaagtctattctaggcatacgtctcaacgtcccggagatagaggaaaaaatagttattgatgaactgggttttggggataagttgagtttaccacgaggcctgaattgtctacccggtaagctcagagtattgcattggaactattgtccgttgagattgtggccctctaaattctccgcaaattttcttgttgagcttgtcatgcgggggaacaactttgagaaactatgggaaaaaatcctgccgctaaaaagtctcaagcggatggatttgagtcactctaaggatctgaaagagattccagatctttcaaatgctactaatctcgaggaactagatctctctagctgctcaggtttgttagagctcaccgactctattggaaaagccactaatcttaagagattgaaacttgcctgttgctctcttttgaaaaagctaccttcctctatcggagatgccacgaatctccaagtgttggatcttttccattgcgaaagtttcgaggaactccccaaatctattggtaagttaactaatctcaaggtattggaactcatgcgttgttataaactggtgactctccccaactctatcaagacacctaaattgccggtcttgagcatgagcgaatgcgaagatctacaggcgtttccaacctacatcaaccttgaggattgtacacagttgaaaatgtttccagaaatttcaacaaacgttaaagaactcgatctgagaaatactgcaatagagaacgtgccatcttcgatatgctcttggtcttgtctttacagattggatatgtcagagtgtagaaacctcaaggagttcccaaatgttcctgtcagcatcgtagagttggacttgagcaagacagagatagaggaagttccttcatggattgagaatctcttacttctgcgtactctaactatggtaggatgcaagagaaatctcgtctcactcccacagcttccgggttcccttttatctctagatgcaaataactgtgaatctttggagagaataaacggctcttttcaaaacccagagatttgtctaaactttgctaactgcatcaacctgaatcaagaagcgagaaagctcatccagacatcagcttgcgaatatgcgatcttacctggtgcagaagttcctgcacacttcactgaccaagatacttcaggctccctaacgatcaacataactactaagactcttccttcacgcttaagatataaagcttgcatcttgctgtcaaaaggcaatataaatcttgaggatgaggatgaggattcgtttatgtctgtgtcttgtcacgtcacggggaaacagaatatccttattctcccttcaccagttctacgtggatatacagatcacttgtatatatttgattattctttctctctacatgaggatttccctgaagccaaagaagccactttcagcgagcttatgtttgacttcatagtccacactaaatcctggaacgtgaaaagctgcggtgtacatctttttgagcctcttagaagtctaaagcagatggatttaagtaagtctgagaatctaaaagagattcctgatctttcaaaagccataaatatcgaggaactctgtctcagttattgtggaagtttggttcctcgatcaagattgtatcacacgtcactgcaagctgccttttctgaatttatcaggatcaatctccagcaagaaagagaatga

SEQ ID NO: 87668 - protein, 1894 aa, Arabidopsis thaliana
  peptide (1)..(1894): Ceres Seq. ID no. 12702513
MEESSSLSLQSCNWRHHVFPSFSGKDVRRTFLSHLLKEFRRKGIRTFIDNDIKRSQMISSELVRAIRESRIAVVVLSRTYASSSWCLNELVEIKKVSQMIMPVFYEVDPSDVRKRTGEFGKAFEEACERQPDEEVKQKWREALVYIANIAGESSQNWDNEADLIDKIAMSISYELNSTLSRDSYNLVGIDNHMRELDSLLCLESTEVKMVGIWGPAGIGKTTIARALFNRLSENFQHTIFMENVKGSSRTSELDAYGFQLRLQEQFLSEVIDHKHMKIHDLGLVKERLQDLKVLVVLDDVDKLEQLDALVKQSQWFGSGSRIIVTTENKQLLRAHGITCIYELGFPSRSDSLQIFCQYAFGESSAPDGCIELATEITKLAGYLPLALKVLGSSLRGMSKDEQKSALPRLRTSLNEDIRNVLRVGYDGIHDKDKVIFLHIACLFNGENVDYVKQILASSGLDVTFGLQVLTSRSLIHISRCNRTITMHNLLEQLGREIVCEQSIAEPGKRQFLMDASEIYDVLADNTGTGAVLGISLDISKINELFLNERAFGGMHNLLFLRFYKSSSSKDQPELHLPRGLDYLPRKLRLLHWDAFPMTSMPLSFCPQFLVVINIRESQLEKLWEGTQPLRSLKQMDLSKSENLKEIPDLSKAVNIEELCLSYCGSLVMLPSSIKNLNKLVVLDMKYCSKLEIIPCNMDLESLSILNLDGCSRLESFPEISSKIGFLSLSETAIEEIPTTVASWPCLAALDMSGFCCDWFLQTFFKENSNSQQEMQPNRASSSLSSTPTRTWTHHVFLSFRGEDVRKGFLSHIQKEFERKGIFPFVDTKMKRGSSIGPVLSDAIIVSKIAIVLLSKNYASSTWCLNELVNIMKCREEFGQTVMTVFYEVDPSDVRKQTGDFGIAFETTCVGKTEEVKQSWRQALIDVSNIVGEVYRIWSKESDLIDKIAEDVLDELNYTMSRDFDGYVGIGRHMRKMKSLLCLESGDVRMIGIVGPPGIGKTTIARALRDQISENFQLTAFIDDIRLTYPRRCYGESGLKPPTAFMNDDRRKIVLQTNFLSEILNQKDIVIHNLNAAPNWLKDRKVLVILDDVDHLEQLDAMAKETGWFGYGSRIIITTQDRKLLKAHNIDYIYEVGLPRKDDALQIFCLSAFGQNFPHDDFQYLACEVTQLAGELPLGLKVLGSYLKGMSLEEWKNALPRLKTCLDGDIEKTLRYSYDALSRKDQALFLHIACLFRGYEVGHVKQWLGKSDLDVDHGLDVLRQKSLISIDMGFLNMHSLLQQLGVEIVRNQSSQEPRERQFLVDVNDISDVFTYNTAGTKSILGIRLNVPEIEEKIVIDELGFGDKLSLPRGLNCLPGKLRVLHWNYCPLRLWPSKFSANFLVELVMRGNNFEKLWEKILPLKSLKRMDLSHSKDLKEIPDLSNATNLEELDLSSCSGLLELTDSIGKATNLKRLKLACCSLLKKLPSSIGDATNLQVLDLFHCESFEELPKSIGKLTNLKVLELMRCYKLVTLPNSIKTPKLPVLSMSECEDLQAFPTYINLEDCTQLKMFPEISTNVKELDLRNTAIENVPSSICSWSCLYRLDMSECRNLKEFPNVPVSIVELDLSKTEIEEVPSWIENLLLLRTLTMVGCKRNLVSLPQLPGSLLSLDANNCESLERINGSFQNPEICLNFANCINLNQEARKLIQTSACEYAILPGAEVPAHFTDQDTSGSLTINITTKTLPSRLRYKACILLSKGNINLEDEDEDSFMSVSCHVTGKQNILILPSPVLRGYTDHLYIFDYSFSLHEDFPEAKEATFSELMFDFIVHTKSWNVKSCGVHLFEPLRSLKQMDLSKSENLKEIPDLSKAINIEELCLSYCGSLVPRSRLYHTSLQAAFSEFIRINLQQERE

SEQ ID NO: 87669 - protein, 1838 aa, Arabidopsis thaliana
  peptide (1)..(1838): Ceres Seq. ID no. 12702514
MISSELVRAIRESRIAVVVLSRTYASSSWCLNELVEIKKVSQMIMPVFYEVDPSDVRKRTGEFGKAFEEACERQPDEEVKQKWREALVYIANIAGESSQNWDNEADLIDKIAMSISYELNSTLSRDSYNLVGIDNHMRELDSLLCLESTEVKMVGIWGPAGIGKTTIARALFNRLSENFQHTIFMENVKGSSRTSELDAYGFQLRLQEQFLSEVIDHKHMKIHDLGLVKERLQDLKVLVVLDDVDKLEQLDALVKQSQWFGSGSRIIVTTENKQLLRAHGITCIYELGFPSRSDSLQIFCQYAFGESSAPDGCIELATEITKLAGYLPLALKVLGSSLRGMSKDEQKSALPRLRTSLNEDIRNVLRVGYDGIHDKDKVIFLHIACLFNGENVDYVKQILASSGLDVTFGLQVLTSRSLIHISRCNRTITMHNLLEQLGREIVCEQSIAEPGKRQFLMDASEIYDVLADNTGTGAVLGISLDISKINELFLNERAFGGMHNLLFLRFYKSSSSKDQPELHLPRGLDYLPRKLRLLHWDAFPMTSMPLSFCPQFLVVINIRESQLEKLWEGTQPLRSLKQMDLSKSENLKEIPDLSKAVNIEELCLSYCGSLVMLPSSIKNLNKLVVLDMKYCSKLEIIPCNMDLESLSILNLDGCSRLESFPEISSKIGFLSLSETAIEEIPTTVASWPCLAALDMSGFCCDWFLQTFFKENSNSQQEMQPNRASSSLSSTPTRTWTHHVFLSFRGEDVRKGFLSHIQKEFERKGIFPFVDTKMKRGSSIGPVLSDAIIVSKIAIVLLSKNYASSTWCLNELVNIMKCREEFGQTVMTVFYEVDPSDVRKQTGDFGIAFETTCVGKTEEVKQSWRQALIDVSNIVGEVYRIWSKESDLIDKIAEDVLDELNYTMSRDFDGYVGIGRHMRKMKSLLCLESGDVRMIGIVGPPGIGKTTIARALRDQISENFQLTAFIDDIRLTYPRRCYGESGLKPPTAFMNDDRRKIVLQTNFLSEILNQKDIVIHNLNAAPNWLKDRKVLVILDDVDHLEQLDAMAKETGWFGYGSRIIITTQDRKLLKAHNIDYIYEVGLPRKDDALQIFCLSAFGQNFPHDDFQYLACEVTQLAGELPLGLKVLGSYLKGMSLEEWKNALPRLKTCLDGDIEKTLRYSYDALSRKDQALFLHIACLFRGYEVGHVKQWLGKSDLDVDHGLDVLRQKSLISIDMGFLNMHSLLQQLGVEIVRNQSSQEPRERQFLVDVNDISDVFTYNTAGTKSILGIRLNVPEIEEKIVIDELGFGDKLSLPRGLNCLPGKLRVLHWNYCPLRLWPSKFSANFLVELVMRGNNFEKLWEKILPLKSLKRMDLSHSKDLKEIPDLSNATNLEELDLSSCSGLLELTDSIGKATNLKRLKLACCSLLKKLPSSIGDATNLQVLDLFHCESFEELPKSIGKLTNLKVLELMRCYKLVTLPNSIKTPKLPVLSMSECEDLQAFPTYINLEDCTQLKMFPEISTNVKELDLRNTAIENVPSSICSWSCLYRLDMSECRNLKEFPNVPVSIVELDLSKTEIEEVPSWIENLLLLRTLTMVGCKRNLVSLPQLPGSLLSLDANNCESLERINGSFQNPEICLNFANCINLNQEARKLIQTSACEYAILPGAEVPAHFTDQDTSGSLTINITTKTLPSRLRYKACILLSKGNINLEDEDEDSFMSVSCHVTGKQNILILPSPVLRGYTDHLYIFDYSFSLHEDFPEAKEATFSELMFDFIVHTKSWNVKSCGVHLFEPLRSLKQMDLSKSENLKEIPDLSKAINIEELCLSYCGSLVPRSRLYHTSLQAAFSEFIRINLQQERE

SEQ ID NO: 87670 - protein, 1796 aa, Arabidopsis thaliana
  peptide (1)..(1796): Ceres Seq. ID no. 12702515
MIMPVFYEVDPSDVRKRTGEFGKAFEEACERQPDEEVKQKWREALVYIANIAGESSQNWDNEADLIDKIAMSISYELNSTLSRDSYNLVGIDNHMRELDSLLCLESTEVKMVGIWGPAGIGKTTIARALFNRLSENFQHTIFMENVKGSSRTSELDAYGFQLRLQEQFLSEVIDHKHMKIHDLGLVKERLQDLKVLVVLDDVDKLEQLDALVKQSQWFGSGSRIIVTTENKQLLRAHGITCIYELGFPSRSDSLQIFCQYAFGESSAPDGCIELATEITKLAGYLPLALKVLGSSLRGMSKDEQKSALPRLRTSLNEDIRNVLRVGYDGIHDKDKVIFLHIACLFNGENVDYVKQILASSGLDVTFGLQVLTSRSLIHISRCNRTITMHNLLEQLGREIVCEQSIAEPGKRQFLMDASEIYDVLADNTGTGAVLGISLDISKINELFLNERAFGGMHNLLFLRFYKSSSSKDQPELHLPRGLDYLPRKLRLLHWDAFPMTSMPLSFCPQFLVVINIRESQLEKLWEGTQPLRSLKQMDLSKSENLKEIPDLSKAVNIEELCLSYCGSLVMLPSSIKNLNKLVVLDMKYCSKLEIIPCNMDLESLSILNLDGCSRLESFPEISSKIGFLSLSETAIEEIPTTVASWPCLAALDMSGFCCDWFLQTFFKENSNSQQEMQPNRASSSLSSTPTRTWTHHVFLSFRGEDVRKGFLSHIQKEFERKGIFPFVDTKMKRGSSIGPVLSDAIIVSKIAIVLLSKNYASSTWCLNELVNIMKCREEFGQTVMTVFYEVDPSDVRKQTGDFGIAFETTCVGKTEEVKQSWRQALIDVSNIVGEVYRIWSKESDLIDKIAEDVLDELNYTMSRDFDGYVGIGRHMRKMKSLLCLESGDVRMIGIVGPPGIGKTTIARALRDQISENFQLTAFIDDIRLTYPRRCYGESGLKPPTAFMNDDRRKIVLQTNFLSEILNQKDIVIHNLNAAPNWLKDRKVLVILDDVDHLEQLDAMAKETGWFGYGSRIIITTQDRKLLKAHNIDYIYEVGLPRKDDALQIFCLSAFGQNFPHDDFQYLACEVTQLAGELPLGLKVLGSYLKGMSLEEWKNALPRLKTCLDGDIEKTLRYSYDALSRKDQALFLHIACLFRGYEVGHVKQWLGKSDLDVDHGLDVLRQKSLISIDMGFLNMHSLLQQLGVEIVRNQSSQEPRERQFLVDVNDISDVFTYNTAGTKSILGIRLNVPEIEEKIVIDELGFGDKLSLPRGLNCLPGKLRVLHWNYCPLRLWPSKFSANFLVELVMRGNNFEKLWEKILPLKSLKRMDLSHSKDLKEIPDLSNATNLEELDLSSCSGLLELTDSIGKATNLKRLKLACCSLLKKLPSSIGDATNLQVLDLFHCESFEELPKSIGKLTNLKVLELMRCYKLVTLPNSIKTPKLPVLSMSECEDLQAFPTYINLEDCTQLKMFPEISTNVKELDLRNTAIENVPSSICSWSCLYRLDMSECRNLKEFPNVPVSIVELDLSKTEIEEVPSWIENLLLLRTLTMVGCKRNLVSLPQLPGSLLSLDANNCESLERINGSFQNPEICLNFANCINLNQEARKLIQTSACEYAILPGAEVPAHFTDQDTSGSLTINITTKTLPSRLRYKACILLSKGNINLEDEDEDSFMSVSCHVTGKQNILILPSPVLRGYTDHLYIFDYSFSLHEDFPEAKEATFSELMFDFIVHTKSWNVKSCGVHLFEPLRSLKQMDLSKSENLKEIPDLSKAINIEELCLSYCGSLVPRSRLYHTSLQAAFSEFIRINLQQERE

SEQ ID NO: 87671 - DNA, 441 bp, Arabidopsis thaliana
  misc_feature (1)..(441): Ceres Seq. ID no. 12702520
  misc_feature (1)..(441): Ortholog of  Ceres SEQ ID NO 12557737 as cited in SEQ ID NO 81
atggcgactcaaccagctactgaatctgtgcaatgcttcggaaggaagaagaccgcagtggccgtcactcactgcaagcgtggatctggtttgatcaagctcaacggttgcccaatcgagcttttccagcctgagatcctccgattcaagatcttcgagccggttcttctcctcggaaagcaccgtttcgctggtgtgaacatgaggatccgtgtcaacggtggtggtcacacatcccaggtttacgccatccgtcagagtatcgcgaaggctcttgttgcgtactaccagaagtatgtggatgagcagtcgaagaaggagattaaggatatcttggtgaggtatgataggactctgcttgtggcggatccgaggaggtgtgagccgaagaagtttggtggtcgtggtgctcgttctcgttaccagaagagttaccgttaa

SEQ ID NO: 87672 - protein, 146 aa, Arabidopsis thaliana; identical to SEQ ID NO: 38400
  peptide (1)..(146): Ceres Seq. ID no. 12702521

SEQ ID NO: 87673 - protein, 79 aa, Arabidopsis thaliana; identical to SEQ ID NO: 21210
  peptide (1)..(79): Ceres Seq. ID no. 12702522

SEQ ID NO: 87674 - DNA, 1074 bp, Arabidopsis thaliana
  misc_feature (1)..(1074): Ceres Seq. ID no. 12702630
  misc_feature (1)..(1074): Ortholog of  Ceres SEQ ID NO 15171626 as cited in SEQ ID NO 57201
atggcagtgtctgggttcgagggtttcgagaaaagactcgaacttcggttcttcgacgatgacaaaccaatcaccaaaaaccctatgggactccgtctaatagacttcgaatctttagaccaagtcttaaacgaagtgcagtgcacagtggtctccgccgtagcgaatcgtagcttcgacgcttacgttctctcagagtcaagcctctttgtatacccaaccaaaatcatcatcaaaacatgtggaaccacgcaactcctcaaatcaatccgaccgttgatccatctcgcacgtaacctcggcctcacgttacgcgcgtgtcgctactcgcgtggcagcttcatcttccctaaagctcagcctttcccttacacaagcttcaaagacgaagtcatcgtcgtcgaagaaagcctcccaaaatctctctgttaccgcaaagcctctgttatgacgccttctaataacccatcacgtgcttggcacgtgttcaccgcaagcgctgacgtggaatccgacgaacatgtcgtcgtagtcgaagtatgtatgacggagctggaccgagtcaacgctcgaagcttctttaaacggaaaggtgacgagaaaaacaacagcgattccgccgggaaagagatgacgcggctcagtggtatcgataacataaacgcaaacgcttatatatgcgatttcgcgtttgatccttgcggttactcgatgaacggcgtcgacggtgaccgttactcaactatccacgtaacgcctgaagacggttttagctacgcgagcttcgagtgtggtttgtctctctacgacaacggtcacgaagatatctctgaggtgttaagccgggccattgatgttttccgtccaagtgacgtctcgatcgccaccacttacggcggcgaagattacaaccacgaggtgactaagcgcgtggagcgtgtgttagctaagaagcttgatcttaagtgtcggagccgtcttatggatgagtttccaggctccggaaccgtcgtttatcagtccttcacgcctcgcaaatgcttttttttctccatgtgtgtgtttgacatttaa

SEQ ID NO: 87675 - protein, 357 aa, Arabidopsis thaliana
  peptide (1)..(357): Ceres Seq. ID no. 12702631
MAVSGFEGFEKRLELRFFDDDKPITKNPMGLRLIDFESLDQVLNEVQCTVVSAVANRSFDAYVLSESSLFVYPTKIIIKTCGTTQLLKSIRPLIHLARNLGLTLRACRYSRGSFIFPKAQPFPYTSFKDEVIVVEESLPKSLCYRKASVMTPSNNPSRAWHVFTASADVESDEHVVVVEVCMTELDRVNARSFFKRKGDEKNNSDSAGKEMTRLSGIDNINANAYICDFAFDPCGYSMNGVDGDRYSTIHVTPEDGFSYASFECGLSLYDNGHEDISEVLSRAIDVFRPSDVSIATTYGGEDYNHEVTKRVERVLAKKLDLKCRSRLMDEFPGSGTVVYQSFTPRKCFFFSMCVFDI

SEQ ID NO: 87676 - protein, 329 aa, Arabidopsis thaliana
  peptide (1)..(329): Ceres Seq. ID no. 12702632
MGLRLIDFESLDQVLNEVQCTVVSAVANRSFDAYVLSESSLFVYPTKIIIKTCGTTQLLKSIRPLIHLARNLGLTLRACRYSRGSFIFPKAQPFPYTSFKDEVIVVEESLPKSLCYRKASVMTPSNNPSRAWHVFTASADVESDEHVVVVEVCMTELDRVNARSFFKRKGDEKNNSDSAGKEMTRLSGIDNINANAYICDFAFDPCGYSMNGVDGDRYSTIHVTPEDGFSYASFECGLSLYDNGHEDISEVLSRAIDVFRPSDVSIATTYGGEDYNHEVTKRVERVLAKKLDLKCRSRLMDEFPGSGTVVYQSFTPRKCFFFSMCVFDI

SEQ ID NO: 87677 - protein, 208 aa, Arabidopsis thaliana
  peptide (1)..(208): Ceres Seq. ID no. 12702633
MTPSNNPSRAWHVFTASADVESDEHVVVVEVCMTELDRVNARSFFKRKGDEKNNSDSAGKEMTRLSGIDNINANAYICDFAFDPCGYSMNGVDGDRYSTIHVTPEDGFSYASFECGLSLYDNGHEDISEVLSRAIDVFRPSDVSIATTYGGEDYNHEVTKRVERVLAKKLDLKCRSRLMDEFPGSGTVVYQSFTPRKCFFFSMCVFDI

SEQ ID NO: 87678 - DNA, 1335 bp, Arabidopsis thaliana
  misc_feature (1)..(1335): Ceres Seq. ID no. 12702638
  misc_feature (1)..(1335): Ortholog of  Ceres SEQ ID NO 14308417 as cited in SEQ ID NO 55357
aaaacttagaaagcagagaagagttaaagtgttagagagagagagagacagagatcggagatgtgtagcaacaaagcaagtccggtcgtcggagaagaaaaacagagtacgagatcatcgaagaggatcaagaagagaaaaaacagagaagctaccaccaccatggaggataagtcttcttccaatcttgacgcgtctcgtaagatcagaacaaaaacgaaaaaacccaaatttctcagtctcaagctcgagctcaacacttctcacgagatcaacgagaatcccagaagcaagaagagcaagaagaagaacaacaacaaaaaacagagcaagaagaaagaaccggatacgacgccgtttaaggagaagaagagagcagagactactactacactggggggaggagagaaagaagaagagcaatacgacaccgttgcagcttacctcttcaattccgccaccgacagtacaatttcttcgatccacgatctcctcccttcctccgcggccaccgatgtagattgcggcggagaaaggaataatctttctccgtatgatcgtcaagaccacggatcgtcgtcgtcttcccttctaaggacggcgatgaggaaaggagcgagcgaggaggaggagacgacggaggagcggtgggtgagttattcagaggttgtggaggaagtgatgagtcggagcgggactccacgttgttgcggcggaggcgatggaaacgatggccggccttcgttggctctgaagcttgattatgagcagatcatggaggcttggtcggataaaggtacgctttatgtcgacggagaaccgccgcagacagtgccggacttgcatgcttccgctgatgggtttaatgacggcggagaggcggggaatttatgggcagtgccggagatggaaacgacggagaggttatggagagggcatagagaagccagcttgctccggtataaagagaaacggcaaaaccgtcttttctctaagcggattcgatatcaagttcgtaaactcaatgccgagaaacgtcctcgtgttaaaggccggtttgtaaaaagagaggattcataaaccacctaagtgacggatgtttagtatttcatgatattgctattttgtgacttgttgagaagttaaggctcaaccggagtataccgagaactgaagatgatattggtctgtataggggtcttgaccagctcggttatgcaaaagtttcggttttgtttggccgcctagctttggttctcttattagaaaagtcaactaatttgtaccaaatcatctgaacaataatgataataaaaatgagaagttaatgggtgc

SEQ ID NO: 87679 - protein, 339 aa, Arabidopsis thaliana; identical to SEQ ID NO: 31015
  peptide (1)..(339): Ceres Seq. ID no. 12702639

SEQ ID NO: 87680 - protein, 305 aa, Arabidopsis thaliana; identical to SEQ ID NO: 31016
  peptide (1)..(305): Ceres Seq. ID no. 12702640

SEQ ID NO: 87681 - protein, 172 aa, Arabidopsis thaliana; identical to SEQ ID NO: 31017
  peptide (1)..(172): Ceres Seq. ID no. 12702641

SEQ ID NO: 87682 - DNA, 1141 bp, Arabidopsis thaliana
  misc_feature (1)..(1141): Ceres Seq. ID no. 12702644
  misc_feature (1)..(1141): Ortholog of  Ceres SEQ ID NO 13596090 as cited in SEQ ID NO 68377
  misc_feature (1)..(1141): Ortholog of  Ceres SEQ ID NO 14303557 as cited in SEQ ID NO 68595
atgggaggtgtgacgtcatcagttgcggcgaagttcgctttcttcccgccgagtccgtcgtcttacaagctggtttacgatgaactgaccggacttcttctgatgaacccatttcctcaccgtgaaaacgttgaaatccttaagcttccgacacgtagaggaacagagatcgtggctatgtacgtcagacatccgatggctacctctactctgctttattcccatggaaacgccgccgatctgggccagatgtatgagctcttcatcgaattgagcatccatcttaaggttaatctcatggggtacgattactccgggtatggacaatctactggaaagccaagtgagcaccatacatatgctgatatcgaagctgcttataaatgtcttgaggaaacctatggagcaaaacaggaagacataatcctttatggccaatccgttggaagtggacctacattagatcttgctgctcggttgcctcaattaagagctgctgttctccatagcccgattctttctggtctaagagtaatgtatccagtgaagaagacatactggttcgacatcttcaagaatatcgacaaaatacctcttgtgaattgcccggttctcgtcattcacggaacttgtgatgaagttgttgactgttctcatggaaaacaactatgggaactctctaaagagaaatatgaaccgctttggctcgaaggcggtaaccactgtgatctagaacactatcctgaatacattaaacaccttaagaagttcatcacaaccgtagagagagatctctcctcgagggcgagcacggcccaattagagaaacagagcagcgatttggaaatgccgaggcagagcgtagatagaagagagaagccgaggcaaagcgttgataaaagggagaaagagaaacctccaaagggtccttcaaagaagagtaagctgagaatcacgttcgagcagcacttagatcggactaggagaagcgttgacttccacgaaaaggcaaggaagagcgttgaccatcatcagcatcatcagaatcatcatcagattgagagaggaaggaagagtgttgatagattggatagagtacggtctgagtaaaccggagaaaatctaccacacgtacataagt

SEQ ID NO: 87683 - protein, 369 aa, Arabidopsis thaliana; identical to SEQ ID NO: 41674
  peptide (1)..(369): Ceres Seq. ID no. 12702645

SEQ ID NO: 87684 - protein, 335 aa, Arabidopsis thaliana; identical to SEQ ID NO: 41675
  peptide (1)..(335): Ceres Seq. ID no. 12702646

SEQ ID NO: 87685 - protein, 310 aa, Arabidopsis thaliana
  peptide (1)..(310): Ceres Seq. ID no. 12702647
MYVRHPMATSTLLYSHGNAADLGQMYELFIELSIHLKVNLMGYDYSGYGQSTGKPSEHHTYADIEAAYKCLEETYGAKQEDIILYGQSVGSGPTLDLAARLPQLRAAVLHSPILSGLRVMYPVKKTYWFDIFKNIDKIPLVNCPVLVIHGTCDEVVDCSHGKQLWELSKEKYEPLWLEGGNHCDLEHYPEYIKHLKKFITTVERDLSSRASTAQLEKQSSDLEMPRQSVDRREKPRQSVDKREKEKPPKGPSKKSKLRITFEQHLDRTRRSVDFHEKARKSVDHHQHHQNHHQIERGRKSVDRLDRVRSE

SEQ ID NO: 87686 - DNA, 1935 bp, Arabidopsis thaliana
  misc_feature (1)..(1935): Ceres Seq. ID no. 12702680
  misc_feature (1)..(1935): Ortholog of  Ceres SEQ ID NO 15174626 as cited in SEQ ID NO 59393
  misc_feature (1)..(1935): Ortholog of  Ceres SEQ ID NO 13656177 as cited in SEQ ID NO 64997
atggctgctactgcttctgcaattcgttacgctcctgaggatccgaatctccctaagccatggaaaggtcttgtggatagtagaactgggtacctctacttttggaatccagaaaccaatgttactcagtacgagagaccggcttcttccgctcctcccaagcttgctgctattcccgtaagctcttcggttcagactaatcagcaatcttcttctggatttaactctggcaaggaagatgataagtatggtaggggcagtgatgggcctaagtctgactctggatcaaggtttaatgaggctggaagaactggacctatatcttctaatgatgctgctagtggactagggaatgcttcatctggtggctcatctgccagagggcctccttcttcagccgcaggaaatgaattgtccccagaggcctattgccgcaaacatgaaattactgtcagtggaggccaagtaccaccacctctaatgtcttttgaagccactggtcttcccaatgagcttctgcgggaggtatacagtgcaggattctcagctccatctccaattcaagctcagtcatggccaattgcgatgcaaaacagagacatagtagccattgctaaaacaggctcgggaaaaactttgggttacttgattcctggtttcatgcatctccaacggatccacaatgattcacgaatgggcccaacgatcttggtcttgtcccctactagggagttggccacacaaatccaagttgaagctctgaaatttggcaagtcatctaaaatttcgtgtgcgtgtttgtatggtggagcacccaagggtcctcagctgaaggaaatagaaagaggtgtagatattgttgttgcaactcccgggcgactgaatgatatccttgaaatgaagagaatcagtctgcatcaagtatcttaccttgtgctggacgaggcagatagaatgctggacatggggttcgaacctcagatcagaaaaattgtgaatgaggttcccactaagcgtcaaaccctcatgtacactgcaacatggccaaaggaggtgaggaaaatcgcagctgatcttcttgttaaccctgcccaggtcaatattggtaatgttgatgagcttgtggcgaacaagtccattactcagactattgaagtcttagcaccgatggagaaacatagtaggttagagcagatattgcgctctcaggaaccgggttccaagattataattttctgttcaaccaaaaggatgtgtgatcaactggcaaggaacctgacccgtacgtttggagctgctgctatacatggagacaagtcgcaggctgagagagacgacgtactgaatcaatttagaagtggtaggactcctgttcttgttgcaactgatgtagctgctcgtggacttgacgttaaggacataagggtggtggtcaactatgattttccaaatggagtagaggattatgtccatagaattggaagaactggaagagctggagcaaccggtctagcttacaccttctttggagaccaagatgcaaaacatgcttcagatctgatcaagatcttggaaggagcaaaccagaaagttcctccacaggtccgcgaaatggctacacgtggtggtggtggaatgaacaaatttcgtcgctggggtacaccttccagtggtggtggtggcggccgtggtggctatggtgattctggttatggtggtcgtggtgagtctggctatggtagtcgtggtgattctggttatggtggtcgtggtgattctggtggtagaggaagctgggctccttcacgtgacagtggcagctcaggatggggaagagagagaagccgtagtcctgagagattcagaggaggtccaccgtccacttcatctccgcctcgcagctttcatgaggcgatgatgatgaaaaatagataa

SEQ ID NO: 87687 - protein, 644 aa, Arabidopsis thaliana
  peptide (1)..(644): Ceres Seq. ID no. 12702681
MAATASAIRYAPEDPNLPKPWKGLVDSRTGYLYFWNPETNVTQYERPASSAPPKLAAIPVSSSVQTNQQSSSGFNSGKEDDKYGRGSDGPKSDSGSRFNEAGRTGPISSNDAASGLGNASSGGSSARGPPSSAAGNELSPEAYCRKHEITVSGGQVPPPLMSFEATGLPNELLREVYSAGFSAPSPIQAQSWPIAMQNRDIVAIAKTGSGKTLGYLIPGFMHLQRIHNDSRMGPTILVLSPTRELATQIQVEALKFGKSSKISCACLYGGAPKGPQLKEIERGVDIVVATPGRLNDILEMKRISLHQVSYLVLDEADRMLDMGFEPQIRKIVNEVPTKRQTLMYTATWPKEVRKIAADLLVNPAQVNIGNVDELVANKSITQTIEVLAPMEKHSRLEQILRSQEPGSKIIIFCSTKRMCDQLARNLTRTFGAAAIHGDKSQAERDDVLNQFRSGRTPVLVATDVAARGLDVKDIRVVVNYDFPNGVEDYVHRIGRTGRAGATGLAYTFFGDQDAKHASDLIKILEGANQKVPPQVREMATRGGGGMNKFRRWGTPSSGGGGGRGGYGDSGYGGRGESGYGSRGDSGYGGRGDSGGRGSWAPSRDSGSSGWGRERSRSPERFRGGPPSTSSPPRSFHEAMMMKNR

SEQ ID NO: 87688 - protein, 484 aa, Arabidopsis thaliana
  peptide (1)..(484): Ceres Seq. ID no. 12702682
MSFEATGLPNELLREVYSAGFSAPSPIQAQSWPIAMQNRDIVAIAKTGSGKTLGYLIPGFMHLQRIHNDSRMGPTILVLSPTRELATQIQVEALKFGKSSKISCACLYGGAPKGPQLKEIERGVDIVVATPGRLNDILEMKRISLHQVSYLVLDEADRMLDMGFEPQIRKIVNEVPTKRQTLMYTATWPKEVRKIAADLLVNPAQVNIGNVDELVANKSITQTIEVLAPMEKHSRLEQILRSQEPGSKIIIFCSTKRMCDQLARNLTRTFGAAAIHGDKSQAERDDVLNQFRSGRTPVLVATDVAARGLDVKDIRVVVNYDFPNGVEDYVHRIGRTGRAGATGLAYTFFGDQDAKHASDLIKILEGANQKVPPQVREMATRGGGGMNKFRRWGTPSSGGGGGRGGYGDSGYGGRGESGYGSRGDSGYGGRGDSGGRGSWAPSRDSGSSGWGRERSRSPERFRGGPPSTSSPPRSFHEAMMMKNR

SEQ ID NO: 87689 - protein, 449 aa, Arabidopsis thaliana
  peptide (1)..(449): Ceres Seq. ID no. 12702683
MQNRDIVAIAKTGSGKTLGYLIPGFMHLQRIHNDSRMGPTILVLSPTRELATQIQVEALKFGKSSKISCACLYGGAPKGPQLKEIERGVDIVVATPGRLNDILEMKRISLHQVSYLVLDEADRMLDMGFEPQIRKIVNEVPTKRQTLMYTATWPKEVRKIAADLLVNPAQVNIGNVDELVANKSITQTIEVLAPMEKHSRLEQILRSQEPGSKIIIFCSTKRMCDQLARNLTRTFGAAAIHGDKSQAERDDVLNQFRSGRTPVLVATDVAARGLDVKDIRVVVNYDFPNGVEDYVHRIGRTGRAGATGLAYTFFGDQDAKHASDLIKILEGANQKVPPQVREMATRGGGGMNKFRRWGTPSSGGGGGRGGYGDSGYGGRGESGYGSRGDSGYGGRGDSGGRGSWAPSRDSGSSGWGRERSRSPERFRGGPPSTSSPPRSFHEAMMMKNR

SEQ ID NO: 87690 - DNA, 1476 bp, Arabidopsis thaliana
  misc_feature (1)..(1476): Ceres Seq. ID no. 12702684
  misc_feature (1)..(1476): Ortholog of  Ceres SEQ ID NO 13661504 as cited in SEQ ID NO 61294
  misc_feature (1)..(1476): Ortholog of  Ceres SEQ ID NO 13596227 as cited in SEQ ID NO 68750
  misc_feature (1)..(1476): Ortholog of  Ceres SEQ ID NO 15179068 as cited in SEQ ID NO 0
gtgtatctctttctaccttctctgaacctatagagccaacgaaaccagaggacagtgaacaaagaattgtataattcgatctcaactcgttcctttgttgattctttactccgactattatgaggattgtacgtgcgacggagacgttctcggcggagcttaaagagttcatgtgcgccgctgtgcaaaggaggaaagacgacgacggattcagaggctctcgtggcggtggtaaatctagaaatgccatggatcttgattctgacgccggaaacagattggtttgtgttactggtggtgtttcttaccttggtcgtgccattgttaaacgtcttcttgttcatggatactccgttagaatcgtcgttgattgtccagaggacaaagagaaagtgagtgagatggaagctgacgctgaaacggcgtcgtttagcaacatgattacttcagtggtttctcgattaacagagatcgatagcttaattaaagcgtttgatggttgtgctggcgttttccacacttctgcgtttgttgatcctgctggagtctctggatattcgaaatcaatggcggagttagaagcaaaagtgagcgagagtgtaatcgaagcgtgtacaagaacagcctcagtgagaaaatgtgtcttcacatcatctctcttagcctgcgcttggcaaaaaaatccctgtaatagtcttgaccactctgttatcaatgaagaaagctggagcgatgaacaactctgcatcgataataagctttggtatgcacttggaaaactaaaagccgagaaagctgcgtggagaatagctgattcaaaaggattaaagcttgcaactatatgtcctgctcttataactggtcctgacttcttcaaccgtaactccacttcaaccttggcttatctcaaaggagcaaaagagatgtatagtaacggattattagcgacaatggatgtgaacaggttggctaaagctcacgtatgtttgtgggaaggtttgggtaataaaactgcgtttggtagatacatttgtttcgacaccattctctctagagatggtgctgaaaagcttgcaaaagatatcgatgttcaaatcgaaaagatttgcggtaacagcaacgattcagatgcaaacacagaaacagaagcttctttacaaatatcagataaaaagctattagatcttatgtcaagaactctacgaagttgctaccatgagagttagctaggcacgacgacaaaaattaaacagagcagttctaagctattgacgtaacgttttgctcttattcttttcttcttttaaattatgctttatttatttgtttagtgtaatgataaatcattatgaaataaaaaaaatgagaatcattgttatttgtaattgtacgaatgtggtttgcgtggagggtggttgttgtaaagggcggtagagttggtgttcgtggaaaatttataaattcttcctatttcgg

SEQ ID NO: 87691 - protein, 368 aa, Arabidopsis thaliana; identical to SEQ ID NO: 30269
  peptide (1)..(368): Ceres Seq. ID no. 12702685

SEQ ID NO: 87692 - protein, 351 aa, Arabidopsis thaliana; identical to SEQ ID NO: 30270
  peptide (1)..(351): Ceres Seq. ID no. 12702686

SEQ ID NO: 87693 - protein, 325 aa, Arabidopsis thaliana; identical to SEQ ID NO: 30271
  peptide (1)..(325): Ceres Seq. ID no. 12702687

SEQ ID NO: 87694 - DNA, 795 bp, Arabidopsis thaliana
  misc_feature (1)..(795): Ceres Seq. ID no. 12702692
  misc_feature (1)..(795): Ortholog of  Ceres SEQ ID NO 13595414 as cited in SEQ ID NO 56539
  misc_feature (1)..(795): Ortholog of  Ceres SEQ ID NO 14314396 as cited in SEQ ID NO 60048
atgacttgcacagaactgagaaggatgggaaacgaatcatatgaagacgccatcgaagctctcaagaatgagaaggatgatctgaaggatgtagctgcggccaaggtgaagaagatcacggcggagcttcaggcagcctcgtcatcggacagcaaatcttttgatcccgtcgaacgaattaaggaaggcttcgtcaccttcaagaaggagaaatacgagaccaatcctgctttgtatggtgagctcgccaaaggtcaaagcccaaagtacatggtgtttgcttgttcggactcacgagtgtgcccatcacacgtactagacttccatcctggagatgccttcgtggttcgtaatatcgccaatatggttcctccttttgacaaggtcaaatatgcaggagttggagccgccattgaatacgctgtcttgcaccttaaggtggaaaacattgtggtgatagggcacagtgcatgtggtggcatcaaggggcttatgtcatttcctcttgacggaaacaactctactgacttcatagaggattgggtcaaaatctgtttaccagcaaagtcaaaagttttggcagaaagtgaaagttcagcatttgaagaccaatgtggccgatgcgaaagggaggcagtgaatgtgtcactagcaaacctattgacatatccatttgtgagagaaggagttgtgaaaggaacacttgctttgaagggaggctactatgactttgttaatggctcctttgagctttgggagctccagtttggaatttcccccgttcattctatatga

SEQ ID NO: 87695 - protein, 264 aa, Arabidopsis thaliana
  peptide (1)..(264): Ceres Seq. ID no. 12702693
MTCTELRRMGNESYEDAIEALKNEKDDLKDVAAAKVKKITAELQAASSSDSKSFDPVERIKEGFVTFKKEKYETNPALYGELAKGQSPKYMVFACSDSRVCPSHVLDFHPGDAFVVRNIANMVPPFDKVKYAGVGAAIEYAVLHLKVENIVVIGHSACGGIKGLMSFPLDGNNSTDFIEDWVKICLPAKSKVLAESESSAFEDQCGRCEREAVNVSLANLLTYPFVREGVVKGTLALKGGYYDFVNGSFELWELQFGISPVHSI

SEQ ID NO: 87696 - protein, 256 aa, Arabidopsis thaliana; identical to SEQ ID NO: 75835
  peptide (1)..(256): Ceres Seq. ID no. 12702694

SEQ ID NO: 87697 - protein, 174 aa, Arabidopsis thaliana; identical to SEQ ID NO: 46818
  peptide (1)..(174): Ceres Seq. ID no. 12702695

SEQ ID NO: 87698 - DNA, 1516 bp, Arabidopsis thaliana
  misc_feature (1)..(1516): Ceres Seq. ID no. 12702700
  misc_feature (1)..(1516): Ortholog of  Ceres SEQ ID NO 13597559 as cited in SEQ ID NO 65274
acacaaaacaaaaatcgaccaaagagtaaccaaattgatatttatctcttctcaaccatggcgatgagacaagccgctaaggcaacgatcagggcctgttcttcctcttcttcttcgggttacttcgctcgacgtcagtttaatgcatcttctggtgatagcaaaaagattgtaggagttttctacaaggccaacgaatacgctaccaagaaccctaacttccttggctgcgtcgagaatgccttaggaatccgtgactggcttgaatcccaaggacatcagtacatcgtcactgatgacaaggaaggccctgattgcgaacttgagaaacatatcccggatcttcacgtcctaatctccactcccttccacccggcgtatgtaactgctgaaagaatcaagaaagccaaaaacttgaagcttctcctcacagctggtattggctcggatcatattgatctccaggcagctgcagctgctggcctgacggttgctgaagtcacgggaagcaacgtggtctcagtggcagaagatgagctcatgagaatcttaatcctcatgcgcaacttcgtaccagggtacaaccaggtcgtcaaaggcgagtggaacgtcgcgggcattgcgtacagagcttatgatcttgaagggaagacgataggaaccgtgggagctggaagaatcggaaagcttttgctgcagcggttgaaaccattcgggtgtaacttgttgtaccatgacaggcttcagatggcaccagagctggagaaagagactggagctaagttcgttgaggatctgaatgaaatgctccctaaatgtgacgttatagtcatcaacatgcctctcacggagaagacaagaggaatgttcaacaaagagttgatagggaaattgaagaaaggcgttttgatagtgaacaacgcaagaggagccatcatggagaggcaagcagtggtggatgcggtggagagtggacacattggagggtacagcggagacgtttgggacccacagccagctcctaaggaccatccatggcgttacatgcctaaccaggctatgacccctcatacctccggcaccaccattgacgctcagctacggtatgcggcggggacgaaagacatgttggagagatacttcaagggagaagacttccctactgagaattacatcgtcaaggacggtgaacttgctcctcagtaccggtaagcttttgaggaggtgacattgggaagatgatgagaaacgaccccaacgttcaagaaaacaaataaagaagtatttggactttgctaagtcgaatgacttgagtcatcttttggtttagtttttgttattatataagcacaataataataggagggcacttcccctgttctgagagtttgtgaacatattactcagtggtttaaatcacacatatgtatttgtttccccaatcgtaggaactcaatggtttcaaatctcattatataaacataaaaatgaataaaggcatattaaatttgtctaa

SEQ ID NO: 87699 - protein, 403 aa, Arabidopsis thaliana
  peptide (1)..(403): Ceres Seq. ID no. 12702701
TQNKNRPKSNQIDIYLFSTMAMRQAAKATIRACSSSSSSGYFARRQFNASSGDSKKIVGVFYKANEYATKNPNFLGCVENALGIRDWLESQGHQYIVTDDKEGPDCELEKHIPDLHVLISTPFHPAYVTAERIKKAKNLKLLLTAGIGSDHIDLQAAAAAGLTVAEVTGSNVVSVAEDELMRILILMRNFVPGYNQVVKGEWNVAGIAYRAYDLEGKTIGTVGAGRIGKLLLQRLKPFGCNLLYHDRLQMAPELEKETGAKFVEDLNEMLPKCDVIVINMPLTEKTRGMFNKELIGKLKKGVLIVNNARGAIMERQAVVDAVESGHIGGYSGDVWDPQPAPKDHPWRYMPNQAMTPHTSGTTIDAQLRYAAGTKDMLERYFKGEDFPTENYIVKDGELAPQYR

SEQ ID NO: 87700 - protein, 384 aa, Arabidopsis thaliana; identical to SEQ ID NO: 76128
  peptide (1)..(384): Ceres Seq. ID no. 12702702

SEQ ID NO: 87701 - protein, 382 aa, Arabidopsis thaliana; identical to SEQ ID NO: 76129
  peptide (1)..(382): Ceres Seq. ID no. 12702703

SEQ ID NO: 87702 - DNA, 1338 bp, Arabidopsis thaliana
  misc_feature (1)..(1338): Ceres Seq. ID no. 12702722
  misc_feature (1)..(1338): Ortholog of  Ceres SEQ ID NO 12613725 as cited in SEQ ID NO 68196
atggaactcgaatcactcctcactaatcttgattatttattcgccagctgtaaatcttgcgatattaaatatataggattaaatttaaaaaaaaaaaaaggtctagtgggattgacatttacggcatttgctgggtcacgttcgactacaaaaacaatctctctttacttcctctacacttcactttccctcgtcgctctaggccttggcgtcttaaacccatctctacaagcctttggtgctgaccagctcgactacgaccttgaccatgacaatgaccacgagccatcctcagagaacaaagaagtcaaatcgaaccgcaagactcagtttttccaatggtggtattttggtgtctgcgccggtagtcttctaggagtcaccgtcatggcttacatccaagacacgtttggatgggttatcggttttgcaatcccaaccgcttcgatgttgttgttgatcttcttgttcttgctgcaagatcagaagcctctatgtaactgtagcaacactgaagctaatactactaccaagagcttacctgatgatcataaaagctgcaaaaccggtttttcggggcttgaaaccgtcaagctattgcttcgacttttacctatatggacgatgcttcttatgtttgcagttatattccaacaacccgcgacctttttcacaaagcaaggtatgactatgaagagaaacatcggaccaaacttcaagatcccaccagcaacactacaaagcactatcactttatccataatccttcttatgcccttctacgacaaaatcttgataccgatcgccaaaaaactaacgaaaaacgaaaagggtatttctgtgaaggaaagaatggggattgggatgttcctgtccatcatcgccattgttattgccgcgttagtcgaaagaaaaagactaaagataagcaaaatgatgaagactacacctaatttggaccccgtaagcatattgtggctcctacctcagtacattctattgggaatctcggacattttcacagttgttggaatgcaagagttcttctacagcgaggttcctgttagcatgagaacaatgggatttgctttgtacacaagcgttttcggtgtggggagttttgtgagtgctgcgttgatttcgataatagagacttacacgagctcaagaggtggaaaacataactggtttgcagatgatatgtcggaagctagacttgataactattattggcttttggctttcacaagtgctattagcttcttgatgtatattgttatttgcaagcatttcaagagtagaagtgatgatgatgatcaatgtgatacaaattgttaa

SEQ ID NO: 87703 - protein, 445 aa, Arabidopsis thaliana
  peptide (1)..(445): Ceres Seq. ID no. 12702723
MELESLLTNLDYLFASCKSCDIKYIGLNLKKKKGLVGLTFTAFAGSRSTTKTISLYFLYTSLSLVALGLGVLNPSLQAFGADQLDYDLDHDNDHEPSSENKEVKSNRKTQFFQWWYFGVCAGSLLGVTVMAYIQDTFGWVIGFAIPTASMLLLIFLFLLQDQKPLCNCSNTEANTTTKSLPDDHKSCKTGFSGLETVKLLLRLLPIWTMLLMFAVIFQQPATFFTKQGMTMKRNIGPNFKIPPATLQSTITLSIILLMPFYDKILIPIAKKLTKNEKGISVKERMGIGMFLSIIAIVIAALVERKRLKISKMMKTTPNLDPVSILWLLPQYILLGISDIFTVVGMQEFFYSEVPVSMRTMGFALYTSVFGVGSFVSAALISIIETYTSSRGGKHNWFADDMSEARLDNYYWLLAFTSAISFLMYIVICKHFKSRSDDDDQCDTNC

SEQ ID NO: 87704 - protein, 316 aa, Arabidopsis thaliana
  peptide (1)..(316): Ceres Seq. ID no. 12702724
MAYIQDTFGWVIGFAIPTASMLLLIFLFLLQDQKPLCNCSNTEANTTTKSLPDDHKSCKTGFSGLETVKLLLRLLPIWTMLLMFAVIFQQPATFFTKQGMTMKRNIGPNFKIPPATLQSTITLSIILLMPFYDKILIPIAKKLTKNEKGISVKERMGIGMFLSIIAIVIAALVERKRLKISKMMKTTPNLDPVSILWLLPQYILLGISDIFTVVGMQEFFYSEVPVSMRTMGFALYTSVFGVGSFVSAALISIIETYTSSRGGKHNWFADDMSEARLDNYYWLLAFTSAISFLMYIVICKHFKSRSDDDDQCDTNC

SEQ ID NO: 87705 - protein, 296 aa, Arabidopsis thaliana
  peptide (1)..(296): Ceres Seq. ID no. 12702725
MLLLIFLFLLQDQKPLCNCSNTEANTTTKSLPDDHKSCKTGFSGLETVKLLLRLLPIWTMLLMFAVIFQQPATFFTKQGMTMKRNIGPNFKIPPATLQSTITLSIILLMPFYDKILIPIAKKLTKNEKGISVKERMGIGMFLSIIAIVIAALVERKRLKISKMMKTTPNLDPVSILWLLPQYILLGISDIFTVVGMQEFFYSEVPVSMRTMGFALYTSVFGVGSFVSAALISIIETYTSSRGGKHNWFADDMSEARLDNYYWLLAFTSAISFLMYIVICKHFKSRSDDDDQCDTNC

SEQ ID NO: 87706 - DNA, 4158 bp, Arabidopsis thaliana
  misc_feature (1)..(4158): Ceres Seq. ID no. 12702740
  misc_feature (1)..(4158): Ortholog of  Ceres SEQ ID NO 13600485 as cited in SEQ ID NO 1221
atgaagcgaattagggatgatatttacgcaaccgggtctcaatttaaacgtcctttgggctcttctcgtggcgaatcatatgagcaatctccaatcactggaggagggagcattggtgaagggggaatcaacactcagaaattgactaccgatgatgctttgacctacttaaaggaagtaaaggagatgtttcaagatcagcgagacaaatatgatatgttccttgaggttatgaaagactttaaggcacaaaagactgatacatctggtgtgatttcacgagtgaaggagctgtttaaggggcataacaatttgattttcgggtttaacacctttttgcctaaggggtttgaaataacgcttgatgatgtagaagctccttcaaagaaaactgttgaatttgaagaagccataagctttgttaataaaattaagacacggttccagcacaatgaacttgtctataagtcgtttctggaaatcttaaatatgtatcggaaggataataaggacatcactgaggtttacaatgaggtgtctactctttttgaggaccactcggatttgcttgaagagttcactaggtttttaccagactcgttggcgcctcatacagaagcccagttacttcgtagtcaagcccaacggtatgatgaccggggatcaggccctcctcttgtgcgtcgaatgtttatggagaaggatcgccgacgagaaagaactgttgcttctcggggtgatcgtgatcacagtgttgaccgttctgaccttaatgatgataaatcaatggttaagatgcacagagatcagaggaaacgtgttgataaggataatagagaaaggagaagccgtgatttggaagatggagaagcagagcaagataacttgcaacatttttcagagaaaaggaagtcctcgagaagaatggaggggtttgaagcttattctggtcctgcttcacattctgagaaaaacaatctaaaaagcatgtacaaccaagcatttttgttttgtgagaaagtcaaggagagattatgcagccaagatgattatcaagcattcttgaagtgtctcaatatgtttagcaatggaattatccaaaggaaagatctgcagaatttggtttccgatgtgcttggaaaattccctgatctcatggatgagttcaatcagttctttgagcgttgtgagagtattgatggtttccagcaccttgctggtgttatgagcaaaagaatagaaataacactgcctggtacacttgctgcagaatcacttggtagtgaagaaaatttatctagatcagtgaagggggaggaaaaagatagagaacacaaacgtgacgttgaggctgctaaggaaaaagagcgatccaaggacaagtacatggggaaatctattcaagagcttgatctatctgattgtgagcgttgcactcctagctaccggcttctccctccagattatccaatcccgtctgtgcgccacagacagaaatcaggagctgctgtgttaaatgatcactgggtttctgtcacttcaggaagtgaagactactcttttaagcacatgcgcaggaaccaatatgaagaaagcttgtttagatgtgaagatgatagatttgagttggacatgctgttggaatctgtgggatctgctgccaaaagtgcagaagaattgttgaatattatcattgataagaaaataagttttgagggctccttccggattgaagaccatttcacagcactaaatctaaggtgtatagagagactttatggagaccatggtcttgacgtgacagacttaatacgtaagaatccagctgctgcacttcctgtaattctaactcgattgaagcagaaacaagatgaatggacaaaatgccgtgaaggttttaatgtggtctgggcggatgtgtatgcgaaaaaccattacaaatcacttgatcaccgcagcttctattttaagcagcaagattctaagaatttgagtgcaaaagcgctggtgtctgaagtcaaggacttgaaagagaagtctcagaaagaagacgatgttgttctgtctatttctgctggttacaggcaaccgataattcctcacctcgagtatgactatctcgacagagctattcatgaagacctgttcaaactagtccaattttcttgtgaggagatatgttctacaaaagagcagactggtaaagttctgaagctctgggctaattttttggagctgatgcttgatgttgcacccagggccaaggggtcagattctgttgaagatgttgtagaaacccagcatcagcgtgcatttaccagtggggaggctaatgagagttctgatgcgataagtttggtttctaggcaactaaaatttgctaccaatggagatgtgcatgcttcatctggggtctccaagcatggtgagactggtttgttgaatagggattcttcagggaaagaaaatttgaaggatggtgatcttgctaataaagatgttgccacctgtgctgaaaaaccccaaaaagatcaagaaattggaaatggagctgctaaaagatctggagatgttgatgaaagagtggccacttcaagttcgtctttcccaagtggggtcgaaaacaataatggtaaagtaggaagcagagattcgtcagtttgtgtttgctatacctaccttaacatgtcggtgctttacttttattttcaaggttcacggggcatattatccaaaccaagtgaagctatagataaagttgatagcattcaacatacgcagggagttgatataggccgaattatagtcttaggaaatggtctgcagtcagatacttctaaagccaacagtaattatgatgaatcgggtggtccatccaaaattgagaaggaggaaggtgaattatcacctgttggtgattccgaagacaactttgttgtttacgaagatcgtgagttgaaggctactgcgaaaacagaacattcagttgaagctgaaggagaaaatgatgaggacgctgacgatgaggatggtgatgatgcttccgaagctggtgaggatgcttcgggaactgaatctattggtgacgaatgttcacaggacgataatggcgttgaggaagagggtgagcatgatgagattgatggtaaagctgaaagtgaaggagaggcagagggaatggagtcacatcttatagaagacaaagggttgtttccgtcatcagaacgtgttctattatcagttaagcctctgtcaaaacatatagctgcagcggctttggttgatgagaaaaagaaggattccagagtattctatgggaatgacgacttttatgtccttttcaggcttcatcgaatcctgtacgagagaattctgtctgcgaaaacatattgctccggcagtgaaatgaaactgagaaacactaaagatacttgttcaccagatccttatgcaaggtttatgaatgctctgtttagtctgcttaatggctcagctgaaaattccaagtttgaggatgaatgccgagctattattggaaaccagtcatatgttttattcactttggaaaaactgatatacaaattggttaaacagcttcaagctgttgtagctgacgacatggacaataagcttcttcagttgtatgagtatgagaattcccggagacctgggagggtatttgactcggtatattatgaaaacgctaggatcctccttcatgaagaaaatatttatcggttagaatgttcttcctctccatctcgtttgtcaatccagcttatggataacataattgaaaagcccgacgcttatgcagtctccatggagcccacatttacgagttatttgcaaaatgagtttctctccaactcatcagggaagaaagagctacaggacattgtgctacaaaggaacatgcgtggatacaatggtctggatgatcttgcagtagcttgcaaggccatggaaggtgtacaagtaattaatggccttgaatgcaagatgtcttgctcttcctacaagatttcgtatgttttggacacagaggatttcttccacaggaagaagaaacagaagaagagcaacaacttgtcactggctaaattatcacagaatagaatagcaagattccacaagtttctctcagcttcaagatga

SEQ ID NO: 87707 - protein, 1385 aa, Arabidopsis thaliana
  peptide (1)..(1385): Ceres Seq. ID no. 12702741
MKRIRDDIYATGSQFKRPLGSSRGESYEQSPITGGGSIGEGGINTQKLTTDDALTYLKEVKEMFQDQRDKYDMFLEVMKDFKAQKTDTSGVISRVKELFKGHNNLIFGFNTFLPKGFEITLDDVEAPSKKTVEFEEAISFVNKIKTRFQHNELVYKSFLEILNMYRKDNKDITEVYNEVSTLFEDHSDLLEEFTRFLPDSLAPHTEAQLLRSQAQRYDDRGSGPPLVRRMFMEKDRRRERTVASRGDRDHSVDRSDLNDDKSMVKMHRDQRKRVDKDNRERRSRDLEDGEAEQDNLQHFSEKRKSSRRMEGFEAYSGPASHSEKNNLKSMYNQAFLFCEKVKERLCSQDDYQAFLKCLNMFSNGIIQRKDLQNLVSDVLGKFPDLMDEFNQFFERCESIDGFQHLAGVMSKRIEITLPGTLAAESLGSEENLSRSVKGEEKDREHKRDVEAAKEKERSKDKYMGKSIQELDLSDCERCTPSYRLLPPDYPIPSVRHRQKSGAAVLNDHWVSVTSGSEDYSFKHMRRNQYEESLFRCEDDRFELDMLLESVGSAAKSAEELLNIIIDKKISFEGSFRIEDHFTALNLRCIERLYGDHGLDVTDLIRKNPAAALPVILTRLKQKQDEWTKCREGFNVVWADVYAKNHYKSLDHRSFYFKQQDSKNLSAKALVSEVKDLKEKSQKEDDVVLSISAGYRQPIIPHLEYDYLDRAIHEDLFKLVQFSCEEICSTKEQTGKVLKLWANFLELMLDVAPRAKGSDSVEDVVETQHQRAFTSGEANESSDAISLVSRQLKFATNGDVHASSGVSKHGETGLLNRDSSGKENLKDGDLANKDVATCAEKPQKDQEIGNGAAKRSGDVDERVATSSSSFPSGVENNNGKVGSRDSSVCVCYTYLNMSVLYFYFQGSRGILSKPSEAIDKVDSIQHTQGVDIGRIIVLGNGLQSDTSKANSNYDESGGPSKIEKEEGELSPVGDSEDNFVVYEDRELKATAKTEHSVEAEGENDEDADDEDGDDASEAGEDASGTESIGDECSQDDNGVEEEGEHDEIDGKAESEGEAEGMESHLIEDKGLFPSSERVLLSVKPLSKHIAAAALVDEKKKDSRVFYGNDDFYVLFRLHRILYERILSAKTYCSGSEMKLRNTKDTCSPDPYARFMNALFSLLNGSAENSKFEDECRAIIGNQSYVLFTLEKLIYKLVKQLQAVVADDMDNKLLQLYEYENSRRPGRVFDSVYYENARILLHEENIYRLECSSSPSRLSIQLMDNIIEKPDAYAVSMEPTFTSYLQNEFLSNSSGKKELQDIVLQRNMRGYNGLDDLAVACKAMEGVQVINGLECKMSCSSYKISYVLDTEDFFHRKKKQKKSNNLSLAKLSQNRIARFHKFLSASR

SEQ ID NO: 87708 - protein, 1323 aa, Arabidopsis thaliana
  peptide (1)..(1323): Ceres Seq. ID no. 12702742
MFQDQRDKYDMFLEVMKDFKAQKTDTSGVISRVKELFKGHNNLIFGFNTFLPKGFEITLDDVEAPSKKTVEFEEAISFVNKIKTRFQHNELVYKSFLEILNMYRKDNKDITEVYNEVSTLFEDHSDLLEEFTRFLPDSLAPHTEAQLLRSQAQRYDDRGSGPPLVRRMFMEKDRRRERTVASRGDRDHSVDRSDLNDDKSMVKMHRDQRKRVDKDNRERRSRDLEDGEAEQDNLQHFSEKRKSSRRMEGFEAYSGPASHSEKNNLKSMYNQAFLFCEKVKERLCSQDDYQAFLKCLNMFSNGIIQRKDLQNLVSDVLGKFPDLMDEFNQFFERCESIDGFQHLAGVMSKRIEITLPGTLAAESLGSEENLSRSVKGEEKDREHKRDVEAAKEKERSKDKYMGKSIQELDLSDCERCTPSYRLLPPDYPIPSVRHRQKSGAAVLNDHWVSVTSGSEDYSFKHMRRNQYEESLFRCEDDRFELDMLLESVGSAAKSAEELLNIIIDKKISFEGSFRIEDHFTALNLRCIERLYGDHGLDVTDLIRKNPAAALPVILTRLKQKQDEWTKCREGFNVVWADVYAKNHYKSLDHRSFYFKQQDSKNLSAKALVSEVKDLKEKSQKEDDVVLSISAGYRQPIIPHLEYDYLDRAIHEDLFKLVQFSCEEICSTKEQTGKVLKLWANFLELMLDVAPRAKGSDSVEDVVETQHQRAFTSGEANESSDAISLVSRQLKFATNGDVHASSGVSKHGETGLLNRDSSGKENLKDGDLANKDVATCAEKPQKDQEIGNGAAKRSGDVDERVATSSSSFPSGVENNNGKVGSRDSSVCVCYTYLNMSVLYFYFQGSRGILSKPSEAIDKVDSIQHTQGVDIGRIIVLGNGLQSDTSKANSNYDESGGPSKIEKEEGELSPVGDSEDNFVVYEDRELKATAKTEHSVEAEGENDEDADDEDGDDASEAGEDASGTESIGDECSQDDNGVEEEGEHDEIDGKAESEGEAEGMESHLIEDKGLFPSSERVLLSVKPLSKHIAAAALVDEKKKDSRVFYGNDDFYVLFRLHRILYERILSAKTYCSGSEMKLRNTKDTCSPDPYARFMNALFSLLNGSAENSKFEDECRAIIGNQSYVLFTLEKLIYKLVKQLQAVVADDMDNKLLQLYEYENSRRPGRVFDSVYYENARILLHEENIYRLECSSSPSRLSIQLMDNIIEKPDAYAVSMEPTFTSYLQNEFLSNSSGKKELQDIVLQRNMRGYNGLDDLAVACKAMEGVQVINGLECKMSCSSYKISYVLDTEDFFHRKKKQKKSNNLSLAKLSQNRIARFHKFLSASR

SEQ ID NO: 87709 - protein, 1313 aa, Arabidopsis thaliana
  peptide (1)..(1313): Ceres Seq. ID no. 12702743
MFLEVMKDFKAQKTDTSGVISRVKELFKGHNNLIFGFNTFLPKGFEITLDDVEAPSKKTVEFEEAISFVNKIKTRFQHNELVYKSFLEILNMYRKDNKDITEVYNEVSTLFEDHSDLLEEFTRFLPDSLAPHTEAQLLRSQAQRYDDRGSGPPLVRRMFMEKDRRRERTVASRGDRDHSVDRSDLNDDKSMVKMHRDQRKRVDKDNRERRSRDLEDGEAEQDNLQHFSEKRKSSRRMEGFEAYSGPASHSEKNNLKSMYNQAFLFCEKVKERLCSQDDYQAFLKCLNMFSNGIIQRKDLQNLVSDVLGKFPDLMDEFNQFFERCESIDGFQHLAGVMSKRIEITLPGTLAAESLGSEENLSRSVKGEEKDREHKRDVEAAKEKERSKDKYMGKSIQELDLSDCERCTPSYRLLPPDYPIPSVRHRQKSGAAVLNDHWVSVTSGSEDYSFKHMRRNQYEESLFRCEDDRFELDMLLESVGSAAKSAEELLNIIIDKKISFEGSFRIEDHFTALNLRCIERLYGDHGLDVTDLIRKNPAAALPVILTRLKQKQDEWTKCREGFNVVWADVYAKNHYKSLDHRSFYFKQQDSKNLSAKALVSEVKDLKEKSQKEDDVVLSISAGYRQPIIPHLEYDYLDRAIHEDLFKLVQFSCEEICSTKEQTGKVLKLWANFLELMLDVAPRAKGSDSVEDVVETQHQRAFTSGEANESSDAISLVSRQLKFATNGDVHASSGVSKHGETGLLNRDSSGKENLKDGDLANKDVATCAEKPQKDQEIGNGAAKRSGDVDERVATSSSSFPSGVENNNGKVGSRDSSVCVCYTYLNMSVLYFYFQGSRGILSKPSEAIDKVDSIQHTQGVDIGRIIVLGNGLQSDTSKANSNYDESGGPSKIEKEEGELSPVGDSEDNFVVYEDRELKATAKTEHSVEAEGENDEDADDEDGDDASEAGEDASGTESIGDECSQDDNGVEEEGEHDEIDGKAESEGEAEGMESHLIEDKGLFPSSERVLLSVKPLSKHIAAAALVDEKKKDSRVFYGNDDFYVLFRLHRILYERILSAKTYCSGSEMKLRNTKDTCSPDPYARFMNALFSLLNGSAENSKFEDECRAIIGNQSYVLFTLEKLIYKLVKQLQAVVADDMDNKLLQLYEYENSRRPGRVFDSVYYENARILLHEENIYRLECSSSPSRLSIQLMDNIIEKPDAYAVSMEPTFTSYLQNEFLSNSSGKKELQDIVLQRNMRGYNGLDDLAVACKAMEGVQVINGLECKMSCSSYKISYVLDTEDFFHRKKKQKKSNNLSLAKLSQNRIARFHKFLSASR

SEQ ID NO: 87710 - DNA, 2061 bp, Arabidopsis thaliana
  misc_feature (1)..(2061): Ceres Seq. ID no. 12702780
  misc_feature (1)..(2061): Ortholog of  Ceres SEQ ID NO 13595870 as cited in SEQ ID NO 62101
  misc_feature (1)..(2061): Ortholog of  Ceres SEQ ID NO 13590241 as cited in SEQ ID NO 63878
  misc_feature (1)..(2061): Ortholog of  Ceres SEQ ID NO 13657939 as cited in SEQ ID NO 66349
atggcatcatcatcatcagctttgtctttccctctctccaacatcccaacctgtagtaagaagtctcaacaatttcaaaaaccggcttctttatccaaatccagtcacacacataaacctagtctcaaaacccaaattttacaccacaaattcactaagagaaatttactgagtttgacgactgccttgggatttacgtcagcgctaggaactgttcttgctcaccccgcaaaagctgaaccagaagctcccatcgaagccacttccaatagaatgtcgtattcgagattcctgcagcatctgaaagagaatgaagtgaagaaagttgacttgatcgagaacggaacggttgcgatcgtagagatctctaatccagtagtaggaaagatccagagggttagggttaaccttcccggtttaccagtcgatctggtgagggagatgaaggagaagaacgtcgatttcgctgctcatcccatgaatgtgaactggggagctttcttgctcaacttcttggggaatttagggtttcctttgatcttgcttgtctctctgcttttaacatcttcttcaagaagaaaccctgctggacctaacttgccttttggtcttggaagaagcaaagctaagtttcagatggagcctaacacagggataacgttcgaggatgtagcaggagtagacgaagccaagcaagactttgaagagatcgttgaatttttgaaaaccccagagaaattctcagctttgggggctaaaatcccaaaaggcgtcttgttgaccggaccgccaggaaccggaaagacactcttggccaaggctatagccggagaagccggtgttccttttttttcattgtctggttcggagttcatagagatgtttgttggtgtaggagcatctagagctagagacttgtttaacaaggcaaaggctaattcaccttgtatagtgttcattgatgagattgatgctgttgggagaatgagaggaaccggtataggaggaggaaacgacgaacgtgagcagacgctaaaccagatattaaccgaaatggatgggtttgcggggaataccggagtaattgtgatcgctgcaacgaaccggccagagattctagactctgctttgctccgaccaggaagattcgataggcaggtttctgttggtttaccggatataagaggaagagaggagatattaaaagttcacagcagaagcaagaaactcgacaaagatgtatctttgagcgtaattgccatgagaactccaggttttagtggagctgacttggccaatcttatgaacgaagcagcgattctcgccggaagaagaggaaaagacaagattacccttacagagatcgacgactctatcgatcggatagtcgccggaatggaagggacaaagatgatcgacggtaaaagtaaagcgattgtagcgtaccatgaagtaggacatgcaatttgtgcgactttgacggagggtcatgatccggttcagaaagttacgttggttcctagaggtcaagcacgtggtctcacgtggttcttaccgggagaagatccgacattggtgtctaaacagcaattgttcgctagaatcgtcggaggactcggaggcagagccgccgaagatgtaatttttggagaaccggagataaccaccggcgctgccggtgatctccagcaagtcactgagatagcaagacagatggtgacgatgtttggtatgtcggaaatcggtccatgggcactaaccgacccagcggttaagcaaaacgatgtggttctacggatgctagcgaggaactcaatgtccgagaaacttgcggaggatattgattcttgcgtgaagaaaataatcggtgacgcttacgaggttgcgaaaaagcacgtgaggaataatagagaagctatagacaagcttgttgatgttttgttggagaaagaaaccttaacgggagacgagtttcgagcaattctgtctgagtatactgatcaaccgttaaataccgatggcgatgtaagaattcgaatcaatgacttgattagtgtctaa

SEQ ID NO: 87711 - protein, 686 aa, Arabidopsis thaliana
  peptide (1)..(686): Ceres Seq. ID no. 12702781
MASSSSALSFPLSNIPTCSKKSQQFQKPASLSKSSHTHKPSLKTQILHHKFTKRNLLSLTTALGFTSALGTVLAHPAKAEPEAPIEATSNRMSYSRFLQHLKENEVKKVDLIENGTVAIVEISNPVVGKIQRVRVNLPGLPVDLVREMKEKNVDFAAHPMNVNWGAFLLNFLGNLGFPLILLVSLLLTSSSRRNPAGPNLPFGLGRSKAKFQMEPNTGITFEDVAGVDEAKQDFEEIVEFLKTPEKFSALGAKIPKGVLLTGPPGTGKTLLAKAIAGEAGVPFFSLSGSEFIEMFVGVGASRARDLFNKAKANSPCIVFIDEIDAVGRMRGTGIGGGNDEREQTLNQILTEMDGFAGNTGVIVIAATNRPEILDSALLRPGRFDRQVSVGLPDIRGREEILKVHSRSKKLDKDVSLSVIAMRTPGFSGADLANLMNEAAILAGRRGKDKITLTEIDDSIDRIVAGMEGTKMIDGKSKAIVAYHEVGHAICATLTEGHDPVQKVTLVPRGQARGLTWFLPGEDPTLVSKQQLFARIVGGLGGRAAEDVIFGEPEITTGAAGDLQQVTEIARQMVTMFGMSEIGPWALTDPAVKQNDVVLRMLARNSMSEKLAEDIDSCVKKIIGDAYEVAKKHVRNNREAIDKLVDVLLEKETLTGDEFRAILSEYTDQPLNTDGDVRIRINDLISV

SEQ ID NO: 87712 - protein, 595 aa, Arabidopsis thaliana
  peptide (1)..(595): Ceres Seq. ID no. 12702782
MSYSRFLQHLKENEVKKVDLIENGTVAIVEISNPVVGKIQRVRVNLPGLPVDLVREMKEKNVDFAAHPMNVNWGAFLLNFLGNLGFPLILLVSLLLTSSSRRNPAGPNLPFGLGRSKAKFQMEPNTGITFEDVAGVDEAKQDFEEIVEFLKTPEKFSALGAKIPKGVLLTGPPGTGKTLLAKAIAGEAGVPFFSLSGSEFIEMFVGVGASRARDLFNKAKANSPCIVFIDEIDAVGRMRGTGIGGGNDEREQTLNQILTEMDGFAGNTGVIVIAATNRPEILDSALLRPGRFDRQVSVGLPDIRGREEILKVHSRSKKLDKDVSLSVIAMRTPGFSGADLANLMNEAAILAGRRGKDKITLTEIDDSIDRIVAGMEGTKMIDGKSKAIVAYHEVGHAICATLTEGHDPVQKVTLVPRGQARGLTWFLPGEDPTLVSKQQLFARIVGGLGGRAAEDVIFGEPEITTGAAGDLQQVTEIARQMVTMFGMSEIGPWALTDPAVKQNDVVLRMLARNSMSEKLAEDIDSCVKKIIGDAYEVAKKHVRNNREAIDKLVDVLLEKETLTGDEFRAILSEYTDQPLNTDGDVRIRINDLISV

SEQ ID NO: 87713 - protein, 539 aa, Arabidopsis thaliana
  peptide (1)..(539): Ceres Seq. ID no. 12702783
MKEKNVDFAAHPMNVNWGAFLLNFLGNLGFPLILLVSLLLTSSSRRNPAGPNLPFGLGRSKAKFQMEPNTGITFEDVAGVDEAKQDFEEIVEFLKTPEKFSALGAKIPKGVLLTGPPGTGKTLLAKAIAGEAGVPFFSLSGSEFIEMFVGVGASRARDLFNKAKANSPCIVFIDEIDAVGRMRGTGIGGGNDEREQTLNQILTEMDGFAGNTGVIVIAATNRPEILDSALLRPGRFDRQVSVGLPDIRGREEILKVHSRSKKLDKDVSLSVIAMRTPGFSGADLANLMNEAAILAGRRGKDKITLTEIDDSIDRIVAGMEGTKMIDGKSKAIVAYHEVGHAICATLTEGHDPVQKVTLVPRGQARGLTWFLPGEDPTLVSKQQLFARIVGGLGGRAAEDVIFGEPEITTGAAGDLQQVTEIARQMVTMFGMSEIGPWALTDPAVKQNDVVLRMLARNSMSEKLAEDIDSCVKKIIGDAYEVAKKHVRNNREAIDKLVDVLLEKETLTGDEFRAILSEYTDQPLNTDGDVRIRINDLISV

SEQ ID NO: 87714 - DNA, 3213 bp, Arabidopsis thaliana
  misc_feature (1)..(3213): Ceres Seq. ID no. 12702844
  misc_feature (1)..(3213): Ortholog of  Ceres SEQ ID NO 14303870 as cited in SEQ ID NO 53632
atgccaccaaatatctatagactctccttcttctcatccctactctgtttcttcttcatcccctgtttctctctcgaccaacaaggtcaagctctcttgtcatggaagtctcaactgaacatctccggcgacgctttttcctcctggcacgtcgccgacacatctccctgcaattgggtcggcgtaaaatgtaaccgtagaggtgaagtttcggagatacagctcaaaggtatggacttgcaaggttctctgccggtgactagtctccggagcctcaagtctcttacttccctcactttatcttcactgaatctcaccggagtaatccccaaggagatcggagacttcacggagcttgagttactcgatttgtcggataattctctctccggtgatatccctgtggaaatcttcaggctcaagaaactcaagactctgtctctgaacactaacaatctagaaggtcatattccgatggagattgggaatctttcgggtctcgtagagcttatgcttttcgacaacaagctatccggagagatcccaaggagtatcggagagctcaagaatctacaagtcttacgtgctggtgggaacaagaatctaagaggtgagcttccttgggagataggtaactgcgagaatcttgtaatgcttggtctcgctgagactagtctctccgggaaacttccggcgtcgattggaaacctgaaacgtgttcagacaatagcaatttacacgtcactcttgtctggtccaattccggatgagattggatactgcacagagctccaaaacctctacttgtatcagaattcaatctcaggatcgatccctaccaccattggaggtttaaagaagctgcagagtctacttttatggcagaacaatctcgttgggaaaatcccaaccgagcttgggaactgtcccgagctctggcttatcgatttttccgagaatctcctcaccgggaccatcccaaggagcttcggaaaacttgagaatctacaagagcttcagctgagtgtaaaccagatctcaggaacaatccctgaagagctaacgaattgcacgaagctgacgcatttagagatcgacaataatctcatcacaggagagattccgtcattgatgagtaacctaagaagcttaaccatgttcttcgcatggcagaacaagttaactggaaacatccctcaaagtctctcccagtgtcgtgagcttcaagccatcgatctctcttacaacagtctctctggctccatcccaaaagagatattcgggttacgaaacctcacgaagcttcttcttctctccaatgatttgtcgggtttcatacctccggatattggaaactgtacgaatctttaccggttaagactcaacggtaacagactcgccggaaaaccgtctcgtcgggtcaatcctccggcgatctctggttgtgaaagcctcgagtttctcgatcttcacacgaatagtctctccggttcattgctcggtactacactcccaaagagcttgaagttcatcgatttctccgataatgctctgtccagtactctgcctccgggaataggattgttgacagagcttacaaagctcaatctcgccaagaacagattatccggcgaaatccctagagaaatctccacttgtcggagtctacagcttctcaatctcggcgaaaatgacttttctggtgaaatccctgacgaattgggtcaaatcccgtctctggcgatatctcttaatctcagctgcaataggttcgtcggagaaatcccgtctagattctccgacttgaaaaaccttggagtgctcgacgtatctcacaaccaactcaccggaaacttaaacgttttaacggatttgcaaaacctcgtctctctcaacatctcctacaacgatttctccggcgatttacccaacacgccctttttccggcgacttccactttctgatctcgcctcaaacagagggctttacatctcgaacgcaatctcgacccgacccgacccgacgaccaggaacagctccgtcgttagattgactattttaattctcgtcgtcgtcactgccgtacttgttctcatggcggtttacactctagtccgggcaagagccgccggaaaacaactcctcggagaagaaatagattcgtgggaagtgacgctttaccaaaaactcgatttttcaatcgacgacattgttaagaatctgacgtcagcaaacgtgatcggaaccggaagctccggtgtggtttaccgtataacgattccctccggcgagtcactcgcggtgaagaaaatgtggtcaaaggaagagagtggtgcgtttaactccgagattaaaactctaggatcgattcgtcacagaaacatcgttcgtcttcttggttggtgctctaatcggaatctgaaactcttgttctacgactatctccctaacggtagcttgagttctcggcttcacggcgccggaaaaggaggatgtgttgattgggaggcgcgatacgacgtcgttcttggtgtggcccatgcacttgcttatctccaccatgattgtctccccacaattatacatggtgacgttaaagctatgaatgtcttattgggtcctcactttgaaccctacttagctgatttcggtttagctagaaccatctccggttatccaaataccggaatcgatttagcgaaacccaccaatcggcctccgatggctggctccttatggttacatgaacatgcttcgatgcaacgtattaccgagaagagcgatgtttatagttacggggtggtattgttagaggttttaaccggaaagcatccgttagatccggatctaccaggaggtgcacatttggttaagtgggtgagagatcacttggctgagaaaaaagatcctagcaggcttcttgatccgagactcgatggacggactgactcgataatgcatgagatgcttcaaactcttgcggttgcgttcttgtgtgttagcaacaaggcaaacgaacgacctttaatgaaagatgttgtggcaatgctcacagaaataaggcatattgatgttggaagatcggagacagagaagatcaaagctggtggttgcggaagcaaagagccacaacaatttatgtcgaatgagaaaatcatcaattctcacggttcgtctaattgttcatttgcgttttcggatgactccgtttaa

SEQ ID NO: 87715 - protein, 1070 aa, Arabidopsis thaliana
  peptide (1)..(1070): Ceres Seq. ID no. 12702845
MPPNIYRLSFFSSLLCFFFIPCFSLDQQGQALLSWKSQLNISGDAFSSWHVADTSPCNWVGVKCNRRGEVSEIQLKGMDLQGSLPVTSLRSLKSLTSLTLSSLNLTGVIPKEIGDFTELELLDLSDNSLSGDIPVEIFRLKKLKTLSLNTNNLEGHIPMEIGNLSGLVELMLFDNKLSGEIPRSIGELKNLQVLRAGGNKNLRGELPWEIGNCENLVMLGLAETSLSGKLPASIGNLKRVQTIAIYTSLLSGPIPDEIGYCTELQNLYLYQNSISGSIPTTIGGLKKLQSLLLWQNNLVGKIPTELGNCPELWLIDFSENLLTGTIPRSFGKLENLQELQLSVNQISGTIPEELTNCTKLTHLEIDNNLITGEIPSLMSNLRSLTMFFAWQNKLTGNIPQSLSQCRELQAIDLSYNSLSGSIPKEIFGLRNLTKLLLLSNDLSGFIPPDIGNCTNLYRLRLNGNRLAGKPSRRVNPPAISGCESLEFLDLHTNSLSGSLLGTTLPKSLKFIDFSDNALSSTLPPGIGLLTELTKLNLAKNRLSGEIPREISTCRSLQLLNLGENDFSGEIPDELGQIPSLAISLNLSCNRFVGEIPSRFSDLKNLGVLDVSHNQLTGNLNVLTDLQNLVSLNISYNDFSGDLPNTPFFRRLPLSDLASNRGLYISNAISTRPDPTTRNSSVVRLTILILVVVTAVLVLMAVYTLVRARAAGKQLLGEEIDSWEVTLYQKLDFSIDDIVKNLTSANVIGTGSSGVVYRITIPSGESLAVKKMWSKEESGAFNSEIKTLGSIRHRNIVRLLGWCSNRNLKLLFYDYLPNGSLSSRLHGAGKGGCVDWEARYDVVLGVAHALAYLHHDCLPTIIHGDVKAMNVLLGPHFEPYLADFGLARTISGYPNTGIDLAKPTNRPPMAGSLWLHEHASMQRITEKSDVYSYGVVLLEVLTGKHPLDPDLPGGAHLVKWVRDHLAEKKDPSRLLDPRLDGRTDSIMHEMLQTLAVAFLCVSNKANERPLMKDVVAMLTEIRHIDVGRSETEKIKAGGCGSKEPQQFMSNEKIINSHGSSNCSFAFSDDSV

SEQ ID NO: 87716 - protein, 993 aa, Arabidopsis thaliana
  peptide (1)..(993): Ceres Seq. ID no. 12702846
MDLQGSLPVTSLRSLKSLTSLTLSSLNLTGVIPKEIGDFTELELLDLSDNSLSGDIPVEIFRLKKLKTLSLNTNNLEGHIPMEIGNLSGLVELMLFDNKLSGEIPRSIGELKNLQVLRAGGNKNLRGELPWEIGNCENLVMLGLAETSLSGKLPASIGNLKRVQTIAIYTSLLSGPIPDEIGYCTELQNLYLYQNSISGSIPTTIGGLKKLQSLLLWQNNLVGKIPTELGNCPELWLIDFSENLLTGTIPRSFGKLENLQELQLSVNQISGTIPEELTNCTKLTHLEIDNNLITGEIPSLMSNLRSLTMFFAWQNKLTGNIPQSLSQCRELQAIDLSYNSLSGSIPKEIFGLRNLTKLLLLSNDLSGFIPPDIGNCTNLYRLRLNGNRLAGKPSRRVNPPAISGCESLEFLDLHTNSLSGSLLGTTLPKSLKFIDFSDNALSSTLPPGIGLLTELTKLNLAKNRLSGEIPREISTCRSLQLLNLGENDFSGEIPDELGQIPSLAISLNLSCNRFVGEIPSRFSDLKNLGVLDVSHNQLTGNLNVLTDLQNLVSLNISYNDFSGDLPNTPFFRRLPLSDLASNRGLYISNAISTRPDPTTRNSSVVRLTILILVVVTAVLVLMAVYTLVRARAAGKQLLGEEIDSWEVTLYQKLDFSIDDIVKNLTSANVIGTGSSGVVYRITIPSGESLAVKKMWSKEESGAFNSEIKTLGSIRHRNIVRLLGWCSNRNLKLLFYDYLPNGSLSSRLHGAGKGGCVDWEARYDVVLGVAHALAYLHHDCLPTIIHGDVKAMNVLLGPHFEPYLADFGLARTISGYPNTGIDLAKPTNRPPMAGSLWLHEHASMQRITEKSDVYSYGVVLLEVLTGKHPLDPDLPGGAHLVKWVRDHLAEKKDPSRLLDPRLDGRTDSIMHEMLQTLAVAFLCVSNKANERPLMKDVVAMLTEIRHIDVGRSETEKIKAGGCGSKEPQQFMSNEKIINSHGSSNCSFAFSDDSV

SEQ ID NO: 87717 - protein, 912 aa, Arabidopsis thaliana
  peptide (1)..(912): Ceres Seq. ID no. 12702847
MEIGNLSGLVELMLFDNKLSGEIPRSIGELKNLQVLRAGGNKNLRGELPWEIGNCENLVMLGLAETSLSGKLPASIGNLKRVQTIAIYTSLLSGPIPDEIGYCTELQNLYLYQNSISGSIPTTIGGLKKLQSLLLWQNNLVGKIPTELGNCPELWLIDFSENLLTGTIPRSFGKLENLQELQLSVNQISGTIPEELTNCTKLTHLEIDNNLITGEIPSLMSNLRSLTMFFAWQNKLTGNIPQSLSQCRELQAIDLSYNSLSGSIPKEIFGLRNLTKLLLLSNDLSGFIPPDIGNCTNLYRLRLNGNRLAGKPSRRVNPPAISGCESLEFLDLHTNSLSGSLLGTTLPKSLKFIDFSDNALSSTLPPGIGLLTELTKLNLAKNRLSGEIPREISTCRSLQLLNLGENDFSGEIPDELGQIPSLAISLNLSCNRFVGEIPSRFSDLKNLGVLDVSHNQLTGNLNVLTDLQNLVSLNISYNDFSGDLPNTPFFRRLPLSDLASNRGLYISNAISTRPDPTTRNSSVVRLTILILVVVTAVLVLMAVYTLVRARAAGKQLLGEEIDSWEVTLYQKLDFSIDDIVKNLTSANVIGTGSSGVVYRITIPSGESLAVKKMWSKEESGAFNSEIKTLGSIRHRNIVRLLGWCSNRNLKLLFYDYLPNGSLSSRLHGAGKGGCVDWEARYDVVLGVAHALAYLHHDCLPTIIHGDVKAMNVLLGPHFEPYLADFGLARTISGYPNTGIDLAKPTNRPPMAGSLWLHEHASMQRITEKSDVYSYGVVLLEVLTGKHPLDPDLPGGAHLVKWVRDHLAEKKDPSRLLDPRLDGRTDSIMHEMLQTLAVAFLCVSNKANERPLMKDVVAMLTEIRHIDVGRSETEKIKAGGCGSKEPQQFMSNEKIINSHGSSNCSFAFSDDSV

SEQ ID NO: 87718 - DNA, 5571 bp, Arabidopsis thaliana
  misc_feature (1)..(5571): Ceres Seq. ID no. 12702873
  misc_feature (1)..(5571): Ortholog of  Ceres SEQ ID NO 13635680 as cited in SEQ ID NO 578
atggctcctccggtaaaccaagccgccgcaaacgattctctaccagagtcggccgaactcagtgacgcgatagctccgccgttgccagaacctccttcggtgacttccttggcgacgcgaatgacagctgctgagaaagagatgctctatctgcgtgacgcagtcacccagatcctccgaaaccagatcttcggcgttcctcgtgaaggccacaacactccgatgggtttttcatcccctgttccgggagtacagtttcctgcttctcaaactccaagtcacgacattcaaaaccgcgactttatgtgtacacctccgttacaacagcagtgtccttcaccacgtcttcgaacagagacaccacaaaggacggtggagttgcctgcttatgagggtggtaacgcagaagattggctctttcgtttggagcagtgtttcctttccaatcagaccctagaggaggacaagttagaaaaggccatatcttgtttgacaggagcagcagtgacttggtggagatgctcaaaggagcgagaacagatctatacttggagagattttcaggagaaattcagagtgcgtttcagaccaagtagaggcagttcggctattgatcacctattgaacataaggcagacagggagtgtcgatgagtatcgtgaaagatttgaagagcttgtggtagacttacctcatgtgacagctgatatcttggaatctgccttcttgaatgggttgaggagaagcctcaaggaccaagttgtccgttgcagacctgtaaacctcaccgatattgtggagatcgcaagactcattgaggcacaggagggtaacaacccgagctaccaggtgaggactcaaccgcgagtcaccttgcctcctaacccaaccactgcagtggcaaggccgtttgaaagagcacaatctagaccatcttttgtgcctactaaagacacaaacaaagcttcgggtagcggtacttctggaggcaatagtaacccatgtcgtcattgtggtgaccgatggtttacagggcatcgctgcaagcagcaaagactcaagagcctagaggttacagaagaggaacaagaggaaagtcccctcattgaagagctcaatgagccattaacagaagaaaaaggtgaacctgaagaagaaaaagaacactccatgagaatgagaggctacataggcagaactaaagtagtgatacttattgattctcgcgccacttgtaacttcattagcgaagatttggtgagagctagagactggataatcactcctacccgtagttttggtgtgcgagcgggaggtggcaggataattagaagtagtggcaaatgtgtggatgtcagactagaggtccagggcatcgaattcagagaagatttctacttgtttgatttgggggagttagatgtagtacttgggttctcttgctggcagataggcagaacatgggtttcgctgtatggagatccggatttgagtactcatcaggtttcgatgagagccatgaaacgagtggtgaagtatacaggagttgcttatcttcttgagctagcttccctgtttgataaccaagcgcaagaggaacagacttccatcactcctatgattcaacaaatcttggaccactatcaacatgtatttcagatgccacaggccttgcctcctacacgtaacaaggaacacgcaatcacgttaaaggaaggtacctctccggttaatctcaggccatacaggtattcctttgaccaaaaggatgagattgagaagcttgtcactgagatgctgagaagtcaagtgatcagacctagtgtcagccctttttcaagtccagtgttgttggttaagaagaaggatgggggctggacgttttgcgtagattacagggcgctgaatgaagcaaccataccagacagatacccaattccggtaatagaagagcttctagatgagctaaagggagccacagttttctccaaattggatttgaaatctggatatcaccaaatcagaatgaagatgagtgacgtggagaaaacagctttcaagactcatcaagggcattatgaattcttggtaatgccctttggattaaccaatgccccctctacctttcatagtgttatgaatgacctctttaggccatacttaaggaagttcgtgttagttttcttcgacgacattcttgtctatagcccggatatggagtctcacctgaaacatttagagatagttctgcaactgcttaaactccaccgactctacgcaaacttgaagaaatgctcttttggcagtacacagatcgcatacttaggccatataatctcagctgaaggtgtctctgctgatcctgaaaaggtggaggcaatgttgtgttggccattgcctaaatcagtcacagagttgcgtggatttctaggccttacaggctactatcgtcggtttgtcaagaactacgggcagatagcaaggccactaacggatcagcttaagaagagcgggttccaatggaatgaggcagccacaaaagcgtttcaggcactgaaggaagcagtcacgaatctgccagtattggtcttacctgactttaatcaagagtttacagtggagacggacgcttctggggttggaataggggctgtgttgtcccaaaacagaaggcctatagcgttcttgagccaggcattttcaagtcaaggtcggattaaatctgtgtatgaaagagaattgttggcgattgtgagagcaatgactaagtggaaacattatctgtccagcaaggagtttgttattaagacagatcagagaagtctaaggcatctcttggaacaaaagtctgtatcaactattcaacaacgttgggcttctaagctaagtgggttgaagtatcgcatagaatacaaacctggagtcgacaacaaagtggccgatgctctctctaggaaaccaccgcaggaaaggtttgctcagttcaccttaacggctccacaaacaatagatattggcgctttaaaagaagaaatcatggctgataaagagttgcgtcagttggttgatacttggcaacaagggcagagtacagaatctgaattttcagtgaaagctgggttggtttacaggaagggagccttggttatccctacaggatctcccttcattccaaagctactagagaagtttcacactagtgcaatgggtggccacgaaggagcgttgaagactttcaagagactcactagtgaggtctattggaagggcatgcgaaaagatacagtggaatacattcgaggatgccaaatctgtcaagagaacaagtactccaccttgtcacccgcgggtttgctctccccattccccattccacaacagatttggagcgatattagcttggattttgtacaaggattaccgtcttcgaaaggattcaactgcatcttggtggtcgtggataggctaagcaaatacagtcactttattccgttgaagcacccgtttactgcaaaggtggtagcagaggcctttataagagatgttgttaagttgcatgggtttccaactacaatggtgtctgatagagacaaggtcttcctcagcaccttctggtctgaattattcaagatacacggcactgaattgagaaagagtactgcctaccacccccaaacggatgggcagacagaagttgttaataggtgcttggagtcatttttgagatgctttgcaggccgacgaccctcttcttggatgcaatggctaccttgggccgagtactggtataacacctcttatcacactgcaacaaagacgaccccattcatggcggtttatggaagagagcccccagcaattctcagatatggggacacacctacagcaaatgcagtcgtcgaagaattactcaaggacagagatgggttgttgctagagctgagagaaaacttggagctagctcagaaacaaatgaagaaagtcgcggacaaacacaggagagatgttgagttcaaggagggcgatttggtctacttaaaactgaggccgtatcgacaagggtcgttggtacacagaaaaaacgagaagctctcgcagcgatactatggaccctaccaggtgattagcaagattggtaaggtcgcatacaaactcaggctaccggattacagtcaaattcatccggtgttccatgtgtcccagctgaaaccagcggttcctccctctttcactgctcaagaactgcccaagattgtgactccttctttagagtgggcgacggagccagaaaagcttctggatatcagacagagtagaacaacagacggtgccgacgtcttggttcaatggagtggcatgtcagctttggaggcaacgtgggagccattagtgactctagtgaagcaattcccgagcttcgatcttgaggacaagatcggtcttctgcgagggagcattgataggctaagggttccactagctactatgagaaagagaatgagaactggcgggagaaaagctaaagctatggagaagtatttgaaaaaggtgttggattttcattttgagaggttttgctctgtgtccttgtccaatctgaatgtatatgcatgccttgtttgtggaaagtacttccaaggaagaagccagaagtctcatgcttatacgcatagcttagaagcaggacaccacgtttacatcaatcttctgacagagaaggtttattgtcttcctgatagttacgagatcaatgacccttctttggatgacattcgccatgttttaaacccaaggtttagtagagcacaagtaaacgagcttgacaagaataggcagtggtctagggctcttgatggctccgactatcttccaggaatggtggggttgaacaacatacaaaagacagagtttgtgaatgttacaatccagtcgttgatgagagttactcctttaaggaatttcttccacattcctgaaaattatcagcactgcaagtctcctcttgttcactgttttggggaactaactcgcaagatttggcatgctcgaaactttaaaggacaggtgagtccacatgagttcttgcaagctgtcatgaaagccagcaagaaacgctttcggattggccaacaatcagatccagtagagtttatgtcgtggctcctcaacactttgcacatggatcttagaacttcaaaggacgccagcagtatcatccacaagtgcttccagggtgagttggaggttgtgaaagagtttcaaggcaatgaaaacaaagaaatctccaggatgtcttttctgatgctcggtctagatttgccaccgcctcctcttttcaaagatgtcatggagaaaaacattattccgcaggttgctctatttgatttattgaagaagtttgatggagaaactgtgacagaggtggttcggcctaagctggccagaatgagataccgtgtaatcaaatctcctcgttacttgatgttccatatggttcggttcaagaagaataacttcttcaaagagaagaaccctacattggatggattccctaatgcctggttaatttga

SEQ ID NO: 87719 - protein, 1856 aa, Arabidopsis thaliana
  peptide (1)..(1856): Ceres Seq. ID no. 12702874
MAPPVNQAAANDSLPESAELSDAIAPPLPEPPSVTSLATRMTAAEKEMLYLRDAVTQILRNQIFGVPREGHNTPMGFSSPVPGVQFPASQTPSHDIQNRDFMCTPPLQQQCPSPRLRTETPQRTVELPAYEGGNAEDWLFRLEQCFLSNQTLEEDKLEKAISCLTGAAVTWWRCSKEREQIYTWRDFQEKFRVRFRPSRGSSAIDHLLNIRQTGSVDEYRERFEELVVDLPHVTADILESAFLNGLRRSLKDQVVRCRPVNLTDIVEIARLIEAQEGNNPSYQVRTQPRVTLPPNPTTAVARPFERAQSRPSFVPTKDTNKASGSGTSGGNSNPCRHCGDRWFTGHRCKQQRLKSLEVTEEEQEESPLIEELNEPLTEEKGEPEEEKEHSMRMRGYIGRTKVVILIDSRATCNFISEDLVRARDWIITPTRSFGVRAGGGRIIRSSGKCVDVRLEVQGIEFREDFYLFDLGELDVVLGFSCWQIGRTWVSLYGDPDLSTHQVSMRAMKRVVKYTGVAYLLELASLFDNQAQEEQTSITPMIQQILDHYQHVFQMPQALPPTRNKEHAITLKEGTSPVNLRPYRYSFDQKDEIEKLVTEMLRSQVIRPSVSPFSSPVLLVKKKDGGWTFCVDYRALNEATIPDRYPIPVIEELLDELKGATVFSKLDLKSGYHQIRMKMSDVEKTAFKTHQGHYEFLVMPFGLTNAPSTFHSVMNDLFRPYLRKFVLVFFDDILVYSPDMESHLKHLEIVLQLLKLHRLYANLKKCSFGSTQIAYLGHIISAEGVSADPEKVEAMLCWPLPKSVTELRGFLGLTGYYRRFVKNYGQIARPLTDQLKKSGFQWNEAATKAFQALKEAVTNLPVLVLPDFNQEFTVETDASGVGIGAVLSQNRRPIAFLSQAFSSQGRIKSVYERELLAIVRAMTKWKHYLSSKEFVIKTDQRSLRHLLEQKSVSTIQQRWASKLSGLKYRIEYKPGVDNKVADALSRKPPQERFAQFTLTAPQTIDIGALKEEIMADKELRQLVDTWQQGQSTESEFSVKAGLVYRKGALVIPTGSPFIPKLLEKFHTSAMGGHEGALKTFKRLTSEVYWKGMRKDTVEYIRGCQICQENKYSTLSPAGLLSPFPIPQQIWSDISLDFVQGLPSSKGFNCILVVVDRLSKYSHFIPLKHPFTAKVVAEAFIRDVVKLHGFPTTMVSDRDKVFLSTFWSELFKIHGTELRKSTAYHPQTDGQTEVVNRCLESFLRCFAGRRPSSWMQWLPWAEYWYNTSYHTATKTTPFMAVYGREPPAILRYGDTPTANAVVEELLKDRDGLLLELRENLELAQKQMKKVADKHRRDVEFKEGDLVYLKLRPYRQGSLVHRKNEKLSQRYYGPYQVISKIGKVAYKLRLPDYSQIHPVFHVSQLKPAVPPSFTAQELPKIVTPSLEWATEPEKLLDIRQSRTTDGADVLVQWSGMSALEATWEPLVTLVKQFPSFDLEDKIGLLRGSIDRLRVPLATMRKRMRTGGRKAKAMEKYLKKVLDFHFERFCSVSLSNLNVYACLVCGKYFQGRSQKSHAYTHSLEAGHHVYINLLTEKVYCLPDSYEINDPSLDDIRHVLNPRFSRAQVNELDKNRQWSRALDGSDYLPGMVGLNNIQKTEFVNVTIQSLMRVTPLRNFFHIPENYQHCKSPLVHCFGELTRKIWHARNFKGQVSPHEFLQAVMKASKKRFRIGQQSDPVEFMSWLLNTLHMDLRTSKDASSIIHKCFQGELEVVKEFQGNENKEISRMSFLMLGLDLPPPPLFKDVMEKNIIPQVALFDLLKKFDGETVTEVVRPKLARMRYRVIKSPRYLMFHMVRFKKNNFFKEKNPTLDGFPNAWLI

SEQ ID NO: 87720 - protein, 1816 aa, Arabidopsis thaliana
  peptide (1)..(1816): Ceres Seq. ID no. 12702875
MTAAEKEMLYLRDAVTQILRNQIFGVPREGHNTPMGFSSPVPGVQFPASQTPSHDIQNRDFMCTPPLQQQCPSPRLRTETPQRTVELPAYEGGNAEDWLFRLEQCFLSNQTLEEDKLEKAISCLTGAAVTWWRCSKEREQIYTWRDFQEKFRVRFRPSRGSSAIDHLLNIRQTGSVDEYRERFEELVVDLPHVTADILESAFLNGLRRSLKDQVVRCRPVNLTDIVEIARLIEAQEGNNPSYQVRTQPRVTLPPNPTTAVARPFERAQSRPSFVPTKDTNKASGSGTSGGNSNPCRHCGDRWFTGHRCKQQRLKSLEVTEEEQEESPLIEELNEPLTEEKGEPEEEKEHSMRMRGYIGRTKVVILIDSRATCNFISEDLVRARDWIITPTRSFGVRAGGGRIIRSSGKCVDVRLEVQGIEFREDFYLFDLGELDVVLGFSCWQIGRTWVSLYGDPDLSTHQVSMRAMKRVVKYTGVAYLLELASLFDNQAQEEQTSITPMIQQILDHYQHVFQMPQALPPTRNKEHAITLKEGTSPVNLRPYRYSFDQKDEIEKLVTEMLRSQVIRPSVSPFSSPVLLVKKKDGGWTFCVDYRALNEATIPDRYPIPVIEELLDELKGATVFSKLDLKSGYHQIRMKMSDVEKTAFKTHQGHYEFLVMPFGLTNAPSTFHSVMNDLFRPYLRKFVLVFFDDILVYSPDMESHLKHLEIVLQLLKLHRLYANLKKCSFGSTQIAYLGHIISAEGVSADPEKVEAMLCWPLPKSVTELRGFLGLTGYYRRFVKNYGQIARPLTDQLKKSGFQWNEAATKAFQALKEAVTNLPVLVLPDFNQEFTVETDASGVGIGAVLSQNRRPIAFLSQAFSSQGRIKSVYERELLAIVRAMTKWKHYLSSKEFVIKTDQRSLRHLLEQKSVSTIQQRWASKLSGLKYRIEYKPGVDNKVADALSRKPPQERFAQFTLTAPQTIDIGALKEEIMADKELRQLVDTWQQGQSTESEFSVKAGLVYRKGALVIPTGSPFIPKLLEKFHTSAMGGHEGALKTFKRLTSEVYWKGMRKDTVEYIRGCQICQENKYSTLSPAGLLSPFPIPQQIWSDISLDFVQGLPSSKGFNCILVVVDRLSKYSHFIPLKHPFTAKVVAEAFIRDVVKLHGFPTTMVSDRDKVFLSTFWSELFKIHGTELRKSTAYHPQTDGQTEVVNRCLESFLRCFAGRRPSSWMQWLPWAEYWYNTSYHTATKTTPFMAVYGREPPAILRYGDTPTANAVVEELLKDRDGLLLELRENLELAQKQMKKVADKHRRDVEFKEGDLVYLKLRPYRQGSLVHRKNEKLSQRYYGPYQVISKIGKVAYKLRLPDYSQIHPVFHVSQLKPAVPPSFTAQELPKIVTPSLEWATEPEKLLDIRQSRTTDGADVLVQWSGMSALEATWEPLVTLVKQFPSFDLEDKIGLLRGSIDRLRVPLATMRKRMRTGGRKAKAMEKYLKKVLDFHFERFCSVSLSNLNVYACLVCGKYFQGRSQKSHAYTHSLEAGHHVYINLLTEKVYCLPDSYEINDPSLDDIRHVLNPRFSRAQVNELDKNRQWSRALDGSDYLPGMVGLNNIQKTEFVNVTIQSLMRVTPLRNFFHIPENYQHCKSPLVHCFGELTRKIWHARNFKGQVSPHEFLQAVMKASKKRFRIGQQSDPVEFMSWLLNTLHMDLRTSKDASSIIHKCFQGELEVVKEFQGNENKEISRMSFLMLGLDLPPPPLFKDVMEKNIIPQVALFDLLKKFDGETVTEVVRPKLARMRYRVIKSPRYLMFHMVRFKKNNFFKEKNPTLDGFPNAWLI

SEQ ID NO: 87721 - protein, 1809 aa, Arabidopsis thaliana
  peptide (1)..(1809): Ceres Seq. ID no. 12702876
MLYLRDAVTQILRNQIFGVPREGHNTPMGFSSPVPGVQFPASQTPSHDIQNRDFMCTPPLQQQCPSPRLRTETPQRTVELPAYEGGNAEDWLFRLEQCFLSNQTLEEDKLEKAISCLTGAAVTWWRCSKEREQIYTWRDFQEKFRVRFRPSRGSSAIDHLLNIRQTGSVDEYRERFEELVVDLPHVTADILESAFLNGLRRSLKDQVVRCRPVNLTDIVEIARLIEAQEGNNPSYQVRTQPRVTLPPNPTTAVARPFERAQSRPSFVPTKDTNKASGSGTSGGNSNPCRHCGDRWFTGHRCKQQRLKSLEVTEEEQEESPLIEELNEPLTEEKGEPEEEKEHSMRMRGYIGRTKVVILIDSRATCNFISEDLVRARDWIITPTRSFGVRAGGGRIIRSSGKCVDVRLEVQGIEFREDFYLFDLGELDVVLGFSCWQIGRTWVSLYGDPDLSTHQVSMRAMKRVVKYTGVAYLLELASLFDNQAQEEQTSITPMIQQILDHYQHVFQMPQALPPTRNKEHAITLKEGTSPVNLRPYRYSFDQKDEIEKLVTEMLRSQVIRPSVSPFSSPVLLVKKKDGGWTFCVDYRALNEATIPDRYPIPVIEELLDELKGATVFSKLDLKSGYHQIRMKMSDVEKTAFKTHQGHYEFLVMPFGLTNAPSTFHSVMNDLFRPYLRKFVLVFFDDILVYSPDMESHLKHLEIVLQLLKLHRLYANLKKCSFGSTQIAYLGHIISAEGVSADPEKVEAMLCWPLPKSVTELRGFLGLTGYYRRFVKNYGQIARPLTDQLKKSGFQWNEAATKAFQALKEAVTNLPVLVLPDFNQEFTVETDASGVGIGAVLSQNRRPIAFLSQAFSSQGRIKSVYERELLAIVRAMTKWKHYLSSKEFVIKTDQRSLRHLLEQKSVSTIQQRWASKLSGLKYRIEYKPGVDNKVADALSRKPPQERFAQFTLTAPQTIDIGALKEEIMADKELRQLVDTWQQGQSTESEFSVKAGLVYRKGALVIPTGSPFIPKLLEKFHTSAMGGHEGALKTFKRLTSEVYWKGMRKDTVEYIRGCQICQENKYSTLSPAGLLSPFPIPQQIWSDISLDFVQGLPSSKGFNCILVVVDRLSKYSHFIPLKHPFTAKVVAEAFIRDVVKLHGFPTTMVSDRDKVFLSTFWSELFKIHGTELRKSTAYHPQTDGQTEVVNRCLESFLRCFAGRRPSSWMQWLPWAEYWYNTSYHTATKTTPFMAVYGREPPAILRYGDTPTANAVVEELLKDRDGLLLELRENLELAQKQMKKVADKHRRDVEFKEGDLVYLKLRPYRQGSLVHRKNEKLSQRYYGPYQVISKIGKVAYKLRLPDYSQIHPVFHVSQLKPAVPPSFTAQELPKIVTPSLEWATEPEKLLDIRQSRTTDGADVLVQWSGMSALEATWEPLVTLVKQFPSFDLEDKIGLLRGSIDRLRVPLATMRKRMRTGGRKAKAMEKYLKKVLDFHFERFCSVSLSNLNVYACLVCGKYFQGRSQKSHAYTHSLEAGHHVYINLLTEKVYCLPDSYEINDPSLDDIRHVLNPRFSRAQVNELDKNRQWSRALDGSDYLPGMVGLNNIQKTEFVNVTIQSLMRVTPLRNFFHIPENYQHCKSPLVHCFGELTRKIWHARNFKGQVSPHEFLQAVMKASKKRFRIGQQSDPVEFMSWLLNTLHMDLRTSKDASSIIHKCFQGELEVVKEFQGNENKEISRMSFLMLGLDLPPPPLFKDVMEKNIIPQVALFDLLKKFDGETVTEVVRPKLARMRYRVIKSPRYLMFHMVRFKKNNFFKEKNPTLDGFPNAWLI

SEQ ID NO: 87722 - DNA, 768 bp, Arabidopsis thaliana
  misc_feature (1)..(768): Ceres Seq. ID no. 12702924
  misc_feature (1)..(768): Ortholog of  Ceres SEQ ID NO 14312715 as cited in SEQ ID NO 51563
atgtctgattcgattcaccggagaaaagtttcgaatcctgtaggaaatggaggtcggagctccagaacaagacgaacagctttcagatatgtttccgacaagaataatcgctctaaatcgagtaataaggttttcgagagaagcttctcagagccgagtcttaatcgccaccgcgacggacagagtaatcacttgcggcgaccatcgccgatgagaggtttaccgatggaagaagaaacaaaaccgatcgtttacttgcctaggattcgctctgaggttttcgcttcgtctccgtcgttgttgaacttatattcgccctcgtcttcatctccgatcaatcaagagggtaatacaaaagaagcaccaaaagtaataatcagtgtagcagtagaaggaagtcctggaccggtaagagcaatggttaaactgagttgcaacgtcgaagaaacgatcaaaattgtcgttgacaagtactgtaaagaaggaagaactccaaaactcgatcgagattctgcctttgaattgcatcagtcacatttcagcatccagtgtttggagaaaagagaaataattggagaattaggcagtagaagcttctacatgagaaagaaagctcctgaaaccggaggttcgttcgccgggatttctccagcgagaacgagcctaattccgtcgtcgaatttgatcggatcgtgcatcgctcagttgattgggaaaatcatgaggagaacaagaaggatatggaacatattggtatgtgtgcaatga

SEQ ID NO: 87723 - protein, 255 aa, Arabidopsis thaliana
  peptide (1)..(255): Ceres Seq. ID no. 12702925
MSDSIHRRKVSNPVGNGGRSSRTRRTAFRYVSDKNNRSKSSNKVFERSFSEPSLNRHRDGQSNHLRRPSPMRGLPMEEETKPIVYLPRIRSEVFASSPSLLNLYSPSSSSPINQEGNTKEAPKVIISVAVEGSPGPVRAMVKLSCNVEETIKIVVDKYCKEGRTPKLDRDSAFELHQSHFSIQCLEKREIIGELGSRSFYMRKKAPETGGSFAGISPARTSLIPSSNLIGSCIAQLIGKIMRRTRRIWNILVCVQ

SEQ ID NO: 87724 - protein, 185 aa, Arabidopsis thaliana
  peptide (1)..(185): Ceres Seq. ID no. 12702926
MRGLPMEEETKPIVYLPRIRSEVFASSPSLLNLYSPSSSSPINQEGNTKEAPKVIISVAVEGSPGPVRAMVKLSCNVEETIKIVVDKYCKEGRTPKLDRDSAFELHQSHFSIQCLEKREIIGELGSRSFYMRKKAPETGGSFAGISPARTSLIPSSNLIGSCIAQLIGKIMRRTRRIWNILVCVQ

SEQ ID NO: 87725 - protein, 180 aa, Arabidopsis thaliana
  peptide (1)..(180): Ceres Seq. ID no. 12702927
MEEETKPIVYLPRIRSEVFASSPSLLNLYSPSSSSPINQEGNTKEAPKVIISVAVEGSPGPVRAMVKLSCNVEETIKIVVDKYCKEGRTPKLDRDSAFELHQSHFSIQCLEKREIIGELGSRSFYMRKKAPETGGSFAGISPARTSLIPSSNLIGSCIAQLIGKIMRRTRRIWNILVCVQ

SEQ ID NO: 87726 - DNA, 1635 bp, Arabidopsis thaliana
  misc_feature (1)..(1635): Ceres Seq. ID no. 12702948
  misc_feature (1)..(1635): Ortholog of  Ceres SEQ ID NO 14310097 as cited in SEQ ID NO 20591
atggagatggatgaagatatggaaatcgagccaatggtgtttgaggttaaagagatcgatctggagtacgaatttgatgcggcgaggtggtacgattttactcgggaagagttaccggaggagtctcaagccgctgagttctggtttcactctgctccgtcgtacgctccttctccttttgtaacaaaactgttactaagagaggaggtttatgatgacaagacggaggcatctacgagatcagaggatgaggaagtcgttgcagatgtttgtgataagtataaaggaacctttcagcaaccaaatcatttagccacagattttaataagacaggaagtagaatgcgttctgggattttttcctcccaacaacaacaaggttgtaatttgaagaaagttccaaatcagcccatatggaaagggccgacggttagcaatcacaaacacactgataaaccaaaattccgagctaagtcaagcatcagaccaactccaaggagctcaacattaatgagacctactgctagccaattagcaaaacaaaataatgccagtaaattccatatgcaagtggatcaaagtcatgataaaggaagttgtgggacatctgggactgaagttcaagcgtctaaaagacagaagcttgatggaggtcttcttcgtaaggtagagtattttgcagacttttcaaatagggtgactgtcatggttgctgatacaaagcaggaaatgagttttgtccacaagatccccaagaaggatacaactcttgataaaaacgctcaacatgccaggacaaagattactatcccacaggagcctgattttgctacatcacagagggctcacaggatacggcacaagaatgatgcgaagttagaacaagagcaaccagctgtatatagattcaaagcacgtccatttaaccgaaagatatttgatgctccttcattgcccatccggaaaaagagcactccgaaactaccagaattccaagaatttcatttgaagacttcagaaagggctatgcaacattcatcagcagtaacaacacggtctcatgcgtataaggagtcagacaaatctattataactgatatgcttgacggtgataacagagaaagtaggagaccaagcggtatggatatatctaagcatgatgtctcagaaggaagtcacgtttttaaagctcgtcctctgaacaagaaggtttccgctcctgctaaacagatactttcaagcagaggagacatgggcattttcaaaaatagcaagcgagaaacaacagtacctttggtatggcagtcttaccaattattctttgcacttgatcttctggagtttagttttcattcggaaaagagagttcaaccagatttaccgacagaccttttcagcaagctctccataaaatccgagatacagccaaacgatggatctcgcacaagattatttcaaccaaaggtctcaaaggaaaatagaataaactctttccaagcaaggaatgaggtaacaagaatggcagcggcaaaaccagtctcttcagctggacaacaaatgcaatttggtaatagtggaataactcctgaaacaaaccagcaatggacagctaggaggaacttaggcattcgctga

SEQ ID NO: 87727 - protein, 544 aa, Arabidopsis thaliana
  peptide (1)..(544): Ceres Seq. ID no. 12702949
MEMDEDMEIEPMVFEVKEIDLEYEFDAARWYDFTREELPEESQAAEFWFHSAPSYAPSPFVTKLLLREEVYDDKTEASTRSEDEEVVADVCDKYKGTFQQPNHLATDFNKTGSRMRSGIFSSQQQQGCNLKKVPNQPIWKGPTVSNHKHTDKPKFRAKSSIRPTPRSSTLMRPTASQLAKQNNASKFHMQVDQSHDKGSCGTSGTEVQASKRQKLDGGLLRKVEYFADFSNRVTVMVADTKQEMSFVHKIPKKDTTLDKNAQHARTKITIPQEPDFATSQRAHRIRHKNDAKLEQEQPAVYRFKARPFNRKIFDAPSLPIRKKSTPKLPEFQEFHLKTSERAMQHSSAVTTRSHAYKESDKSIITDMLDGDNRESRRPSGMDISKHDVSEGSHVFKARPLNKKVSAPAKQILSSRGDMGIFKNSKRETTVPLVWQSYQLFFALDLLEFSFHSEKRVQPDLPTDLFSKLSIKSEIQPNDGSRTRLFQPKVSKENRINSFQARNEVTRMAAAKPVSSAGQQMQFGNSGITPETNQQWTARRNLGIR

SEQ ID NO: 87728 - protein, 542 aa, Arabidopsis thaliana
  peptide (1)..(542): Ceres Seq. ID no. 12702950
MDEDMEIEPMVFEVKEIDLEYEFDAARWYDFTREELPEESQAAEFWFHSAPSYAPSPFVTKLLLREEVYDDKTEASTRSEDEEVVADVCDKYKGTFQQPNHLATDFNKTGSRMRSGIFSSQQQQGCNLKKVPNQPIWKGPTVSNHKHTDKPKFRAKSSIRPTPRSSTLMRPTASQLAKQNNASKFHMQVDQSHDKGSCGTSGTEVQASKRQKLDGGLLRKVEYFADFSNRVTVMVADTKQEMSFVHKIPKKDTTLDKNAQHARTKITIPQEPDFATSQRAHRIRHKNDAKLEQEQPAVYRFKARPFNRKIFDAPSLPIRKKSTPKLPEFQEFHLKTSERAMQHSSAVTTRSHAYKESDKSIITDMLDGDNRESRRPSGMDISKHDVSEGSHVFKARPLNKKVSAPAKQILSSRGDMGIFKNSKRETTVPLVWQSYQLFFALDLLEFSFHSEKRVQPDLPTDLFSKLSIKSEIQPNDGSRTRLFQPKVSKENRINSFQARNEVTRMAAAKPVSSAGQQMQFGNSGITPETNQQWTARRNLGIR

SEQ ID NO: 87729 - protein, 538 aa, Arabidopsis thaliana
  peptide (1)..(538): Ceres Seq. ID no. 12702951
MEIEPMVFEVKEIDLEYEFDAARWYDFTREELPEESQAAEFWFHSAPSYAPSPFVTKLLLREEVYDDKTEASTRSEDEEVVADVCDKYKGTFQQPNHLATDFNKTGSRMRSGIFSSQQQQGCNLKKVPNQPIWKGPTVSNHKHTDKPKFRAKSSIRPTPRSSTLMRPTASQLAKQNNASKFHMQVDQSHDKGSCGTSGTEVQASKRQKLDGGLLRKVEYFADFSNRVTVMVADTKQEMSFVHKIPKKDTTLDKNAQHARTKITIPQEPDFATSQRAHRIRHKNDAKLEQEQPAVYRFKARPFNRKIFDAPSLPIRKKSTPKLPEFQEFHLKTSERAMQHSSAVTTRSHAYKESDKSIITDMLDGDNRESRRPSGMDISKHDVSEGSHVFKARPLNKKVSAPAKQILSSRGDMGIFKNSKRETTVPLVWQSYQLFFALDLLEFSFHSEKRVQPDLPTDLFSKLSIKSEIQPNDGSRTRLFQPKVSKENRINSFQARNEVTRMAAAKPVSSAGQQMQFGNSGITPETNQQWTARRNLGIR

SEQ ID NO: 87730 - DNA, 2379 bp, Arabidopsis thaliana
  misc_feature (1)..(2379): Ceres Seq. ID no. 12703001
  misc_feature (1)..(2379): Ortholog of  Ceres SEQ ID NO 13655640 as cited in SEQ ID NO 63844
atggaattgaagaatctctttccaatcttctggtttgtcctcgtaggctttgctgtggtgtctgcacaagaatgcggcaaaacagggttttttgtaccacaaagtaggtatgaaacaaaccggggccttctcctctcttctcttccttccaatgtttcagctcgaggaggattctacaattcttcgattggccaaggccctgatcgagtgtatgctctggggatgtgcattgaaggtgctgaaccagatgtttgctccgactgtattgaatatgcttctaatctgttattagacacgtgtctcaaccagacagaagcctggcctggccggagaaacggattttgtgcagaaccgcatttctatatccacaacgtggatgatattacatccaatttaacagagtttgatcaagtgtgggaagagttagcacgtcgtatgatagctagtactacttctccatcatctaaacgcaagtactacgcagcagacgtagcagccttgacagctttccagataatatatgcactaatgcaatgcactccggacttatctttggaggattgccatatctgtttaagacaaagtgttggtgactatgaaacatgctgcaatggaaagcaaggtggcattgtgtaccgagccagctgtgttttccggtgggagctttttcccttctctgaggcttttagtcgtatttcgttggcacctccgcctcaatccccagcatttcccacgcttccggcagtaaccaatacagcgaccaagaaaggtagcataacaatctcgataggaattgtctgggcaatcattattcctactgtcattgttgtcttcttggtactgcttgcgctaggatttgttgtttataggaggaggaaatcataccaaggatccagcactgatatcaccattacacactcactgcaattcgatttcaaagcgattgaagatgcaacaaataaattctcggagagcaacataattggtcgcggtggatttggagaagttttcatgggtgtccttaacggtactgaagttgcaattaagaggctgtcaaaagcatcgagacaaggtgcacgagaattcaaaaatgaggttgttgttgttgcaaaactccatcataggaatcttgttaagcttctcgggttttgtctagaaggagaagagaaaatacttgtttacgagtttgtccccaacaagagcctcgactacttcctctttgaccctacaaagcaagggcagttagactggactaaacgatacaacattatccggggaatcactcgaggaattctgtatcttcatcaagactcacggctcacgatcatacatcgtgacctcaaagccagcaacattctcctagatgcagatatgaacccaaaaattgctgattttggaatggcgagaatttttgggatcgatcaaagtggagctaatacaaaaaaaatagctgggacacgcggttacatgcctccagaatatgtgaggcaaggtcagttctcaacaagatcagatgtttatagtttcggagtcttagttcttgagattatatgtggtcgaaataacagattcatccaccagtcagacactacagttgagaatttggtcacatacgcttggaggttgtggagaaacgattcaccattagaactcgtggatccaaccatttcggagaattgtgaaaccgaagaagtgacaagatgcatccacattgcgttgctgtgtgttcaacacaatcccacagatcgccccagcttgtcgacaatcaacatgatgctcataaacaattcgtatgttttacctgatcctcaacaacctggattcttctttccaataataagcaaccaagaacgagatggcctcgactctatgaacaggtccaatccacaaactatcaatgatacaccattgtttgctgcgttgaaaactggctttcctgttgtgtttgtaccaagcgggaaaactggcgtttttacacccaatgataagtatgatacaaaccgtcgccttctcctctcttctctagcttctcatgttgtagctcgaggtgacttctacagtaattcacttggccaagtctatgatcgggtgtatgctttggggatgttcatctcagttgttgaaccaaaggtttgctcaaactgtatcgaccttgcttctaaagaggtgttagaggaatgtaccaaccagacagaaggcattgcctggcccgaaaatgggattctttgtatggtacgttactccaaccgttcgttttctggatcacttgagatggaaccaaagtatatatgcatgtacaatactggagatatcggatccgaaaactttgataacctgtgggacgacttgacaagtcgtatgatagctggagttatatga

SEQ ID NO: 87731 - protein, 792 aa, Arabidopsis thaliana
  peptide (1)..(792): Ceres Seq. ID no. 12703002
MELKNLFPIFWFVLVGFAVVSAQECGKTGFFVPQSRYETNRGLLLSSLPSNVSARGGFYNSSIGQGPDRVYALGMCIEGAEPDVCSDCIEYASNLLLDTCLNQTEAWPGRRNGFCAEPHFYIHNVDDITSNLTEFDQVWEELARRMIASTTSPSSKRKYYAADVAALTAFQIIYALMQCTPDLSLEDCHICLRQSVGDYETCCNGKQGGIVYRASCVFRWELFPFSEAFSRISLAPPPQSPAFPTLPAVTNTATKKGSITISIGIVWAIIIPTVIVVFLVLLALGFVVYRRRKSYQGSSTDITITHSLQFDFKAIEDATNKFSESNIIGRGGFGEVFMGVLNGTEVAIKRLSKASRQGAREFKNEVVVVAKLHHRNLVKLLGFCLEGEEKILVYEFVPNKSLDYFLFDPTKQGQLDWTKRYNIIRGITRGILYLHQDSRLTIIHRDLKASNILLDADMNPKIADFGMARIFGIDQSGANTKKIAGTRGYMPPEYVRQGQFSTRSDVYSFGVLVLEIICGRNNRFIHQSDTTVENLVTYAWRLWRNDSPLELVDPTISENCETEEVTRCIHIALLCVQHNPTDRPSLSTINMMLINNSYVLPDPQQPGFFFPIISNQERDGLDSMNRSNPQTINDTPLFAALKTGFPVVFVPSGKTGVFTPNDKYDTNRRLLLSSLASHVVARGDFYSNSLGQVYDRVYALGMFISVVEPKVCSNCIDLASKEVLEECTNQTEGIAWPENGILCMVRYSNRSFSGSLEMEPKYICMYNTGDIGSENFDNLWDDLTSRMIAGVI

SEQ ID NO: 87732 - protein, 718 aa, Arabidopsis thaliana
  peptide (1)..(718): Ceres Seq. ID no. 12703003
MCIEGAEPDVCSDCIEYASNLLLDTCLNQTEAWPGRRNGFCAEPHFYIHNVDDITSNLTEFDQVWEELARRMIASTTSPSSKRKYYAADVAALTAFQIIYALMQCTPDLSLEDCHICLRQSVGDYETCCNGKQGGIVYRASCVFRWELFPFSEAFSRISLAPPPQSPAFPTLPAVTNTATKKGSITISIGIVWAIIIPTVIVVFLVLLALGFVVYRRRKSYQGSSTDITITHSLQFDFKAIEDATNKFSESNIIGRGGFGEVFMGVLNGTEVAIKRLSKASRQGAREFKNEVVVVAKLHHRNLVKLLGFCLEGEEKILVYEFVPNKSLDYFLFDPTKQGQLDWTKRYNIIRGITRGILYLHQDSRLTIIHRDLKASNILLDADMNPKIADFGMARIFGIDQSGANTKKIAGTRGYMPPEYVRQGQFSTRSDVYSFGVLVLEIICGRNNRFIHQSDTTVENLVTYAWRLWRNDSPLELVDPTISENCETEEVTRCIHIALLCVQHNPTDRPSLSTINMMLINNSYVLPDPQQPGFFFPIISNQERDGLDSMNRSNPQTINDTPLFAALKTGFPVVFVPSGKTGVFTPNDKYDTNRRLLLSSLASHVVARGDFYSNSLGQVYDRVYALGMFISVVEPKVCSNCIDLASKEVLEECTNQTEGIAWPENGILCMVRYSNRSFSGSLEMEPKYICMYNTGDIGSENFDNLWDDLTSRMIAGVI

SEQ ID NO: 87733 - protein, 647 aa, Arabidopsis thaliana
  peptide (1)..(647): Ceres Seq. ID no. 12703004
MIASTTSPSSKRKYYAADVAALTAFQIIYALMQCTPDLSLEDCHICLRQSVGDYETCCNGKQGGIVYRASCVFRWELFPFSEAFSRISLAPPPQSPAFPTLPAVTNTATKKGSITISIGIVWAIIIPTVIVVFLVLLALGFVVYRRRKSYQGSSTDITITHSLQFDFKAIEDATNKFSESNIIGRGGFGEVFMGVLNGTEVAIKRLSKASRQGAREFKNEVVVVAKLHHRNLVKLLGFCLEGEEKILVYEFVPNKSLDYFLFDPTKQGQLDWTKRYNIIRGITRGILYLHQDSRLTIIHRDLKASNILLDADMNPKIADFGMARIFGIDQSGANTKKIAGTRGYMPPEYVRQGQFSTRSDVYSFGVLVLEIICGRNNRFIHQSDTTVENLVTYAWRLWRNDSPLELVDPTISENCETEEVTRCIHIALLCVQHNPTDRPSLSTINMMLINNSYVLPDPQQPGFFFPIISNQERDGLDSMNRSNPQTINDTPLFAALKTGFPVVFVPSGKTGVFTPNDKYDTNRRLLLSSLASHVVARGDFYSNSLGQVYDRVYALGMFISVVEPKVCSNCIDLASKEVLEECTNQTEGIAWPENGILCMVRYSNRSFSGSLEMEPKYICMYNTGDIGSENFDNLWDDLTSRMIAGVI

SEQ ID NO: 87734 - DNA, 1123 bp, Arabidopsis thaliana
  misc_feature (1)..(1123): Ceres Seq. ID no. 12703041
  misc_feature (1)..(1123): Ortholog of  Ceres SEQ ID NO 13593831 as cited in SEQ ID NO 53828
acagagacaacaaactaaagttggtggtgatagagtgagagagaaacatggaaggcaaagaagaagacgtcaatgttggagccaacaagttcccagagagacagccgatcggtacggcggctcagacggagagcaaggactataaggaaccaccaccggcgccgtttttcgaacccggcgagctcaaatcttggtctttctacagagcagggatagctgagttcatagccactttccttttcctctacgtcaccgttttgacagtcatgggtgttaagagagctcccaatatgtgtgcctctgttggaatccaaggcatcgcttgggcttttggtggcatgatctttgctcttgtttactgtactgctggaatctcaggaggacatattaatccggcggtgacttttggtttgttcttggcgaggaagctatctttaaccagagctctgttctacatagtaatgcagtgccttggagctatatgtggtgctggtgtggttaaagggtttcaaccagggctgtaccagacgaatggcggtggagctaatgtggtggctcatggttacacaaagggttcaggtcttggtgcagagattgttggaacttttgttctggtttacactgttttctcagctactgatgctaagagaagtgccagagactctcatgtccctatcttggctccgcttccaattgggtttgctgtcttcttggtgcacttggctaccatcccaattactggaactggcattaacccggccaggagtctcggagctgccatcatctacaacaaggatcatgcttgggatgaccattggatcttctgggtcggtccattcattggtgctgcgcttgctgctctgtaccatcagatagtcatcagagctattcctttcaagtccaagacataaagtttcctacatattctctgatcatcatcaagctaagaatatatcaatctttaattctatatgctttcttcttgtttcctatgtcatgtgtgatgatctctatatgtaccactagagctttgatcttgtaacagtgtaaatgtgtaatctattatgtatcaatggcattgtatcttgtaacattaattatgtcaatggaagaatacattgtg

SEQ ID NO: 87735 - protein, 287 aa, Arabidopsis thaliana; identical to SEQ ID NO: 26812
  peptide (1)..(287): Ceres Seq. ID no. 12703042

SEQ ID NO: 87736 - protein, 214 aa, Arabidopsis thaliana; identical to SEQ ID NO: 26813
  peptide (1)..(214): Ceres Seq. ID no. 12703043

SEQ ID NO: 87737 - protein, 206 aa, Arabidopsis thaliana; identical to SEQ ID NO: 26814
  peptide (1)..(206): Ceres Seq. ID no. 12703044

SEQ ID NO: 87738 - DNA, 1205 bp, Arabidopsis thaliana
  misc_feature (1)..(1205): Ceres Seq. ID no. 12703052
  misc_feature (1)..(1205): Ortholog of  Ceres SEQ ID NO 15168868 as cited in SEQ ID NO 58303
aacgccagttgccatccaggggaggggagaagaagaatttgtattctcaagttgtcgatatgagagagatgaagtcagaaacacgtttgtgagagaacagcttttagatgtgattgtggatcagattctcaaagacttttcgcgaagagtctctgatccttaaatcgcttctctctcgcttgacctcatttcgtcgtcgaaatcagatccttgtgaaaatgccgaaacaggatatggagaagatggagcttcgtaagaacttccgtaatgtttggcataccgatcttacccacagtatccagaacgatactccttattgttgcttcgcgttgtggtgtgccccttgtgcatcatacttgcttcgcaagcgtgcgctttacgatgatatgtcaaggtacgtctgctgtgccggttacatgccttgtagtggtaggtgtggagaagccaaatgtcctcaactttgtcttgccactgaggtcttctgctgctttgcaaactctgtggcctcaactcgctttcttctgcaagatgagttccaaattcaaacgacaaaatgtgacaactgcatcattggtttcatggtttgcctcagccaagtggcttgcatattctccatagttgcatgtattgtcggtatggatgagctttcagaagcttctcagatactcacatgttgctctgacatggtgtactgcacggtttgcgcatgtatgcagacacaacacaagatggaaatggacaagagggacggtaagttcgggccacagccaatggcagtgcctccggctcagcaaatgtcacggtttgatcaagccaccccacccgcagtcggttatcctccacaacaaggttatccaccttctggttatcctcaacaccctccacaaggttatccaccttctggctatcctcaaaaccctcctccctcagcttattctcaataccctcctggggcttatcctcctcctcccgcttacccaaagtgatcactctttgcctgttttctctcccgattggaaaattttatttcatctttttttaatgctgtcttgttacgggtcaagaattgaacgttcgctgattgttttgaggtcgttgtttgtatgagattttgacctcgcatgttgttgttgttttctgaaacgtccctcttggactaagagatttcatgactttttcctttccttttaaattctctctttttc

SEQ ID NO: 87739 - protein, 255 aa, Arabidopsis thaliana; identical to SEQ ID NO: 35963
  peptide (1)..(255): Ceres Seq. ID no. 12703053

SEQ ID NO: 87740 - protein, 250 aa, Arabidopsis thaliana; identical to SEQ ID NO: 35964
  peptide (1)..(250): Ceres Seq. ID no. 12703054

SEQ ID NO: 87741 - protein, 247 aa, Arabidopsis thaliana; identical to SEQ ID NO: 35965
  peptide (1)..(247): Ceres Seq. ID no. 12703055

SEQ ID NO: 87742 - DNA, 1596 bp, Arabidopsis thaliana
  misc_feature (1)..(1596): Ceres Seq. ID no. 12703056
  misc_feature (1)..(1596): Ortholog of  Ceres SEQ ID NO 14311870 as cited in SEQ ID NO 51574
  misc_feature (1)..(1596): Ortholog of  Ceres SEQ ID NO 15174583 as cited in SEQ ID NO 53693
  misc_feature (1)..(1596): Ortholog of  Ceres SEQ ID NO 13581563 as cited in SEQ ID NO 58942
  misc_feature (1)..(1596): Ortholog of  Ceres SEQ ID NO 13658707 as cited in SEQ ID NO 66286
  misc_feature (1)..(1596): Ortholog of  Ceres SEQ ID NO 13654528 as cited in SEQ ID NO 68080
atgacctctctctccaccgccggttaccttcttctccttctccttctccctataagctacgacggtggcttcatcggagccgccgatgcagaacatgacctcagagccactgatctccataatcatcgccatcgtcgccaccgtaaccaccatcgcggagaagagtttgagtactcagccatatcatgtagagcttactcagcctcattggacgagtttggcgccgtaggagacggtgtaacttcaaatacagcggcgtttcgcgacgcggtgtcacaacttagccgtttcgcagactacggtggctcattgttatttgttcccgccggacggtggctcaccggaaactttaacctgaccagccattttacgcttttcctccaccgtgatgctgttatcctcgcctctcaagaagagagtgactatgaagtgatagagccactgccttcgtacggaagagggcgagacacagatggtggaaggttcatcagtctactttttggttcaaacttaaccgatgttgttatcaccggtgagaatgggacaattgatggacaaggagaaccatggtgggggaaattcaagagaggagaactaaaatacacaagaccttatttgattgagattatgcattctgatggtatccaaatctccaatctcactttcttgaattctccttcttggcatattcacccggtctacagcagcaatatatatatccaaggtttgacgatattagcaccggtcacggtaccaaacactgacggtatcaacccagattcttgtaccaacacgaggattgaggactgctacattgtctccggcgacgattgtatcgccgttaaaagtggatgggatcaatacggaatcaactacggcatgcctacgaaacagctcttgatccgacggctcacatgcatttctcctgatagtgccgtgatcgctctcggcagtgaaatgtccggtggaattgaagatgttcgagctgaagatattgttgccattaactctgaatctggaatcaggattaaaacagctatcggacgaggaggttacgtgaaggatgtatacgtaagaggaatgacaatgatgacaatgaaatatgtgttttggatgaccggaagttacggttcgcatccggacgatcattatgatccgaaagcgttaccggtgattcagaacattaattatcaagacatggtcgccgagaacgtgacgatgcctgctcagttagctggaatatcgggagatcagtttactggaatttgtatctctaacgtgactatcactctatcgaagaaacctaagaaagtgctttggaattgtactgatgtttcgggttatactagtggtgtgactccgcagccgtgtcagttgttaccggagaagcagccggggacggttgtgccgtgtaatttcccggaagatccgattcctattgatgaagtgaagcttcaacgttgctactccagaagaaggaatatgtgaacatgtaataagatcttcttttttttaacaaatacttttcttgggttataagtaaatgtgttatcaaatggggacatatttgattgaataataaacaaagcttcaagg

SEQ ID NO: 87743 - protein, 495 aa, Arabidopsis thaliana; identical to SEQ ID NO: 28352
  peptide (1)..(495): Ceres Seq. ID no. 12703057

SEQ ID NO: 87744 - protein, 286 aa, Arabidopsis thaliana; identical to SEQ ID NO: 28353
  peptide (1)..(286): Ceres Seq. ID no. 12703058

SEQ ID NO: 87745 - DNA, 654 bp, Arabidopsis thaliana
  misc_feature (1)..(654): Ceres Seq. ID no. 12703127
  misc_feature (1)..(654): Ortholog of  Ceres SEQ ID NO 13661767 as cited in SEQ ID NO 61423
atgggtgaagccgctaaggatcaaactgaagaagtgattcaagcttggtacttggataataaggaagaggatcagaaacttcctcaccacaaggatcctaaggaatttgtatctttggacaaacttgcagagcttggagtactttgctggagacttgatgctgataactatgaaaccgatgaggaattgaaaaggatccgcgaatctcgtggttactcctacatggacttatgtgaggtgtgtccagagaagcttccaaactatgaagaaaaagtaaagatgttttttgaagaacatttacatattgatgaagagatccgttactgcctcgcaggaagtggatactttgatgtgagggatctcaatgatatttggattagagtatgggtaaagaagggaggtttgatagtcttccctgctggaatatatcatcgcttcaccgtggactcggacaactatatgaaggcaatgcgtcttttcgtgggtggaccagtgtggactgcttataatcgcccacatgaccatcttcctgcaaggtacaatgatgtcttgttctcccatattgtcacgacaaagcttactagatctgtagttatatatctaagcaaagaggcgacaaaagtgtttatgtatattcaaacggctattttatag

SEQ ID NO: 87746 - protein, 217 aa, Arabidopsis thaliana
  peptide (1)..(217): Ceres Seq. ID no. 12703128
MGEAAKDQTEEVIQAWYLDNKEEDQKLPHHKDPKEFVSLDKLAELGVLCWRLDADNYETDEELKRIRESRGYSYMDLCEVCPEKLPNYEEKVKMFFEEHLHIDEEIRYCLAGSGYFDVRDLNDIWIRVWVKKGGLIVFPAGIYHRFTVDSDNYMKAMRLFVGGPVWTAYNRPHDHLPARYNDVLFSHIVTTKLTRSVVIYLSKEATKVFMYIQTAIL

SEQ ID NO: 87747 - protein, 143 aa, Arabidopsis thaliana
  peptide (1)..(143): Ceres Seq. ID no. 12703129
MDLCEVCPEKLPNYEEKVKMFFEEHLHIDEEIRYCLAGSGYFDVRDLNDIWIRVWVKKGGLIVFPAGIYHRFTVDSDNYMKAMRLFVGGPVWTAYNRPHDHLPARYNDVLFSHIVTTKLTRSVVIYLSKEATKVFMYIQTAIL

SEQ ID NO: 87748 - protein, 124 aa, Arabidopsis thaliana
  peptide (1)..(124): Ceres Seq. ID no. 12703130
MFFEEHLHIDEEIRYCLAGSGYFDVRDLNDIWIRVWVKKGGLIVFPAGIYHRFTVDSDNYMKAMRLFVGGPVWTAYNRPHDHLPARYNDVLFSHIVTTKLTRSVVIYLSKEATKVFMYIQTAIL

SEQ ID NO: 87749 - DNA, 1719 bp, Arabidopsis thaliana
  misc_feature (1)..(1719): Ceres Seq. ID no. 12703142
  misc_feature (1)..(1719): Ortholog of  Ceres SEQ ID NO 13658720 as cited in SEQ ID NO 66306
atgaaaccttcaaaatcgcatcacaaggagaaaaccgctcgtcggagagaggagaaactagaggaatccgataatccaaaatacagagatcgtgctaaagaaagaagagagaatcaaaatcctgattatgatccatcagagcttagttctttccatgccgttgctcctcccggagctgtcgatatccgtgctgctgatgcacttaagatatctattgagaacagcaaatatcttggaggtgatgttgaacatacccatttagttaagggtttggattatgctttgttgaataaagtacgaagcgaaatcgttaagaaacctgatggtgaagatggtgatggtgggaagactagtgcgcctaaggaagatcagcgagttactttccgtaccatagctgcaaagtcagtttaccagtggattgttaagcctcagactatcatcaagtctaatgagatgtttcttcccggtagaatgacatttgtctatgatatggaaggtggctatacccatgacataccgaccacgttatataggagtaaagctgactgcccggtgcccgaggaatttgtcacagtcaatgttgatggttctgtgctagatcgaattgctaaaatcatgtcatatcttcgccttgggtcgtcggggaaagttctcaagaagaaaaagaaagaaaaagatgggaaaggaaagatgtcaactattgctaatgattatgatgaagacgacaataaatctaagattgagaatggatcttctgtgaacataagtgacagggaagttttacctcctcctccgccattaccacctgggataaaccatctggatttgagtacgaaacaagaagaaccccctgttgccaggacagacgatgatgacatatttgttggtgaaggcgtcgattacacggttcctggtaaagatgtgacacagagtcctatttctgaggacatggaagaatctcccagggataaggagaaagagaaggtaccttatttcgctgagcctgcttatggtccagtgcagccatctgctggtcaggaatggcaagatatgagtgcatatggtgcaatgcaaactcaaggactggctcctgggtaccccggagagtggcaggaataccaatatgcagagcaaactgggtatcaggagcagtaccttcaacctggaatggagggttacgaggtccaaccagaaaccgatgttttactagatcctcaactcatgtcgcaggaagagaaagataggggtttgggatcggttttcaagcgtgatgaccaaaggcttcaacagttgagggagagtgacgcaagggagaaagatccaacttttgtatccgagagttattcagagtgttatccaggttaccaagagtacaaccatgagattgtcggtagtgatgaagaacctgatttgtctaaaatggacatgggtggaaaggcaaagggtggtttacatcgatgggactttgagacagaagaggaatgggaaaaatataatgagcagaaggaagcgatgccaaaagcggcgttccaattcggggtaaagatgcaagatggtcgaaagacaaggaagcagaaccgtgaccgtgaccagaagctcaataatgaacttcaccagatcaataagatacttacgagaaagaagatggagaaggagggtggggatgttgcttctttggatgccgccgaggcacaaactcctaagagatccaagcattga

SEQ ID NO: 87750 - protein, 572 aa, Arabidopsis thaliana
  peptide (1)..(572): Ceres Seq. ID no. 12703143
MKPSKSHHKEKTARRREEKLEESDNPKYRDRAKERRENQNPDYDPSELSSFHAVAPPGAVDIRAADALKISIENSKYLGGDVEHTHLVKGLDYALLNKVRSEIVKKPDGEDGDGGKTSAPKEDQRVTFRTIAAKSVYQWIVKPQTIIKSNEMFLPGRMTFVYDMEGGYTHDIPTTLYRSKADCPVPEEFVTVNVDGSVLDRIAKIMSYLRLGSSGKVLKKKKKEKDGKGKMSTIANDYDEDDNKSKIENGSSVNISDREVLPPPPPLPPGINHLDLSTKQEEPPVARTDDDDIFVGEGVDYTVPGKDVTQSPISEDMEESPRDKEKEKVPYFAEPAYGPVQPSAGQEWQDMSAYGAMQTQGLAPGYPGEWQEYQYAEQTGYQEQYLQPGMEGYEVQPETDVLLDPQLMSQEEKDRGLGSVFKRDDQRLQQLRESDAREKDPTFVSESYSECYPGYQEYNHEIVGSDEEPDLSKMDMGGKAKGGLHRWDFETEEEWEKYNEQKEAMPKAAFQFGVKMQDGRKTRKQNRDRDQKLNNELHQINKILTRKKMEKEGGDVASLDAAEAQTPKRSKH

SEQ ID NO: 87751 - protein, 421 aa, Arabidopsis thaliana
  peptide (1)..(421): Ceres Seq. ID no. 12703144
MFLPGRMTFVYDMEGGYTHDIPTTLYRSKADCPVPEEFVTVNVDGSVLDRIAKIMSYLRLGSSGKVLKKKKKEKDGKGKMSTIANDYDEDDNKSKIENGSSVNISDREVLPPPPPLPPGINHLDLSTKQEEPPVARTDDDDIFVGEGVDYTVPGKDVTQSPISEDMEESPRDKEKEKVPYFAEPAYGPVQPSAGQEWQDMSAYGAMQTQGLAPGYPGEWQEYQYAEQTGYQEQYLQPGMEGYEVQPETDVLLDPQLMSQEEKDRGLGSVFKRDDQRLQQLRESDAREKDPTFVSESYSECYPGYQEYNHEIVGSDEEPDLSKMDMGGKAKGGLHRWDFETEEEWEKYNEQKEAMPKAAFQFGVKMQDGRKTRKQNRDRDQKLNNELHQINKILTRKKMEKEGGDVASLDAAEAQTPKRSKH

SEQ ID NO: 87752 - protein, 415 aa, Arabidopsis thaliana
  peptide (1)..(415): Ceres Seq. ID no. 12703145
MTFVYDMEGGYTHDIPTTLYRSKADCPVPEEFVTVNVDGSVLDRIAKIMSYLRLGSSGKVLKKKKKEKDGKGKMSTIANDYDEDDNKSKIENGSSVNISDREVLPPPPPLPPGINHLDLSTKQEEPPVARTDDDDIFVGEGVDYTVPGKDVTQSPISEDMEESPRDKEKEKVPYFAEPAYGPVQPSAGQEWQDMSAYGAMQTQGLAPGYPGEWQEYQYAEQTGYQEQYLQPGMEGYEVQPETDVLLDPQLMSQEEKDRGLGSVFKRDDQRLQQLRESDAREKDPTFVSESYSECYPGYQEYNHEIVGSDEEPDLSKMDMGGKAKGGLHRWDFETEEEWEKYNEQKEAMPKAAFQFGVKMQDGRKTRKQNRDRDQKLNNELHQINKILTRKKMEKEGGDVASLDAAEAQTPKRSKH

SEQ ID NO: 87753 - DNA, 1314 bp, Arabidopsis thaliana
  misc_feature (1)..(1314): Ceres Seq. ID no. 12703150
  misc_feature (1)..(1314): Ortholog of  Ceres SEQ ID NO 13597574 as cited in SEQ ID NO 64677
  misc_feature (1)..(1314): Ortholog of  Ceres SEQ ID NO 12779098 as cited in SEQ ID NO 67698
  misc_feature (1)..(1314): Ortholog of  Ceres SEQ ID NO 13591190 as cited in SEQ ID NO 68044
atggcagagattcgccagagaagagtgttgatggtcccagcaccgttccaaggccatttaccttcgatgatgaatctagcgtcctacctttcttcccaaggcttttcaatcacaatcgttagaaacgaattcaatttcaaagatatctcccataatttccctggtataaaattcttcaccatcaaggacggcttgtcagaatctgacgtgaagtctctgggtctccttgaatttgtcctggagcttaactctgtctgtgaacccctattgaaagagtttctaaccaaccatgatgatgttgttgactttatcatttatgatgaatttgtttacttccctcgacgtgttgcggaagatatgaatctgccaaagatggtctttagcccttcttccgccgctacctcgatcagccggtacgcaagatctcaactagaagaaacggtgccagagtttcatccctttcgtttcaaagatctgccttttacagcttatggatctatggagagattaatgatactttacgagaatgtaagcaatagagcctcatcttctggcataatacacaactcttcggattgcttagagaactcattcataacaactgcacaagagaaatggggagttccggtatacccggttggtccactccatatgaccaattccgcaatgtcatgtccaagtttatttgaagaagaaagaaactgtcttgaatggcttgagaagcaagaaacaagctcagtgatctacataagcatggggagcttggcgatgacacaagatatagaggctgtggagatggccatgggatttgtccagagtaatcaacccttcttgtgggtgatccgaccaggctctataaacggacaagaatctttagacttcttaccggaacagttcaaccaaacggtgaccgatggaagaggttttgttgtgaaatgggccccacaaaaagaggtattaaggcatagagcagtgggagggttttggaaccatggtggatggaactcgtgcttggagagcataagcagtggtgtaccaatgatttgtaggccgtattctggtgatcagagggtgaatactcgacttatgtcacatgtttggcaaaccgcgtatgagatcgaaggtgaattggaaagaggagctgttgagatggccgtgaggaggctcattgtggatcaagaaggtcaggagatgagaatgagagccaccatattgaaggaagaggttgaagcctctgtcacaaccgaaggctcttctcacaattctttaaacaatttggtccatgcaataatgatgcaaattgacgaacaatga

SEQ ID NO: 87754 - protein, 437 aa, Arabidopsis thaliana
  peptide (1)..(437): Ceres Seq. ID no. 12703151
MAEIRQRRVLMVPAPFQGHLPSMMNLASYLSSQGFSITIVRNEFNFKDISHNFPGIKFFTIKDGLSESDVKSLGLLEFVLELNSVCEPLLKEFLTNHDDVVDFIIYDEFVYFPRRVAEDMNLPKMVFSPSSAATSISRYARSQLEETVPEFHPFRFKDLPFTAYGSMERLMILYENVSNRASSSGIIHNSSDCLENSFITTAQEKWGVPVYPVGPLHMTNSAMSCPSLFEEERNCLEWLEKQETSSVIYISMGSLAMTQDIEAVEMAMGFVQSNQPFLWVIRPGSINGQESLDFLPEQFNQTVTDGRGFVVKWAPQKEVLRHRAVGGFWNHGGWNSCLESISSGVPMICRPYSGDQRVNTRLMSHVWQTAYEIEGELERGAVEMAVRRLIVDQEGQEMRMRATILKEEVEASVTTEGSSHNSLNNLVHAIMMQIDEQ

SEQ ID NO: 87755 - protein, 427 aa, Arabidopsis thaliana
  peptide (1)..(427): Ceres Seq. ID no. 12703152
MVPAPFQGHLPSMMNLASYLSSQGFSITIVRNEFNFKDISHNFPGIKFFTIKDGLSESDVKSLGLLEFVLELNSVCEPLLKEFLTNHDDVVDFIIYDEFVYFPRRVAEDMNLPKMVFSPSSAATSISRYARSQLEETVPEFHPFRFKDLPFTAYGSMERLMILYENVSNRASSSGIIHNSSDCLENSFITTAQEKWGVPVYPVGPLHMTNSAMSCPSLFEEERNCLEWLEKQETSSVIYISMGSLAMTQDIEAVEMAMGFVQSNQPFLWVIRPGSINGQESLDFLPEQFNQTVTDGRGFVVKWAPQKEVLRHRAVGGFWNHGGWNSCLESISSGVPMICRPYSGDQRVNTRLMSHVWQTAYEIEGELERGAVEMAVRRLIVDQEGQEMRMRATILKEEVEASVTTEGSSHNSLNNLVHAIMMQIDEQ

SEQ ID NO: 87756 - protein, 415 aa, Arabidopsis thaliana
  peptide (1)..(415): Ceres Seq. ID no. 12703153
MMNLASYLSSQGFSITIVRNEFNFKDISHNFPGIKFFTIKDGLSESDVKSLGLLEFVLELNSVCEPLLKEFLTNHDDVVDFIIYDEFVYFPRRVAEDMNLPKMVFSPSSAATSISRYARSQLEETVPEFHPFRFKDLPFTAYGSMERLMILYENVSNRASSSGIIHNSSDCLENSFITTAQEKWGVPVYPVGPLHMTNSAMSCPSLFEEERNCLEWLEKQETSSVIYISMGSLAMTQDIEAVEMAMGFVQSNQPFLWVIRPGSINGQESLDFLPEQFNQTVTDGRGFVVKWAPQKEVLRHRAVGGFWNHGGWNSCLESISSGVPMICRPYSGDQRVNTRLMSHVWQTAYEIEGELERGAVEMAVRRLIVDQEGQEMRMRATILKEEVEASVTTEGSSHNSLNNLVHAIMMQIDEQ

SEQ ID NO: 87757 - DNA, 1530 bp, Arabidopsis thaliana
  misc_feature (1)..(1530): Ceres Seq. ID no. 12703185
  misc_feature (1)..(1530): Ortholog of  Ceres SEQ ID NO 15175923 as cited in SEQ ID NO 54037
  misc_feature (1)..(1530): Ortholog of  Ceres SEQ ID NO 13503610 as cited in SEQ ID NO 62416
  misc_feature (1)..(1530): Ortholog of  Ceres SEQ ID NO 13657610 as cited in SEQ ID NO 66165
  misc_feature (1)..(1530): Ortholog of  Ceres SEQ ID NO 13598312 as cited in SEQ ID NO 68448
  misc_feature (1)..(1530): Ortholog of  Ceres SEQ ID NO 13596100 as cited in SEQ ID NO 68573
atggatgtagagcaaaagaaaccgttaatcgaatcatcagatcgtaatctacctgatttcaaaaaatcagtgaagcttaaatatgtgaagcttggttaccattaccttatcactcatggaatgtaccttttcctctccccattagtacttgtaatcgctgcacagatttcaactttctctgtcaccgatcttcgtagcctctgggagcatcttcagtacaatcttatctcagtggttgtttgttctatgctgcttgttttcttaatgactatttacttcatgactcgaccacgtcctgtctacttggtgaacttctcgtgctttaaacccgatgagtcacgaaaatgcactaaaaagatctttatggatcgttctaaactcactggctctttcacagaggagaatcttgagttccagcgtaagattctacaacgttcggggctcggggaatcgacttacttacccgaggctgtacttaatgttccgcctaacccgtgtatgaaagaagctcgaaaagaggccgagactgttatgtttggagctattgatgagcttcttgcgaagacgaatgtgaacccgaaggatattgggatcttgattgttaactgtagtttgtttaacccgacaccttcgttatctgctatggttgttaatcactataagctccgcgggaatatacttagttacaacttgggaggaatgggttgcagtgctggtttgatttctattgatcttgctaaacatcttcttcactctattcccaacacttatgcaatggtgattagtatggagaacattacgttgaactggtatttcgggaatgaccggtcgaagcttgtttctaattgtctgtttagaatgggaggtgcagcgattcttctttcgaacaaaagatgggacagaagaagatcgaaatatgagcttgttgatacggttaggactcacaagggagctgatgataagtgttttggttgcataactcaagaagaggattccgcaagtaagattggtgttaccttgtcgaaagaacttatggctgttgcgggtgatgctctaaagacaaatattacgacgttaggaccactggttttaccgacatctgaacagcttctgttctttgcaacgttagtgggaagaaaactcttcaagatgaagatcaagccttacatcccagacttcaaactagcgtttgagcatttctgcatccacgcaggagggagagctgttcttgatgaattggagaagaacttgaaactcacagagtggcatatggagccctcgaggatgacactctaccgttttggtaacacgtccagttcttctttgtggtatgaattagcatatagtgaggccaaaggaaggatcaagaaaggtgatagaatttggcagatagcttttggttcggggttcaagtgcaacagctcggtttggagagcggtaaggtcggtaaaccctaagaaagagaagaacccatggatggatgaaattcatgagttcccagttgaagtccccaaggtctccacaatctag

SEQ ID NO: 87758 - protein, 509 aa, Arabidopsis thaliana; identical to SEQ ID NO: 21137
  peptide (1)..(509): Ceres Seq. ID no. 12703186

SEQ ID NO: 87759 - protein, 469 aa, Arabidopsis thaliana; identical to SEQ ID NO: 21138
  peptide (1)..(469): Ceres Seq. ID no. 12703187

SEQ ID NO: 87760 - protein, 427 aa, Arabidopsis thaliana; identical to SEQ ID NO: 21139
  peptide (1)..(427): Ceres Seq. ID no. 12703188

SEQ ID NO: 87761 - DNA, 1488 bp, Arabidopsis thaliana
  misc_feature (1)..(1488): Ceres Seq. ID no. 12703193
  misc_feature (1)..(1488): Ortholog of  Ceres SEQ ID NO 15177692 as cited in SEQ ID NO 52664
atggctaattctagtatcttttacaaagataatgagtccgattatgagagctccaccgtcggaccagactcgagccgccgtacgagttggctgagcagctctttcacggctagccctagttgtagctccatatctcatctaagtaaccatggtctcaacagctataaccaatcaaagcctcacaaagccaaccaagtcgcatgggaagctatggccaggctccgtcggtgctgcggccgtgcggtagggttagaacattttcggcttttaaagaggttgggaagtggtgacatcggaagtgtgtacctctgccaaatacgtggaagtcccgagacggcgttttatgctatgaaagttgtggataaggaagctgttgcggtgaagaaaaagcttggaagggcagagatggagaagaagattttagggatgcttgatcatcctttttgccctacattgtacgcagcttttgaggcttctcattactcttttctcgtcatggagtattgtcccggcggtgatctctacgccgtccgcctccgccaaccgtctaaacgtttcactatctcctccacaaggttttacgcagcagaaactctagtggccttagagtatctccacatgatgggaattgtgtatagagacctaaagccagagaacgtgttgatcagagaagatggtcatgtaatgctctcagatttcgatctctccttcaaatgtgacgtcgttccacaattcctcagcgacaacgaccgtgaccgtggccatcaagaagacgatgacgacatcagcattcgccgtaaatgctctacaccttcttgcacgacaactccattaaaccccgtcatctcctgcttctctcccacttctagcagaagaagaaagaagaatgttgttaccacaacaatacacgaaaacgcagctgacatctctggtggatgtccatcaatatttgccgaaccaatcaatgctcgctctaagtcattcgtgggaacacatgagtacttggcacccgaagtaatctcagggcaagggcatgggagtgcagtagattggtggacttacgggatatttctatacgagatgatatttggtaggacaccgtttaaaggcgataacaacgagaagacgttagtaaacattctgaaagcacccttgacattcccaaaggttatagtgaatagccccaaagagtacgaagatatggtgaatgctcaagatcttattataaaattactggtgaagaaccctaagaagaggttagggagtctcaaaggctctattgagatcaaaagacatgagttttttgaaggtgttaactgggcactaatcaggtcaataaagccaccttgggttcctaaagaagagactagtcacaagactaaaggtgataatcgcagcgttaattattatcttccaccaaggtttatgatgagtaggaaagaaagaaatgagccttaccatgtgtctaattattttgattatttttaa

SEQ ID NO: 87762 - protein, 495 aa, Arabidopsis thaliana
  peptide (1)..(495): Ceres Seq. ID no. 12703194
MANSSIFYKDNESDYESSTVGPDSSRRTSWLSSSFTASPSCSSISHLSNHGLNSYNQSKPHKANQVAWEAMARLRRCCGRAVGLEHFRLLKRLGSGDIGSVYLCQIRGSPETAFYAMKVVDKEAVAVKKKLGRAEMEKKILGMLDHPFCPTLYAAFEASHYSFLVMEYCPGGDLYAVRLRQPSKRFTISSTRFYAAETLVALEYLHMMGIVYRDLKPENVLIREDGHVMLSDFDLSFKCDVVPQFLSDNDRDRGHQEDDDDISIRRKCSTPSCTTTPLNPVISCFSPTSSRRRKKNVVTTTIHENAADISGGCPSIFAEPINARSKSFVGTHEYLAPEVISGQGHGSAVDWWTYGIFLYEMIFGRTPFKGDNNEKTLVNILKAPLTFPKVIVNSPKEYEDMVNAQDLIIKLLVKNPKKRLGSLKGSIEIKRHEFFEGVNWALIRSIKPPWVPKEETSHKTKGDNRSVNYYLPPRFMMSRKERNEPYHVSNYFDYF

SEQ ID NO: 87763 - protein, 425 aa, Arabidopsis thaliana
  peptide (1)..(425): Ceres Seq. ID no. 12703195
MARLRRCCGRAVGLEHFRLLKRLGSGDIGSVYLCQIRGSPETAFYAMKVVDKEAVAVKKKLGRAEMEKKILGMLDHPFCPTLYAAFEASHYSFLVMEYCPGGDLYAVRLRQPSKRFTISSTRFYAAETLVALEYLHMMGIVYRDLKPENVLIREDGHVMLSDFDLSFKCDVVPQFLSDNDRDRGHQEDDDDISIRRKCSTPSCTTTPLNPVISCFSPTSSRRRKKNVVTTTIHENAADISGGCPSIFAEPINARSKSFVGTHEYLAPEVISGQGHGSAVDWWTYGIFLYEMIFGRTPFKGDNNEKTLVNILKAPLTFPKVIVNSPKEYEDMVNAQDLIIKLLVKNPKKRLGSLKGSIEIKRHEFFEGVNWALIRSIKPPWVPKEETSHKTKGDNRSVNYYLPPRFMMSRKERNEPYHVSNYFDYF

SEQ ID NO: 87764 - protein, 379 aa, Arabidopsis thaliana
  peptide (1)..(379): Ceres Seq. ID no. 12703196
MKVVDKEAVAVKKKLGRAEMEKKILGMLDHPFCPTLYAAFEASHYSFLVMEYCPGGDLYAVRLRQPSKRFTISSTRFYAAETLVALEYLHMMGIVYRDLKPENVLIREDGHVMLSDFDLSFKCDVVPQFLSDNDRDRGHQEDDDDISIRRKCSTPSCTTTPLNPVISCFSPTSSRRRKKNVVTTTIHENAADISGGCPSIFAEPINARSKSFVGTHEYLAPEVISGQGHGSAVDWWTYGIFLYEMIFGRTPFKGDNNEKTLVNILKAPLTFPKVIVNSPKEYEDMVNAQDLIIKLLVKNPKKRLGSLKGSIEIKRHEFFEGVNWALIRSIKPPWVPKEETSHKTKGDNRSVNYYLPPRFMMSRKERNEPYHVSNYFDYF

SEQ ID NO: 87765 - DNA, 1269 bp, Arabidopsis thaliana
  misc_feature (1)..(1269): Ceres Seq. ID no. 12703206
  misc_feature (1)..(1269): Ortholog of  Ceres SEQ ID NO 13596030 as cited in SEQ ID NO 62043
atgtcagagccaatcaaaaacatagttctggtaggccgtactggtaatggaaaaagcagcacagggaacacccttcttggtacaaagcagttcaaatctaaaaaccaggcaaaaggcgttaccatgatatgtgaaatgtacagagctgcaatacaagatggtccaataatcaatgtcattgacactcctggtttgtgcgactcgttcgtgcccggagacgacataagtaacgaaataatcaattgcttaacaatggcggaagaaggtatacatgctgtgttgcttgttctatctgctaggggtcgcatttcaaaggaggaggagtctacagttaataccttgcagtgcatattcggcagccaaattcttgactattgcattgttgtgttcactggcggtgacgatttggaagaagacgatcagacattagacgattatttcagagctggttgccctgaattcttgacgaaagttctcagactctgtggtggacggaaggtgctatttgataacaaaagtaaagatgaaaagaagaaggttgagcaagttaagcagcttctagcccgtgtggaaaatgtaggagagcaaactggtggaataccgtatacttatcagttgcaccgtaagataaaggaagaaaatgatgaaaggctaagggaagaagaaagggtgattgaatctaaaaaccgtgctgaagcagaactagcagagatgcaacagaatttactaatggaaaaggagaagttacaaatggaggaggcgaaaaacaaacagttgattgcacaagcggcgaatcgcatgatctgcgcaagggatcttaacatcgaatggtctcatagcgaagagcattggaaatgggtaaatctggatcacaacatatcaagcaatacattcgtcgaagttgctgagcttctaggagtttattggtttgacgtaagtggaagtttggacacgacggaaatggcaccatggacacattacgaggttctgttcgttgttaatttaaaagactcagcttttaaatggaatgcagcggtgaaaatgaacctgttttacatcaacagtaggccaggaggtccaggaacgcaagagcgagctgttgacatgaggcagcatattgggaaaggatgggtaactatacacgccggtgaattcattacgacaccggagaatgtcggactgattgggttccgcatgtctgaggtcgactccggcgataacaggggagggctcattgtcaaaggtgttttaattcgtcctataaactaa

SEQ ID NO: 87766 - protein, 422 aa, Arabidopsis thaliana
  peptide (1)..(422): Ceres Seq. ID no. 12703207
MSEPIKNIVLVGRTGNGKSSTGNTLLGTKQFKSKNQAKGVTMICEMYRAAIQDGPIINVIDTPGLCDSFVPGDDISNEIINCLTMAEEGIHAVLLVLSARGRISKEEESTVNTLQCIFGSQILDYCIVVFTGGDDLEEDDQTLDDYFRAGCPEFLTKVLRLCGGRKVLFDNKSKDEKKKVEQVKQLLARVENVGEQTGGIPYTYQLHRKIKEENDERLREEERVIESKNRAEAELAEMQQNLLMEKEKLQMEEAKNKQLIAQAANRMICARDLNIEWSHSEEHWKWVNLDHNISSNTFVEVAELLGVYWFDVSGSLDTTEMAPWTHYEVLFVVNLKDSAFKWNAAVKMNLFYINSRPGGPGTQERAVDMRQHIGKGWVTIHAGEFITTPENVGLIGFRMSEVDSGDNRGGLIVKGVLIRPIN

SEQ ID NO: 87767 - protein, 381 aa, Arabidopsis thaliana
  peptide (1)..(381): Ceres Seq. ID no. 12703208
MICEMYRAAIQDGPIINVIDTPGLCDSFVPGDDISNEIINCLTMAEEGIHAVLLVLSARGRISKEEESTVNTLQCIFGSQILDYCIVVFTGGDDLEEDDQTLDDYFRAGCPEFLTKVLRLCGGRKVLFDNKSKDEKKKVEQVKQLLARVENVGEQTGGIPYTYQLHRKIKEENDERLREEERVIESKNRAEAELAEMQQNLLMEKEKLQMEEAKNKQLIAQAANRMICARDLNIEWSHSEEHWKWVNLDHNISSNTFVEVAELLGVYWFDVSGSLDTTEMAPWTHYEVLFVVNLKDSAFKWNAAVKMNLFYINSRPGGPGTQERAVDMRQHIGKGWVTIHAGEFITTPENVGLIGFRMSEVDSGDNRGGLIVKGVLIRPIN

SEQ ID NO: 87768 - protein, 377 aa, Arabidopsis thaliana
  peptide (1)..(377): Ceres Seq. ID no. 12703209
MYRAAIQDGPIINVIDTPGLCDSFVPGDDISNEIINCLTMAEEGIHAVLLVLSARGRISKEEESTVNTLQCIFGSQILDYCIVVFTGGDDLEEDDQTLDDYFRAGCPEFLTKVLRLCGGRKVLFDNKSKDEKKKVEQVKQLLARVENVGEQTGGIPYTYQLHRKIKEENDERLREEERVIESKNRAEAELAEMQQNLLMEKEKLQMEEAKNKQLIAQAANRMICARDLNIEWSHSEEHWKWVNLDHNISSNTFVEVAELLGVYWFDVSGSLDTTEMAPWTHYEVLFVVNLKDSAFKWNAAVKMNLFYINSRPGGPGTQERAVDMRQHIGKGWVTIHAGEFITTPENVGLIGFRMSEVDSGDNRGGLIVKGVLIRPIN

SEQ ID NO: 87769 - DNA, 2709 bp, Arabidopsis thaliana
  misc_feature (1)..(2709): Ceres Seq. ID no. 12703268
  misc_feature (1)..(2709): Ortholog of  Ceres SEQ ID NO 13596392 as cited in SEQ ID NO 62136
  misc_feature (1)..(2709): Ortholog of  Ceres SEQ ID NO 13654360 as cited in SEQ ID NO 67980
  misc_feature (1)..(2709): Ortholog of  Ceres SEQ ID NO 13596394 as cited in SEQ ID NO 68561
atggatttggattcttcaatggtaccagagaatgatcaagatcctattgctacgtctgagaatcaatctcctatggaggagaaagaagaagcgtctgagcaacaaaccggatccgaatccgaatcggcgtctttgactccttctcttcctcctccttcgcagcaacaacaacaacagcagcaacagccgcaggtaacggcggtggttggtccgagatgtgcgccaacgtattcggttgtgaatgctataatcgagaagaaagaagatggtcctggtcctagatgtggacatacgctgacggcggttcctgctgttggtgaagaagggacgtcttcttatattggcccgagactgatcttgtttggtggtgctactgctcttgagggtaattctggaggaacgggaacacctacttcagctggaagtgctggcattcggttagctggtgcaaccgctgatgttcattgttatgatgttctttctaataagtggtcgaggcttacaccttatggagaaccacctagtccaagagctgctcatgttgctactgctgttgggaccatggtagtaattcaggggggaataggtcctgctggtttatcagctgaggatcttcacgttcttgatctcacacagcaacggccacgatggcacagggttgttgttcagggtcctggaccaggaccacgttatggacatgtcatggcactggtaggacagaggtatctcatggcaattggtggaaatgatgggaaacgtccattagctgatgtatgggctttggacactgctgccaaaccttatgaatggcgtaagctggaaccggaaggggaaggtccaccaccatgcatgtatgcaactgcaagtgcgcgatctgatggccttcttcttctctgtggtggaagagatgcgaatagtgtgcccctagcaagtgcatatggacttgccaagcacagagatggacgttgggaatgggccatagccccaggtgtctccccttctgccagataccagcatgctgcagtctttgtaaatgcaagactccatgtctctggtggggcacttggtggtggacgcatggtagaagactcgtccagtgttgcagtgttggatactgcagcaggtgtttggtgtgatacaaaatcggttgttactagtcctagaactggtaggtatagtgctgacgcagctggtggtgatgcttctgttgagctgactaggcgatgcaggcatgctgctgctgcagtgggtgatttgatattcatctatggtgggttgcgtggagcggaaacaacatctgctgcctctcatgctgctgctgcagcagcagcaacaaacacgccacctggccgttcacctggaagatatggattttctgatgaaaggacaggggagctaccagaatcagctcctgacgctgtggtgctgggaagccctgttgcaccccctgaattcggggttcgacttcatcatagagctgtggtggttgctgcagaaacaggtggagccttaggtggaatggttagacagttatccattgatcaatttgaaaatgagggacgccgtgttagttatgggacacccgaaagtgcaacagcagctaggaaattattagatcgtcagatgtcaatcaatagtgttccgaaaaaggttgtagctcatcttttgaagcctcgggggtggaagcctccagttcgtcgccagtttttcttggattgcaatgaaatagctgatctttgcgacagtgcagaacgtatcttctcaagcgaacctactgtgttacagcttaaagctcctattaagatatttggtgatttgcatggccagtttggggatctcatgcgcctttttgatgaatatggttcaccatcaacagctggagacatatcatacatcgattacctcttcttaggagactatgttgatcggggtcaacacagcctagagacaattacacttctgcttgctttaaaggttgaataccaacataacgtacacctgattcgtggaaatcatgaagctgccgacattaatgcactttttggtttccggatagagtgtattgagcgaatgggtgaacgtgatgggatctgggtgtggcatcgaataaaccgtttattcaattggctacctctggctgcactgattgagaagaaaatcatctgtatgcatgggggaattggtcggtcgataaatcatgtggagcagatagaaaatatccaacgtccaattacgatggaagcaggctcaattgtacttatggatttattatggtcggatccaactgaaaatgacagtgtcgaaggtttaaggcccaatgctagaggccctgggttggttacttttgggcctgaccgtgtcatggagttttgcaacaacaatgatctgcaattgattgtacgtgcgcatgaatgcgtgatggacggatttgagcgttttgcccaaggtcatttgataacgctcttttcggcaacaaattattgtggtaccgcaaacaatgccggggctatcttggtgttggggagagatcttgtggtggttcctaagcttatccatccattgcctccagcgataacctcacctgaaacttcaccagaaagacatatagaggatacatggatgcaggagttaaacgtaaatagaccaccaacaccaacaagaggacgcccacaaaatccaaatgaccgcggctctcttgcttggatataa

SEQ ID NO: 87770 - protein, 902 aa, Arabidopsis thaliana
  peptide (1)..(902): Ceres Seq. ID no. 12703269
MDLDSSMVPENDQDPIATSENQSPMEEKEEASEQQTGSESESASLTPSLPPPSQQQQQQQQQPQVTAVVGPRCAPTYSVVNAIIEKKEDGPGPRCGHTLTAVPAVGEEGTSSYIGPRLILFGGATALEGNSGGTGTPTSAGSAGIRLAGATADVHCYDVLSNKWSRLTPYGEPPSPRAAHVATAVGTMVVIQGGIGPAGLSAEDLHVLDLTQQRPRWHRVVVQGPGPGPRYGHVMALVGQRYLMAIGGNDGKRPLADVWALDTAAKPYEWRKLEPEGEGPPPCMYATASARSDGLLLLCGGRDANSVPLASAYGLAKHRDGRWEWAIAPGVSPSARYQHAAVFVNARLHVSGGALGGGRMVEDSSSVAVLDTAAGVWCDTKSVVTSPRTGRYSADAAGGDASVELTRRCRHAAAAVGDLIFIYGGLRGAETTSAASHAAAAAAATNTPPGRSPGRYGFSDERTGELPESAPDAVVLGSPVAPPEFGVRLHHRAVVVAAETGGALGGMVRQLSIDQFENEGRRVSYGTPESATAARKLLDRQMSINSVPKKVVAHLLKPRGWKPPVRRQFFLDCNEIADLCDSAERIFSSEPTVLQLKAPIKIFGDLHGQFGDLMRLFDEYGSPSTAGDISYIDYLFLGDYVDRGQHSLETITLLLALKVEYQHNVHLIRGNHEAADINALFGFRIECIERMGERDGIWVWHRINRLFNWLPLAALIEKKIICMHGGIGRSINHVEQIENIQRPITMEAGSIVLMDLLWSDPTENDSVEGLRPNARGPGLVTFGPDRVMEFCNNNDLQLIVRAHECVMDGFERFAQGHLITLFSATNYCGTANNAGAILVLGRDLVVVPKLIHPLPPAITSPETSPERHIEDTWMQELNVNRPPTPTRGRPQNPNDRGSLAWI

SEQ ID NO: 87771 - protein, 896 aa, Arabidopsis thaliana
  peptide (1)..(896): Ceres Seq. ID no. 12703270
MVPENDQDPIATSENQSPMEEKEEASEQQTGSESESASLTPSLPPPSQQQQQQQQQPQVTAVVGPRCAPTYSVVNAIIEKKEDGPGPRCGHTLTAVPAVGEEGTSSYIGPRLILFGGATALEGNSGGTGTPTSAGSAGIRLAGATADVHCYDVLSNKWSRLTPYGEPPSPRAAHVATAVGTMVVIQGGIGPAGLSAEDLHVLDLTQQRPRWHRVVVQGPGPGPRYGHVMALVGQRYLMAIGGNDGKRPLADVWALDTAAKPYEWRKLEPEGEGPPPCMYATASARSDGLLLLCGGRDANSVPLASAYGLAKHRDGRWEWAIAPGVSPSARYQHAAVFVNARLHVSGGALGGGRMVEDSSSVAVLDTAAGVWCDTKSVVTSPRTGRYSADAAGGDASVELTRRCRHAAAAVGDLIFIYGGLRGAETTSAASHAAAAAAATNTPPGRSPGRYGFSDERTGELPESAPDAVVLGSPVAPPEFGVRLHHRAVVVAAETGGALGGMVRQLSIDQFENEGRRVSYGTPESATAARKLLDRQMSINSVPKKVVAHLLKPRGWKPPVRRQFFLDCNEIADLCDSAERIFSSEPTVLQLKAPIKIFGDLHGQFGDLMRLFDEYGSPSTAGDISYIDYLFLGDYVDRGQHSLETITLLLALKVEYQHNVHLIRGNHEAADINALFGFRIECIERMGERDGIWVWHRINRLFNWLPLAALIEKKIICMHGGIGRSINHVEQIENIQRPITMEAGSIVLMDLLWSDPTENDSVEGLRPNARGPGLVTFGPDRVMEFCNNNDLQLIVRAHECVMDGFERFAQGHLITLFSATNYCGTANNAGAILVLGRDLVVVPKLIHPLPPAITSPETSPERHIEDTWMQELNVNRPPTPTRGRPQNPNDRGSLAWI

SEQ ID NO: 87772 - protein, 878 aa, Arabidopsis thaliana
  peptide (1)..(878): Ceres Seq. ID no. 12703271
MEEKEEASEQQTGSESESASLTPSLPPPSQQQQQQQQQPQVTAVVGPRCAPTYSVVNAIIEKKEDGPGPRCGHTLTAVPAVGEEGTSSYIGPRLILFGGATALEGNSGGTGTPTSAGSAGIRLAGATADVHCYDVLSNKWSRLTPYGEPPSPRAAHVATAVGTMVVIQGGIGPAGLSAEDLHVLDLTQQRPRWHRVVVQGPGPGPRYGHVMALVGQRYLMAIGGNDGKRPLADVWALDTAAKPYEWRKLEPEGEGPPPCMYATASARSDGLLLLCGGRDANSVPLASAYGLAKHRDGRWEWAIAPGVSPSARYQHAAVFVNARLHVSGGALGGGRMVEDSSSVAVLDTAAGVWCDTKSVVTSPRTGRYSADAAGGDASVELTRRCRHAAAAVGDLIFIYGGLRGAETTSAASHAAAAAAATNTPPGRSPGRYGFSDERTGELPESAPDAVVLGSPVAPPEFGVRLHHRAVVVAAETGGALGGMVRQLSIDQFENEGRRVSYGTPESATAARKLLDRQMSINSVPKKVVAHLLKPRGWKPPVRRQFFLDCNEIADLCDSAERIFSSEPTVLQLKAPIKIFGDLHGQFGDLMRLFDEYGSPSTAGDISYIDYLFLGDYVDRGQHSLETITLLLALKVEYQHNVHLIRGNHEAADINALFGFRIECIERMGERDGIWVWHRINRLFNWLPLAALIEKKIICMHGGIGRSINHVEQIENIQRPITMEAGSIVLMDLLWSDPTENDSVEGLRPNARGPGLVTFGPDRVMEFCNNNDLQLIVRAHECVMDGFERFAQGHLITLFSATNYCGTANNAGAILVLGRDLVVVPKLIHPLPPAITSPETSPERHIEDTWMQELNVNRPPTPTRGRPQNPNDRGSLAWI

SEQ ID NO: 87773 - DNA, 2343 bp, Arabidopsis thaliana
  misc_feature (1)..(2343): Ceres Seq. ID no. 12703341
  misc_feature (1)..(2343): Ortholog of  Ceres SEQ ID NO 12586556 as cited in SEQ ID NO 64667
  misc_feature (1)..(2343): Ortholog of  Ceres SEQ ID NO 13660894 as cited in SEQ ID NO 67475
atggagatggactgttctatcttttcctctgttttaaaggtttctgctactttatgtgatgagctttttggtagacagttgcattgccagtgtataaagtttgggtttttagatgatgtaagtgtgggaacatcgctggttgatacgtatatgaaaggtagtaactttaaggacggaaggaaagtttttgatgaaatgaaagagaggaatgttgttacttggactacattgataagcgggtatgctcggaattcgatgaatgatgaagttttgacattgtttatgagaatgcagaacgaagggactcagccgaactcatttacttttgcagctgctcttggagttttggctgaagaaggagtgggtgggaggggacttcaggtacatacagttgttgtaaagaacggtttagataaaacgattccggtttctaattctctgattaatctgtatctcaagtgtgggaatgttaggaaagctagaattttgtttgataaaacagaagtaaagagtgtggttacttggaatagtatgatttcgggatatgcagcgaacgggcttgatttagaagcgttgggaatgttttactctatgaggcttaattatgtgcggttatctgaatcgagctttgcttccgttatcaagctctgcgctaacctcaaagaactgaggtttacagaacagctccattgcagtgttgtaaaatacgggtttttgtttgatcagaatataaggacggctctaatggtagcgtatagtaaatgtacggcgatgcttgatgctcttaggctgttcaaagagataggatgcgtaggaaatgttgtgtcgtggacagcgatgattagtggtttcttgcagaatgatgggaaagaggaagcagtagatttattttctgaaatgaagaggaaaggtgttagaccaaacgaattcacttattctgtcattctcacagctcttcctgtgatttctccatcagaggtccacgcacaggttgtaaagactaactacgagagatcttcaactgttggaactgctcttttagatgcttatgtgaagttaggcaaagtagaagaggctgcaaaagtttttagcggtattgatgataaagacattgtggcttggtcagcgatgcttgcaggatatgctcagaccggagagacagaggcagctataaagatgtttggtgagctaacaaaaggagggataaaaccgaacgagttcacattctctagcatccttaacgtgtgtgcggctactaatgcgtctatgggacagggaaagcaattccacgggttcgctataaaatcaagactcgatagttctctgtgtgttagtagtgctcttctaaccatgtatgcaaagaaaggcaacatcgagagtgcggaagaagtctttaaaaggcagagagagaaagatctagtatcatggaattcgatgatctctgggtatgcacaacacgggcaagctatgaaggctctcgatgttttcaaggagatgaagaagagaaaggtgaaaatggatggtgtaacattcatcggagtatttgctgcttgtacacatgcggggttagtagaagaaggcgaaaaatatttcgatataatggtgagagactgcaagatagcacctacaaaggagcataatagttgtatggtggatctatacagccgagctgggcaacttgaaaaggctatgaaggtcatagaaaacatgccaaatccggctggttccaccatttggagaacaattctagctgcatgccgtgtgcacaagaaaacagagctagggagattagctgcagagaagatcattgcgatgaagccagaagattcagcggcatatgtattattgtctaacatgtatgcagagtcaggagattggcaagagagagccaaagtaaggaagctgatgaatgagaggaacgtgaagaaagaacctggttatagttggattgaggtcaagaacaagacttactcgttcttggcgggtgatcggtctcatcctctcaaagatcaaatctatatgaagctagaagatttaagtacacggctgaaggatttagggtatgagccagatacaagttatgtgcttcaagatattgatgatgagcataaagaagcagttcttgctcagcatagtgagagattagctattgctttcgggttgatagctacaccaaagggaagccctcttttgatcattaagaaccttagggtttgtggagattgtcatttagtgatcaaattaattgcaaagattgaagaaagagagatcgtagttagagattcaaatcggtttcatcactttagcagtgatggagtttgctcatgtggagacttttggtga

SEQ ID NO: 87774 - protein, 780 aa, Arabidopsis thaliana; identical to SEQ ID NO: 83750
  peptide (1)..(780): Ceres Seq. ID no. 12703342

SEQ ID NO: 87775 - protein, 778 aa, Arabidopsis thaliana; identical to SEQ ID NO: 83751
  peptide (1)..(778): Ceres Seq. ID no. 12703343

SEQ ID NO: 87776 - protein, 730 aa, Arabidopsis thaliana
  peptide (1)..(730): Ceres Seq. ID no. 12703344
MKGSNFKDGRKVFDEMKERNVVTWTTLISGYARNSMNDEVLTLFMRMQNEGTQPNSFTFAAALGVLAEEGVGGRGLQVHTVVVKNGLDKTIPVSNSLINLYLKCGNVRKARILFDKTEVKSVVTWNSMISGYAANGLDLEALGMFYSMRLNYVRLSESSFASVIKLCANLKELRFTEQLHCSVVKYGFLFDQNIRTALMVAYSKCTAMLDALRLFKEIGCVGNVVSWTAMISGFLQNDGKEEAVDLFSEMKRKGVRPNEFTYSVILTALPVISPSEVHAQVVKTNYERSSTVGTALLDAYVKLGKVEEAAKVFSGIDDKDIVAWSAMLAGYAQTGETEAAIKMFGELTKGGIKPNEFTFSSILNVCAATNASMGQGKQFHGFAIKSRLDSSLCVSSALLTMYAKKGNIESAEEVFKRQREKDLVSWNSMISGYAQHGQAMKALDVFKEMKKRKVKMDGVTFIGVFAACTHAGLVEEGEKYFDIMVRDCKIAPTKEHNSCMVDLYSRAGQLEKAMKVIENMPNPAGSTIWRTILAACRVHKKTELGRLAAEKIIAMKPEDSAAYVLLSNMYAESGDWQERAKVRKLMNERNVKKEPGYSWIEVKNKTYSFLAGDRSHPLKDQIYMKLEDLSTRLKDLGYEPDTSYVLQDIDDEHKEAVLAQHSERLAIAFGLIATPKGSPLLIIKNLRVCGDCHLVIKLIAKIEEREIVVRDSNRFHHFSSDGVCSCGDFW

SEQ ID NO: 87777 - DNA, 1241 bp, Arabidopsis thaliana
  misc_feature (1)..(1241): Ceres Seq. ID no. 12703423
  misc_feature (1)..(1241): Ortholog of  Ceres SEQ ID NO 14316550 as cited in SEQ ID NO 57662
  misc_feature (1)..(1241): Ortholog of  Ceres SEQ ID NO 14302333 as cited in SEQ ID NO 63121
  misc_feature (1)..(1241): Ortholog of  Ceres SEQ ID NO 13596976 as cited in SEQ ID NO 63125
  misc_feature (1)..(1241): Ortholog of  Ceres SEQ ID NO 15179988 as cited in SEQ ID NO 0
aatttatatatgagtatcgaattccaattgcggaagaaaggagaaaataatctccggtttgagctgcgtcgacgagatctatcgtcaggatctcagatttgttgttacactcttgctcaagtctggagacatgagttctccgggaacgagtatgttcaccaatttcactaagctctgcaaaggacttgccctggtacttgtggtgggacacctcgtggttcagttcattcccgctaccgtcccataccttgctctgattccggcgaggactattccttttgcctggaatctgataacaagcggctattttgaactctcagtatatggggttgtcttcagcaccgtttctctcctttttatgggaaagttcctggaacctgtctggggttccacggagttccttaagttcatctttgtggtgaacttccttacgtatctctgtgttttcgttacagccattgccttatactacataacgaggctggaagtttacctatatatgccctttgctggttttcatggtgtcttggcaggccttcttgtagggataaagcagataatacctgaccaggagatattgctgttaaagataaaagcaaagtggttgccctcaattatgctaattttgtcaatagcctcaagcttcttcacactagattcagcagcatatcttcccactttgatatttggtacatatatgggctggttatacctcaggtacctacagaggagaccagaaacaaagctcagaggtgatccaagtgatgactttgccttctctactttctttcctgaacttctcaggccagtaattgaccccattgccttaatctttcaccggatgctttgtggaagatcaaatgccaccagtgaagaccatgattattctaccagtggtgcaccattgccaggttctgattctgctgaagcatccaggaggagagaaagaggggcaagagctctagaggagagactaggaacggaaagattggttcctgcaaggaacaaagatgaattgcagagtgatggtttagataacgtataagtggagattgcaataagcattttgaagaagctgttgttggttcttacttgtgttcatgtggacagtttttttttgttttttttttttgttaatgaaattggcgtttatacagaatcagcttcgtaaattcctttgacagctcagaaaggtagtacatttccttggacaaaccaccaattagaaacaattttcttgg

SEQ ID NO: 87778 - protein, 304 aa, Arabidopsis thaliana; identical to SEQ ID NO: 29099
  peptide (1)..(304): Ceres Seq. ID no. 12703424

SEQ ID NO: 87779 - protein, 297 aa, Arabidopsis thaliana; identical to SEQ ID NO: 29100
  peptide (1)..(297): Ceres Seq. ID no. 12703425

SEQ ID NO: 87780 - protein, 228 aa, Arabidopsis thaliana; identical to SEQ ID NO: 29101
  peptide (1)..(228): Ceres Seq. ID no. 12703426

SEQ ID NO: 87781 - DNA, 1307 bp, Arabidopsis thaliana
  misc_feature (1)..(1307): Ceres Seq. ID no. 12703549
  misc_feature (1)..(1307): Ortholog of  Ceres SEQ ID NO 13656752 as cited in SEQ ID NO 65725
atgaagaagaattgaagagagtgtccgaggaaggagacctttggtttcagtttgtgagtcttgttgtaatggctttatcaatggagtttgggttttcaattgggtcatgcttcaaggcaccaaacccacctgttctaatctctgcaagccctaataagatcaatttcacgttgagaaggagaaagaaaagattcttacttagagtctctgctgtgtcgtataaggaattcgcagagtctgctttagaagaaaccaggaaaaggatcgttcttgaaccttcacatctccagtatagtagcatgacaggactagatggtaagaccgaacttcaaatgcttgcttttaaatcttcaaagattagactcttgaggagtatggcaatagagaatgagacaatgcaggtctttgactttgcgggtttcatggagcctgagtatgatactcccatattctgtgctaactttttcacatctaccaacgttaacatagttgtattggaccttaatcctttgcatcagttgactgaccagacggattaccaagacaagtattataacaagataatgtccatatatcacaaatatgctgagactttcccatggggagggaaattgactggtgaatccataaagtttttctcgcctttggtgatgtggactaggttttcgtctagcaaagaaaaacataaggctttgttctctgcgtttctagagtactatcaggcatggcttgagatgacaatccaagtgagggaggagatggaaccatctcatgtgagagccaattgtgaagcacaacacaagtacctgacatggcgagcacaaaaggatcctggacatggtcttcttaaaagattagtaggtgaagcaaaggcaaaggagctgctaagggatttcctgttcaatggggtggatgagttaggcacaaaaacattcattgattactttccagagtaccaaacagaagatggaactgtaagcgataaacgaagtatcattgggaagtcatatgaaactcgtccatgggatttaacaggacaatttatcggctaacaatgatatatgtgaacaagtcagatttcagagtcatcaacacaagaggacgtgaacttagggaagtaggaataagaaagagcagcatgaggagtctctcaggtctatctgcatttcaagatgattgtttgagttaccatgcattgtagttttacaagtgtagctctcagcccttcatcaaaatgagaatcctcgagtatgatatgattttaatgaaaatgtattcgtctctacctaatcaacagagattaactt

SEQ ID NO: 87782 - protein, 349 aa, Arabidopsis thaliana
  peptide (1)..(349): Ceres Seq. ID no. 12703550
EEELKRVSEEGDLWFQFVSLVVMALSMEFGFSIGSCFKAPNPPVLISASPNKINFTLRRRKKRFLLRVSAVSYKEFAESALEETRKRIVLEPSHLQYSSMTGLDGKTELQMLAFKSSKIRLLRSMAIENETMQVFDFAGFMEPEYDTPIFCANFFTSTNVNIVVLDLNPLHQLTDQTDYQDKYYNKIMSIYHKYAETFPWGGKLTGESIKFFSPLVMWTRFSSSKEKHKALFSAFLEYYQAWLEMTIQVREEMEPSHVRANCEAQHKYLTWRAQKDPGHGLLKRLVGEAKAKELLRDFLFNGVDELGTKTFIDYFPEYQTEDGTVSDKRSIIGKSYETRPWDLTGQFIG

SEQ ID NO: 87783 - protein, 327 aa, Arabidopsis thaliana
  peptide (1)..(327): Ceres Seq. ID no. 12703551
MALSMEFGFSIGSCFKAPNPPVLISASPNKINFTLRRRKKRFLLRVSAVSYKEFAESALEETRKRIVLEPSHLQYSSMTGLDGKTELQMLAFKSSKIRLLRSMAIENETMQVFDFAGFMEPEYDTPIFCANFFTSTNVNIVVLDLNPLHQLTDQTDYQDKYYNKIMSIYHKYAETFPWGGKLTGESIKFFSPLVMWTRFSSSKEKHKALFSAFLEYYQAWLEMTIQVREEMEPSHVRANCEAQHKYLTWRAQKDPGHGLLKRLVGEAKAKELLRDFLFNGVDELGTKTFIDYFPEYQTEDGTVSDKRSIIGKSYETRPWDLTGQFIG

SEQ ID NO: 87784 - protein, 323 aa, Arabidopsis thaliana
  peptide (1)..(323): Ceres Seq. ID no. 12703552
MEFGFSIGSCFKAPNPPVLISASPNKINFTLRRRKKRFLLRVSAVSYKEFAESALEETRKRIVLEPSHLQYSSMTGLDGKTELQMLAFKSSKIRLLRSMAIENETMQVFDFAGFMEPEYDTPIFCANFFTSTNVNIVVLDLNPLHQLTDQTDYQDKYYNKIMSIYHKYAETFPWGGKLTGESIKFFSPLVMWTRFSSSKEKHKALFSAFLEYYQAWLEMTIQVREEMEPSHVRANCEAQHKYLTWRAQKDPGHGLLKRLVGEAKAKELLRDFLFNGVDELGTKTFIDYFPEYQTEDGTVSDKRSIIGKSYETRPWDLTGQFIG

SEQ ID NO: 87785 - DNA, 1038 bp, Arabidopsis thaliana
  misc_feature (1)..(1038): Ceres Seq. ID no. 12703561
  misc_feature (1)..(1038): Ortholog of  Ceres SEQ ID NO 14315481 as cited in SEQ ID NO 56990
atggcgatattcaaaaccctatcttttctggtccttttatgctttgagatacatggaaccgcaggtgtggatttcacgttttcatttgatgaattcgtaaaatctcagagttttgacaagagtgttgctctgtttggagattcgaagctggtcaatgacagttcttcgattcagctgactgactcagtgaatcggaccgagggacgagtcttttacaagaaacccatcaatctattccaaggtaaagagaggaactccgttattttctcgacttacttctcgttttcgatgcccaatgagattggtgatgtcttggcttttgtaatggttccaagtactttggatcttagtctgtttggtaagaaagattacagttcctctgctttagggtttctattagagtatgcaaagaacgagacagttgttgcttttgagtttgatatctccaagagaggaaaccgtgcaagagtcttaattggtagacctgagtctgccaaaattagaaacctttcgtttgtgggtgacttgatgatggatgatggagggattttgagctgtatgattgattatgaggcaagttctaagagaatgagggttcgtttcagaaaacgtggttcgataaagatgtttgatccgttcttctctttctcggtagacttggagaagctttggaaaggtggtgaagtcatggtgggtttaagctctgctaatgggaactcttccaagccacattttctccattcatggactttgaaatatggcatcttgaatccgatatgggtgcaaccagcgccattaggaccaaatgaaggtttgaagccggacgtttccacggaaatggaagagggccgagaaaatagtgagtgtatatggagaatgcttggtgctctggtcttggctgcagtatgtggagccgtaggggcaatgtcagctatgtatctttggactatttgcagtgttaggcggtcaatggccgtggttccagaggaatgtgcagtgagcattgtggtcgttgcagttaaagatggcaagaagtaa

SEQ ID NO: 87786 - protein, 345 aa, Arabidopsis thaliana
  peptide (1)..(345): Ceres Seq. ID no. 12703562
MAIFKTLSFLVLLCFEIHGTAGVDFTFSFDEFVKSQSFDKSVALFGDSKLVNDSSSIQLTDSVNRTEGRVFYKKPINLFQGKERNSVIFSTYFSFSMPNEIGDVLAFVMVPSTLDLSLFGKKDYSSSALGFLLEYAKNETVVAFEFDISKRGNRARVLIGRPESAKIRNLSFVGDLMMDDGGILSCMIDYEASSKRMRVRFRKRGSIKMFDPFFSFSVDLEKLWKGGEVMVGLSSANGNSSKPHFLHSWTLKYGILNPIWVQPAPLGPNEGLKPDVSTEMEEGRENSECIWRMLGALVLAAVCGAVGAMSAMYLWTICSVRRSMAVVPEECAVSIVVVAVKDGKK

SEQ ID NO: 87787 - protein, 249 aa, Arabidopsis thaliana
  peptide (1)..(249): Ceres Seq. ID no. 12703563
MPNEIGDVLAFVMVPSTLDLSLFGKKDYSSSALGFLLEYAKNETVVAFEFDISKRGNRARVLIGRPESAKIRNLSFVGDLMMDDGGILSCMIDYEASSKRMRVRFRKRGSIKMFDPFFSFSVDLEKLWKGGEVMVGLSSANGNSSKPHFLHSWTLKYGILNPIWVQPAPLGPNEGLKPDVSTEMEEGRENSECIWRMLGALVLAAVCGAVGAMSAMYLWTICSVRRSMAVVPEECAVSIVVVAVKDGKK

SEQ ID NO: 87788 - protein, 237 aa, Arabidopsis thaliana
  peptide (1)..(237): Ceres Seq. ID no. 12703564
MVPSTLDLSLFGKKDYSSSALGFLLEYAKNETVVAFEFDISKRGNRARVLIGRPESAKIRNLSFVGDLMMDDGGILSCMIDYEASSKRMRVRFRKRGSIKMFDPFFSFSVDLEKLWKGGEVMVGLSSANGNSSKPHFLHSWTLKYGILNPIWVQPAPLGPNEGLKPDVSTEMEEGRENSECIWRMLGALVLAAVCGAVGAMSAMYLWTICSVRRSMAVVPEECAVSIVVVAVKDGKK

SEQ ID NO: 87789 - DNA, 1199 bp, Arabidopsis thaliana
  misc_feature (1)..(1199): Ceres Seq. ID no. 12703565
  misc_feature (1)..(1199): Ortholog of  Ceres SEQ ID NO 15180043 as cited in SEQ ID NO 0
acgtcaaactctctctatacacagagttaaattgagtttgtgtctcgtaacttatcctgtgagcgaaaatggtgaaagcaactaaggcagagaagaagatcgcctacgataccaagctatgtcagcttatcgatgagtacacccagatcttggtcgttgcggccgataacgtcggatcaactcagcttcagaacatcagaaagggtcttcgtggagactccgtcgtgcttatggggaagaacactatgatgaagcgttccgttaggattcactctgagaacaccggaaacactgcaatcctgaatctgcttcctctccttcagggaaacgttggtttgatctttaccaaaggtgacctcaaggaagtgagcgaggaggttgctaagtacaaggttggtgcccctgctcgtgtgggtttggtggctccaattgatgtggttgtccaacctggcaacactggtctcgacccatcccaaacatctttcttccaggtgcttaacatcccaaccaagattaacaagggtaccgtcgaaatcatcaccccagttgagcttatcaagcaaggtgacaaggtcgggtcttctgaggctgcgcttctagccaagcttggcatcaggccgttctcatatggtcttgttgtccagtctgtctatgacaatggctcagtcttcagcccagaggttcttgatcttactgaagaccaacttgtggagaagtttgcttctggtatctccatggtcacttccttggctcttgctgtgtcgtaccctacccttgctgctgcaccgcatatgttcatcaatgcgtacaagaatgccttggctattgctgttgccactgagtacaccttccctcaagcagagaaggtcaaggaatacttgaaggatccaagcaagtttgctgttgcttcagtagctgcggtgtctgctgatgcaggtggtggtgccccagctgctgctaaggtagaggagaaggaagagtccgacgaagaagactatggaggtgatttcggtttgttcgatgaagagtagattttgtcggttaagatcttacctttttgtcgtggattataagtgttgctttgtttttagtatgttggacctcaattttcttggttttagccaatccagttttatgttactactgtcttttattttttggaaagatttcgttttcttatggttgctttaatatttttc

SEQ ID NO: 87790 - protein, 320 aa, Arabidopsis thaliana; identical to SEQ ID NO: 30935
  peptide (1)..(320): Ceres Seq. ID no. 12703566

SEQ ID NO: 87791 - protein, 266 aa, Arabidopsis thaliana; identical to SEQ ID NO: 26377
  peptide (1)..(266): Ceres Seq. ID no. 12703567

SEQ ID NO: 87792 - protein, 261 aa, Arabidopsis thaliana; identical to SEQ ID NO: 26378
  peptide (1)..(261): Ceres Seq. ID no. 12703568

SEQ ID NO: 87793 - DNA, 1023 bp, Arabidopsis thaliana
  misc_feature (1)..(1023): Ceres Seq. ID no. 12703592
  misc_feature (1)..(1023): Ortholog of  Ceres SEQ ID NO 13656177 as cited in SEQ ID NO 64997
atgggccttaaagaggatgttcttcgtggtttatacgagtacggttacgagaagccctcggccattcagcagagggcgatcatgccaattctccaagggcgagatgttattgctcaagctcagtccggtacgggaaagacctctatgattgctctctccgtctgccaagtcgttgacactttcggttcagataagacgcatgcatgcattggtgggaagagcctcggagaagacataaggaagctggagcatggtgtccatgttgtgtccggaacacctggtcgtgtctatgacatgataaagaggagaagtctaggcaccagagctattaaccttttgattcttgatgaatcagatgaaatgctgagcagaggattcaaggaacaaatctatgatgtttacagatatcttccacctgatattcaggtttgcttggtttctgcaactctacctcacgagattttggagatgacaagcaagtttatgacggatccggtgaagatacttgtgaagcgtgatgagttgactcttgagggaattaaaaacttttttatttctgtagagaaagaggagtggaaatttgagacaatatgtgatctttacgacacacttatcatcactaaagctgttatcttctgcaacacaaaacgaaaagtggactatattagtgagaaaatgaggagcagcaacttcactgtctcatcaatgcatggggacatgcctcagaaggagagagacgagatcatgaatcagtttcggacaggtgaaagtcgcgttttgatcacaacagatatgtttgcacgtgggattgatgtggatcaagtttctcttgtcatcaattatgatctccctaacaaccgtgagctctacattcatcgtattggacggtctggtcgtttcggacgtaagggtgttgcaatcaactttgttaaaatcgacgagatcaagattctccgggacattgagcagtactacagtactcagattgacgagttgccaaagaatatagctgatttgatctaa

SEQ ID NO: 87794 - protein, 340 aa, Arabidopsis thaliana
  peptide (1)..(340): Ceres Seq. ID no. 12703593
MGLKEDVLRGLYEYGYEKPSAIQQRAIMPILQGRDVIAQAQSGTGKTSMIALSVCQVVDTFGSDKTHACIGGKSLGEDIRKLEHGVHVVSGTPGRVYDMIKRRSLGTRAINLLILDESDEMLSRGFKEQIYDVYRYLPPDIQVCLVSATLPHEILEMTSKFMTDPVKILVKRDELTLEGIKNFFISVEKEEWKFETICDLYDTLIITKAVIFCNTKRKVDYISEKMRSSNFTVSSMHGDMPQKERDEIMNQFRTGESRVLITTDMFARGIDVDQVSLVINYDLPNNRELYIHRIGRSGRFGRKGVAINFVKIDEIKILRDIEQYYSTQIDELPKNIADLI

SEQ ID NO: 87795 - protein, 313 aa, Arabidopsis thaliana
  peptide (1)..(313): Ceres Seq. ID no. 12703594
MPILQGRDVIAQAQSGTGKTSMIALSVCQVVDTFGSDKTHACIGGKSLGEDIRKLEHGVHVVSGTPGRVYDMIKRRSLGTRAINLLILDESDEMLSRGFKEQIYDVYRYLPPDIQVCLVSATLPHEILEMTSKFMTDPVKILVKRDELTLEGIKNFFISVEKEEWKFETICDLYDTLIITKAVIFCNTKRKVDYISEKMRSSNFTVSSMHGDMPQKERDEIMNQFRTGESRVLITTDMFARGIDVDQVSLVINYDLPNNRELYIHRIGRSGRFGRKGVAINFVKIDEIKILRDIEQYYSTQIDELPKNIADLI

SEQ ID NO: 87796 - protein, 292 aa, Arabidopsis thaliana
  peptide (1)..(292): Ceres Seq. ID no. 12703595
MIALSVCQVVDTFGSDKTHACIGGKSLGEDIRKLEHGVHVVSGTPGRVYDMIKRRSLGTRAINLLILDESDEMLSRGFKEQIYDVYRYLPPDIQVCLVSATLPHEILEMTSKFMTDPVKILVKRDELTLEGIKNFFISVEKEEWKFETICDLYDTLIITKAVIFCNTKRKVDYISEKMRSSNFTVSSMHGDMPQKERDEIMNQFRTGESRVLITTDMFARGIDVDQVSLVINYDLPNNRELYIHRIGRSGRFGRKGVAINFVKIDEIKILRDIEQYYSTQIDELPKNIADLI

SEQ ID NO: 87797 - DNA, 486 bp, Arabidopsis thaliana
  misc_feature (1)..(486): Ceres Seq. ID no. 12703681
  misc_feature (1)..(486): Ortholog of  Ceres SEQ ID NO 12627237 as cited in SEQ ID NO 61036
atggaagaacttcaaagatacactgattccaacaatggcttcactcttctcataccctcttcttatacaaaggtagagaaagcaggagctaatgctctgtttgaagaactaaacaatggaagcaacaatattggtgttgttgttagtcctgtccgtataaagagccttgaccaatttggttctcctcaatttgttgctgataagcttatcaacgcagagaaacgaaaggaaagcacaaaggaagcagaagttgtatcagtgggagagagagcaggattaggacaacaagtgtatgagtttgaatacaaaattgatagtacaagaggaggaatcaagagggttttctcagctgcgtttgtgagttctaacaagctttatctattgaatgttgttcattcagataaaccagagaatccattggattcaagtacgagaatgtcgttggaacaagttcttcactcctttgatgctctgcctcttacatga

SEQ ID NO: 87798 - protein, 161 aa, Arabidopsis thaliana
  peptide (1)..(161): Ceres Seq. ID no. 12703682
MEELQRYTDSNNGFTLLIPSSYTKVEKAGANALFEELNNGSNNIGVVVSPVRIKSLDQFGSPQFVADKLINAEKRKESTKEAEVVSVGERAGLGQQVYEFEYKIDSTRGGIKRVFSAAFVSSNKLYLLNVVHSDKPENPLDSSTRMSLEQVLHSFDALPLT

SEQ ID NO: 87799 - DNA, 3231 bp, Arabidopsis thaliana
  misc_feature (1)..(3231): Ceres Seq. ID no. 12703683
  misc_feature (1)..(3231): Ortholog of  Ceres SEQ ID NO 13600310 as cited in SEQ ID NO 5086
  misc_feature (1)..(3231): Ortholog of  Ceres SEQ ID NO 15172491 as cited in SEQ ID NO 58719
atggattctaacaattcgaaaaaaggaagttcggtgaaatctccatgtcaaactccacgttcgactgagaagtcaaatcgagattttcgagttgactcaaactcaaactcgaatccagttagcaagaatgagaaagaaaagggtgtgaatatacaagttattgttcgttgcagaccgtttaattcagaggagacgaggttacaaacaccggctgttcttacctgtaatgaccggaaaaaggaagtagcggtagcacaaaatatagctgggaagcagattgataaaacgtttttgtttgacaaggtttttggcccaacatcccagcaaaaggatctgtatcatcaagcagtttctccaattgtctttgaggttcttgatgggtataactgcaccatctttgcatatgggcaaacaggaactggtaagacatacacaatggaaggaggagcaagaaaaaagaatggtgaaattccgagtgatgcaggtgttatccctagagcagttaaacagatatttgatatactggaagcacaaagtgctgctgaatacagtttgaaagtttcatttcttgagctctacaatgaagaactgacagaccttttagctccggaagaaacaaaattcgctgatgataaatcaaagaaacctctggctcttatggaagatggcaaaggtggtgtttttgtccgcggattggaagaagagattgtgtctactgctgatgaaatttacaaagtcttggagaaaggttcagctaagagacgcacagcagagactcttctcaacaaacaaagtagtagatctcattcaatattttcggttacaatccatattaaggaatgtactccagaaggggaagagattgtcaaaagtggaaagctgaatctagttgatcttgctggttcagagaatatttcacggtctggtgctcgagagggtagagccagggaagctggtgagatcaacaaaagtttgctcacacttggacgtgtcataaatgctttggttgaacactctggtcacattccatatagagaaagcaagttgacaagattattgagagactctttgggaggaaaaacaaaaacatgtgtaattgctacagtttcaccctctgttcattgcctggaagaaacactcagcacacttgattatgcacaccgtgcgaaacacatcaaaaataaaccagaggttaaccagaagatgatgaaatcagctattatgaaagatttgtattctgaaattgaacgtctgaagcaagaggtctatgctgctagggagaaaaatggaatttatattccaaaggagaggtatactcaagaagaagctgagaaaaaggctatggctgataagatagagcaaatggaagtagagggtgaagcaaaagacaagcaaattattgatcttcaagagctgtacaactcggaacagcttgtaactgctggattgagagaaaagcttgacaagacagagaaaaagctctatgaaactgaacaagcattgctagatctcgaagagaaacatagacaagcagttgcaacaattaaagaaaaggagtacttaatatccaatctccttaaatctgagaaaacacttgttgaccgggctgtcgagcttcaggcagaattggcaaatgcagcatccgatgtttcaaacttgttcgccaaaattgagaggaaggacaagattgaagacagtaatagatcgctcatccaagatttccagtcacaattgctacgacaacttgaactcttgaacaacagtgttgccggttcagtaagccagcaggaaaaacaattgcaagacatggaaaatgttatggtttctttcgtatctgcaaagacaaaggctactgaaacactacgaggaagtttagcacagttgaaggaaaaatacaatacaggcatcaagtctttagatgatatagctgggaatctggataaagatagccaatcaactttgaatgacttgaactcggaagtgacaaaacattcttgtgcactggaagatatgtttaaaggatttacatcagaagcttacacgctacttgaagggcttcaaggtagcctccacaatcaagaggagaagctctctgcattcacacagcaacagagagacttgcattcccgatcaatggattctgctaagtccgtctccacggtgatgttagacttcttcaagactctagacacacatgccaataagctaacaaagctagcagaagatgctcaaaatgtcaacgagcagaaattatctgcattcactaagaaattcgaggaatccattgcaaatgaagaaaaacaaatgctcgaaaaagtggcggaattactagcgagttcaaacgctaggaagaaagaattggttcagatagctgtgcaagatatacgccaaggatcatcttcccaaacaggtgcattgcagcaagaaatgtctgcaatgcaagattctgcttcttccattaaagtccagtggaactctcacatagtccaagcggaatctcatcatctcgataacatatccgcagttgaggttgcaaaggaagatatgcagaaaatgcatctaaaatgtctggagaattcaaaaaccggaacccaacaatggaagactgctcaagaatcattagttgatctcgaaaaaaggaatgttgcaaccgcggattctattattcggggagccatagaaaacaatgagaaactacgaacgcagttttcttccgcggtctcaaccactttaagcgatgtcgattcttcaaacagagaaatcatctcatccattgacaactcgttacaactcgataaagacgcatcaacggatgttaattccacaatcgttccttgctctgaaaacttgaaagaactaagaacacaccatgatgacaacgttgtcgaaatcaaacagaacacaggaaaatgtcttggtcacgagtacaaggtaacacgatttgatccttttttatataatcatcatatatacatgattgaattggacaaaattgttaaccgtaaattaaattccctgaaaacatcaacacaggtggatgaagcaacaagctcaacaccgaggaagagagagtacaacattccaactgttggatcaatagaagaacttaaaacgccgtcgtttgaggaattgttgaaggcgtttcacgattgtaagtcaccaaaacaaatgcagaacggagaagctaaacacgttagtaacggtcgacctccgttaacggccattaactga

SEQ ID NO: 87800 - protein, 1076 aa, Arabidopsis thaliana
  peptide (1)..(1076): Ceres Seq. ID no. 12703684
MDSNNSKKGSSVKSPCQTPRSTEKSNRDFRVDSNSNSNPVSKNEKEKGVNIQVIVRCRPFNSEETRLQTPAVLTCNDRKKEVAVAQNIAGKQIDKTFLFDKVFGPTSQQKDLYHQAVSPIVFEVLDGYNCTIFAYGQTGTGKTYTMEGGARKKNGEIPSDAGVIPRAVKQIFDILEAQSAAEYSLKVSFLELYNEELTDLLAPEETKFADDKSKKPLALMEDGKGGVFVRGLEEEIVSTADEIYKVLEKGSAKRRTAETLLNKQSSRSHSIFSVTIHIKECTPEGEEIVKSGKLNLVDLAGSENISRSGAREGRAREAGEINKSLLTLGRVINALVEHSGHIPYRESKLTRLLRDSLGGKTKTCVIATVSPSVHCLEETLSTLDYAHRAKHIKNKPEVNQKMMKSAIMKDLYSEIERLKQEVYAAREKNGIYIPKERYTQEEAEKKAMADKIEQMEVEGEAKDKQIIDLQELYNSEQLVTAGLREKLDKTEKKLYETEQALLDLEEKHRQAVATIKEKEYLISNLLKSEKTLVDRAVELQAELANAASDVSNLFAKIERKDKIEDSNRSLIQDFQSQLLRQLELLNNSVAGSVSQQEKQLQDMENVMVSFVSAKTKATETLRGSLAQLKEKYNTGIKSLDDIAGNLDKDSQSTLNDLNSEVTKHSCALEDMFKGFTSEAYTLLEGLQGSLHNQEEKLSAFTQQQRDLHSRSMDSAKSVSTVMLDFFKTLDTHANKLTKLAEDAQNVNEQKLSAFTKKFEESIANEEKQMLEKVAELLASSNARKKELVQIAVQDIRQGSSSQTGALQQEMSAMQDSASSIKVQWNSHIVQAESHHLDNISAVEVAKEDMQKMHLKCLENSKTGTQQWKTAQESLVDLEKRNVATADSIIRGAIENNEKLRTQFSSAVSTTLSDVDSSNREIISSIDNSLQLDKDASTDVNSTIVPCSENLKELRTHHDDNVVEIKQNTGKCLGHEYKVTRFDPFLYNHHIYMIELDKIVNRKLNSLKTSTQVDEATSSTPRKREYNIPTVGSIEELKTPSFEELLKAFHDCKSPKQMQNGEAKHVSNGRPPLTAIN

SEQ ID NO: 87801 - protein, 931 aa, Arabidopsis thaliana
  peptide (1)..(931): Ceres Seq. ID no. 12703685
MEGGARKKNGEIPSDAGVIPRAVKQIFDILEAQSAAEYSLKVSFLELYNEELTDLLAPEETKFADDKSKKPLALMEDGKGGVFVRGLEEEIVSTADEIYKVLEKGSAKRRTAETLLNKQSSRSHSIFSVTIHIKECTPEGEEIVKSGKLNLVDLAGSENISRSGAREGRAREAGEINKSLLTLGRVINALVEHSGHIPYRESKLTRLLRDSLGGKTKTCVIATVSPSVHCLEETLSTLDYAHRAKHIKNKPEVNQKMMKSAIMKDLYSEIERLKQEVYAAREKNGIYIPKERYTQEEAEKKAMADKIEQMEVEGEAKDKQIIDLQELYNSEQLVTAGLREKLDKTEKKLYETEQALLDLEEKHRQAVATIKEKEYLISNLLKSEKTLVDRAVELQAELANAASDVSNLFAKIERKDKIEDSNRSLIQDFQSQLLRQLELLNNSVAGSVSQQEKQLQDMENVMVSFVSAKTKATETLRGSLAQLKEKYNTGIKSLDDIAGNLDKDSQSTLNDLNSEVTKHSCALEDMFKGFTSEAYTLLEGLQGSLHNQEEKLSAFTQQQRDLHSRSMDSAKSVSTVMLDFFKTLDTHANKLTKLAEDAQNVNEQKLSAFTKKFEESIANEEKQMLEKVAELLASSNARKKELVQIAVQDIRQGSSSQTGALQQEMSAMQDSASSIKVQWNSHIVQAESHHLDNISAVEVAKEDMQKMHLKCLENSKTGTQQWKTAQESLVDLEKRNVATADSIIRGAIENNEKLRTQFSSAVSTTLSDVDSSNREIISSIDNSLQLDKDASTDVNSTIVPCSENLKELRTHHDDNVVEIKQNTGKCLGHEYKVTRFDPFLYNHHIYMIELDKIVNRKLNSLKTSTQVDEATSSTPRKREYNIPTVGSIEELKTPSFEELLKAFHDCKSPKQMQNGEAKHVSNGRPPLTAIN

SEQ ID NO: 87802 - protein, 857 aa, Arabidopsis thaliana
  peptide (1)..(857): Ceres Seq. ID no. 12703686
MEDGKGGVFVRGLEEEIVSTADEIYKVLEKGSAKRRTAETLLNKQSSRSHSIFSVTIHIKECTPEGEEIVKSGKLNLVDLAGSENISRSGAREGRAREAGEINKSLLTLGRVINALVEHSGHIPYRESKLTRLLRDSLGGKTKTCVIATVSPSVHCLEETLSTLDYAHRAKHIKNKPEVNQKMMKSAIMKDLYSEIERLKQEVYAAREKNGIYIPKERYTQEEAEKKAMADKIEQMEVEGEAKDKQIIDLQELYNSEQLVTAGLREKLDKTEKKLYETEQALLDLEEKHRQAVATIKEKEYLISNLLKSEKTLVDRAVELQAELANAASDVSNLFAKIERKDKIEDSNRSLIQDFQSQLLRQLELLNNSVAGSVSQQEKQLQDMENVMVSFVSAKTKATETLRGSLAQLKEKYNTGIKSLDDIAGNLDKDSQSTLNDLNSEVTKHSCALEDMFKGFTSEAYTLLEGLQGSLHNQEEKLSAFTQQQRDLHSRSMDSAKSVSTVMLDFFKTLDTHANKLTKLAEDAQNVNEQKLSAFTKKFEESIANEEKQMLEKVAELLASSNARKKELVQIAVQDIRQGSSSQTGALQQEMSAMQDSASSIKVQWNSHIVQAESHHLDNISAVEVAKEDMQKMHLKCLENSKTGTQQWKTAQESLVDLEKRNVATADSIIRGAIENNEKLRTQFSSAVSTTLSDVDSSNREIISSIDNSLQLDKDASTDVNSTIVPCSENLKELRTHHDDNVVEIKQNTGKCLGHEYKVTRFDPFLYNHHIYMIELDKIVNRKLNSLKTSTQVDEATSSTPRKREYNIPTVGSIEELKTPSFEELLKAFHDCKSPKQMQNGEAKHVSNGRPPLTAIN

SEQ ID NO: 87803 - DNA, 1927 bp, Arabidopsis thaliana
  misc_feature (1)..(1927): Ceres Seq. ID no. 12703687
  misc_feature (1)..(1927): Ortholog of  Ceres SEQ ID NO 13593925 as cited in SEQ ID NO 59489
  misc_feature (1)..(1927): Ortholog of  Ceres SEQ ID NO 13657610 as cited in SEQ ID NO 66165
  misc_feature (1)..(1927): Ortholog of  Ceres SEQ ID NO 13598312 as cited in SEQ ID NO 68448
  misc_feature (1)..(1927): Ortholog of  Ceres SEQ ID NO 13596100 as cited in SEQ ID NO 68573
atgcatcttactcacttcatcatctcttcttaaaccccaaaacaaacaaacaaacaaacaaaaaataccaaaacaaagaagaaaaaaaaaataactatggatcttctctttctctttttctctcttctcctctcttacctctttttcaagatctggaaactcatagactcaaagcaagacaaagattgctacattttagactaccaatgtcataaaccaaccgacgatcgaatggtgagcactcaattcagtggagagatcatttatcgaaaccaaaaccttggtttaaccgaatacaagttccttctcaaagccatagtaagctcagggattggagaacaaacctacgctccaagacttgtctttgaaggtcgagaagagcgtccttcgttacaagatgggatctccgagatggaagagttctacgtggacagcatcggaaaactcctggagagaaatcaaatatctcctaaagacatagacatcctcgtagtcaacgtctccatgctctcttcaacgccatctttagcttcaagaatcattaaccattacaagatgagagacgacgtcaaagtcttcaacttgaccgggatgggatgcagcgcaagtctaatctccgtagacattgtcaagaacatttttaagagctacgcaaacaagttagctcttgttgccacctccgagtctttgagccctaattggtatagcggaaacaaccgttcaatgatcttagccaactgtttgttccggtccggtggatgtgctattctcttgactaacaaacgtagcttgagaaagaaagcaatgtttaaactcaagtgtatggtacggactcaccatggagctagagaggagtcttataattgttgcatccaagccgaagatgaacaaggccgtgtcgggttttacttggggaagaatctaccaaaagccgctactcgtgcttttgtagaaaacctcaaggttataacacccaagattcttcccgtaaccgagcttataaggttcatgttaaagcttcttatcaagaaaatcaagattcgtcaaaaccctagcaagggctccacgaatctcccaccggggactccattaaaggcaggaatcaacttcaagaccgggatcgaacatttttgcatacataccggaggaaaagctgtgattgatgggattggacatagcttggatttaaacgagtatgatattgaacctgcgaggatgactcttcaccggtttggcaatacttcggcgagtagtttgtggtatgtgttggcttacatggaggccaagaagagattgaagagaggagatagagtttttatgataagctttggagctggttttaagtgtaatagctgcgtttgggaagttgtgagagatcttactggtggtgaatcaaaaggaaatgtgtggaatcattgcattgatgattatccaccaaaatcgattctgaatccttatttggagaagtttggctggattcaagatgaagatcctgacactttcaaggtccctgacgctttcatgtaaaacgtttacgcacaaaaacgcaaacgcaaacgcaaaaacaacacaaggtgatacaatattctctctttcttaatttcttcttttttgcctttagttaaaatttttacgtttttttgtttaaatggattggaaaggagatatgaatgtaaaagaaactttaattagttttttttttaatatgattttttttgggtgttataatttgttaattacatactttgaaataagggttttaagggacatgcacttccaatacgatgagaatttactaatttgccatcatattggaatgctgccttctttttttcttgttaaatgttgtatcaattttatattttttgtaatgttcatttttcactctatgttgtacttgtttcgcattaactcaagcttgccactg

SEQ ID NO: 87804 - protein, 476 aa, Arabidopsis thaliana; identical to SEQ ID NO: 40710
  peptide (1)..(476): Ceres Seq. ID no. 12703688

SEQ ID NO: 87805 - protein, 431 aa, Arabidopsis thaliana; identical to SEQ ID NO: 40711
  peptide (1)..(431): Ceres Seq. ID no. 12703689

SEQ ID NO: 87806 - protein, 371 aa, Arabidopsis thaliana; identical to SEQ ID NO: 40712
  peptide (1)..(371): Ceres Seq. ID no. 12703690

SEQ ID NO: 87807 - DNA, 1815 bp, Arabidopsis thaliana
  misc_feature (1)..(1815): Ceres Seq. ID no. 12703691
  misc_feature (1)..(1815): Ortholog of  Ceres SEQ ID NO 13598865 as cited in SEQ ID NO 0
atgctactatttaaaccgtctttaactctaggaagaaggataaaaccacgtccatgccaaagcttctctgagtctcttctaatggatagtattgaagcagctgaaactctcacacgtaaatggatttctccagatctctctagttcatcttcttgctccctctcctcgattttctccaccgataatcgcgtagaaggacgaagattcgtcgaagttatcaacagcttacaatacgcaattcaaggagtggtcttggtgaatcctgaatcaccaaagcttactagagcgcataatcttgtgacaatcgctatgaaacagttggaaaaagagttttaccggattttaaaatcgaatcgacggaatcttgatccggaatccgtatccgttcgatcttccccatctttcaatgcaagaaacaaagtgtctatttattcccaagttccaaaatctgaagaagctgatgttatgacggatttgaaaatgatcgctgattgtatgatatcttcgggttacgaaaacgaatgtatcaagatttacaagaagattagaggatcaatcatggttgaagcgttgagtaacttagggtttgagaatctaagttttggcaagattcaaaaattggattgggatagtatggagaagaacatcaagaaatggttagaagctacgaaagtcctaatcacaaacttgttcgagggagaaagaatccttagcgatcacgttttctcgccttcagtctctgtcgcggagtcttgtttcacggagatcacgttagatagtgctttaacactctttatcttccccgtgagtgtagctcgatgtaagaaaaccgtcgagaaaatcttccttactctcgacatttaccaaacgatatcgcagcttatgcctcaaatcgaagagatttttagttatgattcgactactgcggttcgactacaagctgctgattctctcaacaatctcggtgaagagattaattcaatggtggctgaattcgaagcttcgattacgaaagaatcttcgaaaaccccaatccgtggaggcagtgttcatcagctcacaaggtacgtaatgaatttcatcgtttttctcgcggattaccacgaatgtctcgctggagttctcaccgaatcgacgttgccattaccggaagattactttgggaacaatgacgaagacaacaacgaaggagaaaccggatcttcttctactgtaaccacaagaattgcatggctaatcctcgtcttgctctgtaaaatcgacacgaaatctcgaatgtacaacgacatggctctttcatacctcttcctagccaacaatctgcattacgtgatctccaaggtacgtacatcgaatatgagagtcgtgcttggcgacgaatgggtaacgaatcacgaagggaaagttactcagtacctcgaaaaatacgagaaaattgcttggggagaagtgataacgtcacttttcgattccaacgaagaaatgctcgaagaacacgtggcgaaagagcggttgatgcggttcaacgaagggtttgaggaagcgtttcagaaacagagtgagtgggtcgtaccggattcgaaacttagagacgatttaaaagattccgtgacggagaagttaacaactgttacgacgacgttttatgaaaagtaccacgttgaaaattgggaggaagtcaaatttgcccctgaagatttggataattacctctctgaccttttcttaggtacgggacgatcttgtattatcgttccttcgcttaaacaatcggactcgggacgttcacttaaagattcagaatcaggacgttga

SEQ ID NO: 87808 - protein, 604 aa, Arabidopsis thaliana; identical to SEQ ID NO: 70340
  peptide (1)..(604): Ceres Seq. ID no. 12703692

SEQ ID NO: 87809 - protein, 577 aa, Arabidopsis thaliana; identical to SEQ ID NO: 70341
  peptide (1)..(577): Ceres Seq. ID no. 12703693

SEQ ID NO: 87810 - protein, 501 aa, Arabidopsis thaliana
  peptide (1)..(501): Ceres Seq. ID no. 12703694
MKQLEKEFYRILKSNRRNLDPESVSVRSSPSFNARNKVSIYSQVPKSEEADVMTDLKMIADCMISSGYENECIKIYKKIRGSIMVEALSNLGFENLSFGKIQKLDWDSMEKNIKKWLEATKVLITNLFEGERILSDHVFSPSVSVAESCFTEITLDSALTLFIFPVSVARCKKTVEKIFLTLDIYQTISQLMPQIEEIFSYDSTTAVRLQAADSLNNLGEEINSMVAEFEASITKESSKTPIRGGSVHQLTRYVMNFIVFLADYHECLAGVLTESTLPLPEDYFGNNDEDNNEGETGSSSTVTTRIAWLILVLLCKIDTKSRMYNDMALSYLFLANNLHYVISKVRTSNMRVVLGDEWVTNHEGKVTQYLEKYEKIAWGEVITSLFDSNEEMLEEHVAKERLMRFNEGFEEAFQKQSEWVVPDSKLRDDLKDSVTEKLTTVTTTFYEKYHVENWEEVKFAPEDLDNYLSDLFLGTGRSCIIVPSLKQSDSGRSLKDSESGR

SEQ ID NO: 87811 - DNA, 1506 bp, Arabidopsis thaliana
  misc_feature (1)..(1506): Ceres Seq. ID no. 12703699
  misc_feature (1)..(1506): Ortholog of  Ceres SEQ ID NO 15178228 as cited in SEQ ID NO 58330
  misc_feature (1)..(1506): Ortholog of  Ceres SEQ ID NO 13596635 as cited in SEQ ID NO 62488
gtgtttgtgtatgtgtggaaaattaatttcttctcccgacgaatcccaaaagtttgttgaaatttgcctccaagaaatctgcaattagaaatttcatttcgccgtcatcgtcttcttcttctgattctgattaattccagatgtcttcctgagtcttacggagattaggtcattttcgcctcgactcgaactctgtctcgcagcttccgtgagagagtcatggacacgccaccgacttctcgtatcgcatcttttggtcagacggagattaactgggacaaacttgacaaaaggaggttctacattaatggagctggcctcttcactggtgttacagtagctctgtatcctgtatccgttgtgaaaacaaggcttcaagttgcttctaaagagattgctgagagaagtgccttttctgtagttaaaggaattttaaagaatgatggtgttcctggtctgtaccgaggttttggtactgtcattacaggtgctgtacctgcaagaatcatatttctaactgctcttgagaccactaagatttctgcttttaagttggttgcacctttggagttaagtgaacctacacaagccgccattgcaaatggaattgctggcatgacagcatctcttttctcacaggctgtgtttgtcccaattgatgttgttagccaaaagttgatggtacaaggatactcaggtcatgctacatatactggtggtatcgatgttgccacaaaaatcattaagtcatatggtgtaaggggattatacagagggtttggtctgtctgttatgacctattctccttcaagtgccgcttggtgggctagctatggatcaagccaacgtgttatctggagattcttaggttatggtggtgactcggatgcaactgctgctcctagtaagtcaaaaattgttatggtccaggctgctggaggaattattgctggtgcaacagcatcctcaattacaacaccattagacacaatcaaaacgcgactgcaggtcatgggacatcaagaaaatagaccttcagcgaaacaagtggtgaaaaaactgctagcagaagatggctggaaaggattctataggggtttgggcccaagattctttagcatgtcggcttggggaacctcgatgatattgacttacgaatacttaaagcgtctgtgtgcaatagaagattagaaagcttcactactgttcgttggtttttctccttctactaactcgagtagacggcatcaccttgattcaaatctcggctattgggagcttccatgttgacaattggaccattctttcaactttgaagtctgagttccgttattgtaatcattctttcaacttaatttgcgtattggagtgtattcttacagcagaagaaattctagcttacgttcttctgctttatgtagcttctgagatttaagaagcttcaaaacaatgcaatcacttcatgaaatcttatagtcgtacggatgtacgtgttatcgtaacagt

SEQ ID NO: 87812 - protein, 323 aa, Arabidopsis thaliana; identical to SEQ ID NO: 30649
  peptide (1)..(323): Ceres Seq. ID no. 12703700

SEQ ID NO: 87813 - protein, 191 aa, Arabidopsis thaliana; identical to SEQ ID NO: 30650
  peptide (1)..(191): Ceres Seq. ID no. 12703701

SEQ ID NO: 87814 - protein, 170 aa, Arabidopsis thaliana; identical to SEQ ID NO: 30651
  peptide (1)..(170): Ceres Seq. ID no. 12703702

SEQ ID NO: 87815 - DNA, 1408 bp, Arabidopsis thaliana
  misc_feature (1)..(1408): Ceres Seq. ID no. 12703703
  misc_feature (1)..(1408): Ortholog of  Ceres SEQ ID NO 14301830 as cited in SEQ ID NO 62310
  misc_feature (1)..(1408): Ortholog of  Ceres SEQ ID NO 15179524 as cited in SEQ ID NO 0
aaaactcaccgacgcgatccgatctcatctctctcatttcgaaaccatggttgagccggcgaatactgttggtcttccggtgaacccgactccgttgctgaaagatgagctcgatatcgtgattccgactatcagaaacctcgatttcctcgagatgtggaggccttttcttcagccttaccatctgatcatcgtccaggacggagatccatcgaagaagatccatgtccctgaaggttacgactacgagctctacaacaggaacgacattaaccgaatcctcggacctaaggcttcttgtatctcgtttaaggattctgcttgtcgatgctttgggtacatggtgtctaagaagaagtatatcttcaccattgatgacgattgcttcgttgccaaggatccatcaggcaaagcagtgaacgctcttgagcaacacatcaagaaccttctctgcccatcgtctccctttttcttcaacaccttgtatgatccttaccgtgaaggtgctgatttcgtccgtggataccctttcagtctccgtgaaggtgtttccactgctgtttcccatggtctttggctcaacatccctgactacgatgccccgacccaactcgtgaagcctaaggagaggaacaccaggtatgtggatgctgtcatgaccatcccaaagggaacacttttcccaatgtgtggtatgaacttggcttttgaccgtgatttgattggcccggctatgtactttggtctcatgggtgatggtcagcctattggtcgttacgacgatatgtgggctggttggtgcatcaaggtgatctgtgaccacttgagcttgggagtgaagaccggtttaccgtatatctaccacagcaaagcgagcaacccttttgttaacctgaagaaggaatacaagggaatcttctggcaggaggagatcattccgttcttccagaacgcaaagctatcgaaagaagcagtaactgttcagcaatgctacattgagctctcaaagatggtcaaggagaagttgagctccttagacccgtactttgacaagcttgcagatgccatggttacatggattgaagcttgggatgagcttaacccaccagcagccagtggcaaagcttgagagcagtatgagccaaaaagaaaaagccaccaaagttttggttatttttagctcaaattatcgttacttttaaatttctgattttacgaacctttcttgctttttttacacatttgagtagttttcatcatcagtactttctcattgtccggttatggtttttgcatttggtttaaatatcaccggtttatttataaacagtggtggattagtagtactattttctgagtttttttctttgtttcattaataaaaaggccttttcataggtgtttgcaa

SEQ ID NO: 87816 - protein, 375 aa, Arabidopsis thaliana; identical to SEQ ID NO: 23213
  peptide (1)..(375): Ceres Seq. ID no. 12703704

SEQ ID NO: 87817 - protein, 360 aa, Arabidopsis thaliana; identical to SEQ ID NO: 23214
  peptide (1)..(360): Ceres Seq. ID no. 12703705

SEQ ID NO: 87818 - protein, 324 aa, Arabidopsis thaliana; identical to SEQ ID NO: 23215
  peptide (1)..(324): Ceres Seq. ID no. 12703706

SEQ ID NO: 87819 - DNA, 2964 bp, Arabidopsis thaliana
  misc_feature (1)..(2964): Ceres Seq. ID no. 12703740
  misc_feature (1)..(2964): Ortholog of  Ceres SEQ ID NO 13655724 as cited in SEQ ID NO 68973
  misc_feature (1)..(2964): Ortholog of  Ceres SEQ ID NO 12625899 as cited in SEQ ID NO 69079
atggagcttgttcattctgcaacatttccatgtaaacaaaagctactcatcgcagtgaccattgctacatctcttttaaccatcatccctcttctctaccctttgcttgaagaccctaacttcttcctcaagcaacaacctccaagccaaagcagcatcatcaacctcgaaaacggtgttgtaacatcacatgacagctgcgacatattctcgggagagtgggttcctaaccctgaggcaccttactacaccaacacgacgtgctgggcgatacacgaacaccaaaattgcatgaagtttggaagacccgacacggatttcatcaaatggaaatggaaaccttacgggtgcgaagacggcttgccggtatttgacccggttaggtttcttgagatcgtgagaggtaaaaccatggcgtttgttggtgactcagttagcagaaaccacatgcagtctttgatctgccttctttctcaggttgaatatccgatggatgcttcggttaagaatgacgattatttcaaacgatggacatacgaaacatacaatttcacgatcgccgcattttggacaccacacttggttaagtccaaagaacccgaccagacccagcccaagcatattgatatttttgacctataccttgatgaggcagacgagagttggacagccgatataggagattttgacttcgtaatcatctcttctggccactggcattaccggccatcagtctactacgaaaaccggactatcaccggttgccattattgccaattaccgaacataaccgatctcacaatgttttatgggtatagaaaagcttttagaaccgcgtttaaagcgatcttggattcggaaagcttcaaaggcgtaatgtacttacgaagttttgcaccgtcacattttgaaggcgggttgtggaatgaaggaggagattgtttgaggaaacaaccttataggagcaatgagactcaagacgaaacgacaatgaagctacacaagattcagttggaagaattttggagagctgaagaagaagcgaagaagaaagggaaaaggttacgattactagatacgacccaagctatgtggcttagacccgacggtcacccaagccgctacggccatattccagaggccaatgtcacgttgtacaacgactgtgtccactggtgcttgcccggtcctatcgacaacctcaatgacttcttgctggctatgctaaagagagaagaagacaaaggattcttggcgcaagttcgaaaaatgaaatggtcaaatgttgtgcctagttattggatgaccacgagctcaccattattcaccatatatacatacatatttatgacaagaccagacaccattgtcttgaagcagacaatggagcttcctttgtttgcaatccttcaaagaacaccaagagttgcaattacattagcatttgttctatttgtcctcacaatagttcctgctttatatactctccttgccgatccaatcttacctccatcaatctcatctttcgagactgatcatacacgtctcagtcatttgaattcttcatcaaatcagattccttcacccgtgaatggttccattcccacgccaccctaccatacgccttcaaaacatcggaagtcttctttccatcggattcctaaacccaagaaaggtcccatttcctctccaaccgatcatatacctttaagacaacggagttcttcattcgatcagattccttcacccatgaatagtcccgttcccgctccaccacatcggaattcttcagctgatcagagtccttcacctgtgaacggtcccattcccgctccactcaatcacacgtccttaagacatctgaattcttcatctgatgatcattcatccccagtcaccacatcaccatcaaggacgcggatcagagatgatgagcaaatgtgtgacctttttaccggggagtgggtaccaaacgaagaagctccatactacaccaacacgacatgctgggcaatacatgagcaccagaactgcatgaaatatgggagacctgataccggattcatgagatggaggtggaagccggagagttgcgaccttcccatctttgatcctcaagagttcttggaaatggttagagggaaagccatggggtttgttggtgactccattagcagaaaccaagtccaatctctcttgtgccttctctctagggtggaataccctgaagacatttctccttcaccagatacggatttcaaagtatggaactacacatcctataacttcactcttcatgtcatgtggtcaccatttctagtgaaggctactaaacctgatccgaagtccaacttcttcagcctatacctcgacgaatatgacacgaagtggacgagtcagctcgaccaactcgactacctggttatatcatccggccactggttttcccggccggttattttctatgaaaaccaacaaatctctgggtgccaatactgtgcgttaccaaacacgactgaattgcctttgacctatggatacaggaaggctttaagaatatctctaaaagctataatcgagaatttcaagggtctggcatttttaaggagtttttctcctcaacatttcgaaggtggggcttggaacgaaggaggggactgtgtacggacacaaccttacagaagaaacgagactatacccgaggcagatctcaaggttcacgacattcaaagggaggaatttagagctgcagaagaagatgggatgaagaagagtggtttgagactgaagttaatggacacgacacaggcaatgctattgcgaccagatgggcatcctgggagatatggacatctacagaatccaaatgtgactttaagaaatgactgtattcattggtgcctgcctggacctatcgatactctgaatgatatattgctacaaatgatgaagacagataactag

SEQ ID NO: 87820 - protein, 987 aa, Arabidopsis thaliana
  peptide (1)..(987): Ceres Seq. ID no. 12703741
MELVHSATFPCKQKLLIAVTIATSLLTIIPLLYPLLEDPNFFLKQQPPSQSSIINLENGVVTSHDSCDIFSGEWVPNPEAPYYTNTTCWAIHEHQNCMKFGRPDTDFIKWKWKPYGCEDGLPVFDPVRFLEIVRGKTMAFVGDSVSRNHMQSLICLLSQVEYPMDASVKNDDYFKRWTYETYNFTIAAFWTPHLVKSKEPDQTQPKHIDIFDLYLDEADESWTADIGDFDFVIISSGHWHYRPSVYYENRTITGCHYCQLPNITDLTMFYGYRKAFRTAFKAILDSESFKGVMYLRSFAPSHFEGGLWNEGGDCLRKQPYRSNETQDETTMKLHKIQLEEFWRAEEEAKKKGKRLRLLDTTQAMWLRPDGHPSRYGHIPEANVTLYNDCVHWCLPGPIDNLNDFLLAMLKREEDKGFLAQVRKMKWSNVVPSYWMTTSSPLFTIYTYIFMTRPDTIVLKQTMELPLFAILQRTPRVAITLAFVLFVLTIVPALYTLLADPILPPSISSFETDHTRLSHLNSSSNQIPSPVNGSIPTPPYHTPSKHRKSSFHRIPKPKKGPISSPTDHIPLRQRSSSFDQIPSPMNSPVPAPPHRNSSADQSPSPVNGPIPAPLNHTSLRHLNSSSDDHSSPVTTSPSRTRIRDDEQMCDLFTGEWVPNEEAPYYTNTTCWAIHEHQNCMKYGRPDTGFMRWRWKPESCDLPIFDPQEFLEMVRGKAMGFVGDSISRNQVQSLLCLLSRVEYPEDISPSPDTDFKVWNYTSYNFTLHVMWSPFLVKATKPDPKSNFFSLYLDEYDTKWTSQLDQLDYLVISSGHWFSRPVIFYENQQISGCQYCALPNTTELPLTYGYRKALRISLKAIIENFKGLAFLRSFSPQHFEGGAWNEGGDCVRTQPYRRNETIPEADLKVHDIQREEFRAAEEDGMKKSGLRLKLMDTTQAMLLRPDGHPGRYGHLQNPNVTLRNDCIHWCLPGPIDTLNDILLQMMKTDN

SEQ ID NO: 87821 - protein, 890 aa, Arabidopsis thaliana
  peptide (1)..(890): Ceres Seq. ID no. 12703742
MKFGRPDTDFIKWKWKPYGCEDGLPVFDPVRFLEIVRGKTMAFVGDSVSRNHMQSLICLLSQVEYPMDASVKNDDYFKRWTYETYNFTIAAFWTPHLVKSKEPDQTQPKHIDIFDLYLDEADESWTADIGDFDFVIISSGHWHYRPSVYYENRTITGCHYCQLPNITDLTMFYGYRKAFRTAFKAILDSESFKGVMYLRSFAPSHFEGGLWNEGGDCLRKQPYRSNETQDETTMKLHKIQLEEFWRAEEEAKKKGKRLRLLDTTQAMWLRPDGHPSRYGHIPEANVTLYNDCVHWCLPGPIDNLNDFLLAMLKREEDKGFLAQVRKMKWSNVVPSYWMTTSSPLFTIYTYIFMTRPDTIVLKQTMELPLFAILQRTPRVAITLAFVLFVLTIVPALYTLLADPILPPSISSFETDHTRLSHLNSSSNQIPSPVNGSIPTPPYHTPSKHRKSSFHRIPKPKKGPISSPTDHIPLRQRSSSFDQIPSPMNSPVPAPPHRNSSADQSPSPVNGPIPAPLNHTSLRHLNSSSDDHSSPVTTSPSRTRIRDDEQMCDLFTGEWVPNEEAPYYTNTTCWAIHEHQNCMKYGRPDTGFMRWRWKPESCDLPIFDPQEFLEMVRGKAMGFVGDSISRNQVQSLLCLLSRVEYPEDISPSPDTDFKVWNYTSYNFTLHVMWSPFLVKATKPDPKSNFFSLYLDEYDTKWTSQLDQLDYLVISSGHWFSRPVIFYENQQISGCQYCALPNTTELPLTYGYRKALRISLKAIIENFKGLAFLRSFSPQHFEGGAWNEGGDCVRTQPYRRNETIPEADLKVHDIQREEFRAAEEDGMKKSGLRLKLMDTTQAMLLRPDGHPGRYGHLQNPNVTLRNDCIHWCLPGPIDTLNDILLQMMKTDN

SEQ ID NO: 87822 - protein, 850 aa, Arabidopsis thaliana
  peptide (1)..(850): Ceres Seq. ID no. 12703743
MAFVGDSVSRNHMQSLICLLSQVEYPMDASVKNDDYFKRWTYETYNFTIAAFWTPHLVKSKEPDQTQPKHIDIFDLYLDEADESWTADIGDFDFVIISSGHWHYRPSVYYENRTITGCHYCQLPNITDLTMFYGYRKAFRTAFKAILDSESFKGVMYLRSFAPSHFEGGLWNEGGDCLRKQPYRSNETQDETTMKLHKIQLEEFWRAEEEAKKKGKRLRLLDTTQAMWLRPDGHPSRYGHIPEANVTLYNDCVHWCLPGPIDNLNDFLLAMLKREEDKGFLAQVRKMKWSNVVPSYWMTTSSPLFTIYTYIFMTRPDTIVLKQTMELPLFAILQRTPRVAITLAFVLFVLTIVPALYTLLADPILPPSISSFETDHTRLSHLNSSSNQIPSPVNGSIPTPPYHTPSKHRKSSFHRIPKPKKGPISSPTDHIPLRQRSSSFDQIPSPMNSPVPAPPHRNSSADQSPSPVNGPIPAPLNHTSLRHLNSSSDDHSSPVTTSPSRTRIRDDEQMCDLFTGEWVPNEEAPYYTNTTCWAIHEHQNCMKYGRPDTGFMRWRWKPESCDLPIFDPQEFLEMVRGKAMGFVGDSISRNQVQSLLCLLSRVEYPEDISPSPDTDFKVWNYTSYNFTLHVMWSPFLVKATKPDPKSNFFSLYLDEYDTKWTSQLDQLDYLVISSGHWFSRPVIFYENQQISGCQYCALPNTTELPLTYGYRKALRISLKAIIENFKGLAFLRSFSPQHFEGGAWNEGGDCVRTQPYRRNETIPEADLKVHDIQREEFRAAEEDGMKKSGLRLKLMDTTQAMLLRPDGHPGRYGHLQNPNVTLRNDCIHWCLPGPIDTLNDILLQMMKTDN

SEQ ID NO: 87823 - DNA, 1386 bp, Arabidopsis thaliana
  misc_feature (1)..(1386): Ceres Seq. ID no. 12703815
  misc_feature (1)..(1386): Ortholog of  Ceres SEQ ID NO 14311313 as cited in SEQ ID NO 53503
  misc_feature (1)..(1386): Ortholog of  Ceres SEQ ID NO 14311625 as cited in SEQ ID NO 55184
  misc_feature (1)..(1386): Ortholog of  Ceres SEQ ID NO 14310588 as cited in SEQ ID NO 58770
atgaagaatgaggaggaggagccgctcagcccgatggctcgtgtattccaatcgccggacatagacttatgtgccatcatcaacattgggttcaaaacaaaaattaatcccgacgttgttcttgatgctttgaagcaaaatgtttacaagcatcctcgtttctccagcaaactgtctgaaaatggtgaaaaatggatcgagaccgaagtcaatgtagaagatcatgtaatcgtaccatacatagatccagaagatatatgtgaaggtggacaaagcttcgtcgatgattatatctcacgtctcacattgattcctcttgatagatcaagacctttgtgggacattcacatccttaatgtcaaaacctcatatgctgaagcagtcggtgtaataagatttaaccatgcgttggcagatggaatgtccttcatttccctagttcttgcatgtacccataaaacatcaaatcctgacatgttgtctactgctattccttcggtgaaacggcgaagcacggtgtcacatagcctaaaaaaaaccggctggttcttaacggcaatattcaccattggttctacaatgagactaatttggaatacattggtagatatgttcttgctttttgctactatgttgtttctgaaggatacaaaaacaccactaaaaggcggtgcgaatgtcaggagcaatccaaagacattttatcaccgaaatatctctctagatgacattaaacttatcaagaacgctatgaacatgactatcaacgatgttctactcggaattacacaagctgctctttctagctatttgaaccgacgatatggttgtacggtaaacctaaggtcagacatcgggttcaagcctttggcagaaatgatggtcaaggattcaaaatgcagatggggaaactactttagctttattattttaccattatcgattagtttagaaaccgatccattggtttatctaaacaaatccaaagctatgatggctcgaacgaagcactcttatcaagcagctctaacgtattttcttatcaaaatatccctaaaagtgttaggagctaaggcaacgacatcattattcaatcaacacttgatgaacataacgacatgtgtttcaaacgttatgggtcctatggaagaaatcagtttcaatggccatcctgtcgcttacatttctccaagctcttatggacactcacatgcattgttgatacattacacaagttatgctggtgaaatgacaattactataacggttgatcctactgtaataccggatcctcacaagatttgtgatgatatggaagaatcactgaaaacaatgaaagctgttctctgggaaagagggttactcaaagaggcctataaggtctaa

SEQ ID NO: 87824 - protein, 461 aa, Arabidopsis thaliana
  peptide (1)..(461): Ceres Seq. ID no. 12703816
MKNEEEEPLSPMARVFQSPDIDLCAIINIGFKTKINPDVVLDALKQNVYKHPRFSSKLSENGEKWIETEVNVEDHVIVPYIDPEDICEGGQSFVDDYISRLTLIPLDRSRPLWDIHILNVKTSYAEAVGVIRFNHALADGMSFISLVLACTHKTSNPDMLSTAIPSVKRRSTVSHSLKKTGWFLTAIFTIGSTMRLIWNTLVDMFLLFATMLFLKDTKTPLKGGANVRSNPKTFYHRNISLDDIKLIKNAMNMTINDVLLGITQAALSSYLNRRYGCTVNLRSDIGFKPLAEMMVKDSKCRWGNYFSFIILPLSISLETDPLVYLNKSKAMMARTKHSYQAALTYFLIKISLKVLGAKATTSLFNQHLMNITTCVSNVMGPMEEISFNGHPVAYISPSSYGHSHALLIHYTSYAGEMTITITVDPTVIPDPHKICDDMEESLKTMKAVLWERGLLKEAYKV

SEQ ID NO: 87825 - protein, 450 aa, Arabidopsis thaliana
  peptide (1)..(450): Ceres Seq. ID no. 12703817
MARVFQSPDIDLCAIINIGFKTKINPDVVLDALKQNVYKHPRFSSKLSENGEKWIETEVNVEDHVIVPYIDPEDICEGGQSFVDDYISRLTLIPLDRSRPLWDIHILNVKTSYAEAVGVIRFNHALADGMSFISLVLACTHKTSNPDMLSTAIPSVKRRSTVSHSLKKTGWFLTAIFTIGSTMRLIWNTLVDMFLLFATMLFLKDTKTPLKGGANVRSNPKTFYHRNISLDDIKLIKNAMNMTINDVLLGITQAALSSYLNRRYGCTVNLRSDIGFKPLAEMMVKDSKCRWGNYFSFIILPLSISLETDPLVYLNKSKAMMARTKHSYQAALTYFLIKISLKVLGAKATTSLFNQHLMNITTCVSNVMGPMEEISFNGHPVAYISPSSYGHSHALLIHYTSYAGEMTITITVDPTVIPDPHKICDDMEESLKTMKAVLWERGLLKEAYKV

SEQ ID NO: 87826 - protein, 321 aa, Arabidopsis thaliana
  peptide (1)..(321): Ceres Seq. ID no. 12703818
MSFISLVLACTHKTSNPDMLSTAIPSVKRRSTVSHSLKKTGWFLTAIFTIGSTMRLIWNTLVDMFLLFATMLFLKDTKTPLKGGANVRSNPKTFYHRNISLDDIKLIKNAMNMTINDVLLGITQAALSSYLNRRYGCTVNLRSDIGFKPLAEMMVKDSKCRWGNYFSFIILPLSISLETDPLVYLNKSKAMMARTKHSYQAALTYFLIKISLKVLGAKATTSLFNQHLMNITTCVSNVMGPMEEISFNGHPVAYISPSSYGHSHALLIHYTSYAGEMTITITVDPTVIPDPHKICDDMEESLKTMKAVLWERGLLKEAYKV

SEQ ID NO: 87827 - DNA, 741 bp, Arabidopsis thaliana
  misc_feature (1)..(741): Ceres Seq. ID no. 12703819
  misc_feature (1)..(741): Ortholog of  Ceres SEQ ID NO 14305022 as cited in SEQ ID NO 53586
  misc_feature (1)..(741): Ortholog of  Ceres SEQ ID NO 12506279 as cited in SEQ ID NO 55440
  misc_feature (1)..(741): Ortholog of  Ceres SEQ ID NO 13654847 as cited in SEQ ID NO 62459
  misc_feature (1)..(741): Ortholog of  Ceres SEQ ID NO 15174357 as cited in SEQ ID NO 0
atgggattgttctcccacaagatctccagagatgatctgaaaccaggcgatcacatctattcttggcgtaacgcttatatctactctcatcacggagtctacgtaggagatgagaaagtcattcatttcactcgtggaggtggtctagaattcggaacaggaacagttttggacaagatcatcgatatttcaataccaaatcatggaagaagagacaaaaagtgtattgattgtggagatcaatccaatctcggtggtgtaatctcttcttgtcttgattgttttctcgccggaggaaatctacatctcttcgaatacagtgcctctccgtctatctttctagccaaacgaggtggtacatgcacgatagcatcttcagatccttgtgatgaagtcatttctcgtgctaaatttctccttttgcaaaatggatttggtgagtacgatcttttagacaacaattgtgaagattttgcgatttattgcaaaactggtttgtttgtgttgtcggttgctaccaagtttggatgtagtggtcaagccaattctgtatctgcagctgttaaatatgtagttcctggtattggtggtttggctttggctgaatatggtaattactgtattggtcgtctgttttacgacattggtgttagaaaagatgcttgtaaggtttctgttgaagagcttgtagcatttgtaggagccaagcaaaacatcttggaaggcaagaagtctaattag

SEQ ID NO: 87828 - protein, 246 aa, Arabidopsis thaliana
  peptide (1)..(246): Ceres Seq. ID no. 12703820
MGLFSHKISRDDLKPGDHIYSWRNAYIYSHHGVYVGDEKVIHFTRGGGLEFGTGTVLDKIIDISIPNHGRRDKKCIDCGDQSNLGGVISSCLDCFLAGGNLHLFEYSASPSIFLAKRGGTCTIASSDPCDEVISRAKFLLLQNGFGEYDLLDNNCEDFAIYCKTGLFVLSVATKFGCSGQANSVSAAVKYVVPGIGGLALAEYGNYCIGRLFYDIGVRKDACKVSVEELVAFVGAKQNILEGKKSN

SEQ ID NO: 87829 - DNA, 1830 bp, Arabidopsis thaliana
  misc_feature (1)..(1830): Ceres Seq. ID no. 12703841
  misc_feature (1)..(1830): Ortholog of  Ceres SEQ ID NO 13654989 as cited in SEQ ID NO 63117
  misc_feature (1)..(1830): Ortholog of  Ceres SEQ ID NO 13584744 as cited in SEQ ID NO 69137
atgatgaattgttttccgtgtttcacttcacaaaagagcagaaacgctccatgcacgacgaacgagactaacgatgataacgttgaacacgacgaattcagaccacctgttgttgcgacgacgaaacggactgaagaaagagaacctgcagagcaacaaccaccggtgaaaacattcaatttccgggagttagcgacggcgaccaagaatttccggcaagaatgtcttttaggagaaggtggattcggtagggtttacaaaggaactcttcaatctactggccagttggtagctgtaaagcagctagacaagcatggattacatggtaacaaagagtttctagctgaagtcttgtcattggctaaacttgaacacccgaatcttgttaagcttataggatactgtgctgatggagatcaacggcttttagtctttgagtatgtctctggaggttcccttcaagaccatctttacgaacaaaagccaggccagaagccgatggattggataacgaggatgaagattgcgtttggtgcagcgcaaggattggattacttgcacgataaagttactccagcggtgatataccgagatttgaaagcttctaacatcttgttagatgctgagttttaccctaagctttgtgattttggtctgcataatctagagccaggaacaggtgatagcttgtttctttcttcccgggttatggatacttatggttattcagcacctgagtacactcgaggggacgatctcactgtcaagtcagatgtttatagcttcggagttgtgttgctcgaactcatcaccggtagaagagctattgacaccactaagcctaatgatgagcaaaatctagttgcttgggcacaaccgatatttaaagacccgaaaagatatccggatatggcagatcctcttttgaggaagaatttctcagagagagggttaaatcaagcagtggcaataacatcaatgtgtctacaagaggaaccaactgctcgtcctttgataagtgatgtaatggttgctcttagcttcctttcaatgtctacagaagatggtattccagccacggttccaatggaatcgttcagggacaaaagcaacaaatccagttcttcatcagactcggaggatgaagaagaagaaaaggaacaaaaagcagaaaaagaagaagaatcaacaagtaagaaaagacaagagcaggaagaaaccgcgacagattcagatgatgagtctgattcaaactccgaaaaggatcaagaagaggaacagtctcagttagagaaagccagggagtctagtagctcatcctctgactctggaagtgagagaagatcaattgatgaaacaaacgcaactgctcagagcttgaagataagttacagtaattatagctctgaggaagaagataacgagaagctaagcagtaaaagcagctgtaaatcaaacgaagaaagcactttttcgcggtatgacagcggtagagatcacgatgattcgtcaagaaacacaagcatgcgaatcaatagtcttgctcatgatgataaggaggaagacgaggaggagaatcatgaaacacggagctatagtgatcacgatgattcgccaaggaacactagcatgcgaatcaatagtctttctcatgatgatgatgaggaagaggaggaggagaatcatcaaactcggcttgagcacattcatagctcgaaatctgaagaccaaagtgtttattcagatgatgatgccggcgaaagtggtgagtcgtctttgcataggatcgaagcaaaggaagaagaacatatttcttctgaccatgattaa

SEQ ID NO: 87830 - protein, 609 aa, Arabidopsis thaliana
  peptide (1)..(609): Ceres Seq. ID no. 12703842
MMNCFPCFTSQKSRNAPCTTNETNDDNVEHDEFRPPVVATTKRTEEREPAEQQPPVKTFNFRELATATKNFRQECLLGEGGFGRVYKGTLQSTGQLVAVKQLDKHGLHGNKEFLAEVLSLAKLEHPNLVKLIGYCADGDQRLLVFEYVSGGSLQDHLYEQKPGQKPMDWITRMKIAFGAAQGLDYLHDKVTPAVIYRDLKASNILLDAEFYPKLCDFGLHNLEPGTGDSLFLSSRVMDTYGYSAPEYTRGDDLTVKSDVYSFGVVLLELITGRRAIDTTKPNDEQNLVAWAQPIFKDPKRYPDMADPLLRKNFSERGLNQAVAITSMCLQEEPTARPLISDVMVALSFLSMSTEDGIPATVPMESFRDKSNKSSSSSDSEDEEEEKEQKAEKEEESTSKKRQEQEETATDSDDESDSNSEKDQEEEQSQLEKARESSSSSSDSGSERRSIDETNATAQSLKISYSNYSSEEEDNEKLSSKSSCKSNEESTFSRYDSGRDHDDSSRNTSMRINSLAHDDKEEDEEENHETRSYSDHDDSPRNTSMRINSLSHDDDEEEEEENHQTRLEHIHSSKSEDQSVYSDDDAGESGESSLHRIEAKEEEHISSDHD

SEQ ID NO: 87831 - protein, 608 aa, Arabidopsis thaliana; identical to SEQ ID NO: 83448
  peptide (1)..(608): Ceres Seq. ID no. 12703843

SEQ ID NO: 87832 - protein, 443 aa, Arabidopsis thaliana; identical to SEQ ID NO: 83449
  peptide (1)..(443): Ceres Seq. ID no. 12703844

SEQ ID NO: 87833 - DNA, 1005 bp, Arabidopsis thaliana
  misc_feature (1)..(1005): Ceres Seq. ID no. 12703852
  misc_feature (1)..(1005): Ortholog of  Ceres SEQ ID NO 13600220 as cited in SEQ ID NO 0
atgttacattgcatcactacgatcttcctcagtatctcgaggatgactatggaggatggaccaatcgcagaatcatatgtttgctttagagagtttgggaaccatgtcaaattctggaccactatcaacgaggctaatgtattcactatcggaggttacaacgatgggacttcaccgcctggtcgttgttctaactgctcgtcagggaactcttccactgaaacatacattgtaggccataacttgcttcttgcacacgcctctgtttccagactatatcagcaaaagtacaaggataagcaaggaggttctgtagggtttagcttatatgcatttgagtttattcctcagacaagctcttctaaggatgatgaaattgcaatccaaagagccaaagacttcttctacggctggatacttgggcctcttacatttggagactatcctgatgaaatgaaaagagctgtgggatcaagactgccaattttctcaaaggaagaatcagaacaagttaaaggctcctctgacttcataggaatcatgcactattttccggctttggtggaaaacattaaacttaaaccgtctctttcaagaaacacggatttctactcagacatgggtgtatctttgacttgtttcgggtatgatgtttttccatgggctatggaaagtgtcctggaatatataaagcagacctatggcaatcctcctgtctacattcttgagaatggtacaccgatgaagccagatttggagctgcaacagaaggacacacgtaggattgagtacttacaagcttacattggtgctgtactcaaagccgttagtggatacgagcttagttatggattgtaccctgtcaacttcagcgatccttatcgcaagagatctcccaaactctctgctcactggtactctgattttctcaaggggaaaatcaccttttttggttcccaaggcatcaaacaattgcatagcaacttctcttattcctccttgtag

SEQ ID NO: 87834 - protein, 334 aa, Arabidopsis thaliana
  peptide (1)..(334): Ceres Seq. ID no. 12703853
MLHCITTIFLSISRMTMEDGPIAESYVCFREFGNHVKFWTTINEANVFTIGGYNDGTSPPGRCSNCSSGNSSTETYIVGHNLLLAHASVSRLYQQKYKDKQGGSVGFSLYAFEFIPQTSSSKDDEIAIQRAKDFFYGWILGPLTFGDYPDEMKRAVGSRLPIFSKEESEQVKGSSDFIGIMHYFPALVENIKLKPSLSRNTDFYSDMGVSLTCFGYDVFPWAMESVLEYIKQTYGNPPVYILENGTPMKPDLELQQKDTRRIEYLQAYIGAVLKAVSGYELSYGLYPVNFSDPYRKRSPKLSAHWYSDFLKGKITFFGSQGIKQLHSNFSYSSL

SEQ ID NO: 87835 - protein, 320 aa, Arabidopsis thaliana
  peptide (1)..(320): Ceres Seq. ID no. 12703854
MTMEDGPIAESYVCFREFGNHVKFWTTINEANVFTIGGYNDGTSPPGRCSNCSSGNSSTETYIVGHNLLLAHASVSRLYQQKYKDKQGGSVGFSLYAFEFIPQTSSSKDDEIAIQRAKDFFYGWILGPLTFGDYPDEMKRAVGSRLPIFSKEESEQVKGSSDFIGIMHYFPALVENIKLKPSLSRNTDFYSDMGVSLTCFGYDVFPWAMESVLEYIKQTYGNPPVYILENGTPMKPDLELQQKDTRRIEYLQAYIGAVLKAVSGYELSYGLYPVNFSDPYRKRSPKLSAHWYSDFLKGKITFFGSQGIKQLHSNFSYSSL

SEQ ID NO: 87836 - protein, 318 aa, Arabidopsis thaliana
  peptide (1)..(318): Ceres Seq. ID no. 12703855
MEDGPIAESYVCFREFGNHVKFWTTINEANVFTIGGYNDGTSPPGRCSNCSSGNSSTETYIVGHNLLLAHASVSRLYQQKYKDKQGGSVGFSLYAFEFIPQTSSSKDDEIAIQRAKDFFYGWILGPLTFGDYPDEMKRAVGSRLPIFSKEESEQVKGSSDFIGIMHYFPALVENIKLKPSLSRNTDFYSDMGVSLTCFGYDVFPWAMESVLEYIKQTYGNPPVYILENGTPMKPDLELQQKDTRRIEYLQAYIGAVLKAVSGYELSYGLYPVNFSDPYRKRSPKLSAHWYSDFLKGKITFFGSQGIKQLHSNFSYSSL

SEQ ID NO: 87837 - DNA, 2628 bp, Arabidopsis thaliana
  misc_feature (1)..(2628): Ceres Seq. ID no. 12703860
  misc_feature (1)..(2628): Ortholog of  Ceres SEQ ID NO 13593889 as cited in SEQ ID NO 53305
  misc_feature (1)..(2628): Ortholog of  Ceres SEQ ID NO 13581959 as cited in SEQ ID NO 56156
atgtcgaagatgaagcatcttctacggaagctccacatcggcggaagtagtggcgtcggcggcggatttgctgaccatcacaggttagacgactcgactagacctatgatcgatcctagccctattcttagtactagccctagccctgcatcgacttcttccgtctcttcctctggttttggtaacgcttccacgacaatgccgagactggatacatttgagcctgttggccgtgatctgacggctgttgatggtgttgatttcaatttgatggaggaggagtaccaagtccagttagctatggcgatcagcgtctctgatcctgatccgagagagaatgcagatacagctcagcttgatgccgctaagaggattagccttggggtttctgctccggtcaccgacgctgattccgccgttgactttctctcgcttcgttattgggggtttagggagtctggttgctcgattagcgagggtttaaaggaattaggatcttggctattgcctgcagtgttctcttcgttgcgaggacataaggtcattaattatgaccagaaagtcagggatggattttacgatgtgtatgggattacatctaattctctttcacaggggaagatgccacttcttgttgatcttcaagcgatctctatttcagataatgttgattatgaggtcattctagttaacagattgattgatcctgaactacaagagctagagaggagagtattcgctttggcttcggaatgtccagactttgctcctggtcaggtgtcaagtgatttgactcagaaaattgcaaatatagttgtagagcaaatgggtggccccgttgaaaatgctgatgaagcattgagaaggtggatgcttcggagctatgaactaagaaattctttgaacactactattcttccacttggtcgagttaatgttggtcttgcacgacacagggctttgcttttcaaggtccttgctgataggattaatctcccatgtatgctggtaaaaggcagttactacactggaactgatgatggggctgtgaacttgattaaactagatgacaaaagtgaatacattattgatttaatgggtgctccgggtgctctgatcccttctgaggttccaagcagttttcttccagtttcttgcacagatacaagagtatttcctgagaatttggactctttgcaacattcatcccccgtacttgagaaagaaattgaaacgccagcattttcagtttcgaaggaagcagattctagatctggtatggtagcaaacttcttcactggaaaccaggaagaaaacagtgacagatgtgctgttgaaaaacatcaaacagagagatttgagcatgattttgggaagttaatgcactcacagcagatatctggtgaaaatatgccaccattttctgggaaaccgacttgtgcacagaaagttaaagttaaaaatgtctcaaagtatgtcataagtgcagcaaagaaccctgaatttgcgcagaaattacatgctgtgttgttagaaagtggtgcatcacctcccccagatttgtttatggatattaacccacataacttgagggggaagaatttgcttcaagagctccgccaagaaagtagcaattctatggtttctggtattccatgctacccagaaaaggtagctgaacaactgagagaatctgaaaggaaccccacagccgagagttaccaacaatcagtggaggtcgatttgtcaatgaagaggaactttgatttggataatactggtaaagcttcttcatccgaaaatatggaggttggcactgctgatggggagtctgctgtttgtgatagtcatgaccaagggattaatccattgctcggagaagctgcaaagtgggaaattatgtgggaagatcttcagattggcgagcgcattggtattggttcatatggagaagtttatcgtgcagagtggaatggaactgaagtggctgttaagaagtttctggaccaagatttctctggtgatgcattgacacagttcaaatctgaaattgaaataatgttgaggttacggcatccaaacgttgttcttttcatgggagcagttactcgtcccccaaatttctccatcctgacagagttcctacccaggggaagtttgtatagattactccatcggccgaaccatcagcttgatgagaagaggagaatgcggatggctcttgatgtggcaaagggaatgaactacttacacaccagccacccgactgttgtacatagggatttaaaatctccaaaccttcttgttgataaaaattgggttgtgaaggtttgtgattttggattgtcccgcatgaaacaccacacatatttgtcctcgaaatcaactgcaggaacgcctgagtggatggctccagaagtgttgaggaatgaaccggctaatgagaaatgtgacgtgtacagctttggtgtcatattgtgggaattagctacttcacgcgtcccctggaaaggtttgaacccgatgcaagtcgttggagctgtgggattccagaatcgacgccttgaaatcccagatgatatcgatctaactgtggcacagataatccgtgaatgttggcaaacgtaa

SEQ ID NO: 87838 - protein, 875 aa, Arabidopsis thaliana
  peptide (1)..(875): Ceres Seq. ID no. 12703861
MSKMKHLLRKLHIGGSSGVGGGFADHHRLDDSTRPMIDPSPILSTSPSPASTSSVSSSGFGNASTTMPRLDTFEPVGRDLTAVDGVDFNLMEEEYQVQLAMAISVSDPDPRENADTAQLDAAKRISLGVSAPVTDADSAVDFLSLRYWGFRESGCSISEGLKELGSWLLPAVFSSLRGHKVINYDQKVRDGFYDVYGITSNSLSQGKMPLLVDLQAISISDNVDYEVILVNRLIDPELQELERRVFALASECPDFAPGQVSSDLTQKIANIVVEQMGGPVENADEALRRWMLRSYELRNSLNTTILPLGRVNVGLARHRALLFKVLADRINLPCMLVKGSYYTGTDDGAVNLIKLDDKSEYIIDLMGAPGALIPSEVPSSFLPVSCTDTRVFPENLDSLQHSSPVLEKEIETPAFSVSKEADSRSGMVANFFTGNQEENSDRCAVEKHQTERFEHDFGKLMHSQQISGENMPPFSGKPTCAQKVKVKNVSKYVISAAKNPEFAQKLHAVLLESGASPPPDLFMDINPHNLRGKNLLQELRQESSNSMVSGIPCYPEKVAEQLRESERNPTAESYQQSVEVDLSMKRNFDLDNTGKASSSENMEVGTADGESAVCDSHDQGINPLLGEAAKWEIMWEDLQIGERIGIGSYGEVYRAEWNGTEVAVKKFLDQDFSGDALTQFKSEIEIMLRLRHPNVVLFMGAVTRPPNFSILTEFLPRGSLYRLLHRPNHQLDEKRRMRMALDVAKGMNYLHTSHPTVVHRDLKSPNLLVDKNWVVKVCDFGLSRMKHHTYLSSKSTAGTPEWMAPEVLRNEPANEKCDVYSFGVILWELATSRVPWKGLNPMQVVGAVGFQNRRLEIPDDIDLTVAQIIRECWQT

SEQ ID NO: 87839 - protein, 872 aa, Arabidopsis thaliana
  peptide (1)..(872): Ceres Seq. ID no. 12703862
MKHLLRKLHIGGSSGVGGGFADHHRLDDSTRPMIDPSPILSTSPSPASTSSVSSSGFGNASTTMPRLDTFEPVGRDLTAVDGVDFNLMEEEYQVQLAMAISVSDPDPRENADTAQLDAAKRISLGVSAPVTDADSAVDFLSLRYWGFRESGCSISEGLKELGSWLLPAVFSSLRGHKVINYDQKVRDGFYDVYGITSNSLSQGKMPLLVDLQAISISDNVDYEVILVNRLIDPELQELERRVFALASECPDFAPGQVSSDLTQKIANIVVEQMGGPVENADEALRRWMLRSYELRNSLNTTILPLGRVNVGLARHRALLFKVLADRINLPCMLVKGSYYTGTDDGAVNLIKLDDKSEYIIDLMGAPGALIPSEVPSSFLPVSCTDTRVFPENLDSLQHSSPVLEKEIETPAFSVSKEADSRSGMVANFFTGNQEENSDRCAVEKHQTERFEHDFGKLMHSQQISGENMPPFSGKPTCAQKVKVKNVSKYVISAAKNPEFAQKLHAVLLESGASPPPDLFMDINPHNLRGKNLLQELRQESSNSMVSGIPCYPEKVAEQLRESERNPTAESYQQSVEVDLSMKRNFDLDNTGKASSSENMEVGTADGESAVCDSHDQGINPLLGEAAKWEIMWEDLQIGERIGIGSYGEVYRAEWNGTEVAVKKFLDQDFSGDALTQFKSEIEIMLRLRHPNVVLFMGAVTRPPNFSILTEFLPRGSLYRLLHRPNHQLDEKRRMRMALDVAKGMNYLHTSHPTVVHRDLKSPNLLVDKNWVVKVCDFGLSRMKHHTYLSSKSTAGTPEWMAPEVLRNEPANEKCDVYSFGVILWELATSRVPWKGLNPMQVVGAVGFQNRRLEIPDDIDLTVAQIIRECWQT

SEQ ID NO: 87840 - protein, 840 aa, Arabidopsis thaliana
  peptide (1)..(840): Ceres Seq. ID no. 12703863
MIDPSPILSTSPSPASTSSVSSSGFGNASTTMPRLDTFEPVGRDLTAVDGVDFNLMEEEYQVQLAMAISVSDPDPRENADTAQLDAAKRISLGVSAPVTDADSAVDFLSLRYWGFRESGCSISEGLKELGSWLLPAVFSSLRGHKVINYDQKVRDGFYDVYGITSNSLSQGKMPLLVDLQAISISDNVDYEVILVNRLIDPELQELERRVFALASECPDFAPGQVSSDLTQKIANIVVEQMGGPVENADEALRRWMLRSYELRNSLNTTILPLGRVNVGLARHRALLFKVLADRINLPCMLVKGSYYTGTDDGAVNLIKLDDKSEYIIDLMGAPGALIPSEVPSSFLPVSCTDTRVFPENLDSLQHSSPVLEKEIETPAFSVSKEADSRSGMVANFFTGNQEENSDRCAVEKHQTERFEHDFGKLMHSQQISGENMPPFSGKPTCAQKVKVKNVSKYVISAAKNPEFAQKLHAVLLESGASPPPDLFMDINPHNLRGKNLLQELRQESSNSMVSGIPCYPEKVAEQLRESERNPTAESYQQSVEVDLSMKRNFDLDNTGKASSSENMEVGTADGESAVCDSHDQGINPLLGEAAKWEIMWEDLQIGERIGIGSYGEVYRAEWNGTEVAVKKFLDQDFSGDALTQFKSEIEIMLRLRHPNVVLFMGAVTRPPNFSILTEFLPRGSLYRLLHRPNHQLDEKRRMRMALDVAKGMNYLHTSHPTVVHRDLKSPNLLVDKNWVVKVCDFGLSRMKHHTYLSSKSTAGTPEWMAPEVLRNEPANEKCDVYSFGVILWELATSRVPWKGLNPMQVVGAVGFQNRRLEIPDDIDLTVAQIIRECWQT

SEQ ID NO: 87841 - DNA, 1361 bp, Arabidopsis thaliana
  misc_feature (1)..(1361): Ceres Seq. ID no. 12703879
  misc_feature (1)..(1361): Ortholog of  Ceres SEQ ID NO 13584730 as cited in SEQ ID NO 65565
attcctccattaaaaagcttcttccttcgtttctcgtcggcgttttgagagacatgtgggaatcgatttgcctaacgcttgcggccaccgccggaaacaatatcggcaaggttctccagaagaagggcactattatcctccctcctctctcccttaagcttaaggtgttaagagcatatgctgaaaacaaaccatgggcgttaggttttcttatggacattgttggtgctttgttgatgctgagagcactatcacttgctcctgtgtcagttgttcagccagtctcgggatgtggccttgccattctttccgtcttttcgcatttttatttgaaggaagtcatgaatgtttttgactggattgggattactgttgccggcattgggaccataggagttggggctggtggtgaggagcaagaagcatcattaatatctgtcttccagttgctgtggctagcattggttgttgccatcttgtttgtactactaaatgcgtggcttcatatcttcaaacgccagcgcagggagcaggagctgggggaatatgaagtggtggaagaaatcatatatggcttggaatctggcattttattcggaatggcatctgtagtatcaaagatgggttttgtattcgtggagcagggattttctacaatgttcattcccatgtgcatttcgattagtatatgctgtagtggaactggatttttctaccagactcggggactaaaacatgggagagcaatcgtagtatccacttgcgctgctgtggcatcaattgtaacaggtgtggttgcaggaatgtttgctctgggtgagaaattacccacttcaccatctggacggcttttacttctcctgggatggttacttatcatgctaggtgttgtattactagtgacttcatcacggcttatcagacatcttccacggtcattccggcgttcaaggcaaaccagtttagaaagaggtttcaacataaggcggacaacttctcacacaccaaaggatacaaacccaagtgcggttatccaggcagcaacattacaccatctcttatcatccccatcaaaagacaaagactaaatggattcagaaacaccgaagaatatttgcggagtgcatacttatgttacacaagttatttctcgaatttatgactaaaggtgtcagattttcatattccggggtttcatttcattgatattccaattgtgggaacagcttaaaagtcagagcttgggatcaatttatgacgtaacttgatgtctaaaatgtgaaatatgagttcccttggacatgttactctaattgtgcaaacaatctgggatatacgaaccaactttggtttattgtgtt

SEQ ID NO: 87842 - protein, 361 aa, Arabidopsis thaliana; identical to SEQ ID NO: 35290
  peptide (1)..(361): Ceres Seq. ID no. 12703880

SEQ ID NO: 87843 - protein, 344 aa, Arabidopsis thaliana; identical to SEQ ID NO: 35291
  peptide (1)..(344): Ceres Seq. ID no. 12703881

SEQ ID NO: 87844 - protein, 291 aa, Arabidopsis thaliana; identical to SEQ ID NO: 35292
  peptide (1)..(291): Ceres Seq. ID no. 12703882

SEQ ID NO: 87845 - DNA, 732 bp, Arabidopsis thaliana
  misc_feature (1)..(732): Ceres Seq. ID no. 12703936
  misc_feature (1)..(732): Ortholog of  Ceres SEQ ID NO 13598653 as cited in SEQ ID NO 65049
atggagcctgaacgtttaaaatttggagctcgttgtcctttgttttcccctttggctcaccttgaggtcaatgtgttgtttgtttcaagtgcaggtccaagagagttgtgcggtgctgcggatcttatatctcaattcaaactagtgcaacaccatgaattcttttgcaagaaatctcttcctgtttctttatcagattcccattatcttcataatgtggttggggacacagagatcagaaaaggagaaggaatgcaattagatcagcttattgagagcatatcacagagccgggagactaatattcgcatccagccttttgatatagatgagcttcaggagtctttccaactaaatgatatgactcctgttgaattacccccagcagagaagggagctcctacaattccgtctaagtcaaaaagtgagtcgaaagatagggacaggaaacataagaaacacaaggacagggataaagacaaagatagagagcataagaagcacaagcacaaacataaagatagaagcaaagataaagataaagacaaggaccgagacagaaagaaggacaaaaatggccaccatgattcgggtgatcattctaagaaacatcatgataagaaaaggaaacacgatggagatgaagatcttaatgacgttcagaggcacaaaaaaaacaagcataaaagctcaaagcttgatgaggtgggtgcaataagggttgctggctaa

SEQ ID NO: 87846 - protein, 243 aa, Arabidopsis thaliana
  peptide (1)..(243): Ceres Seq. ID no. 12703937
MEPERLKFGARCPLFSPLAHLEVNVLFVSSAGPRELCGAADLISQFKLVQHHEFFCKKSLPVSLSDSHYLHNVVGDTEIRKGEGMQLDQLIESISQSRETNIRIQPFDIDELQESFQLNDMTPVELPPAEKGAPTIPSKSKSESKDRDRKHKKHKDRDKDKDREHKKHKHKHKDRSKDKDKDKDRDRKKDKNGHHDSGDHSKKHHDKKRKHDGDEDLNDVQRHKKNKHKSSKLDEVGAIRVAG

SEQ ID NO: 87847 - protein, 159 aa, Arabidopsis thaliana; identical to SEQ ID NO: 70005
  peptide (1)..(159): Ceres Seq. ID no. 12703938

SEQ ID NO: 87848 - protein, 123 aa, Arabidopsis thaliana; identical to SEQ ID NO: 70006
  peptide (1)..(123): Ceres Seq. ID no. 12703939

SEQ ID NO: 87849 - DNA, 474 bp, Arabidopsis thaliana
  misc_feature (1)..(474): Ceres Seq. ID no. 12703994
  misc_feature (1)..(474): Ortholog of  Ceres SEQ ID NO 13581889 as cited in SEQ ID NO 50900
  misc_feature (1)..(474): Ortholog of  Ceres SEQ ID NO 13581902 as cited in SEQ ID NO 52223
atgtctccacccacaaactctcaatacatatctttcaccatcaaaacttttttacatatcaaagttgatttgctcactatggctcgttcgaaccagacagctcgtaaggcaacaggaggtaaggctccacacttcgccatgagagtatggcaacactcaactccgccgcttaagaaaccatatagatacaagccaggaacagtggcactcagggagatcaggaagtaccagaagaccacagacttagttataagaaaactccctttccaaagactggtgaaagagatagctcagagtctcaaggcagatctaaggttccagaccggtgctgtttccgctcttcaagaagccgctgaagcttttatggttggaatgtttgaggacaccaatttgtgtgccatgcatgccaaaagatcaactatcatgcctaaggatatccagctcgctaaaaggcttcgaggcgatagggtttga

SEQ ID NO: 87850 - protein, 157 aa, Arabidopsis thaliana
  peptide (1)..(157): Ceres Seq. ID no. 12703995
MSPPTNSQYISFTIKTFLHIKVDLLTMARSNQTARKATGGKAPHFAMRVWQHSTPPLKKPYRYKPGTVALREIRKYQKTTDLVIRKLPFQRLVKEIAQSLKADLRFQTGAVSALQEAAEAFMVGMFEDTNLCAMHAKRSTIMPKDIQLAKRLRGDRV

SEQ ID NO: 87851 - protein, 131 aa, Arabidopsis thaliana; identical to SEQ ID NO: 79608
  peptide (1)..(131): Ceres Seq. ID no. 12703996

SEQ ID NO: 87852 - protein, 111 aa, Arabidopsis thaliana; identical to SEQ ID NO: 79609
  peptide (1)..(111): Ceres Seq. ID no. 12703997

SEQ ID NO: 87853 - DNA, 2075 bp, Arabidopsis thaliana
  misc_feature (1)..(2075): Ceres Seq. ID no. 12703998
  misc_feature (1)..(2075): Ortholog of  Ceres SEQ ID NO 15171181 as cited in SEQ ID NO 56848
tctctctctctctctctctctctcttcttcacacacacagagacatcatcctcttcacacccttttcttttgcacaatcgcattcactatctcttctctctcttttgtgtcacatccttctcttctcttctaagttctaatcttgtactatcttgttctaccatggcttcttctgaaacaagaatgaacaaggcaagagaaaaagaagaagccatagcaaatggagtgaagttgagagcacttcaagcgagtcttatgcagatgaagtcaagcccatcttccaattacagtctcagaaacccttcttcctcttctgctgcttcacctgcttctcgtcctctccctaacctctctgctcatgattaccctgttttcactcctagctatgaagatgagcctgtgtctgcatttcatcacaagaatctcactttatctgagacttgggatgaagatggtgttggtttagtagatggagatacttatctctctgattcttacaaaacctcaacttcaagaaagactgtgatgatgcctcatcaagattctcatcatcatgtttacactatgtcggacgctctcagatctccaccgttacatttttatacaaccggtagaagcaactgtggctcggtcgactttagatcggtctcttcttgcaatgactacaataaacaaaaaggtttcgacacgaagagcttgaagagctctaatcttgttgtgcccttgacggattcgcactctgctgttgtttcttctcagccaagaaaccgtggaggtagagtaatgtcttggttattccctaagttaaagaagaaacaaaagagtaattcgatctttaattcacctagtataactgagaagtcagaggaagtttctgaggtgttgaaggattctggttctggtgttgagaagttgaagagagaattgatggaagcaaacagaagtagggatgctgcgttaacacaagtctcagagatgaaatcttcattgggagagttaagtgagaagcttcagtacttggaaagttactgtgacaatttaaagaaagctttgagagaagcaacagaagtagtgtcacaggagaatagtggtggaagaagctcagggaaaaagaactcagagatgccagtgagtgaagaagtgatggttgaagggttcttgcagattgtatcagaagcaagattatcgataaagcagttcttgaaaacattagtttcagagattgatgaagaagactcgactctaattggtaacatcaacactctccttcaacctcacaacttatcattcacttctaagtactccaagatcattcagtaccacttagaagcaatcataagccaatcagtataccaagactttgagaactgcgtattccagaagaacggtaagccgaaactgcttgatccggaacaagatcgacaagcgaacttctcgtcctttgcttccttgagaaacttgagctggaacgaggtattgaaaaagggtacaaaatactacagtgatgagttcagtagattctgcgatgagaagatgagtttgatcattacaacattgaattggacaagaccttggtcagaacaaatgcttcaagcattctttgtggctgcaaaatgtgtatggttgcttcatttgcttgccttctcgttcaatccagcgttagggatattgagagttgaggagaacagagagtttgaatcaagttttatggaagatatgggtgcagataggcagagatcagcattgtcccgtggaccggcacgggttaaggttatggtaatgcctgggttttatgttttagatagggttttgagatgtaaggttctttgcaggtacaagtcattgggctgaactgaagagagtcacactcactctagtctaatcaaaattgattggttcttaattaacttttcttattgttaatctcttgtgtttcttctacctaggcttttttttactggtctttttacactttgttaagaattattataggtttttaaatattgtcaaatactacttgtcaaggagattttgtatttttacatttttgtattgatggaaaagtattgaatatg

SEQ ID NO: 87854 - protein, 616 aa, Arabidopsis thaliana
  peptide (1)..(616): Ceres Seq. ID no. 12703999
SLSLSLSLFFTHTETSSSSHPFLLHNRIHYLFSLFCVTSFSSLLSSNLVLSCSTMASSETRMNKAREKEEAIANGVKLRALQASLMQMKSSPSSNYSLRNPSSSSAASPASRPLPNLSAHDYPVFTPSYEDEPVSAFHHKNLTLSETWDEDGVGLVDGDTYLSDSYKTSTSRKTVMMPHQDSHHHVYTMSDALRSPPLHFYTTGRSNCGSVDFRSVSSCNDYNKQKGFDTKSLKSSNLVVPLTDSHSAVVSSQPRNRGGRVMSWLFPKLKKKQKSNSIFNSPSITEKSEEVSEVLKDSGSGVEKLKRELMEANRSRDAALTQVSEMKSSLGELSEKLQYLESYCDNLKKALREATEVVSQENSGGRSSGKKNSEMPVSEEVMVEGFLQIVSEARLSIKQFLKTLVSEIDEEDSTLIGNINTLLQPHNLSFTSKYSKIIQYHLEAIISQSVYQDFENCVFQKNGKPKLLDPEQDRQANFSSFASLRNLSWNEVLKKGTKYYSDEFSRFCDEKMSLIITTLNWTRPWSEQMLQAFFVAAKCVWLLHLLAFSFNPALGILRVEENREFESSFMEDMGADRQRSALSRGPARVKVMVMPGFYVLDRVLRCKVLCRYKSLG

SEQ ID NO: 87855 - protein, 562 aa, Arabidopsis thaliana; identical to SEQ ID NO: 40604
  peptide (1)..(562): Ceres Seq. ID no. 12704000

SEQ ID NO: 87856 - protein, 555 aa, Arabidopsis thaliana; identical to SEQ ID NO: 40605
  peptide (1)..(555): Ceres Seq. ID no. 12704001

SEQ ID NO: 87857 - DNA, 2751 bp, Arabidopsis thaliana
  misc_feature (1)..(2751): Ceres Seq. ID no. 12704033
  misc_feature (1)..(2751): Ortholog of  Ceres SEQ ID NO 15170741 as cited in SEQ ID NO 58530
atgtgcgagcccgatgataattccgctagaaacggcgtcactactcaaccttcgaggtcaagggagcttctaatggatgttgacgacttagatcttgacggttcatggccactagatcaaatcccttacttatcctcatcgaatcgcatgatttctccgatttttgtctcctcttcctctgagcagccttgctcgcctctctgggctttctccgacggtggaggaaatggttttcaccacgcaacctccggtggcgatgatgagaagatcagctctgtctccggtgttccttctttccgtctcgccgagtatcctctcttcctcccttactcttctccatcagcagctgagaacacaacagagaagcataacagtttccagtttccgtctccattgatgagcctagtcccaccagagaacacagacaactactgtgtgatcaaagagaggatgactcaggcgcttcgatacttcaaagaatcaaccgaacaacacgttttggctcaggtctgggctcctgtgagaaagaatggtcgtgatttgctgacgactttgggtcaaccttttgttcttaatcctaatggtaatgggcttaatcaatacaggatgatctctctcacatatatgttttctgtggatagtgaaagtgacgtagagctcggactcccgggtcgagttttccgtcagaaattgcctgaatggactccaaatgttcagtactattccagcaaagaattctcgcggcttgatcacgccttgcactacaacgtgcgtggtacactggccttgcctgtctttaatccctctggtcagtcctgcataggtgttgtggaacttataatgacctcagagaagattcactatgcacccgaagtggacaaagtttgcaaagcccttgagatatgcaatgagagtcgccaaaacgcgcttgctgagattctcgaagtgctgacagttgtatgtgagacccataacttgcctctcgctcagacttgggttccatgtcagcatgggagcgttcttgccaatggtggcggtctaaagaaaaactgcaccagctttgacggtagctgcatgggtcaaatctgcatgtctacaaccgacatggcctgctatgtcgtggatgctcatgtctggggctttagagatgcctgtcttgaacaccatctccagaaaggccagggagtcgctggacgagcttttctcaatggtggctcatgtttctgcagagacatcaccaagttctgcaaaacgcagtacccactagtccattatgcgctcatgttcaagttgaccacttgttttgcaatatctctccagagctcttacacgggcgacgacagttacattcttgaattttttcttccttcgagtataacagacgaccaagagcaagatttgctgttgggttctattttggtgacaatgaaagaacattttcagagtctgagggttgcatctggggttgactttggtgaagatgacgacaaattgtctttcgagatcatccaagcattaccggacaagaagcctgtggttcagtcttctgatccagtaaatgagaaaatcaacgtggccactgttaacggtgtggttaaggagaagaagaaaacagagaaaaagcgtgggaagactgagaaaacaatcagtctagatgtacttcagcagtatttcactggaagtctcaaagacgctgcaaagagcctaggagtttgcccgacgacaatgaagcgaatttgcaggcaacacggaatctcgcggtggccatcgaggaagatcaagaaagtgaatcgttcaatcacaaagctgaaacgagtcatcgaatctgttcaaggtactgatggaggcctcgacctgacttccatggccgttagttccatcccttggacacacggtcaaacatcagcacagccactaaactcacccaatggttccaaaccacctgagctaccaaacaccaataattcacctaaccattggtcaagtgatcacagtccgaacgagccaaatggttcgcctgagttaccaccaagcaatggtcacaagcgatcacgaacggtggatgagagcgctgggactccaacctctcatggctcatgtgacggtaaccaattagatgaaccgaaagtcccaaatcaagatccgctcttcacggttggtggatcacccgggctcctttttccaccttattctagagatcatgatgtatctgcagcttccttcgcaatgccgaacaggcttcttggttctatagaccatttccgaggaatgctcattgaagacgctggaagttcaaaagatctgagaaatctctgccccactgcagcatttgacgataagtttcaagacacaaactggatgaacaatgataataatagcaacaacaacttatacgctcccccaaaggaagaggccattgcaaatgttgcatgcgaaccatcaggctcagaaatgagaacggtaacaatcaaagcaagttacaaagacgacataatacggttcagaatatcctcgggttcaggtataatggaattgaaggatgaagtggctaagaggctgaaagttgatgcaggaacgttcgatatcaagtatcttgacgatgataacgaatgggttttaatagcttgtgatgctgatcttcaagaatgtctcgagatccctagatcctcccgcacgaaaatcgtaaggctcttagttcatgatgtaacgacaaatctagggagctcctgcgagagcactggagaattgtga

SEQ ID NO: 87858 - protein, 916 aa, Arabidopsis thaliana
  peptide (1)..(916): Ceres Seq. ID no. 12704034
MCEPDDNSARNGVTTQPSRSRELLMDVDDLDLDGSWPLDQIPYLSSSNRMISPIFVSSSSEQPCSPLWAFSDGGGNGFHHATSGGDDEKISSVSGVPSFRLAEYPLFLPYSSPSAAENTTEKHNSFQFPSPLMSLVPPENTDNYCVIKERMTQALRYFKESTEQHVLAQVWAPVRKNGRDLLTTLGQPFVLNPNGNGLNQYRMISLTYMFSVDSESDVELGLPGRVFRQKLPEWTPNVQYYSSKEFSRLDHALHYNVRGTLALPVFNPSGQSCIGVVELIMTSEKIHYAPEVDKVCKALEICNESRQNALAEILEVLTVVCETHNLPLAQTWVPCQHGSVLANGGGLKKNCTSFDGSCMGQICMSTTDMACYVVDAHVWGFRDACLEHHLQKGQGVAGRAFLNGGSCFCRDITKFCKTQYPLVHYALMFKLTTCFAISLQSSYTGDDSYILEFFLPSSITDDQEQDLLLGSILVTMKEHFQSLRVASGVDFGEDDDKLSFEIIQALPDKKPVVQSSDPVNEKINVATVNGVVKEKKKTEKKRGKTEKTISLDVLQQYFTGSLKDAAKSLGVCPTTMKRICRQHGISRWPSRKIKKVNRSITKLKRVIESVQGTDGGLDLTSMAVSSIPWTHGQTSAQPLNSPNGSKPPELPNTNNSPNHWSSDHSPNEPNGSPELPPSNGHKRSRTVDESAGTPTSHGSCDGNQLDEPKVPNQDPLFTVGGSPGLLFPPYSRDHDVSAASFAMPNRLLGSIDHFRGMLIEDAGSSKDLRNLCPTAAFDDKFQDTNWMNNDNNSNNNLYAPPKEEAIANVACEPSGSEMRTVTIKASYKDDIIRFRISSGSGIMELKDEVAKRLKVDAGTFDIKYLDDDNEWVLIACDADLQECLEIPRSSRTKIVRLLVHDVTTNLGSSCESTGEL

SEQ ID NO: 87859 - protein, 892 aa, Arabidopsis thaliana
  peptide (1)..(892): Ceres Seq. ID no. 12704035
MDVDDLDLDGSWPLDQIPYLSSSNRMISPIFVSSSSEQPCSPLWAFSDGGGNGFHHATSGGDDEKISSVSGVPSFRLAEYPLFLPYSSPSAAENTTEKHNSFQFPSPLMSLVPPENTDNYCVIKERMTQALRYFKESTEQHVLAQVWAPVRKNGRDLLTTLGQPFVLNPNGNGLNQYRMISLTYMFSVDSESDVELGLPGRVFRQKLPEWTPNVQYYSSKEFSRLDHALHYNVRGTLALPVFNPSGQSCIGVVELIMTSEKIHYAPEVDKVCKALEICNESRQNALAEILEVLTVVCETHNLPLAQTWVPCQHGSVLANGGGLKKNCTSFDGSCMGQICMSTTDMACYVVDAHVWGFRDACLEHHLQKGQGVAGRAFLNGGSCFCRDITKFCKTQYPLVHYALMFKLTTCFAISLQSSYTGDDSYILEFFLPSSITDDQEQDLLLGSILVTMKEHFQSLRVASGVDFGEDDDKLSFEIIQALPDKKPVVQSSDPVNEKINVATVNGVVKEKKKTEKKRGKTEKTISLDVLQQYFTGSLKDAAKSLGVCPTTMKRICRQHGISRWPSRKIKKVNRSITKLKRVIESVQGTDGGLDLTSMAVSSIPWTHGQTSAQPLNSPNGSKPPELPNTNNSPNHWSSDHSPNEPNGSPELPPSNGHKRSRTVDESAGTPTSHGSCDGNQLDEPKVPNQDPLFTVGGSPGLLFPPYSRDHDVSAASFAMPNRLLGSIDHFRGMLIEDAGSSKDLRNLCPTAAFDDKFQDTNWMNNDNNSNNNLYAPPKEEAIANVACEPSGSEMRTVTIKASYKDDIIRFRISSGSGIMELKDEVAKRLKVDAGTFDIKYLDDDNEWVLIACDADLQECLEIPRSSRTKIVRLLVHDVTTNLGSSCESTGEL

SEQ ID NO: 87860 - protein, 867 aa, Arabidopsis thaliana
  peptide (1)..(867): Ceres Seq. ID no. 12704036
MISPIFVSSSSEQPCSPLWAFSDGGGNGFHHATSGGDDEKISSVSGVPSFRLAEYPLFLPYSSPSAAENTTEKHNSFQFPSPLMSLVPPENTDNYCVIKERMTQALRYFKESTEQHVLAQVWAPVRKNGRDLLTTLGQPFVLNPNGNGLNQYRMISLTYMFSVDSESDVELGLPGRVFRQKLPEWTPNVQYYSSKEFSRLDHALHYNVRGTLALPVFNPSGQSCIGVVELIMTSEKIHYAPEVDKVCKALEICNESRQNALAEILEVLTVVCETHNLPLAQTWVPCQHGSVLANGGGLKKNCTSFDGSCMGQICMSTTDMACYVVDAHVWGFRDACLEHHLQKGQGVAGRAFLNGGSCFCRDITKFCKTQYPLVHYALMFKLTTCFAISLQSSYTGDDSYILEFFLPSSITDDQEQDLLLGSILVTMKEHFQSLRVASGVDFGEDDDKLSFEIIQALPDKKPVVQSSDPVNEKINVATVNGVVKEKKKTEKKRGKTEKTISLDVLQQYFTGSLKDAAKSLGVCPTTMKRICRQHGISRWPSRKIKKVNRSITKLKRVIESVQGTDGGLDLTSMAVSSIPWTHGQTSAQPLNSPNGSKPPELPNTNNSPNHWSSDHSPNEPNGSPELPPSNGHKRSRTVDESAGTPTSHGSCDGNQLDEPKVPNQDPLFTVGGSPGLLFPPYSRDHDVSAASFAMPNRLLGSIDHFRGMLIEDAGSSKDLRNLCPTAAFDDKFQDTNWMNNDNNSNNNLYAPPKEEAIANVACEPSGSEMRTVTIKASYKDDIIRFRISSGSGIMELKDEVAKRLKVDAGTFDIKYLDDDNEWVLIACDADLQECLEIPRSSRTKIVRLLVHDVTTNLGSSCESTGEL

SEQ ID NO: 87861 - DNA, 1008 bp, Arabidopsis thaliana
  misc_feature (1)..(1008): Ceres Seq. ID no. 12704082
  misc_feature (1)..(1008): Ortholog of  Ceres SEQ ID NO 13596944 as cited in SEQ ID NO 68910
atggatcacaatcattttctttttcctctcctcttcatcatcatcatctcttccttgcacgttttgcgtgcttcgaccacaccttcacactcacacaaactaaaatccgccactaccattagaaaaatcaaccgtagaggaccttacattggccttgtgacggtctttgagaccgaagaagatgcttttctcggcagtgttgatttcagactcgatcctacgcatcctttcctcgatctctctggaagacgttttcgtatagggaagattcatggaaagaaggttgtgtatgtcagatgtgggataggaatggtgaacgcagcagcagcaacacaacaaatgatagatgtgttcagtgtgaaagggattgtgcattttgggattgctggaaatataaacaactcgatgtccataggagatgtgagcatccctaagcaaatcacgaatgctggcttgtgggattggctgaatccaggcaaagcaaaaggaaatgaggatgtagcgtacttagatgtcgggaactataatgttccacaaggaaacaataagttaggaactattggatacagttacgaggaattatattcagtcagtggtcacatcaattcaccaaagaaagtgttttggattaatacaactcaagagtggcttcatcttgcagctgatcttgagaagatggagctattgcagtgtgtgaatgcaagtctgtgtcttccaaataaacccaaagtagtagttggattaaaagcagccactgctgacatatttgtggataatgcagcctatagaaatttcttatacgatacttttggagtttcctcctcagacatggagagttctgctgtggccatgacttgcgtgtcaaatgggtatcccctaattgtgataagaggattatcagatttagcaggagtaggagataacactgttcgaaagtttggatctttggctgccactaacactgccaaagctgttttagagttcattaaaaagctcccaccgtcataa

SEQ ID NO: 87862 - protein, 335 aa, Arabidopsis thaliana
  peptide (1)..(335): Ceres Seq. ID no. 12704083
MDHNHFLFPLLFIIIISSLHVLRASTTPSHSHKLKSATTIRKINRRGPYIGLVTVFETEEDAFLGSVDFRLDPTHPFLDLSGRRFRIGKIHGKKVVYVRCGIGMVNAAAATQQMIDVFSVKGIVHFGIAGNINNSMSIGDVSIPKQITNAGLWDWLNPGKAKGNEDVAYLDVGNYNVPQGNNKLGTIGYSYEELYSVSGHINSPKKVFWINTTQEWLHLAADLEKMELLQCVNASLCLPNKPKVVVGLKAATADIFVDNAAYRNFLYDTFGVSSSDMESSAVAMTCVSNGYPLIVIRGLSDLAGVGDNTVRKFGSLAATNTAKAVLEFIKKLPPS

SEQ ID NO: 87863 - protein, 232 aa, Arabidopsis thaliana
  peptide (1)..(232): Ceres Seq. ID no. 12704084
MVNAAAATQQMIDVFSVKGIVHFGIAGNINNSMSIGDVSIPKQITNAGLWDWLNPGKAKGNEDVAYLDVGNYNVPQGNNKLGTIGYSYEELYSVSGHINSPKKVFWINTTQEWLHLAADLEKMELLQCVNASLCLPNKPKVVVGLKAATADIFVDNAAYRNFLYDTFGVSSSDMESSAVAMTCVSNGYPLIVIRGLSDLAGVGDNTVRKFGSLAATNTAKAVLEFIKKLPPS

SEQ ID NO: 87864 - protein, 222 aa, Arabidopsis thaliana
  peptide (1)..(222): Ceres Seq. ID no. 12704085
MIDVFSVKGIVHFGIAGNINNSMSIGDVSIPKQITNAGLWDWLNPGKAKGNEDVAYLDVGNYNVPQGNNKLGTIGYSYEELYSVSGHINSPKKVFWINTTQEWLHLAADLEKMELLQCVNASLCLPNKPKVVVGLKAATADIFVDNAAYRNFLYDTFGVSSSDMESSAVAMTCVSNGYPLIVIRGLSDLAGVGDNTVRKFGSLAATNTAKAVLEFIKKLPPS

SEQ ID NO: 87865 - DNA, 1189 bp, Arabidopsis thaliana
  misc_feature (1)..(1189): Ceres Seq. ID no. 12704132
  misc_feature (1)..(1189): Ortholog of  Ceres SEQ ID NO 13597757 as cited in SEQ ID NO 65472
gcacagccaaacccccccaattttggcctctcgatttagttttttgaaaccctaagctcgatttcgatcctccggcatactcggtttcgccgccgaatctctgcttgtagcgagtgttactattcaatcggcgagaatgtcgatgtcgaagagttcaaagatgcttcagttcatcaactacaggatgcgagtgacgatccaagacggaagacagctcgttgggaagttcatggcgtttgaccgtcacatgaacctcgttctcggcgattgcgaggagtttcgtaagcttccaccagctaaagggaagaagatcaacgaagagcgtgaagatcgccgtacgctaggtttagtgttgcttagaggtgaagaagttatctcaatgactgtcgaaggaccacctcctcctgaagaatctcgtgctaaagctggctctgcagctgctgttgctggtccaggaattggccgtgccgctgggcgtggagttcctactggtccgttagttcaagctcagcctggtttatctggtcctgttcgtggtgttggtggacctgctccgggaatgatgcagcctcagatctctcgtccaccacagctttcagctcctccgattattcgacctccgggacagatgttgccaccgcctccttttggtggtcaaggtcctcctatgggaagaggtcctccaccgccttatggtatgaggccaccgccacagcagttttctggaccaccaccgcctcagtatgggcaaaggccaatgattcctcctcctggtggtatgatgagaggacctcctcctccacctcatggaatgcaaggacctcctccgcctcgccctggaatgcctcctgctcctggtggttttgctccaccgcgtcctggcatgccaccacataatcagcagcagtgattaggttagcagtgaatgaacaggactcttgtctcggctttttactgtttttgtcgctgttttcttgagattatgaaggctttaagatgtttgattgaacttcctcaggtttacggtatcgtgctatcatgttgcctttcattgactttagccgcaatttctcatctatcttagctttcaaagtttgtagatttgttgacgagtgagttgtctttgccttatcttcttgtgttttcttttaagaacgaatccattaaactttgttatgtcttcttaagg

SEQ ID NO: 87866 - protein, 257 aa, Arabidopsis thaliana
  peptide (1)..(257): Ceres Seq. ID no. 12704133
MSMSKSSKMLQFINYRMRVTIQDGRQLVGKFMAFDRHMNLVLGDCEEFRKLPPAKGKKINEEREDRRTLGLVLLRGEEVISMTVEGPPPPEESRAKAGSAAAVAGPGIGRAAGRGVPTGPLVQAQPGLSGPVRGVGGPAPGMMQPQISRPPQLSAPPIIRPPGQMLPPPPFGGQGPPMGRGPPPPYGMRPPPQQFSGPPPPQYGQRPMIPPPGGMMRGPPPPPHGMQGPPPPRPGMPPAPGGFAPPRPGMPPHNQQQ

SEQ ID NO: 87867 - protein, 255 aa, Arabidopsis thaliana
  peptide (1)..(255): Ceres Seq. ID no. 12704134
MSKSSKMLQFINYRMRVTIQDGRQLVGKFMAFDRHMNLVLGDCEEFRKLPPAKGKKINEEREDRRTLGLVLLRGEEVISMTVEGPPPPEESRAKAGSAAAVAGPGIGRAAGRGVPTGPLVQAQPGLSGPVRGVGGPAPGMMQPQISRPPQLSAPPIIRPPGQMLPPPPFGGQGPPMGRGPPPPYGMRPPPQQFSGPPPPQYGQRPMIPPPGGMMRGPPPPPHGMQGPPPPRPGMPPAPGGFAPPRPGMPPHNQQQ

SEQ ID NO: 87868 - protein, 249 aa, Arabidopsis thaliana
  peptide (1)..(249): Ceres Seq. ID no. 12704135
MLQFINYRMRVTIQDGRQLVGKFMAFDRHMNLVLGDCEEFRKLPPAKGKKINEEREDRRTLGLVLLRGEEVISMTVEGPPPPEESRAKAGSAAAVAGPGIGRAAGRGVPTGPLVQAQPGLSGPVRGVGGPAPGMMQPQISRPPQLSAPPIIRPPGQMLPPPPFGGQGPPMGRGPPPPYGMRPPPQQFSGPPPPQYGQRPMIPPPGGMMRGPPPPPHGMQGPPPPRPGMPPAPGGFAPPRPGMPPHNQQQ

SEQ ID NO: 87869 - DNA, 813 bp, Arabidopsis thaliana
  misc_feature (1)..(813): Ceres Seq. ID no. 12704147
  misc_feature (1)..(813): Ortholog of  Ceres SEQ ID NO 13661768 as cited in SEQ ID NO 61427
  misc_feature (1)..(813): Ortholog of  Ceres SEQ ID NO 15179176 as cited in SEQ ID NO 0
atgaaaaaacacacacaccaaaaatatcagatatctcaaacaatgtcttcagtttttggatctgtccatatcttggccatgatagccatacaactcctccttacacacagtgtttcatctctgaaccttaccaatgcgtatctgcaccacaaatgcagcaacactcaaggaaaatataagcaggggagcgcgttcgagaaaaatctcaacttagtcctcagtaccatcacctcgattggaaattttcgtgacggtttccgctacaccgaagaaggtgaggatcccaataacgtctttgtcatgttccagtgtcgcggcgactcctactggtccaagtgccccccttgcattagcaccgccgtctctgggcttcgtaggagatgtccaagaaataagggagcaataatatggtatgaccaatgtcttttaaagatatcttcagttgcctccttcaataagatagattatgagaacgatttctatttgtccaacccaaacaacatgagtgatcgggggttgttcaacaaggagacgtcggctctcctggagaagctggcatataaagcctccgatagaaacaacttggatggtaaacaattggtgttgtacgcagcaggggagaagagaattgggacaaagaaggtgtatgcaatggtgcagtgtacgaaagacttaatatttacaaagtgctttgagtgtttggaagggattttgaggaagtttccacagtgttgtgacggtaaacgaggagggagagttttcggtacgagctgtaactttaggtatgagttatatccttttcttagaaactaa

SEQ ID NO: 87870 - protein, 270 aa, Arabidopsis thaliana; identical to SEQ ID NO: 35980
  peptide (1)..(270): Ceres Seq. ID no. 12704148

SEQ ID NO: 87871 - protein, 256 aa, Arabidopsis thaliana; identical to SEQ ID NO: 35981
  peptide (1)..(256): Ceres Seq. ID no. 12704149

SEQ ID NO: 87872 - protein, 244 aa, Arabidopsis thaliana; identical to SEQ ID NO: 35982
  peptide (1)..(244): Ceres Seq. ID no. 12704150

SEQ ID NO: 87873 - DNA, 822 bp, Arabidopsis thaliana
  misc_feature (1)..(822): Ceres Seq. ID no. 12704154
  misc_feature (1)..(822): Ortholog of  Ceres SEQ ID NO 15178924 as cited in SEQ ID NO 1050
  misc_feature (1)..(822): Ortholog of  Ceres SEQ ID NO 13661768 as cited in SEQ ID NO 61427
  misc_feature (1)..(822): Ortholog of  Ceres SEQ ID NO 15179239 as cited in SEQ ID NO 0
atgtacccttcatgttctcttttacaacgtctcgtttggttccctttcttagccttggtggccacacaactcctatttatacgcaatgtttcgtccctgaacctgaccaatgagtatctgcatcacaaatgtctcgttagtgaagggaaatataaaccaggaagcaagtacgagtatatccttaacgatcacatccgttttctcgcagccggaaattttcgctcaggttccatgcacatgacaagtggtctaaaacccaatgctgtaaccatcctctaccagtgccgcggtgactcctataattctaagtgccgctcttgctatgctgccggcatctccgggcttcgtaggcgatgtccgagaaacaaaggtgggataatatggttcgatcagtgttttgttgagattacttcaatcagtgtcatcgacttcaacatctcaaagatcaattacgagaacaatttccccttacacaacccgaacagggtaagtggcgatataaagtcattcaacaatgagacaatggctctcctcaaagagttggcgttgaaagcaaataataaagacaacatggacaatggcaagatggcactgtacgcatcaggggagaagagggtcgggacaaagaaggtgtacgcaatggttcagtgtatgagagatctagttaagcctaagatgtgtaaggagtgtttggaaagcattataaaggagtttcccgagtgttgcgacggtaaacaaggagggaggattttgggtacgagctgtgattttaggtatgaactttacccttttctaaggacttcagattcaaaaactgtttga

SEQ ID NO: 87874 - protein, 273 aa, Arabidopsis thaliana
  peptide (1)..(273): Ceres Seq. ID no. 12704155
MYPSCSLLQRLVWFPFLALVATQLLFIRNVSSLNLTNEYLHHKCLVSEGKYKPGSKYEYILNDHIRFLAAGNFRSGSMHMTSGLKPNAVTILYQCRGDSYNSKCRSCYAAGISGLRRRCPRNKGGIIWFDQCFVEITSISVIDFNISKINYENNFPLHNPNRVSGDIKSFNNETMALLKELALKANNKDNMDNGKMALYASGEKRVGTKKVYAMVQCMRDLVKPKMCKECLESIIKEFPECCDGKQGGRILGTSCDFRYELYPFLRTSDSKTV

SEQ ID NO: 87875 - protein, 196 aa, Arabidopsis thaliana
  peptide (1)..(196): Ceres Seq. ID no. 12704156
MHMTSGLKPNAVTILYQCRGDSYNSKCRSCYAAGISGLRRRCPRNKGGIIWFDQCFVEITSISVIDFNISKINYENNFPLHNPNRVSGDIKSFNNETMALLKELALKANNKDNMDNGKMALYASGEKRVGTKKVYAMVQCMRDLVKPKMCKECLESIIKEFPECCDGKQGGRILGTSCDFRYELYPFLRTSDSKTV

SEQ ID NO: 87876 - protein, 194 aa, Arabidopsis thaliana
  peptide (1)..(194): Ceres Seq. ID no. 12704157
MTSGLKPNAVTILYQCRGDSYNSKCRSCYAAGISGLRRRCPRNKGGIIWFDQCFVEITSISVIDFNISKINYENNFPLHNPNRVSGDIKSFNNETMALLKELALKANNKDNMDNGKMALYASGEKRVGTKKVYAMVQCMRDLVKPKMCKECLESIIKEFPECCDGKQGGRILGTSCDFRYELYPFLRTSDSKTV

SEQ ID NO: 87877 - DNA, 513 bp, Arabidopsis thaliana
  misc_feature (1)..(513): Ceres Seq. ID no. 12704158
  misc_feature (1)..(513): Ortholog of  Ceres SEQ ID NO 13661768 as cited in SEQ ID NO 61427
atgttccagtgtcgcggcgactcctactggtccaagtgccccccttgcattagcaccgccgtctctgggcttcgtaggagatgtccaagaaataagggagcaataatatggtatgaccaatgtcttttaaagatatcttcagttgcctccttcaataagatagattatgagaacgatttctatttgtccaacccaaacaacatgagtgatcgggggttgttcaacaaggagacgtcggctctcctggagaagctggcatataaagcctccgatagaaacaacttggatggtaaacaattggtgttgtacgcagcaggggagaagagaattgggacaaagaaggtgtatgcaatggtgcagtgtacgaaagacttaatatttacaaagtgctttgagtgtttggaagggattttgaggaagtttccacagtgttgtgacggtaaacgaggagggagagttttcggtacgagctgtaactttaggtatgagttatatccttttcttagaaactaa

SEQ ID NO: 87878 - protein, 170 aa, Arabidopsis thaliana
  peptide (1)..(170): Ceres Seq. ID no. 12704159
MFQCRGDSYWSKCPPCISTAVSGLRRRCPRNKGAIIWYDQCLLKISSVASFNKIDYENDFYLSNPNNMSDRGLFNKETSALLEKLAYKASDRNNLDGKQLVLYAAGEKRIGTKKVYAMVQCTKDLIFTKCFECLEGILRKFPQCCDGKRGGRVFGTSCNFRYELYPFLRN

SEQ ID NO: 87879 - protein, 103 aa, Arabidopsis thaliana
  peptide (1)..(103): Ceres Seq. ID no. 12704160
MSDRGLFNKETSALLEKLAYKASDRNNLDGKQLVLYAAGEKRIGTKKVYAMVQCTKDLIFTKCFECLEGILRKFPQCCDGKRGGRVFGTSCNFRYELYPFLRN

SEQ ID NO: 87880 - DNA, 909 bp, Arabidopsis thaliana
  misc_feature (1)..(909): Ceres Seq. ID no. 12704214
  misc_feature (1)..(909): Ortholog of  Ceres SEQ ID NO 12617391 as cited in SEQ ID NO 64114
  misc_feature (1)..(909): Ortholog of  Ceres SEQ ID NO 13595922 as cited in SEQ ID NO 69293
  misc_feature (1)..(909): Ortholog of  Ceres SEQ ID NO 12635496 as cited in SEQ ID NO 0
atggataccaacgcaaaaacaattttcttcatggctatgtgtttcatctatctatctttccctaatatttcacacgctcattctgaagtcgacgacgaaactccatttacttacgaacaaaaaacggaaaagggaccagagggatggggcaaaataaatccgcactggaaagtttgtaacaccggaagatatcaatccccgatcgatcttactaacgaaagagtcagtcttattcatgatcaagcatggacaagacaatataaaccagctccggctgtaattacaaacagaggccatgacattatggtatcatggaaaggagatgctgggaagatgacaatacggaaaacggattttaatttggtgcaatgccattggcattcaccttctgagcataccgttaacggaactaggtacgacctagagcttcacatggttcacacgagtgcacgaggcagaactgcggttatcggagttctttacaaattaggcgaacctaatgaattcctcaccaagctactaaatggaataaaagcagtgggaaataaagagataaatctagggatgattgatccacgagagattaggtttcaaacaagaaaattctatagatacattggctctctcactgttcctccttgcactgaaggcgtcatttggactgtcgtcaaaagggtgaacacaatatcaatggagcaaattacagctcttaggcaagccgttgacgatggatttgagacaaattcaagaccggttcaagactcaaagggaagatcagtttggttctatgatccaaatgatttcagtaactttatgtttttttcgtcacttatgtatcaagtttcttgttattatttttctatgaaaatgaaagaaattcagtctatggaatggaagcatgaaaattag

SEQ ID NO: 87881 - protein, 302 aa, Arabidopsis thaliana
  peptide (1)..(302): Ceres Seq. ID no. 12704215
MDTNAKTIFFMAMCFIYLSFPNISHAHSEVDDETPFTYEQKTEKGPEGWGKINPHWKVCNTGRYQSPIDLTNERVSLIHDQAWTRQYKPAPAVITNRGHDIMVSWKGDAGKMTIRKTDFNLVQCHWHSPSEHTVNGTRYDLELHMVHTSARGRTAVIGVLYKLGEPNEFLTKLLNGIKAVGNKEINLGMIDPREIRFQTRKFYRYIGSLTVPPCTEGVIWTVVKRVNTISMEQITALRQAVDDGFETNSRPVQDSKGRSVWFYDPNDFSNFMFFSSLMYQVSCYYFSMKMKEIQSMEWKHEN

SEQ ID NO: 87882 - protein, 292 aa, Arabidopsis thaliana
  peptide (1)..(292): Ceres Seq. ID no. 12704216
MAMCFIYLSFPNISHAHSEVDDETPFTYEQKTEKGPEGWGKINPHWKVCNTGRYQSPIDLTNERVSLIHDQAWTRQYKPAPAVITNRGHDIMVSWKGDAGKMTIRKTDFNLVQCHWHSPSEHTVNGTRYDLELHMVHTSARGRTAVIGVLYKLGEPNEFLTKLLNGIKAVGNKEINLGMIDPREIRFQTRKFYRYIGSLTVPPCTEGVIWTVVKRVNTISMEQITALRQAVDDGFETNSRPVQDSKGRSVWFYDPNDFSNFMFFSSLMYQVSCYYFSMKMKEIQSMEWKHEN

SEQ ID NO: 87883 - protein, 290 aa, Arabidopsis thaliana
  peptide (1)..(290): Ceres Seq. ID no. 12704217
MCFIYLSFPNISHAHSEVDDETPFTYEQKTEKGPEGWGKINPHWKVCNTGRYQSPIDLTNERVSLIHDQAWTRQYKPAPAVITNRGHDIMVSWKGDAGKMTIRKTDFNLVQCHWHSPSEHTVNGTRYDLELHMVHTSARGRTAVIGVLYKLGEPNEFLTKLLNGIKAVGNKEINLGMIDPREIRFQTRKFYRYIGSLTVPPCTEGVIWTVVKRVNTISMEQITALRQAVDDGFETNSRPVQDSKGRSVWFYDPNDFSNFMFFSSLMYQVSCYYFSMKMKEIQSMEWKHEN

SEQ ID NO: 87884 - DNA, 1785 bp, Arabidopsis thaliana
  misc_feature (1)..(1785): Ceres Seq. ID no. 12704238
  misc_feature (1)..(1785): Ortholog of  Ceres SEQ ID NO 13596319 as cited in SEQ ID NO 67933
atggcttcgggtggtggtgacgatgggcttcgtcggcgaggctgttcatgcacaaaagacgatttcttaccggaagaatcgttccaaagcatggggaattacctaaaagcccttaaagaaacaccgagtcggttcatggatcgtattatgactcggtcactagactccgacgagattaacgagatgaaggctcgtagtggtcacgagatgaagaagacgttgacgtggtgggatctcatgtggtttggtatcggtgcagtcatcggctctgggatattcgttctcactggactcgaagcacgtaatcattccggtccagccgtcgtgttgtcttacgttgtctctggtgtctccgccatgctctccgtcttttgttacaccgagttcgccgttgagattcccgtcgcaggcggttcttttgcctacttaagagtggagctcggcgacttcatggccttcatcgccgcgggaaacataatcctcgaatacgttgtcggtggagctgccgtggctcgatcgtggacctcttacttcgccactctcttaaaccataaacctgaagacttccgcatcatagttcacaaactcggcgaagactatagccacttagatccaatagccgtcggcgtttgcgccatcatttgtgttttagctgtcgttggcacaaaaggctcctcaagattcaattacattgcttctataatccacatggtcgtgattctctttgttatcatcgccggatttactaaagccgatgtgaaaaactacagcgatttcactccttacggcgttagaggagtgtttaaatccgccgcggttcttttctttgcctatattggatttgatgcggtttcaacgatggctgaggagacaaagaatccagggagagatattcctattggtcttgttggatcgatggtggttactacggtttgttattgtctcatggcggttacgttgtgtcttatgcagccgtatcaacagattgatccggacgcgccattctcggttgcgttttctgccgttggatgggattgggctaagtacattgtcgcctttggggctcttaaaggtatgacgacggttttgttagttggggccattggtcaagctaggtacatgacacacatagcccgagcccatatgatgcctccatggctagctcaagtcaacgcaaagaccggaacaccaattaacgcgaccgtggtaatgcttgccgcgacagctctcatagcattcttcacaaaactgaaaattttagccgatctcttgtctgtttccacacttttcatcttcatgttcgttgctgtggctcttctcgttagaagatattacgtcaccggagaaacatcgacccgtgaccgtaacaagtttttagtgttcttaggtttgattcttgcgtcctctaccgcgactgctgtttattgggctttggaagaagaaggttggattgggtattgcattacggttcctatatggtttctgtctacggttgccatgaagtttcttgtaccgcaagctagggctccgaaaatttggggtgttcctttggttccgtggttgccttctgcttccatcgctattaatatcttccttcttggttccatcgatacaaaatcgttcgttaggtttgcaatctggacaggtattctgctcatatattacgtcttgtttgggttgcacgcaacgtatgatacagctaaggcgacgttgaaggagaagcaggcattgcagaaagctgaggaaggtggtgttgttgctgataattcttgttctgcaacttaa

SEQ ID NO: 87885 - protein, 594 aa, Arabidopsis thaliana
  peptide (1)..(594): Ceres Seq. ID no. 12704239
MASGGGDDGLRRRGCSCTKDDFLPEESFQSMGNYLKALKETPSRFMDRIMTRSLDSDEINEMKARSGHEMKKTLTWWDLMWFGIGAVIGSGIFVLTGLEARNHSGPAVVLSYVVSGVSAMLSVFCYTEFAVEIPVAGGSFAYLRVELGDFMAFIAAGNIILEYVVGGAAVARSWTSYFATLLNHKPEDFRIIVHKLGEDYSHLDPIAVGVCAIICVLAVVGTKGSSRFNYIASIIHMVVILFVIIAGFTKADVKNYSDFTPYGVRGVFKSAAVLFFAYIGFDAVSTMAEETKNPGRDIPIGLVGSMVVTTVCYCLMAVTLCLMQPYQQIDPDAPFSVAFSAVGWDWAKYIVAFGALKGMTTVLLVGAIGQARYMTHIARAHMMPPWLAQVNAKTGTPINATVVMLAATALIAFFTKLKILADLLSVSTLFIFMFVAVALLVRRYYVTGETSTRDRNKFLVFLGLILASSTATAVYWALEEEGWIGYCITVPIWFLSTVAMKFLVPQARAPKIWGVPLVPWLPSASIAINIFLLGSIDTKSFVRFAIWTGILLIYYVLFGLHATYDTAKATLKEKQALQKAEEGGVVADNSCSAT

SEQ ID NO: 87886 - protein, 564 aa, Arabidopsis thaliana
  peptide (1)..(564): Ceres Seq. ID no. 12704240
MGNYLKALKETPSRFMDRIMTRSLDSDEINEMKARSGHEMKKTLTWWDLMWFGIGAVIGSGIFVLTGLEARNHSGPAVVLSYVVSGVSAMLSVFCYTEFAVEIPVAGGSFAYLRVELGDFMAFIAAGNIILEYVVGGAAVARSWTSYFATLLNHKPEDFRIIVHKLGEDYSHLDPIAVGVCAIICVLAVVGTKGSSRFNYIASIIHMVVILFVIIAGFTKADVKNYSDFTPYGVRGVFKSAAVLFFAYIGFDAVSTMAEETKNPGRDIPIGLVGSMVVTTVCYCLMAVTLCLMQPYQQIDPDAPFSVAFSAVGWDWAKYIVAFGALKGMTTVLLVGAIGQARYMTHIARAHMMPPWLAQVNAKTGTPINATVVMLAATALIAFFTKLKILADLLSVSTLFIFMFVAVALLVRRYYVTGETSTRDRNKFLVFLGLILASSTATAVYWALEEEGWIGYCITVPIWFLSTVAMKFLVPQARAPKIWGVPLVPWLPSASIAINIFLLGSIDTKSFVRFAIWTGILLIYYVLFGLHATYDTAKATLKEKQALQKAEEGGVVADNSCSAT

SEQ ID NO: 87887 - protein, 549 aa, Arabidopsis thaliana
  peptide (1)..(549): Ceres Seq. ID no. 12704241
MDRIMTRSLDSDEINEMKARSGHEMKKTLTWWDLMWFGIGAVIGSGIFVLTGLEARNHSGPAVVLSYVVSGVSAMLSVFCYTEFAVEIPVAGGSFAYLRVELGDFMAFIAAGNIILEYVVGGAAVARSWTSYFATLLNHKPEDFRIIVHKLGEDYSHLDPIAVGVCAIICVLAVVGTKGSSRFNYIASIIHMVVILFVIIAGFTKADVKNYSDFTPYGVRGVFKSAAVLFFAYIGFDAVSTMAEETKNPGRDIPIGLVGSMVVTTVCYCLMAVTLCLMQPYQQIDPDAPFSVAFSAVGWDWAKYIVAFGALKGMTTVLLVGAIGQARYMTHIARAHMMPPWLAQVNAKTGTPINATVVMLAATALIAFFTKLKILADLLSVSTLFIFMFVAVALLVRRYYVTGETSTRDRNKFLVFLGLILASSTATAVYWALEEEGWIGYCITVPIWFLSTVAMKFLVPQARAPKIWGVPLVPWLPSASIAINIFLLGSIDTKSFVRFAIWTGILLIYYVLFGLHATYDTAKATLKEKQALQKAEEGGVVADNSCSAT

SEQ ID NO: 87888 - DNA, 696 bp, Arabidopsis thaliana
  misc_feature (1)..(696): Ceres Seq. ID no. 12704242
  misc_feature (1)..(696): Ortholog of  Ceres SEQ ID NO 13583590 as cited in SEQ ID NO 62482
atgatcagattcgcgagaccaaaacctataattgactcagtgagttacaatcttctccagaaatgttacgctagtggaacccccaaaggaaaatcgaagctgaagacaggccaatcattgaaacgcaacaaactcacaatcaaaaaaggcggtggaaacggcggtggcagaggtggtgatgaggtggataagggaaaaggaagaatctcagatcaatgcataaacgctccttgtcctgttcgttacctgagacctaaggaaagagagcgagaagcgagacgagagaagctagggctaatcagtaaagcgaggcaaaaagagattgattttcagaagaaaggtggatcctttacgatgggagttactactgcgccgatgaggattgggactccaggattggattacatttcgttagggatttttacggaagatgagttaccaaagtataaggttacagtggaggatgggattagacttgcgaaagagtatagtagagtgcttatgagagagcatagagcgagacgtgtagcggagattagtttgatgaagatgaggaacgctgcggttgaggcattgccggagaatttgaagaaggcggctttagtgcgtgatttgactccgtttccggtgagtcgaggtacgaggattatgaatgctgcggctaggaagagctctggtaaagagaagttgagatga

SEQ ID NO: 87889 - protein, 231 aa, Arabidopsis thaliana
  peptide (1)..(231): Ceres Seq. ID no. 12704243
MIRFARPKPIIDSVSYNLLQKCYASGTPKGKSKLKTGQSLKRNKLTIKKGGGNGGGRGGDEVDKGKGRISDQCINAPCPVRYLRPKEREREARREKLGLISKARQKEIDFQKKGGSFTMGVTTAPMRIGTPGLDYISLGIFTEDELPKYKVTVEDGIRLAKEYSRVLMREHRARRVAEISLMKMRNAAVEALPENLKKAALVRDLTPFPVSRGTRIMNAAARKSSGKEKLR

SEQ ID NO: 87890 - DNA, 1017 bp, Arabidopsis thaliana
  misc_feature (1)..(1017): Ceres Seq. ID no. 12704257
  misc_feature (1)..(1017): Ortholog of  Ceres SEQ ID NO 15175492 as cited in SEQ ID NO 56277
  misc_feature (1)..(1017): Ortholog of  Ceres SEQ ID NO 13582350 as cited in SEQ ID NO 56734
  misc_feature (1)..(1017): Ortholog of  Ceres SEQ ID NO 12476493 as cited in SEQ ID NO 58163
  misc_feature (1)..(1017): Ortholog of  Ceres SEQ ID NO 13597295 as cited in SEQ ID NO 63743
  misc_feature (1)..(1017): Ortholog of  Ceres SEQ ID NO 12617090 as cited in SEQ ID NO 64005
  misc_feature (1)..(1017): Ortholog of  Ceres SEQ ID NO 13597439 as cited in SEQ ID NO 64081
  misc_feature (1)..(1017): Ortholog of  Ceres SEQ ID NO 13597233 as cited in SEQ ID NO 64370
  misc_feature (1)..(1017): Ortholog of  Ceres SEQ ID NO 13598327 as cited in SEQ ID NO 68040
atggatccaccattcaacgaaatatacaataaccttttgtataatcagatcacaaagaaagataacgatgtttctgaaataccctttagcttctcagtcacagccgtcgtcgaggaggtggagcttcctgtgattgacgtcagccgtttgattgatggagccgaggaggagagagagaaatgtaaggaagcgattgcgagagcttcgagggagtggggattttttcaagtgataaaccatggaatatcaatggatgtgttggagaagatgagacaagagcaaattagggtctttagagagccttttgacaagaaaagtaagtcggagaaattttccgccgggagttaccggtggggaacgccgtcagccacttctatccggcagctttcttggtcagaagcttttcatgttcccatgacagatatttctgacaacaaggactttactactctcagctcaacaatggagaaatttgcttcggaatcagaggcattagcatatatgttggcagaggttcttgcagaaaaatctggacaaaattcaagtttcttcaaagaaaactgtgtgagaaatacatgttatctaaggatgaaccgatatccaccttgtcccaaaccatcggaggtgtacggattaatgccacacacggacagtgatttcctcacaatcttgtatcaagatcaagtcggaggactccaacttatcaaagacaatagatggatcgctgttaaacctaatcctaaagctctcattatcaatattggtgacttatttcaggcatggagcaatggcatgtacaaaagtgttgaacaccgtgtgatgacgaacccaaaggtggagagattctcaacggcttattttatgtgtccatcatacgacgccgttatagagtgttcaagtgatcgtcctgcttatagaaatttcagcttcagagaattcagacaacaagttcaagaagatgttaagaagtttggttttaaagttggccttcctaggttccttaatcacgtctactaa

SEQ ID NO: 87891 - protein, 338 aa, Arabidopsis thaliana
  peptide (1)..(338): Ceres Seq. ID no. 12704258
MDPPFNEIYNNLLYNQITKKDNDVSEIPFSFSVTAVVEEVELPVIDVSRLIDGAEEEREKCKEAIARASREWGFFQVINHGISMDVLEKMRQEQIRVFREPFDKKSKSEKFSAGSYRWGTPSATSIRQLSWSEAFHVPMTDISDNKDFTTLSSTMEKFASESEALAYMLAEVLAEKSGQNSSFFKENCVRNTCYLRMNRYPPCPKPSEVYGLMPHTDSDFLTILYQDQVGGLQLIKDNRWIAVKPNPKALIINIGDLFQAWSNGMYKSVEHRVMTNPKVERFSTAYFMCPSYDAVIECSSDRPAYRNFSFREFRQQVQEDVKKFGFKVGLPRFLNHVY

SEQ ID NO: 87892 - protein, 255 aa, Arabidopsis thaliana
  peptide (1)..(255): Ceres Seq. ID no. 12704259
MDVLEKMRQEQIRVFREPFDKKSKSEKFSAGSYRWGTPSATSIRQLSWSEAFHVPMTDISDNKDFTTLSSTMEKFASESEALAYMLAEVLAEKSGQNSSFFKENCVRNTCYLRMNRYPPCPKPSEVYGLMPHTDSDFLTILYQDQVGGLQLIKDNRWIAVKPNPKALIINIGDLFQAWSNGMYKSVEHRVMTNPKVERFSTAYFMCPSYDAVIECSSDRPAYRNFSFREFRQQVQEDVKKFGFKVGLPRFLNHVY

SEQ ID NO: 87893 - protein, 249 aa, Arabidopsis thaliana
  peptide (1)..(249): Ceres Seq. ID no. 12704260
MRQEQIRVFREPFDKKSKSEKFSAGSYRWGTPSATSIRQLSWSEAFHVPMTDISDNKDFTTLSSTMEKFASESEALAYMLAEVLAEKSGQNSSFFKENCVRNTCYLRMNRYPPCPKPSEVYGLMPHTDSDFLTILYQDQVGGLQLIKDNRWIAVKPNPKALIINIGDLFQAWSNGMYKSVEHRVMTNPKVERFSTAYFMCPSYDAVIECSSDRPAYRNFSFREFRQQVQEDVKKFGFKVGLPRFLNHVY

SEQ ID NO: 87894 - DNA, 1929 bp, Arabidopsis thaliana
  misc_feature (1)..(1929): Ceres Seq. ID no. 12704265
  misc_feature (1)..(1929): Ortholog of  Ceres SEQ ID NO 13655640 as cited in SEQ ID NO 63844
  misc_feature (1)..(1929): Ortholog of  Ceres SEQ ID NO 13584744 as cited in SEQ ID NO 69137
atggcttctacttcaataatgctttcttccttcttctccttcttcttcttgactttttttgtcacttatgctcagcaaaacgtcaccgttcacacaatttgctactacgatggaggtaacttcacatccaacacttcatattcccttaatctcaaccgtctgatctcgtctttacctgatctaactccaaccatcaacggcttctacaatatctccatcaatggagaagtcaacgccatagctttatgcagaggagatgtcaagccaaatcaagattgcatcagttgcatcaccaccgccgcaaagcagctcgtagagagctgtccaaacatcatcgaagccaatatttggcttgagaaatgcatgtttcgttacacaagtcgaattatcttaggtcaaatggagccggttcctttttcttatacatcaagtaatgttagtgtgacagacaaggaaggtttcagcaagggtttaggtgacctattggattcattaggagcaaaaatcgatgctgcgaatgagaccaaagaggttaagtttgcagcaggagtgaaaggaacgatctacgcgttggctcagtgtacaccagatttgtctgaatcagattgtagaatctgtcttgctcagatctttgctggagttcccacttgttgtgatggaaagacaggtggatggtggactaatccaagttgctatttcaggtttgaagtgtatccgtttttcgatctttcagttacttcagaacagaagcaacctctttcttctcataataataacaccagaagaagtgatcaaggaaaaagtaaagaccggtctaaaactctcatctttgcggtggttcccattgtggcgatcatattaggtcttgtgtttctctttatctacttaaagaggaggaggaaaaagaagaccctgaaggaaaatgctgaaaatgaatttgagagtacagactcattgcattttgattttgagaccataagagtagcaacagatgatttttccttaacgaataagatcggtgaaggtggttttggcgttgtctacaagggtcatctcccagatggactagagatagctgtgaaaaggttatccatacattcaggacaaggcaatgcagagtttaagacagaagtactcttaatgactaagctgcaacacaagaatcttgttaaactctttggtttctccatcaaagaatctgaaagacttcttgtatatgagtttatcccaaatacaagtcttgatcggttcttgttcgatcctatcaagcagaagcaactagactgggaaaaacggtacaatatcatcgtaggagtttcccggggattgctttacctacacgaaggctcggagtttccgataatccaccgtgatctcaaatcctccaatgtgcttttagatgaacaaatgctacctaagatctcagattttggaatggcaagacaattcgatttcgataatactcaagcagtaacaagaagagttgttggaacttatggatatatggctccagagtatgcaatgcacggaagattctcagtgaaaacagatgtttatagctttggagttcttgtacttgagatcattacaggtaaaagaaacagtggattaggtcttggtgaaggaacagatctccccacatttgcttggcaaaattggattgaaggaacatcaatggaactaatagatcctgttcttctgcaaactcacgacaagaaagaatcaatgcaatgcttagaaattgctctgtcttgtgttcaagagaatcctacaaaaagaccaactatggattcagttgtttcaatgcttagctctgattctgagtctcgtcagcttccaaaaccatcgcagcctggtttcttcagaagatcagcgtcgttttcgatttctttaaatgatgtttctctcacagatttgtctgcacgttag

SEQ ID NO: 87895 - protein, 642 aa, Arabidopsis thaliana
  peptide (1)..(642): Ceres Seq. ID no. 12704266
MASTSIMLSSFFSFFFLTFFVTYAQQNVTVHTICYYDGGNFTSNTSYSLNLNRLISSLPDLTPTINGFYNISINGEVNAIALCRGDVKPNQDCISCITTAAKQLVESCPNIIEANIWLEKCMFRYTSRIILGQMEPVPFSYTSSNVSVTDKEGFSKGLGDLLDSLGAKIDAANETKEVKFAAGVKGTIYALAQCTPDLSESDCRICLAQIFAGVPTCCDGKTGGWWTNPSCYFRFEVYPFFDLSVTSEQKQPLSSHNNNTRRSDQGKSKDRSKTLIFAVVPIVAIILGLVFLFIYLKRRRKKKTLKENAENEFESTDSLHFDFETIRVATDDFSLTNKIGEGGFGVVYKGHLPDGLEIAVKRLSIHSGQGNAEFKTEVLLMTKLQHKNLVKLFGFSIKESERLLVYEFIPNTSLDRFLFDPIKQKQLDWEKRYNIIVGVSRGLLYLHEGSEFPIIHRDLKSSNVLLDEQMLPKISDFGMARQFDFDNTQAVTRRVVGTYGYMAPEYAMHGRFSVKTDVYSFGVLVLEIITGKRNSGLGLGEGTDLPTFAWQNWIEGTSMELIDPVLLQTHDKKESMQCLEIALSCVQENPTKRPTMDSVVSMLSSDSESRQLPKPSQPGFFRRSASFSISLNDVSLTDLSAR

SEQ ID NO: 87896 - protein, 636 aa, Arabidopsis thaliana
  peptide (1)..(636): Ceres Seq. ID no. 12704267
MLSSFFSFFFLTFFVTYAQQNVTVHTICYYDGGNFTSNTSYSLNLNRLISSLPDLTPTINGFYNISINGEVNAIALCRGDVKPNQDCISCITTAAKQLVESCPNIIEANIWLEKCMFRYTSRIILGQMEPVPFSYTSSNVSVTDKEGFSKGLGDLLDSLGAKIDAANETKEVKFAAGVKGTIYALAQCTPDLSESDCRICLAQIFAGVPTCCDGKTGGWWTNPSCYFRFEVYPFFDLSVTSEQKQPLSSHNNNTRRSDQGKSKDRSKTLIFAVVPIVAIILGLVFLFIYLKRRRKKKTLKENAENEFESTDSLHFDFETIRVATDDFSLTNKIGEGGFGVVYKGHLPDGLEIAVKRLSIHSGQGNAEFKTEVLLMTKLQHKNLVKLFGFSIKESERLLVYEFIPNTSLDRFLFDPIKQKQLDWEKRYNIIVGVSRGLLYLHEGSEFPIIHRDLKSSNVLLDEQMLPKISDFGMARQFDFDNTQAVTRRVVGTYGYMAPEYAMHGRFSVKTDVYSFGVLVLEIITGKRNSGLGLGEGTDLPTFAWQNWIEGTSMELIDPVLLQTHDKKESMQCLEIALSCVQENPTKRPTMDSVVSMLSSDSESRQLPKPSQPGFFRRSASFSISLNDVSLTDLSAR

SEQ ID NO: 87897 - protein, 521 aa, Arabidopsis thaliana
  peptide (1)..(521): Ceres Seq. ID no. 12704268
MFRYTSRIILGQMEPVPFSYTSSNVSVTDKEGFSKGLGDLLDSLGAKIDAANETKEVKFAAGVKGTIYALAQCTPDLSESDCRICLAQIFAGVPTCCDGKTGGWWTNPSCYFRFEVYPFFDLSVTSEQKQPLSSHNNNTRRSDQGKSKDRSKTLIFAVVPIVAIILGLVFLFIYLKRRRKKKTLKENAENEFESTDSLHFDFETIRVATDDFSLTNKIGEGGFGVVYKGHLPDGLEIAVKRLSIHSGQGNAEFKTEVLLMTKLQHKNLVKLFGFSIKESERLLVYEFIPNTSLDRFLFDPIKQKQLDWEKRYNIIVGVSRGLLYLHEGSEFPIIHRDLKSSNVLLDEQMLPKISDFGMARQFDFDNTQAVTRRVVGTYGYMAPEYAMHGRFSVKTDVYSFGVLVLEIITGKRNSGLGLGEGTDLPTFAWQNWIEGTSMELIDPVLLQTHDKKESMQCLEIALSCVQENPTKRPTMDSVVSMLSSDSESRQLPKPSQPGFFRRSASFSISLNDVSLTDLSAR

SEQ ID NO: 87898 - DNA, 327 bp, Arabidopsis thaliana
  misc_feature (1)..(327): Ceres Seq. ID no. 12704299
  misc_feature (1)..(327): Ortholog of  Ceres SEQ ID NO 15172800 as cited in SEQ ID NO 60137
atgggactttgtttggtaagagcaagtgccgagaccggagaagaagaatccgacgatcaaaacaagcctgagagaagaagtttcttgagcttagcagaagctggtctagtcgaaatctcaggccttggtgcacacgagaagtttctctgtcgactaacgatatcatcattgaatttgctaagagtgatatcagagcaagaaggatgttcaatagaagagttgaatgctggcaaaatatgtgattggttccttaaggacaagctgaagagagagcataacattgaatctgctgttcttcaatgggatgatcccgattttcctttttaa

SEQ ID NO: 87899 - protein, 108 aa, Arabidopsis thaliana; identical to SEQ ID NO: 50795
  peptide (1)..(108): Ceres Seq. ID no. 12704300

SEQ ID NO: 87900 - DNA, 1248 bp, Arabidopsis thaliana
  misc_feature (1)..(1248): Ceres Seq. ID no. 12704304
  misc_feature (1)..(1248): Ortholog of  Ceres SEQ ID NO 14316522 as cited in SEQ ID NO 58267
atgagaggagctctgttcagaaatgcatctctctgcgctcgcagaatcattctttcttctaggatctcccccaatgttccctttctcactccaatcgccgctccggctcctcccaaattcagatttttcagttccgaatccggtgagaactcgactactgccactgagtcttcgccgactgattcatccgataagaaggatctcgttgtaaaggatgtcagcaacaaagagcttaaaagccgtatagacaagtctttcaatgagggtaatgaagatgctttacctggagttattgaagcacttctacagagaagacttgtagacaaacacgcagagactgatgatgaattgatggaaaaaatcgagagtctacctttcaaagatgatgtcaaggatgaagattttgaatccgatttcgaagaagcgcattctactgacgaagaacttgaggatttgtacaactctcccgagtatgtagctgaaaagatgaggaagaaagaatttttcaacatggacgataacaagtgggatcacatgattagagaaggtatccaacatggctgtcttaccgatactaaacaatgcgaggagattctcgaggatatgctcaaatgggaccagcttcttcctgatgacttgaagaaaaaagttgaagcaaagtttaatgagctcggggatatgtgtgaaagaggtgaaattgaggccgaagcagcttatgagcttttcaaggaatttgaagatgagatggtaattcagtatggggatcagatggaagctgagggtcctccccaatttggtgaaacagatacttctgacaggaatactgacttggatgatccctccggtaaaggcccaatcctcaggtggcaatcaaggatagtttttgctcctggaggtgatgcgtggcatccaaagaacaggaaagttaaaatgtctgttacagtgaaagagcttgggctctcaaatcatcaggctaaaaggctaagggaacttgtgggaaaaagataccattcagggaaagatgagcttacaatcacctgcgagaggtttgaacaccgagaagaaaacaggaaagactgcttgagaactctttacgggttgatagaggaagctgggaaagccaacaagatcgctgaagacataagaacttcatatgtaaaacagagactccgagccagtccagcttttatgcagaaactacaagccaagatcataaggtctaaagaatcaaatgccatcaacgcttga

SEQ ID NO: 87901 - protein, 415 aa, Arabidopsis thaliana; identical to SEQ ID NO: 85192
  peptide (1)..(415): Ceres Seq. ID no. 12704305

SEQ ID NO: 87902 - protein, 298 aa, Arabidopsis thaliana; identical to SEQ ID NO: 85193
  peptide (1)..(298): Ceres Seq. ID no. 12704306

SEQ ID NO: 87903 - protein, 253 aa, Arabidopsis thaliana
  peptide (1)..(253): Ceres Seq. ID no. 12704307
MRKKEFFNMDDNKWDHMIREGIQHGCLTDTKQCEEILEDMLKWDQLLPDDLKKKVEAKFNELGDMCERGEIEAEAAYELFKEFEDEMVIQYGDQMEAEGPPQFGETDTSDRNTDLDDPSGKGPILRWQSRIVFAPGGDAWHPKNRKVKMSVTVKELGLSNHQAKRLRELVGKRYHSGKDELTITCERFEHREENRKDCLRTLYGLIEEAGKANKIAEDIRTSYVKQRLRASPAFMQKLQAKIIRSKESNAINA

SEQ ID NO: 87904 - DNA, 2988 bp, Arabidopsis thaliana
  misc_feature (1)..(2988): Ceres Seq. ID no. 12704353
  misc_feature (1)..(2988): Ortholog of  Ceres SEQ ID NO 13656662 as cited in SEQ ID NO 65594
atggattattgttctttgttggttgtctcgttcttgatcactgttatgaccgttcttgcttctaaagagaacgatcatgagctaataaaaagtgatcaaatctctttgctttctttcaaatcatccattgtttcagatcctcaaaactctctaagcagttggatttcttcttcttcttcttcgtcttctatgctcgttgatgtttgtaattggtctggtgtgaagtgtaacaaagagagcactcaagtaatcgagcttgatatcagtggtagagatctcggcggcgaaatctcaccgtcgatcgctaatctaaccggtttaacggttcttgatctttcgagaaacttcttcgttggaaaaatcccacctgagataggttcattgcatgaaacattgaagcagctaagtctctctgagaatcttttacatggaaacattccacaagagcttggtttgcttaaccgtcttgtttatctcgatcttggaagcaaccggttaaacggttcaatcccggttcagctcttttgcaacggctcttcttcatctctacaatacatagacctttccaacaactctttaaccggagagatccctttaaattaccattgtcacctcaaagaacttcggtttcttcttctctggtccaacaagctcaccggtactgtcccgtcttctctctcaaactctacgaatctcaagtggatggatttggagtcaaatatgttaagtggagagttaccttctcaagtcataagcaagatgccacaacttcagtttctttacctttcttataaccatttcgttagccacaacaataacacaaacctcgaaccttttttcgcctctctcgccaattcctctgacctacaagagcttgagttagccggaaacagcctcggaggagagattacttcttccgtaaggcacctctctgtaaatcttgtgcagattcatcttgatcaaaaccgtatccatggctctatacctccagagatatcaaaccttttgaacctaactcttctaaacttgtcgagtaacctcttgtccggtcctatcccgcgtgagctctgtaagctaagcaagctcgaaagggtttatctctcgaataatcacctaaccggcgaaatccctatggaactcggggatattcctcgccttggtcttcttgatgtttctagaaacaatctttctggttcaatccctgatagtttcggaaacctttctcagctgagaagacttcttctgtacggaaaccatctctctggtactgtccctcaaagcctcggcaaatgtatcaatcttgagattcttgatctctctcacaacaacctcacagggaccatacctgttgaagttgtctccaatctcagaaacctgaagctgtatctcaacctctctagcaaccacttaagcggtccaatacctttggagctaagcaaaatggatatggttctctccgttgatctgtcttccaacgaactctcagggaagattccgcctcagctcggaagctgcattgcattagagcatctgaatctttcaagaaacggtttctccagtacgcttccttcatcattaggccaacttccatatctgaaagagctagatgtgtcttttaacagattaaccggagctataccgccttcttttcaacagtcttcgactctcaagcacttgaatttctccttcaacttgctctctggtaatgtatctgacaaaggatcattctctaagctgactattgagtcttttcttggagattctctcttgtgtggctctataaaaggcatgcaagcctgcaagaagaaacacaagtacccttctgttcttctaccggttctgttatcgttgatcgcaactcctgttctgtgtgtgttcgggtaccctttggtccaaagatcaagatttggaaagaatctaacagtgtatgccaaagaagaggtggaagacgaggaaaaacagaaccaaaatgacccgaagtacccgagaatatcgtatcagcagctcatagcagctactggaggtttcaatgcttctagcttgattggttcagggagatttggtcatgtttataagggagttctcagaaacaacacgaaggtcgcggtaaaagtacttgatccaaagaccgcactggagttctcggggagtttcaaaagagaatgtcagatcttgaagagaacaagacacaggaacttgatcaggatcatcactacgtgcagcaaacctggtttcaacgctcttgttctgccactgatgccaaatggaagcttggagaggcacttatacccgggagagtactcgagcaagaacttagatttgattcagttggtgaatatatgcagcgatgttgctgaaggaatagcttacttgcatcactattcacctgtaaaagttgttcactgtgatctcaaaccgagcaatatccttcttgatgatgaaatgaccgctctggttacggattttgggatttcaagattggttcaaggtgttgaagaaacagtttctacagatgattcagtgtcatttggctcaacagatggattgttatgtggatcagtcggttacattgcaccagaatacgggatggggaaacgcgcatcgacacatggagatgtgtacagttttggtgttctcctgctagagattgtaagcggaaggagaccaacagatgttcttgtcaatgaaggttcaagcttacatgagtttatgaagtcgcattaccccgattctctagagggaatcatcgaacaagcgttgagtagatggaaaccgcaagggaaaccagaaaaatgtgagaagctatggagagaagtcatattggaaatgattgagttaggattggtatgtactcaatacaatccttcaactaggcctgacatgcttgatgtcgcacacgaaatgggacggcttaaagaatatttatttgcttgtccttctctattgcatttttcatctcaagaaacacaaggagaagctagttcataa

SEQ ID NO: 87905 - protein, 995 aa, Arabidopsis thaliana
  peptide (1)..(995): Ceres Seq. ID no. 12704354
MDYCSLLVVSFLITVMTVLASKENDHELIKSDQISLLSFKSSIVSDPQNSLSSWISSSSSSSSMLVDVCNWSGVKCNKESTQVIELDISGRDLGGEISPSIANLTGLTVLDLSRNFFVGKIPPEIGSLHETLKQLSLSENLLHGNIPQELGLLNRLVYLDLGSNRLNGSIPVQLFCNGSSSSLQYIDLSNNSLTGEIPLNYHCHLKELRFLLLWSNKLTGTVPSSLSNSTNLKWMDLESNMLSGELPSQVISKMPQLQFLYLSYNHFVSHNNNTNLEPFFASLANSSDLQELELAGNSLGGEITSSVRHLSVNLVQIHLDQNRIHGSIPPEISNLLNLTLLNLSSNLLSGPIPRELCKLSKLERVYLSNNHLTGEIPMELGDIPRLGLLDVSRNNLSGSIPDSFGNLSQLRRLLLYGNHLSGTVPQSLGKCINLEILDLSHNNLTGTIPVEVVSNLRNLKLYLNLSSNHLSGPIPLELSKMDMVLSVDLSSNELSGKIPPQLGSCIALEHLNLSRNGFSSTLPSSLGQLPYLKELDVSFNRLTGAIPPSFQQSSTLKHLNFSFNLLSGNVSDKGSFSKLTIESFLGDSLLCGSIKGMQACKKKHKYPSVLLPVLLSLIATPVLCVFGYPLVQRSRFGKNLTVYAKEEVEDEEKQNQNDPKYPRISYQQLIAATGGFNASSLIGSGRFGHVYKGVLRNNTKVAVKVLDPKTALEFSGSFKRECQILKRTRHRNLIRIITTCSKPGFNALVLPLMPNGSLERHLYPGEYSSKNLDLIQLVNICSDVAEGIAYLHHYSPVKVVHCDLKPSNILLDDEMTALVTDFGISRLVQGVEETVSTDDSVSFGSTDGLLCGSVGYIAPEYGMGKRASTHGDVYSFGVLLLEIVSGRRPTDVLVNEGSSLHEFMKSHYPDSLEGIIEQALSRWKPQGKPEKCEKLWREVILEMIELGLVCTQYNPSTRPDMLDVAHEMGRLKEYLFACPSLLHFSSQETQGEASS

SEQ ID NO: 87906 - protein, 980 aa, Arabidopsis thaliana
  peptide (1)..(980): Ceres Seq. ID no. 12704355
MTVLASKENDHELIKSDQISLLSFKSSIVSDPQNSLSSWISSSSSSSSMLVDVCNWSGVKCNKESTQVIELDISGRDLGGEISPSIANLTGLTVLDLSRNFFVGKIPPEIGSLHETLKQLSLSENLLHGNIPQELGLLNRLVYLDLGSNRLNGSIPVQLFCNGSSSSLQYIDLSNNSLTGEIPLNYHCHLKELRFLLLWSNKLTGTVPSSLSNSTNLKWMDLESNMLSGELPSQVISKMPQLQFLYLSYNHFVSHNNNTNLEPFFASLANSSDLQELELAGNSLGGEITSSVRHLSVNLVQIHLDQNRIHGSIPPEISNLLNLTLLNLSSNLLSGPIPRELCKLSKLERVYLSNNHLTGEIPMELGDIPRLGLLDVSRNNLSGSIPDSFGNLSQLRRLLLYGNHLSGTVPQSLGKCINLEILDLSHNNLTGTIPVEVVSNLRNLKLYLNLSSNHLSGPIPLELSKMDMVLSVDLSSNELSGKIPPQLGSCIALEHLNLSRNGFSSTLPSSLGQLPYLKELDVSFNRLTGAIPPSFQQSSTLKHLNFSFNLLSGNVSDKGSFSKLTIESFLGDSLLCGSIKGMQACKKKHKYPSVLLPVLLSLIATPVLCVFGYPLVQRSRFGKNLTVYAKEEVEDEEKQNQNDPKYPRISYQQLIAATGGFNASSLIGSGRFGHVYKGVLRNNTKVAVKVLDPKTALEFSGSFKRECQILKRTRHRNLIRIITTCSKPGFNALVLPLMPNGSLERHLYPGEYSSKNLDLIQLVNICSDVAEGIAYLHHYSPVKVVHCDLKPSNILLDDEMTALVTDFGISRLVQGVEETVSTDDSVSFGSTDGLLCGSVGYIAPEYGMGKRASTHGDVYSFGVLLLEIVSGRRPTDVLVNEGSSLHEFMKSHYPDSLEGIIEQALSRWKPQGKPEKCEKLWREVILEMIELGLVCTQYNPSTRPDMLDVAHEMGRLKEYLFACPSLLHFSSQETQGEASS

SEQ ID NO: 87907 - protein, 932 aa, Arabidopsis thaliana
  peptide (1)..(932): Ceres Seq. ID no. 12704356
MLVDVCNWSGVKCNKESTQVIELDISGRDLGGEISPSIANLTGLTVLDLSRNFFVGKIPPEIGSLHETLKQLSLSENLLHGNIPQELGLLNRLVYLDLGSNRLNGSIPVQLFCNGSSSSLQYIDLSNNSLTGEIPLNYHCHLKELRFLLLWSNKLTGTVPSSLSNSTNLKWMDLESNMLSGELPSQVISKMPQLQFLYLSYNHFVSHNNNTNLEPFFASLANSSDLQELELAGNSLGGEITSSVRHLSVNLVQIHLDQNRIHGSIPPEISNLLNLTLLNLSSNLLSGPIPRELCKLSKLERVYLSNNHLTGEIPMELGDIPRLGLLDVSRNNLSGSIPDSFGNLSQLRRLLLYGNHLSGTVPQSLGKCINLEILDLSHNNLTGTIPVEVVSNLRNLKLYLNLSSNHLSGPIPLELSKMDMVLSVDLSSNELSGKIPPQLGSCIALEHLNLSRNGFSSTLPSSLGQLPYLKELDVSFNRLTGAIPPSFQQSSTLKHLNFSFNLLSGNVSDKGSFSKLTIESFLGDSLLCGSIKGMQACKKKHKYPSVLLPVLLSLIATPVLCVFGYPLVQRSRFGKNLTVYAKEEVEDEEKQNQNDPKYPRISYQQLIAATGGFNASSLIGSGRFGHVYKGVLRNNTKVAVKVLDPKTALEFSGSFKRECQILKRTRHRNLIRIITTCSKPGFNALVLPLMPNGSLERHLYPGEYSSKNLDLIQLVNICSDVAEGIAYLHHYSPVKVVHCDLKPSNILLDDEMTALVTDFGISRLVQGVEETVSTDDSVSFGSTDGLLCGSVGYIAPEYGMGKRASTHGDVYSFGVLLLEIVSGRRPTDVLVNEGSSLHEFMKSHYPDSLEGIIEQALSRWKPQGKPEKCEKLWREVILEMIELGLVCTQYNPSTRPDMLDVAHEMGRLKEYLFACPSLLHFSSQETQGEASS

SEQ ID NO: 87908 - DNA, 423 bp, Arabidopsis thaliana
  misc_feature (1)..(423): Ceres Seq. ID no. 12704357
  misc_feature (1)..(423): Ortholog of  Ceres SEQ ID NO 15174293 as cited in SEQ ID NO 0
atggcttccgttaacgttagcttctgtcatcctttacgctcttcttctccaaaggtctcacttcgcagttccgttcatttcgcgacgagtctttcctcaagtcactccatttctgggcttcgcgctgttttgcctctgaagatttctacagttgcttcccccaattctcaaaagcttcattcttttaccgttttcgctcataagggctacaagatgaagacccacaaggcctcagcgaagcggttcagagtgacgggtagagggaagattgtgaggaggagatctggaaagcagcatttgttagctaagaagaacaacaagaggaaattacgtctatcgaaaatgacggaagtgaaccggagcgactatgacaacgtgatcggagctctgccctacttgaaagtcaatcgaaaggcgacttaa

SEQ ID NO: 87909 - protein, 140 aa, Arabidopsis thaliana; identical to SEQ ID NO: 37997
  peptide (1)..(140): Ceres Seq. ID no. 12704358

SEQ ID NO: 87910 - DNA, 882 bp, Arabidopsis thaliana
  misc_feature (1)..(882): Ceres Seq. ID no. 12704382
  misc_feature (1)..(882): Ortholog of  Ceres SEQ ID NO 13596090 as cited in SEQ ID NO 68377
atgggtaatgtgacgtcaaacatggctgcaaagttcgctttcttcccaccgccaccaacatacgacgtgggtaaagacgaggagaccggaaagcttatgttcaccgggataacaccagaaaaaagcatggatgttcatcagcttaccaccaaatctggcaacaaggtcattgccacgttttggaaacaccctttctctagattcactcttctttattcacatggcaatgccgcggatctcggccaaatggttgatctcttcatcgagcttcgagctcatctccgcgtcaacattatgagctatgattattcaggctatggagcttcaacaggcaagccaactgagctcaatacgtactatgatatcgaggctgtgtacaattgcttgaggaccgagtacgggatcatgcaagaggaaatgattctatatggtcaatccgttggaagcggaccaacattgcacttagcatctcgagtaaagagactaagagggattgttcttcatagcgcaattctctccggcctcagagttctgtatcctgtcaaaatgacattctggttcgatatgtacaaaaacattgacaagatacgccatgtaacatgccctgttcttgtcatacatggaacaaaagatgatattgtgaatatgtcacatgggaagcgattgtgggaactagcaaaggacaagtatgatccattgtgggtaaaaggaggagggcattgcaacttggaaacataccccgagtacatcaagcatatgcgaaagttcatgaacgccatggagaaactcgctctcaacaatccaccaaacaaacaacaaaacgacgagccaagcatcaaggaaactaaacaaaatcggtgcttgagattcagcaaaagatag

SEQ ID NO: 87911 - protein, 293 aa, Arabidopsis thaliana
  peptide (1)..(293): Ceres Seq. ID no. 12704383
MGNVTSNMAAKFAFFPPPPTYDVGKDEETGKLMFTGITPEKSMDVHQLTTKSGNKVIATFWKHPFSRFTLLYSHGNAADLGQMVDLFIELRAHLRVNIMSYDYSGYGASTGKPTELNTYYDIEAVYNCLRTEYGIMQEEMILYGQSVGSGPTLHLASRVKRLRGIVLHSAILSGLRVLYPVKMTFWFDMYKNIDKIRHVTCPVLVIHGTKDDIVNMSHGKRLWELAKDKYDPLWVKGGGHCNLETYPEYIKHMRKFMNAMEKLALNNPPNKQQNDEPSIKETKQNRCLRFSKR

SEQ ID NO: 87912 - protein, 286 aa, Arabidopsis thaliana
  peptide (1)..(286): Ceres Seq. ID no. 12704384
MAAKFAFFPPPPTYDVGKDEETGKLMFTGITPEKSMDVHQLTTKSGNKVIATFWKHPFSRFTLLYSHGNAADLGQMVDLFIELRAHLRVNIMSYDYSGYGASTGKPTELNTYYDIEAVYNCLRTEYGIMQEEMILYGQSVGSGPTLHLASRVKRLRGIVLHSAILSGLRVLYPVKMTFWFDMYKNIDKIRHVTCPVLVIHGTKDDIVNMSHGKRLWELAKDKYDPLWVKGGGHCNLETYPEYIKHMRKFMNAMEKLALNNPPNKQQNDEPSIKETKQNRCLRFSKR

SEQ ID NO: 87913 - protein, 261 aa, Arabidopsis thaliana
  peptide (1)..(261): Ceres Seq. ID no. 12704385
MFTGITPEKSMDVHQLTTKSGNKVIATFWKHPFSRFTLLYSHGNAADLGQMVDLFIELRAHLRVNIMSYDYSGYGASTGKPTELNTYYDIEAVYNCLRTEYGIMQEEMILYGQSVGSGPTLHLASRVKRLRGIVLHSAILSGLRVLYPVKMTFWFDMYKNIDKIRHVTCPVLVIHGTKDDIVNMSHGKRLWELAKDKYDPLWVKGGGHCNLETYPEYIKHMRKFMNAMEKLALNNPPNKQQNDEPSIKETKQNRCLRFSKR

SEQ ID NO: 87914 - DNA, 2361 bp, Arabidopsis thaliana
  misc_feature (1)..(2361): Ceres Seq. ID no. 12704396
  misc_feature (1)..(2361): Ortholog of  Ceres SEQ ID NO 13654989 as cited in SEQ ID NO 63117
  misc_feature (1)..(2361): Ortholog of  Ceres SEQ ID NO 13584744 as cited in SEQ ID NO 69137
atgccgaaaaacaataacgtgggagtcaaggaaggagggtctagcggagttgtagctgttgcaatagacaaagacaaaagcagccaacacgctcttaaatgggctgttgataatttgttgcagcgaggccaatccgtcattcttgtccacgtcaagcttcgaccttctccattgaataatagcgcttctcttcatgcttcctctgcaaagctgagccaagattcttcattggtatgcagagatccagaaggcatttccaaagaaatatttcttcctttccgttgcttctgcacacgcaaagacattcaatgccaagatgtgttgcttgaggagtccgatgttgccaaagcattggtcgaatacgtaaaccaagcggccattgaggttttagtagttggttcctccagcaaaggtggttttctcaggttcaacaaacctacagatattccaggcagcataacaaaaaacgctcctgatttctgcacggtttatatcatttccaaaggaaagattcaaacaatgagatcagcttctcgttctgcacccatgactgctcctctacgcagttcagttcaaccacctagcttaaagcctcctcaacctatgccttctacttccgctaacagtctgcgagccgatagacggtcttttgagtctaaccaacgaaggtctgtagaagatcaacaacgcaggtctatggaggatcaacaacgcaggtcaatagacgatcaatcagagtccttcagatctccttttacaagaagaggcaatggtagatcatacggagatttaactgttccagaatcagacatatcctttatcagttccggaagaccaagcattgaccgtatcttcccttctctatatgacaacaatgatccaagccgaactcctcctaggctttcaaatttctcagacatggactatagttctagccttgatcagtcttccaactatggaaggagatcagtggatatgaactcacccactgatttcgagagcgaaagattttcatccgcctctcaatcaatagatgatgtagaggctgagatgaggaggcttaaactggagttgaagcagactatggaaatgtatagtacagcttgcaaagaagcactcacagcaaaacaaaaggcgactgagcttcaacgttggaagttagaagaagagagaaaactagaagaagcgagaaatgcagaggaagcagcattagccattgcagagaaagagaaagcaaagtcaaaagcagctatggaggcagctgaagcagctcaaaggattgctgaattagaggctaagaagagagtcaacgcggaaatgaaagctttaaaagagtcagaggagaaaacaaaggctcttaccgctttagcaaactcagatgtcaggtataggaagtactccattgaagatattgagcttgcaacagagtttttcgctgagaaatataagattggagaaggtggttatggacctgtctacaaatgttatcttgatcatacaccagtggctgttaaagttcttcgtcccgatgcagctcaaggaagatcgcaatttcaacaagaggtcgaggtattgagctgcattaggcatccgaacatggttctacttcttggggcttgtccggaatgcggatgtttagtctacgagttcatggctaatgggagcttagaagatcgtcttttcagactaggaaacagtccacctctctcgtggcagatgagatttagaatcgctgcagagataggcactggattgttgttcttgcaccaagctaaacctgagcctcttgttcaccgtgatctcaaaccaggaaacatcttgctagaccgtaacttcgtcagcaagatatctgatgttggtttagctagattggtccctccaacagttgcagacacagtgacacaataccgcatgacttcaaccgctggcacattctgttatatcgacccagagtatcaacaaacaggaatgttgggtgtgaaatcagacatttactcacttggaattatgtttctacagttgataacagcaaaaccaccaatgggtctaactcattatgtcgagagagcactagagaaaggaactttggttgatttactcgatccagttgtttctgattggccaatggaagacactgaagagtttgctaaattagctcttaaatgtgcagagctaaggagaaaagatagacctgatcttgctaaagttattttgcctgagctaaatagattaagaacacttgctgatgaatcatcacattctgtagtagtcggcaatagccctctaccatctccaactggtagccaaagttctttgaaactggaacatatgagtggtgcttctatctcagtgcctcagtaa

SEQ ID NO: 87915 - protein, 786 aa, Arabidopsis thaliana
  peptide (1)..(786): Ceres Seq. ID no. 12704397
MPKNNNVGVKEGGSSGVVAVAIDKDKSSQHALKWAVDNLLQRGQSVILVHVKLRPSPLNNSASLHASSAKLSQDSSLVCRDPEGISKEIFLPFRCFCTRKDIQCQDVLLEESDVAKALVEYVNQAAIEVLVVGSSSKGGFLRFNKPTDIPGSITKNAPDFCTVYIISKGKIQTMRSASRSAPMTAPLRSSVQPPSLKPPQPMPSTSANSLRADRRSFESNQRRSVEDQQRRSMEDQQRRSIDDQSESFRSPFTRRGNGRSYGDLTVPESDISFISSGRPSIDRIFPSLYDNNDPSRTPPRLSNFSDMDYSSSLDQSSNYGRRSVDMNSPTDFESERFSSASQSIDDVEAEMRRLKLELKQTMEMYSTACKEALTAKQKATELQRWKLEEERKLEEARNAEEAALAIAEKEKAKSKAAMEAAEAAQRIAELEAKKRVNAEMKALKESEEKTKALTALANSDVRYRKYSIEDIELATEFFAEKYKIGEGGYGPVYKCYLDHTPVAVKVLRPDAAQGRSQFQQEVEVLSCIRHPNMVLLLGACPECGCLVYEFMANGSLEDRLFRLGNSPPLSWQMRFRIAAEIGTGLLFLHQAKPEPLVHRDLKPGNILLDRNFVSKISDVGLARLVPPTVADTVTQYRMTSTAGTFCYIDPEYQQTGMLGVKSDIYSLGIMFLQLITAKPPMGLTHYVERALEKGTLVDLLDPVVSDWPMEDTEEFAKLALKCAELRRKDRPDLAKVILPELNRLRTLADESSHSVVVGNSPLPSPTGSQSSLKLEHMSGASISVPQ

SEQ ID NO: 87916 - protein, 613 aa, Arabidopsis thaliana
  peptide (1)..(613): Ceres Seq. ID no. 12704398
MRSASRSAPMTAPLRSSVQPPSLKPPQPMPSTSANSLRADRRSFESNQRRSVEDQQRRSMEDQQRRSIDDQSESFRSPFTRRGNGRSYGDLTVPESDISFISSGRPSIDRIFPSLYDNNDPSRTPPRLSNFSDMDYSSSLDQSSNYGRRSVDMNSPTDFESERFSSASQSIDDVEAEMRRLKLELKQTMEMYSTACKEALTAKQKATELQRWKLEEERKLEEARNAEEAALAIAEKEKAKSKAAMEAAEAAQRIAELEAKKRVNAEMKALKESEEKTKALTALANSDVRYRKYSIEDIELATEFFAEKYKIGEGGYGPVYKCYLDHTPVAVKVLRPDAAQGRSQFQQEVEVLSCIRHPNMVLLLGACPECGCLVYEFMANGSLEDRLFRLGNSPPLSWQMRFRIAAEIGTGLLFLHQAKPEPLVHRDLKPGNILLDRNFVSKISDVGLARLVPPTVADTVTQYRMTSTAGTFCYIDPEYQQTGMLGVKSDIYSLGIMFLQLITAKPPMGLTHYVERALEKGTLVDLLDPVVSDWPMEDTEEFAKLALKCAELRRKDRPDLAKVILPELNRLRTLADESSHSVVVGNSPLPSPTGSQSSLKLEHMSGASISVPQ

SEQ ID NO: 87917 - protein, 604 aa, Arabidopsis thaliana
  peptide (1)..(604): Ceres Seq. ID no. 12704399
MTAPLRSSVQPPSLKPPQPMPSTSANSLRADRRSFESNQRRSVEDQQRRSMEDQQRRSIDDQSESFRSPFTRRGNGRSYGDLTVPESDISFISSGRPSIDRIFPSLYDNNDPSRTPPRLSNFSDMDYSSSLDQSSNYGRRSVDMNSPTDFESERFSSASQSIDDVEAEMRRLKLELKQTMEMYSTACKEALTAKQKATELQRWKLEEERKLEEARNAEEAALAIAEKEKAKSKAAMEAAEAAQRIAELEAKKRVNAEMKALKESEEKTKALTALANSDVRYRKYSIEDIELATEFFAEKYKIGEGGYGPVYKCYLDHTPVAVKVLRPDAAQGRSQFQQEVEVLSCIRHPNMVLLLGACPECGCLVYEFMANGSLEDRLFRLGNSPPLSWQMRFRIAAEIGTGLLFLHQAKPEPLVHRDLKPGNILLDRNFVSKISDVGLARLVPPTVADTVTQYRMTSTAGTFCYIDPEYQQTGMLGVKSDIYSLGIMFLQLITAKPPMGLTHYVERALEKGTLVDLLDPVVSDWPMEDTEEFAKLALKCAELRRKDRPDLAKVILPELNRLRTLADESSHSVVVGNSPLPSPTGSQSSLKLEHMSGASISVPQ

SEQ ID NO: 87918 - DNA, 2814 bp, Arabidopsis thaliana
  misc_feature (1)..(2814): Ceres Seq. ID no. 12704418
  misc_feature (1)..(2814): Ortholog of  Ceres SEQ ID NO 13646569 as cited in SEQ ID NO 20745
atggcggtacgaatacccatggaggaagtgttcgaggagctgaaatgtacaaaacaaggtcttacggcaaatgaagcttctcaccgtcttgacgtttttggtcctaacaagcttgaagagaagaaggaaagcaagttacttaagtttttagggttcatgtggaacccattgtcgtgggtgatggaggtggctgcactaatggcaatcgctttggccaacggaggaggacggccaccggattggcaagactttgtggggatagtgtgtttactattaatcaactcaaccattagtttcattgaggaaaataacgccggtaatgctgcagccgctctcatggccggtctagcccctaagacaaaggttctcagagataatcaatggagcgagcaagaagcatcgattctcgtccccggagatgtaatcagcatcaagctcggcgatatcattcccgccgatgcacgtttactcgacggcgatcctctcaaaatcgatcaatcatcactcaccggtgaatcaatccccgtcacaaaaaaccccagcgatgaagtcttctccggctcaatatgcaaacaaggcgaaatcgaagcaatcgtcatcgccactggagtccacacattcttcggcaaagcagctcatctcgtcgacaacacaaaccaaatcggccatttccagaaagttctcacttcgattggtaacttctgtatctgttcgattgctttaggaatcatcgttgagcttttagtaatgtatccgattcaacgccggagatatcgagacggaatcgataatttacttgttttgttgatcggagggattcctatagctatgcctagtgtgttatctgttacaatggcgactggttctcatagattgtttcaacaaggagctattactaagagaatgactgctattgaggaaatggctggtatggatgtattgtgttgtgataagactggtactcttacgcttaataagcttacggttgataagaacttagtcgaggttttcgctaaaggagttggtaaagaacatgttttccttttggctgcgagagcttcgaggattgagaatcaagatgcgattgatgctgctattgttggaatgcttgctgatcctaaagaggctagagctggtgttagagaggttcattttttcccttttaatccggttgataagagaactgctttgacttatgttgactctgatggaaactggcatagagctagtaaaggagctccagagcagatactgaacctctgtaattgcaaggaagatgttaggaggaaagttcatggagtgattgataagtttgctgagcgtggacttcgctctttggctgttgcaagacaggaagttctcgagaagaagaaagatgctcctggtggcccatggcaacttgtaggtcttttacctctttttgatcctccgaggcatgacagtgccgagacaatcaggagggctttaaacctcggtgttaatgttaagatgataaccggggaccagcttgcaattgggaaagagaccggtcgaaggcttggaatgggtacgaacatgtatccttcttctgcgctgctcggacaagtcaaagattcttccttgggtgcacttcctgtggatgaactgatagagaaggctgatgggtttgcaggagtctttccagaacataagtatgagattgttcataggctgcaacaaaggaatcacatatgtggcatgactggagatggtgtgaatgatgccccggctctcaagaaggcggatattggtatagctgttgttgatgctactgatgctgcgagaggcgcttctgatatcgttctcacagaacccggattgagtgttatcattagtgctgtactcaccagtagagccatattccaaagaatgaaaaattacactatttatgcggtttcaatcacgatacgaattgtgtttggcttcatgttcattgccctcatatggcagttcgatttttcgcctttcatggttctgatcatagcaatcttaaacgacggaacaatcatgacaatatcaaaagacagaatgaagccatctccacagccagatagctggaaactcagagatatattctcgaccggcgtcgtgcttggaggttaccaggccttgatgacagtcgttttcttctgggtgatgaaagacagtgattttttctcgaactattttggtgtgagaccactgagccaacgtcctgaacaaatgatggctgctctgtatctacaagttagcatcataagccaggctctcatcttcgtcaccagatcccgtagctggtcctacgccgaatgccctggccttctcttacttggtgcatttgtcatagctcagctggtggcgacatttatagcagtttatgcaaactggagttttgcccggatagaaggagccggttggggatgggctggagtgatctggctatacagtttcctaacgtacatccctcttgacttactcaagtttggaatccgctatgttttgagtggaaaagcttggttaaatcttcttgagaacaagactgccttcacgacgaagaaagactatgggaaagaggaaagagaagctcaatgggctgcagctcaaagaaccctccacggacttcaaccagcagagaaaaacaacatctttaacgaaaagaatagttacagtgaactctctcagattgctgaacaggctaaacgccgagctgaggttgtcaggctgagagagataaatacattaaaagggcatgtagagtcagtggtgaagcttaaaggacttgacattgacacgattcagcaacattacaccgtttaa

SEQ ID NO: 87919 - protein, 937 aa, Arabidopsis thaliana
  peptide (1)..(937): Ceres Seq. ID no. 12704419
MAVRIPMEEVFEELKCTKQGLTANEASHRLDVFGPNKLEEKKESKLLKFLGFMWNPLSWVMEVAALMAIALANGGGRPPDWQDFVGIVCLLLINSTISFIEENNAGNAAAALMAGLAPKTKVLRDNQWSEQEASILVPGDVISIKLGDIIPADARLLDGDPLKIDQSSLTGESIPVTKNPSDEVFSGSICKQGEIEAIVIATGVHTFFGKAAHLVDNTNQIGHFQKVLTSIGNFCICSIALGIIVELLVMYPIQRRRYRDGIDNLLVLLIGGIPIAMPSVLSVTMATGSHRLFQQGAITKRMTAIEEMAGMDVLCCDKTGTLTLNKLTVDKNLVEVFAKGVGKEHVFLLAARASRIENQDAIDAAIVGMLADPKEARAGVREVHFFPFNPVDKRTALTYVDSDGNWHRASKGAPEQILNLCNCKEDVRRKVHGVIDKFAERGLRSLAVARQEVLEKKKDAPGGPWQLVGLLPLFDPPRHDSAETIRRALNLGVNVKMITGDQLAIGKETGRRLGMGTNMYPSSALLGQVKDSSLGALPVDELIEKADGFAGVFPEHKYEIVHRLQQRNHICGMTGDGVNDAPALKKADIGIAVVDATDAARGASDIVLTEPGLSVIISAVLTSRAIFQRMKNYTIYAVSITIRIVFGFMFIALIWQFDFSPFMVLIIAILNDGTIMTISKDRMKPSPQPDSWKLRDIFSTGVVLGGYQALMTVVFFWVMKDSDFFSNYFGVRPLSQRPEQMMAALYLQVSIISQALIFVTRSRSWSYAECPGLLLLGAFVIAQLVATFIAVYANWSFARIEGAGWGWAGVIWLYSFLTYIPLDLLKFGIRYVLSGKAWLNLLENKTAFTTKKDYGKEEREAQWAAAQRTLHGLQPAEKNNIFNEKNSYSELSQIAEQAKRRAEVVRLREINTLKGHVESVVKLKGLDIDTIQQHYTV

SEQ ID NO: 87920 - protein, 931 aa, Arabidopsis thaliana; identical to SEQ ID NO: 70308
  peptide (1)..(931): Ceres Seq. ID no. 12704420

SEQ ID NO: 87921 - protein, 885 aa, Arabidopsis thaliana; identical to SEQ ID NO: 70309
  peptide (1)..(885): Ceres Seq. ID no. 12704421

SEQ ID NO: 87922 - DNA, 1452 bp, Arabidopsis thaliana
  misc_feature (1)..(1452): Ceres Seq. ID no. 12704445
  misc_feature (1)..(1452): Ortholog of  Ceres SEQ ID NO 13648124 as cited in SEQ ID NO 20362
atgagtcaggtttttatttgcatgttctttcagagaatacctgtagccttcttcttgaagaatatagaaggaagatatgagcagaagacggcggagctgagatcagatgcgtcaaagataacttgggaagtgaagatagatggacagagactcactgacggttggaaagagtttgctctctcacatgatcttcgaatcggtgacattgttgttttcagacaagagagagatatgtctttccacgttacaatgttgggacctagttgttgtgagatccaatatggttcgtgttcagacgaggagagaaacctcgagaagaagaagaatccaaatggagaagcaaagtcttcttcactagatccttcttgtttttcggctaatgtggcgccttcgagtctacgttatgacttaatgctttttccaatgggttttgtgagggaaaatggtgtagtcggatctggaaagattgttctgatgaatgaaaagggcagatcatggaattttaacttgagacaaaagccatcatgcggaacagtttatgttagaggagggtgggtgagtttttgtgatgccaatggacttcaagctggagatatctacactttcaaactgatcaaaagaggaggaactcttgttctacgtttgttacccaaaggggcagagtcttgttcactagatccctcttgttttgtggctaatgttgcgccttcgactctacgctatgacacactgtatcttccaaagcgttttatgagggaaaatggtgtagacaaaagacgtggagagatgattctgatgaatgaaaagggcaaatcatggactttagatttgaaactaaagaaatcatgcggaacttccctcatcagacgaggatggagaagtttctgtagtgccaatggactaagagctggaagtatcattactttcaaactgattaagaaaagtggaactcttgttctatgtttgctctccaacgagccagaagaagaagtgtgctcagaagctaatgaagtagagtctctttcgacagatcaagaaagccatgaagagagtagccacaacgagaaaatctcaagaagaaaggaaaagaagggtagaatgatatggaaagcttcgtcttcaccatccgaaaaccgatttgtgacattaaatcttacaccttataacatcctacgttctgcactgcgtcttccgatacccttcacgaggatgaatggtatcaatgaagaaactaaaatgactctgttggataaacatggtatgaagtggttaacgactctgcggttggtggactacaaaagaaaaagactgggaatggtaggaggctggaaaggattcatccaagctaacggtgtgaaggcaaacgaatccatcatgttggaactgatttgggaagaagaaacaagttgcgtccttaagttctgctccaaggtgaagctagcaatcaaatga

SEQ ID NO: 87923 - protein, 483 aa, Arabidopsis thaliana
  peptide (1)..(483): Ceres Seq. ID no. 12704446
MSQVFICMFFQRIPVAFFLKNIEGRYEQKTAELRSDASKITWEVKIDGQRLTDGWKEFALSHDLRIGDIVVFRQERDMSFHVTMLGPSCCEIQYGSCSDEERNLEKKKNPNGEAKSSSLDPSCFSANVAPSSLRYDLMLFPMGFVRENGVVGSGKIVLMNEKGRSWNFNLRQKPSCGTVYVRGGWVSFCDANGLQAGDIYTFKLIKRGGTLVLRLLPKGAESCSLDPSCFVANVAPSTLRYDTLYLPKRFMRENGVDKRRGEMILMNEKGKSWTLDLKLKKSCGTSLIRRGWRSFCSANGLRAGSIITFKLIKKSGTLVLCLLSNEPEEEVCSEANEVESLSTDQESHEESSHNEKISRRKEKKGRMIWKASSSPSENRFVTLNLTPYNILRSALRLPIPFTRMNGINEETKMTLLDKHGMKWLTTLRLVDYKRKRLGMVGGWKGFIQANGVKANESIMLELIWEEETSCVLKFCSKVKLAIK

SEQ ID NO: 87924 - protein, 476 aa, Arabidopsis thaliana
  peptide (1)..(476): Ceres Seq. ID no. 12704447
MFFQRIPVAFFLKNIEGRYEQKTAELRSDASKITWEVKIDGQRLTDGWKEFALSHDLRIGDIVVFRQERDMSFHVTMLGPSCCEIQYGSCSDEERNLEKKKNPNGEAKSSSLDPSCFSANVAPSSLRYDLMLFPMGFVRENGVVGSGKIVLMNEKGRSWNFNLRQKPSCGTVYVRGGWVSFCDANGLQAGDIYTFKLIKRGGTLVLRLLPKGAESCSLDPSCFVANVAPSTLRYDTLYLPKRFMRENGVDKRRGEMILMNEKGKSWTLDLKLKKSCGTSLIRRGWRSFCSANGLRAGSIITFKLIKKSGTLVLCLLSNEPEEEVCSEANEVESLSTDQESHEESSHNEKISRRKEKKGRMIWKASSSPSENRFVTLNLTPYNILRSALRLPIPFTRMNGINEETKMTLLDKHGMKWLTTLRLVDYKRKRLGMVGGWKGFIQANGVKANESIMLELIWEEETSCVLKFCSKVKLAIK

SEQ ID NO: 87925 - protein, 406 aa, Arabidopsis thaliana
  peptide (1)..(406): Ceres Seq. ID no. 12704448
MSFHVTMLGPSCCEIQYGSCSDEERNLEKKKNPNGEAKSSSLDPSCFSANVAPSSLRYDLMLFPMGFVRENGVVGSGKIVLMNEKGRSWNFNLRQKPSCGTVYVRGGWVSFCDANGLQAGDIYTFKLIKRGGTLVLRLLPKGAESCSLDPSCFVANVAPSTLRYDTLYLPKRFMRENGVDKRRGEMILMNEKGKSWTLDLKLKKSCGTSLIRRGWRSFCSANGLRAGSIITFKLIKKSGTLVLCLLSNEPEEEVCSEANEVESLSTDQESHEESSHNEKISRRKEKKGRMIWKASSSPSENRFVTLNLTPYNILRSALRLPIPFTRMNGINEETKMTLLDKHGMKWLTTLRLVDYKRKRLGMVGGWKGFIQANGVKANESIMLELIWEEETSCVLKFCSKVKLAIK

SEQ ID NO: 87926 - DNA, 1671 bp, Arabidopsis thaliana
  misc_feature (1)..(1671): Ceres Seq. ID no. 12704476
  misc_feature (1)..(1671): Ortholog of  Ceres SEQ ID NO 13648124 as cited in SEQ ID NO 20362
atggctaatccacttctctattctccgatcaacccacaattcttccaaccacttcttcccggtttcaccaaccacctggacattcctgtggcgttcttcttgaagtacttagtgggaactaacgtaggaaaaacggctgagctcagatcagatgcatcggagatgacatggaaagtgaagatagacggccggagactctctaatggttgggaagatttcacaatcgcacatgatctccgagttggtgacattgttgttttcagacaagaaggagagttagtgttccatgtcacagctttaggaccaagttgctgtgagattcaatacggagaagatacccttgaagaggataaaattggtaaccttagtttcatattaaatatcattagcacatttagaatgagtctaagaatattacttaatctatcaacagagaaactttgtggtacggagaatgtttcaagtaagaaaaagagtctaaagagagaagctgagtctgcaccagacaattcactagattcttgttttgtggccactgtcacgggttcgaatctaaagcgcgatacattgtatattccgaaagagtttgcattgtcaaatggtctgatgaacaaatatcagattgtgttaatgaatgaagaaggagaatcatggaagatagacttgagacgcgaggcatataattacggccggttttacatgagaagaggctggagaagtttctgtattgctaatgggaagaaacctggagacgtttttgcattcaaattggtcaaaaatgaagaaacacctatgatacagttgttccctatgaccattgaagatttagacaaacttcccactgtcacggcttcaaatctaagccgagatagactgtatcttccgaagacgttcattatgtcaaatggtttgttgaagaaatttcagatgtgtctaatgaatgaagagggagaatcatggacgatagatgtgaaacatgaggcacatacaggccggtttttaacgataagaggttggagaagattctgtgtggctaatgggaagaaaccaggagacttgctcaaattcaaattagtccataacgaagaaacacctgtgctccagttgttacccttgaacagtgaagatctacacaaacttaatcctagcaatgacacaaggcatggacagagtttaaaagttaccaaaaaagagtttcttggcatggaagccacagaaaatgagtttcttggggaagaagtttactgtaatgactcctttaaagctagcgagaaagatactcttccttttgctgaacctatcaatgaagatataaggcaaggacaatgttcacaaactattaaacaagaatatgtttccacagaagagaaaaactcaacaagccaaaaccgatttgtgaccttaacacttacacattcaagtaaacttaatcttccgtttgaattcatgaagcggaatggaatcaaaaaggcggggaagataacgatggttgatagatacgatgcaaaatggcgtacttcactactgatggacaagatcggaacaatgagtttaggaagaggttcaaaaggtttctgcgaggttaatggtgttgagatgaatgagtcgtttatcttggagttgatttgggaagacacagttcctcttcttaagttttgttccaaagtttga

SEQ ID NO: 87927 - protein, 556 aa, Arabidopsis thaliana
  peptide (1)..(556): Ceres Seq. ID no. 12704477
MANPLLYSPINPQFFQPLLPGFTNHLDIPVAFFLKYLVGTNVGKTAELRSDASEMTWKVKIDGRRLSNGWEDFTIAHDLRVGDIVVFRQEGELVFHVTALGPSCCEIQYGEDTLEEDKIGNLSFILNIISTFRMSLRILLNLSTEKLCGTENVSSKKKSLKREAESAPDNSLDSCFVATVTGSNLKRDTLYIPKEFALSNGLMNKYQIVLMNEEGESWKIDLRREAYNYGRFYMRRGWRSFCIANGKKPGDVFAFKLVKNEETPMIQLFPMTIEDLDKLPTVTASNLSRDRLYLPKTFIMSNGLLKKFQMCLMNEEGESWTIDVKHEAHTGRFLTIRGWRRFCVANGKKPGDLLKFKLVHNEETPVLQLLPLNSEDLHKLNPSNDTRHGQSLKVTKKEFLGMEATENEFLGEEVYCNDSFKASEKDTLPFAEPINEDIRQGQCSQTIKQEYVSTEEKNSTSQNRFVTLTLTHSSKLNLPFEFMKRNGIKKAGKITMVDRYDAKWRTSLLMDKIGTMSLGRGSKGFCEVNGVEMNESFILELIWEDTVPLLKFCSKV

SEQ ID NO: 87928 - protein, 502 aa, Arabidopsis thaliana
  peptide (1)..(502): Ceres Seq. ID no. 12704478
MTWKVKIDGRRLSNGWEDFTIAHDLRVGDIVVFRQEGELVFHVTALGPSCCEIQYGEDTLEEDKIGNLSFILNIISTFRMSLRILLNLSTEKLCGTENVSSKKKSLKREAESAPDNSLDSCFVATVTGSNLKRDTLYIPKEFALSNGLMNKYQIVLMNEEGESWKIDLRREAYNYGRFYMRRGWRSFCIANGKKPGDVFAFKLVKNEETPMIQLFPMTIEDLDKLPTVTASNLSRDRLYLPKTFIMSNGLLKKFQMCLMNEEGESWTIDVKHEAHTGRFLTIRGWRRFCVANGKKPGDLLKFKLVHNEETPVLQLLPLNSEDLHKLNPSNDTRHGQSLKVTKKEFLGMEATENEFLGEEVYCNDSFKASEKDTLPFAEPINEDIRQGQCSQTIKQEYVSTEEKNSTSQNRFVTLTLTHSSKLNLPFEFMKRNGIKKAGKITMVDRYDAKWRTSLLMDKIGTMSLGRGSKGFCEVNGVEMNESFILELIWEDTVPLLKFCSKV

SEQ ID NO: 87929 - protein, 423 aa, Arabidopsis thaliana
  peptide (1)..(423): Ceres Seq. ID no. 12704479
MSLRILLNLSTEKLCGTENVSSKKKSLKREAESAPDNSLDSCFVATVTGSNLKRDTLYIPKEFALSNGLMNKYQIVLMNEEGESWKIDLRREAYNYGRFYMRRGWRSFCIANGKKPGDVFAFKLVKNEETPMIQLFPMTIEDLDKLPTVTASNLSRDRLYLPKTFIMSNGLLKKFQMCLMNEEGESWTIDVKHEAHTGRFLTIRGWRRFCVANGKKPGDLLKFKLVHNEETPVLQLLPLNSEDLHKLNPSNDTRHGQSLKVTKKEFLGMEATENEFLGEEVYCNDSFKASEKDTLPFAEPINEDIRQGQCSQTIKQEYVSTEEKNSTSQNRFVTLTLTHSSKLNLPFEFMKRNGIKKAGKITMVDRYDAKWRTSLLMDKIGTMSLGRGSKGFCEVNGVEMNESFILELIWEDTVPLLKFCSKV

SEQ ID NO: 87930 - DNA, 1299 bp, Arabidopsis thaliana
  misc_feature (1)..(1299): Ceres Seq. ID no. 12704581
  misc_feature (1)..(1299): Ortholog of  Ceres SEQ ID NO 13654989 as cited in SEQ ID NO 63117
  misc_feature (1)..(1299): Ortholog of  Ceres SEQ ID NO 13584744 as cited in SEQ ID NO 69137
atgagagagcttcttcttcttcttcttcttcattttcagtctctaattcttttgatgatcttcatcactgtctctgcttcttctgcttcaaatccttctttagctcctgtttactcttccatggctacattctctcctcgaatccaaatgggaagtggtgaagaagatagatttgatgctcataagaaacttctgattggtctcataatcagtttctcttctcttggccttataatcttgttctgttttggcttttgggtttatcgcaagaaccaatctccaaaatccatcaacaactcagattctgagagtgggaattcattttccttgttaatgagacgacttggctcgattaaaactcagagaagaacttctatccaaaagggttacgtgcaatttttcgatatcaagaccctcgagaaagcgacaggcggttttaaagaaagtagtgtaatcggacaaggcggtttcggatgcgtttacaagggttgtttggacaataacgttaaagcagcggtcaagaagatcgagaacgttagccaagaagcaaaacgagaatttcagaatgaagttgacttgttgagcaagatccatcactcgaacgttatatcattgttgggctctgcaagcgaaatcaactcgagtttcatcgtttatgagcttatggagaaaggatcattagatgaacagttacatgggccttctcgtggatcagctctaacatggcacatgcgtatgaagattgctcttgatacagctagaggactagagtatctccatgagcattgtcgtccaccagttatccacagagatttgaaatcttcgaatattcttcttgattcttccttcaacgccaagatttcagatttcggtcttgctgtatcgctggatgaacatggcaagaacaacattaaactctctgggacacttggttatgttgccccggaatacctccttgacggaaaactgacggataagagtgatgtttatgcatttggggtagttctgcttgaactcttgttgggtagacgaccagttgaaaaattaactccagctcaatgccaatctcttgtaacttgggcaatgccacaacttaccgatagatccaagcttccaaacattgtggatgccgttataaaagatacaatggatctcaaacacttataccaggtagcagccatggctgtgttgtgcgtgcagccagaaccaagttaccggccgttgataaccgatgttcttcactcacttgttccactggttccggtagagctaggagggactctccggttaacaagatga

SEQ ID NO: 87931 - protein, 432 aa, Arabidopsis thaliana
  peptide (1)..(432): Ceres Seq. ID no. 12704582
MRELLLLLLLHFQSLILLMIFITVSASSASNPSLAPVYSSMATFSPRIQMGSGEEDRFDAHKKLLIGLIISFSSLGLIILFCFGFWVYRKNQSPKSINNSDSESGNSFSLLMRRLGSIKTQRRTSIQKGYVQFFDIKTLEKATGGFKESSVIGQGGFGCVYKGCLDNNVKAAVKKIENVSQEAKREFQNEVDLLSKIHHSNVISLLGSASEINSSFIVYELMEKGSLDEQLHGPSRGSALTWHMRMKIALDTARGLEYLHEHCRPPVIHRDLKSSNILLDSSFNAKISDFGLAVSLDEHGKNNIKLSGTLGYVAPEYLLDGKLTDKSDVYAFGVVLLELLLGRRPVEKLTPAQCQSLVTWAMPQLTDRSKLPNIVDAVIKDTMDLKHLYQVAAMAVLCVQPEPSYRPLITDVLHSLVPLVPVELGGTLRLTR

SEQ ID NO: 87932 - protein, 414 aa, Arabidopsis thaliana
  peptide (1)..(414): Ceres Seq. ID no. 12704583
MIFITVSASSASNPSLAPVYSSMATFSPRIQMGSGEEDRFDAHKKLLIGLIISFSSLGLIILFCFGFWVYRKNQSPKSINNSDSESGNSFSLLMRRLGSIKTQRRTSIQKGYVQFFDIKTLEKATGGFKESSVIGQGGFGCVYKGCLDNNVKAAVKKIENVSQEAKREFQNEVDLLSKIHHSNVISLLGSASEINSSFIVYELMEKGSLDEQLHGPSRGSALTWHMRMKIALDTARGLEYLHEHCRPPVIHRDLKSSNILLDSSFNAKISDFGLAVSLDEHGKNNIKLSGTLGYVAPEYLLDGKLTDKSDVYAFGVVLLELLLGRRPVEKLTPAQCQSLVTWAMPQLTDRSKLPNIVDAVIKDTMDLKHLYQVAAMAVLCVQPEPSYRPLITDVLHSLVPLVPVELGGTLRLTR

SEQ ID NO: 87933 - protein, 392 aa, Arabidopsis thaliana
  peptide (1)..(392): Ceres Seq. ID no. 12704584
MATFSPRIQMGSGEEDRFDAHKKLLIGLIISFSSLGLIILFCFGFWVYRKNQSPKSINNSDSESGNSFSLLMRRLGSIKTQRRTSIQKGYVQFFDIKTLEKATGGFKESSVIGQGGFGCVYKGCLDNNVKAAVKKIENVSQEAKREFQNEVDLLSKIHHSNVISLLGSASEINSSFIVYELMEKGSLDEQLHGPSRGSALTWHMRMKIALDTARGLEYLHEHCRPPVIHRDLKSSNILLDSSFNAKISDFGLAVSLDEHGKNNIKLSGTLGYVAPEYLLDGKLTDKSDVYAFGVVLLELLLGRRPVEKLTPAQCQSLVTWAMPQLTDRSKLPNIVDAVIKDTMDLKHLYQVAAMAVLCVQPEPSYRPLITDVLHSLVPLVPVELGGTLRLTR

SEQ ID NO: 87934 - DNA, 1035 bp, Arabidopsis thaliana
  misc_feature (1)..(1035): Ceres Seq. ID no. 12704589
  misc_feature (1)..(1035): Ortholog of  Ceres SEQ ID NO 15170209 as cited in SEQ ID NO 58562
  misc_feature (1)..(1035): Ortholog of  Ceres SEQ ID NO 12616332 as cited in SEQ ID NO 63449
  misc_feature (1)..(1035): Ortholog of  Ceres SEQ ID NO 13597498 as cited in SEQ ID NO 64648
atggagagcttacccacgacggttccctccaaatcagaacgacgagctcgttcctccaagttttctcagagttcctctaagccttcggttataatggctttcttctcttgcgtcgcttggctctacgtcgctggcaggttatggcaagatgcagagaatagagtggtactcaataatatacttaagaagagttatgatcagaagcctaaggttcttacggtggatgacaagcttatggtcctaggatgcaaagatcttgagaggagaattgttgaaactgaaatggagttgactctggctaagagtcaaggctatcttaagaacttaaaaagtggttcgtcttcagggaagaaattacttgctgtgattggagtgtattcaggctttggtagtcatctgaggcgtaatacatttcgagggtcttatatgccacaaggtgatgctttgaggaaacttgaggaaagaggaattgtcatacgttttgtgattggtcgaagtccaaatcgaggtgatagcttagatcgaaaaatcgacgaggaaaatcaagcaagaaaagattttttgattcttgagaatcatgaggaggcccaagaagagctagccaagaaagtgaagttcttctttagtgctgctgttcaaaactgggatgcagagttttacatcaaagttgatgacaatattgacttagatcttgaggggttgattggccttcttgaaagtcggcgtggtcaagatgctgcttacattgggtgtatgaagtctggtgaagtggttgctgaagagggagggaaatggtatgagccagaatggtggaaatttggggacgaaaaatcctggttcgctgttaatactatccaaaactttggctcagtatgtaaacataaacaggttaggctcactggatcattgaagacatatgcatttgatgatacctctataggatcttggatgattggtgttcaggcaacttatatagacgacaatcgcctttgctgcagcagcatcagacaagacaaggtgtgttctgtggcttga

SEQ ID NO: 87935 - protein, 344 aa, Arabidopsis thaliana
  peptide (1)..(344): Ceres Seq. ID no. 12704590
MESLPTTVPSKSERRARSSKFSQSSSKPSVIMAFFSCVAWLYVAGRLWQDAENRVVLNNILKKSYDQKPKVLTVDDKLMVLGCKDLERRIVETEMELTLAKSQGYLKNLKSGSSSGKKLLAVIGVYSGFGSHLRRNTFRGSYMPQGDALRKLEERGIVIRFVIGRSPNRGDSLDRKIDEENQARKDFLILENHEEAQEELAKKVKFFFSAAVQNWDAEFYIKVDDNIDLDLEGLIGLLESRRGQDAAYIGCMKSGEVVAEEGGKWYEPEWWKFGDEKSWFAVNTIQNFGSVCKHKQVRLTGSLKTYAFDDTSIGSWMIGVQATYIDDNRLCCSSIRQDKVCSVA

SEQ ID NO: 87936 - protein, 313 aa, Arabidopsis thaliana
  peptide (1)..(313): Ceres Seq. ID no. 12704591
MAFFSCVAWLYVAGRLWQDAENRVVLNNILKKSYDQKPKVLTVDDKLMVLGCKDLERRIVETEMELTLAKSQGYLKNLKSGSSSGKKLLAVIGVYSGFGSHLRRNTFRGSYMPQGDALRKLEERGIVIRFVIGRSPNRGDSLDRKIDEENQARKDFLILENHEEAQEELAKKVKFFFSAAVQNWDAEFYIKVDDNIDLDLEGLIGLLESRRGQDAAYIGCMKSGEVVAEEGGKWYEPEWWKFGDEKSWFAVNTIQNFGSVCKHKQVRLTGSLKTYAFDDTSIGSWMIGVQATYIDDNRLCCSSIRQDKVCSVA

SEQ ID NO: 87937 - protein, 266 aa, Arabidopsis thaliana
  peptide (1)..(266): Ceres Seq. ID no. 12704592
MVLGCKDLERRIVETEMELTLAKSQGYLKNLKSGSSSGKKLLAVIGVYSGFGSHLRRNTFRGSYMPQGDALRKLEERGIVIRFVIGRSPNRGDSLDRKIDEENQARKDFLILENHEEAQEELAKKVKFFFSAAVQNWDAEFYIKVDDNIDLDLEGLIGLLESRRGQDAAYIGCMKSGEVVAEEGGKWYEPEWWKFGDEKSWFAVNTIQNFGSVCKHKQVRLTGSLKTYAFDDTSIGSWMIGVQATYIDDNRLCCSSIRQDKVCSVA

SEQ ID NO: 87938 - DNA, 1286 bp, Arabidopsis thaliana
  misc_feature (1)..(1286): Ceres Seq. ID no. 12704637
  misc_feature (1)..(1286): Ortholog of  Ceres SEQ ID NO 12578315 as cited in SEQ ID NO 62451
  misc_feature (1)..(1286): Ortholog of  Ceres SEQ ID NO 13584577 as cited in SEQ ID NO 65298
tataccaaaaaatataaaataaaaaacactatggcggaaaactacgaccgtgccagtgagttaaaagcattcgacgagatgaagattggcgtgaaaggactcgtcgacgccggagtcacaaaagtcccgcgcattttccataacccgcatgttaacgtagcaaaccctaagcctacatcgacggtggtgatgattccaacaatcgatctaggtggcgtgttcgaatccacggtcgtgcgagagagtgtagttgcgaaggttaaagacgcaatggagaagtttggatttttccaggcgattaaccatggggttccacttgatgtgatggagaagatgataaatggtattcgtcggtttcacgaccaagatccagaagtgaggaaaatgttctatacccgagacaaaaccaaaaagcttaaatatcactctaatgctgatctctatgagtctcctgctgcgagttggagagataccttaagttgtgtcatggctcctgatgttccaaaagcacaggacttacctgaggtttgtggggagatcatgttggagtactcaaaggaagtgatgaagttagcggagttaatgtttgaaattttatcagaagctttagggttgagtcctaaccacctcaaagaaatggattgcgcaaaaggtttatggatgctctgtcattgttttccaccctgtcctgagccaaaccgaacattcggcggcgctcagcacacagacagatctttccttactattcttcttaacgacaacaatggaggacttcaagttctctacgatggatactggatcgatgttcctcctaatcccgaagcacttatctttaacgtaggagatttcctccagcttatctcgaatgacaagtttgtaagcatggagcatagaattttggcaaatggaggtgaagagccgcgcatttcggtcgcttgtttctttgtgcatacttttacttcaccaagttcgagagtatatggacccattaaagagcttctgtctgagctaaaccctccaaaatacagagacaccacctcggaatcctccaatcactatgtggctagaaaacctaatgggaattcttcgttggaccatttaaggatctgaaacttgaacctatatctcagaggttttcttgagtttccaataaaatttggtgcacgctgtgacgtaccatgttcaagaccttgaacgtatcattcaataattcttccgttgtgagtttcggctgcatgtttgacccaaaccagagagagtatggatcaatcaaggagagtgaacct

SEQ ID NO: 87939 - protein, 369 aa, Arabidopsis thaliana
  peptide (1)..(369): Ceres Seq. ID no. 12704638
YTKKYKIKNTMAENYDRASELKAFDEMKIGVKGLVDAGVTKVPRIFHNPHVNVANPKPTSTVVMIPTIDLGGVFESTVVRESVVAKVKDAMEKFGFFQAINHGVPLDVMEKMINGIRRFHDQDPEVRKMFYTRDKTKKLKYHSNADLYESPAASWRDTLSCVMAPDVPKAQDLPEVCGEIMLEYSKEVMKLAELMFEILSEALGLSPNHLKEMDCAKGLWMLCHCFPPCPEPNRTFGGAQHTDRSFLTILLNDNNGGLQVLYDGYWIDVPPNPEALIFNVGDFLQLISNDKFVSMEHRILANGGEEPRISVACFFVHTFTSPSSRVYGPIKELLSELNPPKYRDTTSESSNHYVARKPNGNSSLDHLRI

SEQ ID NO: 87940 - protein, 359 aa, Arabidopsis thaliana; identical to SEQ ID NO: 40798
  peptide (1)..(359): Ceres Seq. ID no. 12704639

SEQ ID NO: 87941 - protein, 343 aa, Arabidopsis thaliana; identical to SEQ ID NO: 40799
  peptide (1)..(343): Ceres Seq. ID no. 12704640

SEQ ID NO: 87942 - DNA, 1554 bp, Arabidopsis thaliana
  misc_feature (1)..(1554): Ceres Seq. ID no. 12704643
  misc_feature (1)..(1554): Ortholog of  Ceres SEQ ID NO 14308243 as cited in SEQ ID NO 60493
atggcaaagaaggtgaggaagcttcacgtgacggtgaagccggtgaggcttgatggtttaccggctattctcggtgatgaaacggcaggaaagaacctttccgcgatggtggaggtgaaatggaagggacctgtctccggttttggattgggcttcgtcccattctatcgttctaatcgaccggttaaccatacgagctctaaaccgattgctttaggctcaaaccacgtagaatgggaggaagagttcgaacgcgtttgttgcattgttggcccatggaacctctccttcaatgtcttctacggtgagaatatggacgcaaaaaacaaaaagtctttgatcggaaaagcatcgttggatttatcggagttagcgtcgaaacaagaatcgacggtggagagaaagcttccgattcggtcaaagggttccgtactttcgaaggaagcaacacttgtggtcaacgtgactttttctgaggtaagaaccgaaccagacgactttatgcaacttggtcagatctccgttgactcagcaattccgaagaaaaagtcaacgagtcgtcgcggcggtggtagccatttcgactctttttcctccccagccaccgcgtcgagttcaggcggacgtagccccgtagttgaaaccgggttattttcaagcccggatgagaaccagtctgaaccgggtcaaaaagccgggtttaattggtggaagagaagacggttaagcttttctatgacatggagaagagaaccgagagaggatgaagttacgaagacatcaacaaaaccatcggaggaactagaaaaaccggcgacggagataccaatcgaggcaaacaaatgggtaatgaaggatttagtgagccgcgatggaaaatcgaagctgaaatcggaagtttacttagcgtcgattgatcaaagaagcgaacaagccgccggagaagcagcatgcgcggcggttgcggtggtggtggctcattggttccacgcgaatcctaagctcatcaatccttcaggaacagcgttcgattcactaatcacgcaagggtcttctttatggcaatctctttgcgacaaagaatcgtatctaagattgtttccaaacaggcatttcgatctggaaacgatcgtttccgcaaatttacgaccggttagggtttgtaccgataaatcgtttaccgggttattcagcccggagagatttgcttcgttggatggtctgatgtcgtttgatcagatttgggacgaggcagatttagatggtttttgcgttattgattcgttaggggagagattgtttgaaggatgcaagcaagcttacattcttaagtttgatgattcgagtttgatgtatgagaaagaggaatcgtcggagaagttggtttgtgagggtaaaaagtgttgtagagaatatataaagagctttttggcggcgattccggtggcggagttggcggcaaaggaggagaaagggaatgtagtggatgtgtctcttcttcatgagagacttcagattgatttgcatcatattatattgactagtagtgattag

SEQ ID NO: 87943 - protein, 517 aa, Arabidopsis thaliana
  peptide (1)..(517): Ceres Seq. ID no. 12704644
MAKKVRKLHVTVKPVRLDGLPAILGDETAGKNLSAMVEVKWKGPVSGFGLGFVPFYRSNRPVNHTSSKPIALGSNHVEWEEEFERVCCIVGPWNLSFNVFYGENMDAKNKKSLIGKASLDLSELASKQESTVERKLPIRSKGSVLSKEATLVVNVTFSEVRTEPDDFMQLGQISVDSAIPKKKSTSRRGGGSHFDSFSSPATASSSGGRSPVVETGLFSSPDENQSEPGQKAGFNWWKRRRLSFSMTWRREPREDEVTKTSTKPSEELEKPATEIPIEANKWVMKDLVSRDGKSKLKSEVYLASIDQRSEQAAGEAACAAVAVVVAHWFHANPKLINPSGTAFDSLITQGSSLWQSLCDKESYLRLFPNRHFDLETIVSANLRPVRVCTDKSFTGLFSPERFASLDGLMSFDQIWDEADLDGFCVIDSLGERLFEGCKQAYILKFDDSSLMYEKEESSEKLVCEGKKCCREYIKSFLAAIPVAELAAKEEKGNVVDVSLLHERLQIDLHHIILTSSD

SEQ ID NO: 87944 - protein, 482 aa, Arabidopsis thaliana
  peptide (1)..(482): Ceres Seq. ID no. 12704645
MVEVKWKGPVSGFGLGFVPFYRSNRPVNHTSSKPIALGSNHVEWEEEFERVCCIVGPWNLSFNVFYGENMDAKNKKSLIGKASLDLSELASKQESTVERKLPIRSKGSVLSKEATLVVNVTFSEVRTEPDDFMQLGQISVDSAIPKKKSTSRRGGGSHFDSFSSPATASSSGGRSPVVETGLFSSPDENQSEPGQKAGFNWWKRRRLSFSMTWRREPREDEVTKTSTKPSEELEKPATEIPIEANKWVMKDLVSRDGKSKLKSEVYLASIDQRSEQAAGEAACAAVAVVVAHWFHANPKLINPSGTAFDSLITQGSSLWQSLCDKESYLRLFPNRHFDLETIVSANLRPVRVCTDKSFTGLFSPERFASLDGLMSFDQIWDEADLDGFCVIDSLGERLFEGCKQAYILKFDDSSLMYEKEESSEKLVCEGKKCCREYIKSFLAAIPVAELAAKEEKGNVVDVSLLHERLQIDLHHIILTSSD

SEQ ID NO: 87945 - protein, 413 aa, Arabidopsis thaliana
  peptide (1)..(413): Ceres Seq. ID no. 12704646
MDAKNKKSLIGKASLDLSELASKQESTVERKLPIRSKGSVLSKEATLVVNVTFSEVRTEPDDFMQLGQISVDSAIPKKKSTSRRGGGSHFDSFSSPATASSSGGRSPVVETGLFSSPDENQSEPGQKAGFNWWKRRRLSFSMTWRREPREDEVTKTSTKPSEELEKPATEIPIEANKWVMKDLVSRDGKSKLKSEVYLASIDQRSEQAAGEAACAAVAVVVAHWFHANPKLINPSGTAFDSLITQGSSLWQSLCDKESYLRLFPNRHFDLETIVSANLRPVRVCTDKSFTGLFSPERFASLDGLMSFDQIWDEADLDGFCVIDSLGERLFEGCKQAYILKFDDSSLMYEKEESSEKLVCEGKKCCREYIKSFLAAIPVAELAAKEEKGNVVDVSLLHERLQIDLHHIILTSSD

SEQ ID NO: 87946 - DNA, 1269 bp, Arabidopsis thaliana
  misc_feature (1)..(1269): Ceres Seq. ID no. 12704651
  misc_feature (1)..(1269): Ortholog of  Ceres SEQ ID NO 12372734 as cited in SEQ ID NO 1206
  misc_feature (1)..(1269): Ortholog of  Ceres SEQ ID NO 13584160 as cited in SEQ ID NO 63677
atgtcggaagttttcatgaatctgagtaactttttacgaatggactctgaaagcgtcgtagctgctgacggtgcggattgtgctattgcaaatggtgaagtgacaatggaaggagacagtagtaatggaaatggtggtacttcagagaatttggaatgttgttctactcagcatcctatggaggcatctgagttttttcgctttttccagggcacacagaatgaacaagtggatgattcaaaacagatgagaggacaaaaggtgcaaggaagggtcaagcatgagaagacctctggaggcaagaatattccatcagtcttggtgaagaagaaaaaagatgggaaagtggtggcatcaaatggttctgttgctccaaacgtaaagcctgtaaagtctcctaagagcaaatcgctcaatggtagagaggctcatgtcacgaagcatgggaaccatgactctctaccagctgaagggaccagggacaagccaaaactgagggaaacaaggaaacaagtcaatgatacatctgaagatgatacacagtatccaaaagaagatgatggcaaacctcgtcgagctagtgcacttccaaattatggattcagttttagatgtgaccaacgagctgaaaaaagaagagagttctattcaaagcttgaggaaaagatccatgcgaaagaagaagaaaagaataccgtacaagctaagtccaaggaaactcaagaagctgagcttaagatgctaaggaagagtctgaacttcaaagccacacctatgcctaccttctatcaagaacctcagctacctaaaacagagttaaagaagatagcgataacaagaccaaaatctccaaaactcgggcggaagaagaccaattctcgagcagattctgaagaagccattactattcaaacccctcgctttggtaggttgagcttagatgagaaaactcctaaagataacccggttgttgaaggaagtgtacccggtgagaccaagaagccaccagtgcgcaagtcacttcccaggttgccttcagaaaagacaaatctgtccaacgggaaggtggctccagcaaaagctgtaacagcctcaacaaaggcaaagtcggaaagaaagaaaccagataaagatgtggatgacctaagccagtcaagtcctgtagacgacaatgctgacccagaagattcacaagaacaagctccaagagtgaatgaagacagaaacgaatctcacatggtagtggaagtggttgcggttgagccttaa

SEQ ID NO: 87947 - protein, 422 aa, Arabidopsis thaliana
  peptide (1)..(422): Ceres Seq. ID no. 12704652
MSEVFMNLSNFLRMDSESVVAADGADCAIANGEVTMEGDSSNGNGGTSENLECCSTQHPMEASEFFRFFQGTQNEQVDDSKQMRGQKVQGRVKHEKTSGGKNIPSVLVKKKKDGKVVASNGSVAPNVKPVKSPKSKSLNGREAHVTKHGNHDSLPAEGTRDKPKLRETRKQVNDTSEDDTQYPKEDDGKPRRASALPNYGFSFRCDQRAEKRREFYSKLEEKIHAKEEEKNTVQAKSKETQEAELKMLRKSLNFKATPMPTFYQEPQLPKTELKKIAITRPKSPKLGRKKTNSRADSEEAITIQTPRFGRLSLDEKTPKDNPVVEGSVPGETKKPPVRKSLPRLPSEKTNLSNGKVAPAKAVTASTKAKSERKKPDKDVDDLSQSSPVDDNADPEDSQEQAPRVNEDRNESHMVVEVVAVEP

SEQ ID NO: 87948 - protein, 417 aa, Arabidopsis thaliana
  peptide (1)..(417): Ceres Seq. ID no. 12704653
MNLSNFLRMDSESVVAADGADCAIANGEVTMEGDSSNGNGGTSENLECCSTQHPMEASEFFRFFQGTQNEQVDDSKQMRGQKVQGRVKHEKTSGGKNIPSVLVKKKKDGKVVASNGSVAPNVKPVKSPKSKSLNGREAHVTKHGNHDSLPAEGTRDKPKLRETRKQVNDTSEDDTQYPKEDDGKPRRASALPNYGFSFRCDQRAEKRREFYSKLEEKIHAKEEEKNTVQAKSKETQEAELKMLRKSLNFKATPMPTFYQEPQLPKTELKKIAITRPKSPKLGRKKTNSRADSEEAITIQTPRFGRLSLDEKTPKDNPVVEGSVPGETKKPPVRKSLPRLPSEKTNLSNGKVAPAKAVTASTKAKSERKKPDKDVDDLSQSSPVDDNADPEDSQEQAPRVNEDRNESHMVVEVVAVEP

SEQ ID NO: 87949 - protein, 409 aa, Arabidopsis thaliana
  peptide (1)..(409): Ceres Seq. ID no. 12704654
MDSESVVAADGADCAIANGEVTMEGDSSNGNGGTSENLECCSTQHPMEASEFFRFFQGTQNEQVDDSKQMRGQKVQGRVKHEKTSGGKNIPSVLVKKKKDGKVVASNGSVAPNVKPVKSPKSKSLNGREAHVTKHGNHDSLPAEGTRDKPKLRETRKQVNDTSEDDTQYPKEDDGKPRRASALPNYGFSFRCDQRAEKRREFYSKLEEKIHAKEEEKNTVQAKSKETQEAELKMLRKSLNFKATPMPTFYQEPQLPKTELKKIAITRPKSPKLGRKKTNSRADSEEAITIQTPRFGRLSLDEKTPKDNPVVEGSVPGETKKPPVRKSLPRLPSEKTNLSNGKVAPAKAVTASTKAKSERKKPDKDVDDLSQSSPVDDNADPEDSQEQAPRVNEDRNESHMVVEVVAVEP

SEQ ID NO: 87950 - DNA, 927 bp, Arabidopsis thaliana
  misc_feature (1)..(927): Ceres Seq. ID no. 12704681
  misc_feature (1)..(927): Ortholog of  Ceres SEQ ID NO 14301994 as cited in SEQ ID NO 56653
  misc_feature (1)..(927): Ortholog of  Ceres SEQ ID NO 13595658 as cited in SEQ ID NO 59888
  misc_feature (1)..(927): Ortholog of  Ceres SEQ ID NO 13661330 as cited in SEQ ID NO 61614
  misc_feature (1)..(927): Ortholog of  Ceres SEQ ID NO 13596025 as cited in SEQ ID NO 62024
  misc_feature (1)..(927): Ortholog of  Ceres SEQ ID NO 13662324 as cited in SEQ ID NO 62162
  misc_feature (1)..(927): Ortholog of  Ceres SEQ ID NO 12625713 as cited in SEQ ID NO 64160
  misc_feature (1)..(927): Ortholog of  Ceres SEQ ID NO 14302860 as cited in SEQ ID NO 67667
cacaccaaaagctacacaatggctaaaacctctcttcctctcgccgcctccttcctcctcctcatctccttctcctccgccgtagacacttcccgtctcttcctcaccgtcgtcaacaactgtcccttcactgtctggccagccattcaacccaacgccggccaccccgtcctagagaaaggtggcttcgctctcccaactttcactcaccgctccttcaacgttccaaccacacactggtccggtcgcatctgggccagaacctggtgtgcccactacaacggaaaattctcctgcctcaccggagactgcggaaaccgcctggaatgcaacggtctcggcggggcaccaccagcttctctagctcagttcgacctccaccacggtggtcaccacgacttctcctcttacggtgtctctctcgttgacggttacaatgttccgatgaccgtgactcctcacgaaggccatggtgtctgtcctgtcgttggttgtcgtgaagatctaataaaaacgtgtccggctcatcttcaggtccggtcacacagtggacacgtggtggcttgtaagagtgggtgtgaggctttccatacagacgagctgtgttgtcgtggtcattacaatagccctaacacgtgtaaagcttcgagccattcgctgttctttaagcatgcgtgtccttcgagtttcacttttgctcatgatagtccttcgcttatgcatgactgtgcttctcctagagagctcaaagtcatcttctgccactaatgtttcggccatgttctagggttattgtcgtaacatcggactgatcttctaatgcttttgtttggttagtctgattttgattggtttagtatgcgatttcccggttcagttatgtagtccaactatgaaattatgtattatcttgaaattgctctcttt

SEQ ID NO: 87951 - protein, 255 aa, Arabidopsis thaliana
  peptide (1)..(255): Ceres Seq. ID no. 12704682
HTKSYTMAKTSLPLAASFLLLISFSSAVDTSRLFLTVVNNCPFTVWPAIQPNAGHPVLEKGGFALPTFTHRSFNVPTTHWSGRIWARTWCAHYNGKFSCLTGDCGNRLECNGLGGAPPASLAQFDLHHGGHHDFSSYGVSLVDGYNVPMTVTPHEGHGVCPVVGCREDLIKTCPAHLQVRSHSGHVVACKSGCEAFHTDELCCRGHYNSPNTCKASSHSLFFKHACPSSFTFAHDSPSLMHDCASPRELKVIFCH

SEQ ID NO: 87952 - protein, 249 aa, Arabidopsis thaliana; identical to SEQ ID NO: 26173
  peptide (1)..(249): Ceres Seq. ID no. 12704683

SEQ ID NO: 87953 - DNA, 2643 bp, Arabidopsis thaliana
  misc_feature (1)..(2643): Ceres Seq. ID no. 12704707
  misc_feature (1)..(2643): Ortholog of  Ceres SEQ ID NO 13654989 as cited in SEQ ID NO 63117
  misc_feature (1)..(2643): Ortholog of  Ceres SEQ ID NO 13584744 as cited in SEQ ID NO 69137
atgaagattcaccttttgttggccatgattggaacctttgtcgttataattggagcccaggatcaagaaggtttcatcagtttagattgtggattacctagtgacgaatctccttacgatgattcgtttaacggattaacattcacatcggattccactttcatccaaacaggaaaaattgatagtgtcgataaagatcttaacataaacttatcaaaacaatatttgactcttagatacttcccagaaggaaaacgtaattgttatagtcttgatgtcaagcgtggcacaacttatctcatcgtggttagctttgtatatggaaattatgatggtcttaaccgtgatccaaacttcgatatccatcttggtcccaataagtggaaaagaatagatttggatggagagaaagaaggtacaagagaagagatcatacacaaagccaggtcaaactctttggatatttgtcttgttaagacaggagaaactttgccaataatttcagccatagaaatacggccactaaggaataatacgtatgttacacaatctggttcgctgatgatgtctttccgggtttatcttagcaattcagatgcatctataaggtatgctgatgacgtccatgatcgtatttggtctccattcaacggatcttcacatacacatataacaactgatctcaatataaacaactcaaatgcatatgagattccaaaaaatatactccaaactgctgccataccaagaaacgccagtgcgccgctgattattacgtgggatccactacccattaatgcggaggtatacttgtacatgcactttgcggagattcaaacccttgaagccaacgagacgaggcagtttgacgttatcttgagaggaaactttaatcattcaggatttagtccaaccaagttaaaggtatttacattatacacagaagaaccaatgaaatgtggttcagaaggttgttatttacagctagtaaaaacaccgaactcaactctgccacctctgatcaacgctattgaggcatacagtgttatcgagttctcacaattggaaacaagtcttagtgatgtggacgctatcaagaacatcaaaaatacttataagctgaataaaatcacttggcaaggagatccatgtctccctcaagatttgtcgtgggaaagtattagatgcacctacgtagatggctccacttcaccaacaatcatttccttagatttgtcgaaaagtggattaaatgggagtataccccaaattttacaaaatttcacgcaattacaagaactggacttatcaaataatagcttgactggaccggtgcctatcttccttgccaacatgaaaacaaacttaagtgggaacaatctcagtggttcagttcctcaagctcttcttgacaaagaaaaagaaggacttgtgttaaaacttgaaggaaatccagatttgtgcaaatccagtttttgcaataccgaaaagaaaaataaattcttgctcccggttattgcatcagctgcctctttggttattgtagttgtggttgtggctcttttttttgtcttccgaaagaagaaggccagcccttcaaatctacatgctccaccaagtatgcctgtatcgaatcccgggcacaatagtcaatcagaatcatcattcacatcgaaaaaaattaggtttacttactctgaggttcaagaaatgacaaataacttcgataaagctctcggtgaaggaggatttggagtcgtgtatcatggttttgttaatgttattgaacaagtagcagttaaattgctatcacaatcatcttctcaaggctataagcatttcaaggcagaggtggaactccttatgagagttcaccatataaatttggtgagtcttgttgggtattgtgatgaaggagaacacttggctcttatttatgaatacatgccaaatggagacttaaagcaacatttgtcaggaaagcatggcggattcgtcctgagctgggaaagtagactaaaaatagttttggatgcagcactaggattggagtatttacatactggatgtgtaccaccaatggttcacagagatatcaaaactacgaatatacttctagatcaacatctccaagctaaattagctgattttgggctttcaagatcttttcccatcggaaatgagaaaaatgtgtcaactgttgttgctggtactcctggatatcttgatcctgagtattatcaaacaaattggttgacagaaaagagtgatatatacagtttcggaattgtactgttagagataatttcaaaccgtcctataatccagcaatcccgtgaaaagcctcacatagtggaatgggtcagttttatgataacaaaaggagatcttagaagtattatggatccaaacctccaccaagattatgatattggttctgtctggaaggccattgaattagcaatgtcatgtgtgagtctttcttctgcaagacgaccaaacatgtctcgagttgtgaatgaattaaaagaatgtcttatatccgaaacctctaggataggtgagggacgagacatggaatcaaaaggttcaatggaattcagcagagacatttataatgaggtaatacctcaagctcgctag

SEQ ID NO: 87954 - protein, 880 aa, Arabidopsis thaliana
  peptide (1)..(880): Ceres Seq. ID no. 12704708
MKIHLLLAMIGTFVVIIGAQDQEGFISLDCGLPSDESPYDDSFNGLTFTSDSTFIQTGKIDSVDKDLNINLSKQYLTLRYFPEGKRNCYSLDVKRGTTYLIVVSFVYGNYDGLNRDPNFDIHLGPNKWKRIDLDGEKEGTREEIIHKARSNSLDICLVKTGETLPIISAIEIRPLRNNTYVTQSGSLMMSFRVYLSNSDASIRYADDVHDRIWSPFNGSSHTHITTDLNINNSNAYEIPKNILQTAAIPRNASAPLIITWDPLPINAEVYLYMHFAEIQTLEANETRQFDVILRGNFNHSGFSPTKLKVFTLYTEEPMKCGSEGCYLQLVKTPNSTLPPLINAIEAYSVIEFSQLETSLSDVDAIKNIKNTYKLNKITWQGDPCLPQDLSWESIRCTYVDGSTSPTIISLDLSKSGLNGSIPQILQNFTQLQELDLSNNSLTGPVPIFLANMKTNLSGNNLSGSVPQALLDKEKEGLVLKLEGNPDLCKSSFCNTEKKNKFLLPVIASAASLVIVVVVVALFFVFRKKKASPSNLHAPPSMPVSNPGHNSQSESSFTSKKIRFTYSEVQEMTNNFDKALGEGGFGVVYHGFVNVIEQVAVKLLSQSSSQGYKHFKAEVELLMRVHHINLVSLVGYCDEGEHLALIYEYMPNGDLKQHLSGKHGGFVLSWESRLKIVLDAALGLEYLHTGCVPPMVHRDIKTTNILLDQHLQAKLADFGLSRSFPIGNEKNVSTVVAGTPGYLDPEYYQTNWLTEKSDIYSFGIVLLEIISNRPIIQQSREKPHIVEWVSFMITKGDLRSIMDPNLHQDYDIGSVWKAIELAMSCVSLSSARRPNMSRVVNELKECLISETSRIGEGRDMESKGSMEFSRDIYNEVIPQAR

SEQ ID NO: 87955 - protein, 872 aa, Arabidopsis thaliana
  peptide (1)..(872): Ceres Seq. ID no. 12704709
MIGTFVVIIGAQDQEGFISLDCGLPSDESPYDDSFNGLTFTSDSTFIQTGKIDSVDKDLNINLSKQYLTLRYFPEGKRNCYSLDVKRGTTYLIVVSFVYGNYDGLNRDPNFDIHLGPNKWKRIDLDGEKEGTREEIIHKARSNSLDICLVKTGETLPIISAIEIRPLRNNTYVTQSGSLMMSFRVYLSNSDASIRYADDVHDRIWSPFNGSSHTHITTDLNINNSNAYEIPKNILQTAAIPRNASAPLIITWDPLPINAEVYLYMHFAEIQTLEANETRQFDVILRGNFNHSGFSPTKLKVFTLYTEEPMKCGSEGCYLQLVKTPNSTLPPLINAIEAYSVIEFSQLETSLSDVDAIKNIKNTYKLNKITWQGDPCLPQDLSWESIRCTYVDGSTSPTIISLDLSKSGLNGSIPQILQNFTQLQELDLSNNSLTGPVPIFLANMKTNLSGNNLSGSVPQALLDKEKEGLVLKLEGNPDLCKSSFCNTEKKNKFLLPVIASAASLVIVVVVVALFFVFRKKKASPSNLHAPPSMPVSNPGHNSQSESSFTSKKIRFTYSEVQEMTNNFDKALGEGGFGVVYHGFVNVIEQVAVKLLSQSSSQGYKHFKAEVELLMRVHHINLVSLVGYCDEGEHLALIYEYMPNGDLKQHLSGKHGGFVLSWESRLKIVLDAALGLEYLHTGCVPPMVHRDIKTTNILLDQHLQAKLADFGLSRSFPIGNEKNVSTVVAGTPGYLDPEYYQTNWLTEKSDIYSFGIVLLEIISNRPIIQQSREKPHIVEWVSFMITKGDLRSIMDPNLHQDYDIGSVWKAIELAMSCVSLSSARRPNMSRVVNELKECLISETSRIGEGRDMESKGSMEFSRDIYNEVIPQAR

SEQ ID NO: 87956 - protein, 693 aa, Arabidopsis thaliana
  peptide (1)..(693): Ceres Seq. ID no. 12704710
MMSFRVYLSNSDASIRYADDVHDRIWSPFNGSSHTHITTDLNINNSNAYEIPKNILQTAAIPRNASAPLIITWDPLPINAEVYLYMHFAEIQTLEANETRQFDVILRGNFNHSGFSPTKLKVFTLYTEEPMKCGSEGCYLQLVKTPNSTLPPLINAIEAYSVIEFSQLETSLSDVDAIKNIKNTYKLNKITWQGDPCLPQDLSWESIRCTYVDGSTSPTIISLDLSKSGLNGSIPQILQNFTQLQELDLSNNSLTGPVPIFLANMKTNLSGNNLSGSVPQALLDKEKEGLVLKLEGNPDLCKSSFCNTEKKNKFLLPVIASAASLVIVVVVVALFFVFRKKKASPSNLHAPPSMPVSNPGHNSQSESSFTSKKIRFTYSEVQEMTNNFDKALGEGGFGVVYHGFVNVIEQVAVKLLSQSSSQGYKHFKAEVELLMRVHHINLVSLVGYCDEGEHLALIYEYMPNGDLKQHLSGKHGGFVLSWESRLKIVLDAALGLEYLHTGCVPPMVHRDIKTTNILLDQHLQAKLADFGLSRSFPIGNEKNVSTVVAGTPGYLDPEYYQTNWLTEKSDIYSFGIVLLEIISNRPIIQQSREKPHIVEWVSFMITKGDLRSIMDPNLHQDYDIGSVWKAIELAMSCVSLSSARRPNMSRVVNELKECLISETSRIGEGRDMESKGSMEFSRDIYNEVIPQAR

SEQ ID NO: 87957 - DNA, 1797 bp, Arabidopsis thaliana
  misc_feature (1)..(1797): Ceres Seq. ID no. 12704719
  misc_feature (1)..(1797): Ortholog of  Ceres SEQ ID NO 13659394 as cited in SEQ ID NO 67049
atgggttcttactcaaatcttgcttctgcggatgctgatttctctgattctgttttgaagtacataagccaagttcttatggaagaggacatggaagataagccttgtatgtttcatgatgctttatctcttcaagcagctgagaagtctctctatgaagctctcggcgagaagtacccgacaccgatcccgagtaacttcatttttcagtctacatctactagagccagtagcggtaacgcggttttcgggtcaagttttagcggtgatttggtttctaatatgtttaatgatactgacttggcgttacaattcaagaaagggatggaggaagctagtaaattccttcctaagagctctcagttggttatagataactctgttcctaacagattaaccggaaagaagagccattggcgcgaagaagaacatttgactgaagaaagaagtaagaaacaatctgctatttatgttgatgaaactgatgagcttactgatatgtttgacaatattctgatatttggcgaggctaaggaacaacctgtatgcattcttaacgagagtttccctaaggaacctgcgaaagcttcaacgtttagtaagagtcctaaaggcgaaaaaccggaagctagtggtaacagttatacaaaagagacacctgatttgaggacaatgctggtttcttgtgctcaagctgtttcgattaacgatcgtagaactgctgacgagctgttaagtcggataaggcaacattcttcatcttacggcgatggaacagagagattggctcattattttgctaacagtcttgaagcacgtttggctgggataggtacacaggtttatactgccttgtcttccaagaaaacatctacttctgacatgttgaaagcttatcagacatatatatcagtctgtccgttcaagaaaatcgcaatcatattcgccaaccatagtattatgcggttggcttcaagtgctaatgccaaaaccatccacatcatagattttggaatatctgatggtttccagtggccttctctgattcatcgacttgcttggagacgtggttcatcttgtaagcttcggataaccggtatagagttgcctcaacgtggttttagaccagccgagggagttattgagactggtcgtcgcttggctaagtattgtcagaagttcaatattccgtttgagtacaatgcgattgcgcagaaatgggaatcaatcaagttggaggacttgaagctaaaagaaggcgagtttgttgcggtaaactctttatttcggtttaggaatcttctagatgagacggtggcagtgcatagcccgagagatacggttttgaagctgataaggaagataaagccagacgtgttcatccccgggatcctcagcggatcctacaacgcgcctttctttgtcacgaggtttagagaagttctgtttcattactcatctctgtttgacatgtgtgacacgaatctaacacgggaagatccaatgagggttatgtttgagaaagagttctatgggcgggagatcatgaacgtggtggcgtgtgaggggacggagagagtggagaggccagagagttataagcagtggcaggcgagggcgatgagagccgggtttagacagattccgctggagaaggaactagttcagaaactgaagttgatggtggaaagtggatacaaacccaaagagtttgatgttgatcaagattgtcactggttgcttcagggctggaaaggtagaattgtatacggttcatctatttgggttcctttgtag

SEQ ID NO: 87958 - protein, 598 aa, Arabidopsis thaliana
  peptide (1)..(598): Ceres Seq. ID no. 12704720
MGSYSNLASADADFSDSVLKYISQVLMEEDMEDKPCMFHDALSLQAAEKSLYEALGEKYPTPIPSNFIFQSTSTRASSGNAVFGSSFSGDLVSNMFNDTDLALQFKKGMEEASKFLPKSSQLVIDNSVPNRLTGKKSHWREEEHLTEERSKKQSAIYVDETDELTDMFDNILIFGEAKEQPVCILNESFPKEPAKASTFSKSPKGEKPEASGNSYTKETPDLRTMLVSCAQAVSINDRRTADELLSRIRQHSSSYGDGTERLAHYFANSLEARLAGIGTQVYTALSSKKTSTSDMLKAYQTYISVCPFKKIAIIFANHSIMRLASSANAKTIHIIDFGISDGFQWPSLIHRLAWRRGSSCKLRITGIELPQRGFRPAEGVIETGRRLAKYCQKFNIPFEYNAIAQKWESIKLEDLKLKEGEFVAVNSLFRFRNLLDETVAVHSPRDTVLKLIRKIKPDVFIPGILSGSYNAPFFVTRFREVLFHYSSLFDMCDTNLTREDPMRVMFEKEFYGREIMNVVACEGTERVERPESYKQWQARAMRAGFRQIPLEKELVQKLKLMVESGYKPKEFDVDQDCHWLLQGWKGRIVYGSSIWVPL

SEQ ID NO: 87959 - protein, 572 aa, Arabidopsis thaliana
  peptide (1)..(572): Ceres Seq. ID no. 12704721
MEEDMEDKPCMFHDALSLQAAEKSLYEALGEKYPTPIPSNFIFQSTSTRASSGNAVFGSSFSGDLVSNMFNDTDLALQFKKGMEEASKFLPKSSQLVIDNSVPNRLTGKKSHWREEEHLTEERSKKQSAIYVDETDELTDMFDNILIFGEAKEQPVCILNESFPKEPAKASTFSKSPKGEKPEASGNSYTKETPDLRTMLVSCAQAVSINDRRTADELLSRIRQHSSSYGDGTERLAHYFANSLEARLAGIGTQVYTALSSKKTSTSDMLKAYQTYISVCPFKKIAIIFANHSIMRLASSANAKTIHIIDFGISDGFQWPSLIHRLAWRRGSSCKLRITGIELPQRGFRPAEGVIETGRRLAKYCQKFNIPFEYNAIAQKWESIKLEDLKLKEGEFVAVNSLFRFRNLLDETVAVHSPRDTVLKLIRKIKPDVFIPGILSGSYNAPFFVTRFREVLFHYSSLFDMCDTNLTREDPMRVMFEKEFYGREIMNVVACEGTERVERPESYKQWQARAMRAGFRQIPLEKELVQKLKLMVESGYKPKEFDVDQDCHWLLQGWKGRIVYGSSIWVPL

SEQ ID NO: 87960 - protein, 568 aa, Arabidopsis thaliana
  peptide (1)..(568): Ceres Seq. ID no. 12704722
MEDKPCMFHDALSLQAAEKSLYEALGEKYPTPIPSNFIFQSTSTRASSGNAVFGSSFSGDLVSNMFNDTDLALQFKKGMEEASKFLPKSSQLVIDNSVPNRLTGKKSHWREEEHLTEERSKKQSAIYVDETDELTDMFDNILIFGEAKEQPVCILNESFPKEPAKASTFSKSPKGEKPEASGNSYTKETPDLRTMLVSCAQAVSINDRRTADELLSRIRQHSSSYGDGTERLAHYFANSLEARLAGIGTQVYTALSSKKTSTSDMLKAYQTYISVCPFKKIAIIFANHSIMRLASSANAKTIHIIDFGISDGFQWPSLIHRLAWRRGSSCKLRITGIELPQRGFRPAEGVIETGRRLAKYCQKFNIPFEYNAIAQKWESIKLEDLKLKEGEFVAVNSLFRFRNLLDETVAVHSPRDTVLKLIRKIKPDVFIPGILSGSYNAPFFVTRFREVLFHYSSLFDMCDTNLTREDPMRVMFEKEFYGREIMNVVACEGTERVERPESYKQWQARAMRAGFRQIPLEKELVQKLKLMVESGYKPKEFDVDQDCHWLLQGWKGRIVYGSSIWVPL

SEQ ID NO: 87961 - DNA, 2757 bp, Arabidopsis thaliana
  misc_feature (1)..(2757): Ceres Seq. ID no. 12704739
  misc_feature (1)..(2757): Ortholog of  Ceres SEQ ID NO 12589728 as cited in SEQ ID NO 0
  misc_feature (1)..(2757): Ortholog of  Ceres SEQ ID NO 14302164 as cited in SEQ ID NO 0
atgatgataccggaactagggagaagaccgatgcatagaggtaacgaagattcatcttttggggatgattacgagaaagagattggagtattgcttggtgagcagcagagaaggcaagtagaggcggatgagcttgagagagagcttaacttgtatagaagtggctctgctccaccgactgttgatggttctcttagtgctgccggagggctttttagcggcggaggtggggcttcttttctggaatttggtggagttaataagggtaatgggtttggtggtgatgatgaggagtttaggaaagatccagcttacttgtcttattactatgctaatatgaagttgaatccgaggttgccacctcctttgatgtctagggaggatttgagggcggatatggggcatcctgttgtacagcagccctcacgtcctgctagtcgtaatacctttgatgagaatgttgactctaataataacctgtctccatctgcatcacaaggcattggagcgccatctccatactgctatgcagctgttctgggttcatctttgtctagaaatggaactccagatccacagggcattgctagggtgcctagtccttgccttactcccattggcagtggaagagtgagttcaaatgataagaggaacacaagtaatcaaagcccgttcaacggtgttacatctggtctcaacgagtcttctgatcttgtcaatgctttatccggcttgaacctgtcaggcactggcgggctagatgaacgtggtcaggctgagcaagatgtcgaaaaggtcaggaactatatgtttggactgcaagatgggcataatgaagtcaatccacatgggttcccaaacagatctgatcaagctaggggaactgcttcgtgcaggaattcacaaatgagagggtcacaaggatctgcatataatagtggaagtggagtagctaatccttaccagcatcatgatagcccaaactattacgcattaaatccagctgtagcttctatgatggctaaccaacttggaactaataactattctccaatgtatgaaaatgcttctgccactttgggatattctgcaatggactccagacttcatggtggaagttttgtttcttctggtcaaaacctctctgaatcacgaaatattggcagggtcggtaatcgaatgatggaaggaggtacgggtcacccgtcacatcttgcagacccgatgtatcatcagtatgcaaggttctctgaaaatgctgattcgtttgatcttcttaatgacccttcaatggacaggaactatggtaattcatacatgaatatgcttgaaattcagagggcttatctcggatctcagaaatcacagtatggtcttccttacaaatcagggagccctaacagccatagctattatggcagtccaacatttgggtctaatatgtcatatcctggcagcccattggctcatcatggtatgccaaactctcttatgtcaccttacagccctatgagacgaggtgaagtaaatatgcgatatcccgctgcaacaagaaactatactggaggggtaatgggttcttggcacatggatgctagtttggatgaaggatttggatcttcaatgcttgaagagttcaaaagtaacaaaacaagagggttcgaactttctgaaatagctggccatgttgtagagttcagttcggatcagtatggaagccggtttattcagcagaaactcgagacagcaacaactgatgagaaaaacatggtttatgaggagatcatgccaaaagctcttgccctgatgactgacgtttttggaaactatgtgattcagaagttctttgagcatggactcccaccacagagaagagaattgggagagaaactcattgacaatgttttgcctcttagcttacagatgtatggttgtcgtgtcatccagaaggcaattgaggtggttgatctagaccagaaaatccaaatggtcaaagaacttgatggacatgtgatgcgatgtgtacgtgatcagaatgggaaccatgtggttcaaaagtgtattgaatgtgtgcctgaagaaaacattgagtttattatttcaactttctttggccatgtggtgaccctctccactcacccatacgggtgccgtgttattcagagagtattggaacactgccataaccctgatacacagagtaaggttatggaagaaatcctgtccactgttagtatgctgacccaagatcagtatggaaactatgttgttcagcatgtactggagcatggaaagcctgatgagcgcactgtgataatcaaagagttagcggggaagattgttcagatgagccaacagaagtttgcatcaaacgttgttgagaagtgtttgacttttggaggtcctgaggaacgggaattgctggtgaatgagatgctgggcacaactgatgaaaacgagcctcttcaggcgatgatgaaggatcagtttgcaaactatgtagtgcaaaaagtcctggagacatgtgatgaccaacagcgtgaactgatactgactcgtattaaagtgcatctgaatgctctaaagaaatacacttacggaaagcatatcgttgcccgtgttgaaaaactcgttgctgctggaggtatgctcatagaggagaatggctttgcagtcattaccccagcctctggtggcgtaaggccgcaagtgttgtacagcttaactagggtggatggctctgccataacgttttga

SEQ ID NO: 87962 - protein, 918 aa, Arabidopsis thaliana
  peptide (1)..(918): Ceres Seq. ID no. 12704740
MMIPELGRRPMHRGNEDSSFGDDYEKEIGVLLGEQQRRQVEADELERELNLYRSGSAPPTVDGSLSAAGGLFSGGGGASFLEFGGVNKGNGFGGDDEEFRKDPAYLSYYYANMKLNPRLPPPLMSREDLRADMGHPVVQQPSRPASRNTFDENVDSNNNLSPSASQGIGAPSPYCYAAVLGSSLSRNGTPDPQGIARVPSPCLTPIGSGRVSSNDKRNTSNQSPFNGVTSGLNESSDLVNALSGLNLSGTGGLDERGQAEQDVEKVRNYMFGLQDGHNEVNPHGFPNRSDQARGTASCRNSQMRGSQGSAYNSGSGVANPYQHHDSPNYYALNPAVASMMANQLGTNNYSPMYENASATLGYSAMDSRLHGGSFVSSGQNLSESRNIGRVGNRMMEGGTGHPSHLADPMYHQYARFSENADSFDLLNDPSMDRNYGNSYMNMLEIQRAYLGSQKSQYGLPYKSGSPNSHSYYGSPTFGSNMSYPGSPLAHHGMPNSLMSPYSPMRRGEVNMRYPAATRNYTGGVMGSWHMDASLDEGFGSSMLEEFKSNKTRGFELSEIAGHVVEFSSDQYGSRFIQQKLETATTDEKNMVYEEIMPKALALMTDVFGNYVIQKFFEHGLPPQRRELGEKLIDNVLPLSLQMYGCRVIQKAIEVVDLDQKIQMVKELDGHVMRCVRDQNGNHVVQKCIECVPEENIEFIISTFFGHVVTLSTHPYGCRVIQRVLEHCHNPDTQSKVMEEILSTVSMLTQDQYGNYVVQHVLEHGKPDERTVIIKELAGKIVQMSQQKFASNVVEKCLTFGGPEERELLVNEMLGTTDENEPLQAMMKDQFANYVVQKVLETCDDQQRELILTRIKVHLNALKKYTYGKHIVARVEKLVAAGGMLIEENGFAVITPASGGVRPQVLYSLTRVDGSAITF

SEQ ID NO: 87963 - protein, 917 aa, Arabidopsis thaliana
  peptide (1)..(917): Ceres Seq. ID no. 12704741
MIPELGRRPMHRGNEDSSFGDDYEKEIGVLLGEQQRRQVEADELERELNLYRSGSAPPTVDGSLSAAGGLFSGGGGASFLEFGGVNKGNGFGGDDEEFRKDPAYLSYYYANMKLNPRLPPPLMSREDLRADMGHPVVQQPSRPASRNTFDENVDSNNNLSPSASQGIGAPSPYCYAAVLGSSLSRNGTPDPQGIARVPSPCLTPIGSGRVSSNDKRNTSNQSPFNGVTSGLNESSDLVNALSGLNLSGTGGLDERGQAEQDVEKVRNYMFGLQDGHNEVNPHGFPNRSDQARGTASCRNSQMRGSQGSAYNSGSGVANPYQHHDSPNYYALNPAVASMMANQLGTNNYSPMYENASATLGYSAMDSRLHGGSFVSSGQNLSESRNIGRVGNRMMEGGTGHPSHLADPMYHQYARFSENADSFDLLNDPSMDRNYGNSYMNMLEIQRAYLGSQKSQYGLPYKSGSPNSHSYYGSPTFGSNMSYPGSPLAHHGMPNSLMSPYSPMRRGEVNMRYPAATRNYTGGVMGSWHMDASLDEGFGSSMLEEFKSNKTRGFELSEIAGHVVEFSSDQYGSRFIQQKLETATTDEKNMVYEEIMPKALALMTDVFGNYVIQKFFEHGLPPQRRELGEKLIDNVLPLSLQMYGCRVIQKAIEVVDLDQKIQMVKELDGHVMRCVRDQNGNHVVQKCIECVPEENIEFIISTFFGHVVTLSTHPYGCRVIQRVLEHCHNPDTQSKVMEEILSTVSMLTQDQYGNYVVQHVLEHGKPDERTVIIKELAGKIVQMSQQKFASNVVEKCLTFGGPEERELLVNEMLGTTDENEPLQAMMKDQFANYVVQKVLETCDDQQRELILTRIKVHLNALKKYTYGKHIVARVEKLVAAGGMLIEENGFAVITPASGGVRPQVLYSLTRVDGSAITF

SEQ ID NO: 87964 - protein, 908 aa, Arabidopsis thaliana
  peptide (1)..(908): Ceres Seq. ID no. 12704742
MHRGNEDSSFGDDYEKEIGVLLGEQQRRQVEADELERELNLYRSGSAPPTVDGSLSAAGGLFSGGGGASFLEFGGVNKGNGFGGDDEEFRKDPAYLSYYYANMKLNPRLPPPLMSREDLRADMGHPVVQQPSRPASRNTFDENVDSNNNLSPSASQGIGAPSPYCYAAVLGSSLSRNGTPDPQGIARVPSPCLTPIGSGRVSSNDKRNTSNQSPFNGVTSGLNESSDLVNALSGLNLSGTGGLDERGQAEQDVEKVRNYMFGLQDGHNEVNPHGFPNRSDQARGTASCRNSQMRGSQGSAYNSGSGVANPYQHHDSPNYYALNPAVASMMANQLGTNNYSPMYENASATLGYSAMDSRLHGGSFVSSGQNLSESRNIGRVGNRMMEGGTGHPSHLADPMYHQYARFSENADSFDLLNDPSMDRNYGNSYMNMLEIQRAYLGSQKSQYGLPYKSGSPNSHSYYGSPTFGSNMSYPGSPLAHHGMPNSLMSPYSPMRRGEVNMRYPAATRNYTGGVMGSWHMDASLDEGFGSSMLEEFKSNKTRGFELSEIAGHVVEFSSDQYGSRFIQQKLETATTDEKNMVYEEIMPKALALMTDVFGNYVIQKFFEHGLPPQRRELGEKLIDNVLPLSLQMYGCRVIQKAIEVVDLDQKIQMVKELDGHVMRCVRDQNGNHVVQKCIECVPEENIEFIISTFFGHVVTLSTHPYGCRVIQRVLEHCHNPDTQSKVMEEILSTVSMLTQDQYGNYVVQHVLEHGKPDERTVIIKELAGKIVQMSQQKFASNVVEKCLTFGGPEERELLVNEMLGTTDENEPLQAMMKDQFANYVVQKVLETCDDQQRELILTRIKVHLNALKKYTYGKHIVARVEKLVAAGGMLIEENGFAVITPASGGVRPQVLYSLTRVDGSAITF

SEQ ID NO: 87965 - DNA, 1854 bp, Arabidopsis thaliana
  misc_feature (1)..(1854): Ceres Seq. ID no. 12704743
  misc_feature (1)..(1854): Ortholog of  Ceres SEQ ID NO 13597679 as cited in SEQ ID NO 65073
atggagttccaaggaagttcacaagtaaagatgattaatcttcagaccttgagaagagaatatgagaatctgaagatggaggagagtgaaaacataaatgatttcacaaccaagttgattaatatgagtaatcaactaagagttcatggtgaagagaaaaccgattaccaattggttcaaaaggttcttatctccttaccgcaacagtttgatagcatcgttgcggtccttgaacaaacaaaggatctatcaactttctctatgacagagatgataggtactttgaatgcgcatgagaagcgcttgagtctccgagaagaacgtatcaatgagggtgcgttttatggagaaaagcttggctcaagagcagaaaacaagcaaacaaaaatcgccatgggaagaccaacatgtggtgcagcaaagaagagtgaaagcatttcacaaagaggtggaagctatgaaagaagatgctatgtgtgcgacaagccaggacacatagccagagattggaaacttaaaaaaggtgaaagagcacatctaagtagtgaagaatcagaagatgaagaagaagatgagtgtcatattctctttagtgctgttgaagaaaaagagatctcaacaattggagaagaaacgtggttggtagatagcggatgtaccaatcacatgtctaaagatgttagacacttcatcactttggaccgcaacaagaaaattaccataaggattggtaatggtcgaaaggtcgtgtctgaaggcagaggagatataagagtatccacaaacaaaggagatcatgtcatcaaagatgtactttatgtacccgaactagcaagaaatttgcttagtgtctctcaaatgatatccaacggatatcgagtcatctttgaagacaacaagtgtgtgattcaagacttaaaaggaaagaagatcttggacatcaagatgatggatagaagttttccaattcgttggaaaaaatctagagaagaagtgtatgcggcattcaaagaaaaagaagaacaaggaggagggaatgatctaaacgctcaaatagatcaaaatttggagggagcaatgaatgacgtgaagtggatagaagacatgagagaagagttgatgatgatagaaaagaacaagacgtggcaagttgtggagagaccaagcaattggagcagatcagttgaggacaagaaaaatacaagtggctatgtctttacttctggatcaggtgcattttgttggaattctagcaaacagaagaacgttgctcaatcaacgaccgaggcggaactctttatcacatcaaggttcgaagttctacgagaagagctagacgtaaacaatgcgggaacgggtataacaaagccgaccacagagtatacagcacaagattactcatttctgatggctacaaatctcgactcagcttttcatctctcacagctcgcgcatcctttgttgaaagcatctggttcagggagcatcgtgctcatgtcctctactgcaggggttgtacatatcaatgttggttccatctatggagcaactaaaggagctatgaatcagctagcaaaaaacttagcatgcgagtgggcaagggataacataagggttaattctgtctgtccatggttcatagcaactcctttagctaacatttatctcaatgatgaagagttaaagaaagaagtggagcgtaagacaccaatgggacgtgttggaaacgcaaatgaagtatcatcgcttgtcgcatttctctgctttccggctgcttcgtatataacaggtcagacaatctgcgtcgacggaggtttcacggtcaactgcttttctttcaagccagtgctttaa

SEQ ID NO: 87966 - protein, 617 aa, Arabidopsis thaliana
  peptide (1)..(617): Ceres Seq. ID no. 12704744
MEFQGSSQVKMINLQTLRREYENLKMEESENINDFTTKLINMSNQLRVHGEEKTDYQLVQKVLISLPQQFDSIVAVLEQTKDLSTFSMTEMIGTLNAHEKRLSLREERINEGAFYGEKLGSRAENKQTKIAMGRPTCGAAKKSESISQRGGSYERRCYVCDKPGHIARDWKLKKGERAHLSSEESEDEEEDECHILFSAVEEKEISTIGEETWLVDSGCTNHMSKDVRHFITLDRNKKITIRIGNGRKVVSEGRGDIRVSTNKGDHVIKDVLYVPELARNLLSVSQMISNGYRVIFEDNKCVIQDLKGKKILDIKMMDRSFPIRWKKSREEVYAAFKEKEEQGGGNDLNAQIDQNLEGAMNDVKWIEDMREELMMIEKNKTWQVVERPSNWSRSVEDKKNTSGYVFTSGSGAFCWNSSKQKNVAQSTTEAELFITSRFEVLREELDVNNAGTGITKPTTEYTAQDYSFLMATNLDSAFHLSQLAHPLLKASGSGSIVLMSSTAGVVHINVGSIYGATKGAMNQLAKNLACEWARDNIRVNSVCPWFIATPLANIYLNDEELKKEVERKTPMGRVGNANEVSSLVAFLCFPAASYITGQTICVDGGFTVNCFSFKPVL

SEQ ID NO: 87967 - protein, 607 aa, Arabidopsis thaliana
  peptide (1)..(607): Ceres Seq. ID no. 12704745
MINLQTLRREYENLKMEESENINDFTTKLINMSNQLRVHGEEKTDYQLVQKVLISLPQQFDSIVAVLEQTKDLSTFSMTEMIGTLNAHEKRLSLREERINEGAFYGEKLGSRAENKQTKIAMGRPTCGAAKKSESISQRGGSYERRCYVCDKPGHIARDWKLKKGERAHLSSEESEDEEEDECHILFSAVEEKEISTIGEETWLVDSGCTNHMSKDVRHFITLDRNKKITIRIGNGRKVVSEGRGDIRVSTNKGDHVIKDVLYVPELARNLLSVSQMISNGYRVIFEDNKCVIQDLKGKKILDIKMMDRSFPIRWKKSREEVYAAFKEKEEQGGGNDLNAQIDQNLEGAMNDVKWIEDMREELMMIEKNKTWQVVERPSNWSRSVEDKKNTSGYVFTSGSGAFCWNSSKQKNVAQSTTEAELFITSRFEVLREELDVNNAGTGITKPTTEYTAQDYSFLMATNLDSAFHLSQLAHPLLKASGSGSIVLMSSTAGVVHINVGSIYGATKGAMNQLAKNLACEWARDNIRVNSVCPWFIATPLANIYLNDEELKKEVERKTPMGRVGNANEVSSLVAFLCFPAASYITGQTICVDGGFTVNCFSFKPVL

SEQ ID NO: 87968 - protein, 592 aa, Arabidopsis thaliana
  peptide (1)..(592): Ceres Seq. ID no. 12704746
MEESENINDFTTKLINMSNQLRVHGEEKTDYQLVQKVLISLPQQFDSIVAVLEQTKDLSTFSMTEMIGTLNAHEKRLSLREERINEGAFYGEKLGSRAENKQTKIAMGRPTCGAAKKSESISQRGGSYERRCYVCDKPGHIARDWKLKKGERAHLSSEESEDEEEDECHILFSAVEEKEISTIGEETWLVDSGCTNHMSKDVRHFITLDRNKKITIRIGNGRKVVSEGRGDIRVSTNKGDHVIKDVLYVPELARNLLSVSQMISNGYRVIFEDNKCVIQDLKGKKILDIKMMDRSFPIRWKKSREEVYAAFKEKEEQGGGNDLNAQIDQNLEGAMNDVKWIEDMREELMMIEKNKTWQVVERPSNWSRSVEDKKNTSGYVFTSGSGAFCWNSSKQKNVAQSTTEAELFITSRFEVLREELDVNNAGTGITKPTTEYTAQDYSFLMATNLDSAFHLSQLAHPLLKASGSGSIVLMSSTAGVVHINVGSIYGATKGAMNQLAKNLACEWARDNIRVNSVCPWFIATPLANIYLNDEELKKEVERKTPMGRVGNANEVSSLVAFLCFPAASYITGQTICVDGGFTVNCFSFKPVL

SEQ ID NO: 87969 - DNA, 2898 bp, Arabidopsis thaliana
  misc_feature (1)..(2898): Ceres Seq. ID no. 12704755
  misc_feature (1)..(2898): Ortholog of  Ceres SEQ ID NO 12589728 as cited in SEQ ID NO 0
  misc_feature (1)..(2898): Ortholog of  Ceres SEQ ID NO 14302164 as cited in SEQ ID NO 0
atggtgacaatgataccggaactagggagaagaccgatgcatagaggtaacgaagattcatcttttggggatgattatgagaaagagattggagtattgcttggtgagcagcagagaaggcaagtagaagctgatgagcttgagagagagcttaacttgtttagaagtggctctgctccaccgactgttgatggttctgttagtgctgccggagggctttttagcggcggaggtggggctccttttttggagtttggtggtgttaataagggtaatgggtttggtggtgatgatgaggagtttaggaaagatccggcttacttgtcttattactatgctaatatgaagttgaatccgaggttgccaccgcctttgatgtctagggaggatttgagggttgctcagaggcttaaagggagtaataatgtgttaggtggtgttggggataggagaaaagttaatgataatcgatctttgttctctatgccaccgggttttgaaggtgagaaaactggtgcttctgcttctgaatgggatgctaatggattgattggtttaccgggtttgggacttggaggcaagcagaagagttttgctgatatctttcaggctgatatggggcatggacatcctgtcgcacaacagccctcacgtcctgcaagtcgtaatacctttgatgaaaatgttgactctaataataatctgtctccgtctgcatcacaaggcattggtgcaccatctccatacagctatgcagctgttctaggctcttctttgtctagaaatggaactccagatccacaggccattgctagggtgcctagtccctgtcttactcccattgggagtggaagaatgagttcaaatgataagaggaacacaagtaaccagagcccattcaatggtgttacctctggtctcaacgagtcttctgatcttgtcaatgctttatctggcttgaacctgtcatgcagtgttgggttagatgatcggagtcaggctgagcaagatgtcgaaaaggtcaggaactatatgtttggactgcaaggtgggcataacgaagtcaatcaacatgagttcccaaacaaatctgatcaagcccataaggcaactggctcgttgaggaattcacaattgagagggccacacggatctgcctataatggtggagttggattagctaatccttaccagcaacttgatagcccaaattattgtctcaacaattacgcattaaatccagctgtagcctctatgatggctaaccaacttgggaacaataactttgctccaatgtatgataatgtatccgctttgggattttctggaatggactctagacatcatggacgaggctttgtatcttctggtcaaaacctctctgaatcacgtaatcttggcagattcagtaatcgaatgatgggaggaggtgctggtctccagtcacatatggtagacccaatgtataatcagtatgctgattcacttgatcttctcaatgatccttccatggataggaactttatgggtggttcatcatacatggatatgcttgaactccagagggcttatcttggagctcagaaatcacagtatggtgtcccttacaaatccgggagccctaacagccatagctattatgggagtccaacatttgggtctaatatgtcatatcctggcagcccattggctcatcatggtatgccaaactctcttatgtcaccttatagccctatgagacgggatgaagttaatatgcgatttccttctgcaacaagaaattattcgggagggttaatgggttcttggcacatggatgctagttttgatgaaggctttggatcttcaatgcttgaagagttcaaaagtaacaaaacaagaggatttgaactttctgaaatagctggccatgttgtggagttcagccgctttattcagcagaaactcgagacagcaacaactgatgagaaaaacatggtctatgaggagatcatgccacaagctcttgtcctgatgactgacgtttttggaaactatgtgattcagaagttctttgagcatggactcccgccacagaggagagaattggcagagaaactctttgaccatgttttgcctcttagcttacagatgtatggttgccgtgtcatccagaaggcaattgaggtggttgatctagaccagaaaattaaaatggtgaaagaacttgatggacatgtaatgcgatgtgtacgtgatcagaatgggaaccatgtggttcaaaagtgtattgaatgtgtgcctgaagaaaacatcgagtttattatttcaactttctttggccatgtggtgaccctctccactcacccatatgggtgccgtgttattcagagagtattggaacactgccatgaccctgatacacagagtaaggttatggaagaaatcctgtccactgttagtatgctggcccaagatcagtatggaaactatgttgttcagcatgtgctggagcatggaaagcctgatgagcgcactgtgataatcaaagaattggcggggaagattgttcagatgagccagcagaagttcgcatcaaacgttgttgagaaatgtttgacttttggaggtcctgaggaacgagaattgcttgtgaatgagatgctgggaacaactgatgaaaacgagcctcttcaggcgatgatgaaggatcagttcgcaaactatgtagtgcagaaagttttggagacctgtgatgaccaacaacgtgagctgatacttactcgcatcaaagtgcatcttactgctttaaaaaagtacacttatggaaagcatgtcgttgcgcgtattgaaaaactcgttgctgctggagagaggagaatggctttgcagtccctaacccagccccagatggcttaa

SEQ ID NO: 87970 - protein, 965 aa, Arabidopsis thaliana
  peptide (1)..(965): Ceres Seq. ID no. 12704756
MVTMIPELGRRPMHRGNEDSSFGDDYEKEIGVLLGEQQRRQVEADELERELNLFRSGSAPPTVDGSVSAAGGLFSGGGGAPFLEFGGVNKGNGFGGDDEEFRKDPAYLSYYYANMKLNPRLPPPLMSREDLRVAQRLKGSNNVLGGVGDRRKVNDNRSLFSMPPGFEGEKTGASASEWDANGLIGLPGLGLGGKQKSFADIFQADMGHGHPVAQQPSRPASRNTFDENVDSNNNLSPSASQGIGAPSPYSYAAVLGSSLSRNGTPDPQAIARVPSPCLTPIGSGRMSSNDKRNTSNQSPFNGVTSGLNESSDLVNALSGLNLSCSVGLDDRSQAEQDVEKVRNYMFGLQGGHNEVNQHEFPNKSDQAHKATGSLRNSQLRGPHGSAYNGGVGLANPYQQLDSPNYCLNNYALNPAVASMMANQLGNNNFAPMYDNVSALGFSGMDSRHHGRGFVSSGQNLSESRNLGRFSNRMMGGGAGLQSHMVDPMYNQYADSLDLLNDPSMDRNFMGGSSYMDMLELQRAYLGAQKSQYGVPYKSGSPNSHSYYGSPTFGSNMSYPGSPLAHHGMPNSLMSPYSPMRRDEVNMRFPSATRNYSGGLMGSWHMDASFDEGFGSSMLEEFKSNKTRGFELSEIAGHVVEFSRFIQQKLETATTDEKNMVYEEIMPQALVLMTDVFGNYVIQKFFEHGLPPQRRELAEKLFDHVLPLSLQMYGCRVIQKAIEVVDLDQKIKMVKELDGHVMRCVRDQNGNHVVQKCIECVPEENIEFIISTFFGHVVTLSTHPYGCRVIQRVLEHCHDPDTQSKVMEEILSTVSMLAQDQYGNYVVQHVLEHGKPDERTVIIKELAGKIVQMSQQKFASNVVEKCLTFGGPEERELLVNEMLGTTDENEPLQAMMKDQFANYVVQKVLETCDDQQRELILTRIKVHLTALKKYTYGKHVVARIEKLVAAGERRMALQSLTQPQMA

SEQ ID NO: 87971 - protein, 962 aa, Arabidopsis thaliana
  peptide (1)..(962): Ceres Seq. ID no. 12704757
MIPELGRRPMHRGNEDSSFGDDYEKEIGVLLGEQQRRQVEADELERELNLFRSGSAPPTVDGSVSAAGGLFSGGGGAPFLEFGGVNKGNGFGGDDEEFRKDPAYLSYYYANMKLNPRLPPPLMSREDLRVAQRLKGSNNVLGGVGDRRKVNDNRSLFSMPPGFEGEKTGASASEWDANGLIGLPGLGLGGKQKSFADIFQADMGHGHPVAQQPSRPASRNTFDENVDSNNNLSPSASQGIGAPSPYSYAAVLGSSLSRNGTPDPQAIARVPSPCLTPIGSGRMSSNDKRNTSNQSPFNGVTSGLNESSDLVNALSGLNLSCSVGLDDRSQAEQDVEKVRNYMFGLQGGHNEVNQHEFPNKSDQAHKATGSLRNSQLRGPHGSAYNGGVGLANPYQQLDSPNYCLNNYALNPAVASMMANQLGNNNFAPMYDNVSALGFSGMDSRHHGRGFVSSGQNLSESRNLGRFSNRMMGGGAGLQSHMVDPMYNQYADSLDLLNDPSMDRNFMGGSSYMDMLELQRAYLGAQKSQYGVPYKSGSPNSHSYYGSPTFGSNMSYPGSPLAHHGMPNSLMSPYSPMRRDEVNMRFPSATRNYSGGLMGSWHMDASFDEGFGSSMLEEFKSNKTRGFELSEIAGHVVEFSRFIQQKLETATTDEKNMVYEEIMPQALVLMTDVFGNYVIQKFFEHGLPPQRRELAEKLFDHVLPLSLQMYGCRVIQKAIEVVDLDQKIKMVKELDGHVMRCVRDQNGNHVVQKCIECVPEENIEFIISTFFGHVVTLSTHPYGCRVIQRVLEHCHDPDTQSKVMEEILSTVSMLAQDQYGNYVVQHVLEHGKPDERTVIIKELAGKIVQMSQQKFASNVVEKCLTFGGPEERELLVNEMLGTTDENEPLQAMMKDQFANYVVQKVLETCDDQQRELILTRIKVHLTALKKYTYGKHVVARIEKLVAAGERRMALQSLTQPQMA

SEQ ID NO: 87972 - protein, 953 aa, Arabidopsis thaliana
  peptide (1)..(953): Ceres Seq. ID no. 12704758
MHRGNEDSSFGDDYEKEIGVLLGEQQRRQVEADELERELNLFRSGSAPPTVDGSVSAAGGLFSGGGGAPFLEFGGVNKGNGFGGDDEEFRKDPAYLSYYYANMKLNPRLPPPLMSREDLRVAQRLKGSNNVLGGVGDRRKVNDNRSLFSMPPGFEGEKTGASASEWDANGLIGLPGLGLGGKQKSFADIFQADMGHGHPVAQQPSRPASRNTFDENVDSNNNLSPSASQGIGAPSPYSYAAVLGSSLSRNGTPDPQAIARVPSPCLTPIGSGRMSSNDKRNTSNQSPFNGVTSGLNESSDLVNALSGLNLSCSVGLDDRSQAEQDVEKVRNYMFGLQGGHNEVNQHEFPNKSDQAHKATGSLRNSQLRGPHGSAYNGGVGLANPYQQLDSPNYCLNNYALNPAVASMMANQLGNNNFAPMYDNVSALGFSGMDSRHHGRGFVSSGQNLSESRNLGRFSNRMMGGGAGLQSHMVDPMYNQYADSLDLLNDPSMDRNFMGGSSYMDMLELQRAYLGAQKSQYGVPYKSGSPNSHSYYGSPTFGSNMSYPGSPLAHHGMPNSLMSPYSPMRRDEVNMRFPSATRNYSGGLMGSWHMDASFDEGFGSSMLEEFKSNKTRGFELSEIAGHVVEFSRFIQQKLETATTDEKNMVYEEIMPQALVLMTDVFGNYVIQKFFEHGLPPQRRELAEKLFDHVLPLSLQMYGCRVIQKAIEVVDLDQKIKMVKELDGHVMRCVRDQNGNHVVQKCIECVPEENIEFIISTFFGHVVTLSTHPYGCRVIQRVLEHCHDPDTQSKVMEEILSTVSMLAQDQYGNYVVQHVLEHGKPDERTVIIKELAGKIVQMSQQKFASNVVEKCLTFGGPEERELLVNEMLGTTDENEPLQAMMKDQFANYVVQKVLETCDDQQRELILTRIKVHLTALKKYTYGKHVVARIEKLVAAGERRMALQSLTQPQMA

SEQ ID NO: 87973 - DNA, 732 bp, Arabidopsis thaliana
  misc_feature (1)..(732): Ceres Seq. ID no. 12704766
  misc_feature (1)..(732): Ortholog of  Ceres SEQ ID NO 13597679 as cited in SEQ ID NO 65073
atgaacagggaagctgttgtggaggaactgtcaattttgggagcaagagtccacacatgtgctagagacgagactcagcttcaagaacgtttacgtgaatggcaagaaaaagggtttcaggtcaccacttctatctgcgacgtttctttgcgtgagcaacgagagaaactcatggaaaccgtttcctctctcttccaaggaaaactcaacatcctcgtgaacaatgtgggaacgttaatgctcaagccgaccacagagtatacagcagaagaattctcgtttcttatggctacaaatctcgactcagctttccatatttcacagcttgcgcaccctttgttgaaagcctctggctcagggagcattgtgctcatgtcctctattgccggagtcgtgcatgtcggtgttggatccatctatggagcaacaaaaggagccatgaatcagttggctagaaacttagcttgcgaatgggcaagcgacaacataaggactaacgctatttgtccatggttaatcacaactcctttgattagtgatcttctcagtgttgaggagatgaaaaaagaagcagaggaaaggacacccatggggcgtgtgggagaggcaaatgaagtctcaccgcttgtggcatttctttgtcttcctgcagcttcttatattactggtcaagtcatttgtgttgatggaggtctcactgttaatggcttctcctatcagccacatgcttga

SEQ ID NO: 87974 - protein, 243 aa, Arabidopsis thaliana
  peptide (1)..(243): Ceres Seq. ID no. 12704767
MNREAVVEELSILGARVHTCARDETQLQERLREWQEKGFQVTTSICDVSLREQREKLMETVSSLFQGKLNILVNNVGTLMLKPTTEYTAEEFSFLMATNLDSAFHISQLAHPLLKASGSGSIVLMSSIAGVVHVGVGSIYGATKGAMNQLARNLACEWASDNIRTNAICPWLITTPLISDLLSVEEMKKEAEERTPMGRVGEANEVSPLVAFLCLPAASYITGQVICVDGGLTVNGFSYQPHA

SEQ ID NO: 87975 - protein, 186 aa, Arabidopsis thaliana; identical to SEQ ID NO: 49785
  peptide (1)..(186): Ceres Seq. ID no. 12704768

SEQ ID NO: 87976 - protein, 164 aa, Arabidopsis thaliana
  peptide (1)..(164): Ceres Seq. ID no. 12704769
MLKPTTEYTAEEFSFLMATNLDSAFHISQLAHPLLKASGSGSIVLMSSIAGVVHVGVGSIYGATKGAMNQLARNLACEWASDNIRTNAICPWLITTPLISDLLSVEEMKKEAEERTPMGRVGEANEVSPLVAFLCLPAASYITGQVICVDGGLTVNGFSYQPHA

SEQ ID NO: 87977 - DNA, 795 bp, Arabidopsis thaliana
  misc_feature (1)..(795): Ceres Seq. ID no. 12704770
  misc_feature (1)..(795): Ortholog of  Ceres SEQ ID NO 14304224 as cited in SEQ ID NO 56350
  misc_feature (1)..(795): Ortholog of  Ceres SEQ ID NO 13597679 as cited in SEQ ID NO 65073
atggacaaaagattatggagtcttcaaggtatgactgctcttgtgaccggtgcagccagcggaatcggttatgccatagtagaagagttagctggttttggagctaaaatccacatatgtgacatatccaaaactttgctcaatcaaagtttaagcgaatgggaaaataaagggtttcaagtgagtggttcagtatgtgatgtaacctctcatcctgagagagaaaaactgatgcaaaccgtctcctcgattttcgatggcaaactcaacattcttgtaaataacgtgggggtacttcgcggaaagccaacaacagaatatgtggcagacgatttcacttttcatatatcaactaacttggaagctgcttaccatttttgtcaactttcacatcctctcttaaaggcttcaggctatggaagcattgtattcctttcctctgttgctggggttgtatcactaattgactgtggatccatttatggtctaacaaaaggagctctaaatcaattagctagaaacttggcatgtgaatgggcaaaagacggcataagagccaatgctgttgcacctaatgttgtcaagactgctcagtctcaatcgtttcttgaagacgtcagtaaaaaggagggattgttgagtagaactccacttggccgtgttggagagccgaatgaagtttcatcactagtggtcttcttgtgtctacctgcagcttcttatatcacaggtcaaaccatttgtgttgatggaggtctcacggttaacggtttctcctatcaaccacatgcttga

SEQ ID NO: 87978 - protein, 264 aa, Arabidopsis thaliana; identical to SEQ ID NO: 26073
  peptide (1)..(264): Ceres Seq. ID no. 12704771

SEQ ID NO: 87979 - protein, 254 aa, Arabidopsis thaliana
  peptide (1)..(254): Ceres Seq. ID no. 12704772
MTALVTGAASGIGYAIVEELAGFGAKIHICDISKTLLNQSLSEWENKGFQVSGSVCDVTSHPEREKLMQTVSSIFDGKLNILVNNVGVLRGKPTTEYVADDFTFHISTNLEAAYHFCQLSHPLLKASGYGSIVFLSSVAGVVSLIDCGSIYGLTKGALNQLARNLACEWAKDGIRANAVAPNVVKTAQSQSFLEDVSKKEGLLSRTPLGRVGEPNEVSSLVVFLCLPAASYITGQTICVDGGLTVNGFSYQPHA

SEQ ID NO: 87980 - protein, 187 aa, Arabidopsis thaliana
  peptide (1)..(187): Ceres Seq. ID no. 12704773
MQTVSSIFDGKLNILVNNVGVLRGKPTTEYVADDFTFHISTNLEAAYHFCQLSHPLLKASGYGSIVFLSSVAGVVSLIDCGSIYGLTKGALNQLARNLACEWAKDGIRANAVAPNVVKTAQSQSFLEDVSKKEGLLSRTPLGRVGEPNEVSSLVVFLCLPAASYITGQTICVDGGLTVNGFSYQPHA

SEQ ID NO: 87981 - DNA, 1512 bp, Arabidopsis thaliana
  misc_feature (1)..(1512): Ceres Seq. ID no. 12704774
  misc_feature (1)..(1512): Ortholog of  Ceres SEQ ID NO 13597679 as cited in SEQ ID NO 65073
atggataaaaggtggagtctccaaggtttgactgctcttgtgaccggtggagccagcggaatcggtcatgctatagtagaagaactcgccggttttggggccaaaatccatgtgtgtgacatatcgaaaactctgctcaatcaaagtttatccgaatgggagaagaaagggtttcaagtgagtggttcagtctgcgatgcatccaatcgtctcgaaagagaaacacttatgcaaactgtcaccacaatatttgatggcaagcttaacattcttgtgaacaatgttggcacaattcgcacaaagccaacaatagaatatgaggcagaagatttttcgttccttatttcaacaaacttggaatctgcttatcatctaagccaactttcacatccactcctaaaggcttcaggcaacggaattattacttttatttcctctgctgcagggatcgtatcatttgatgctgcatccatttatggtctaacgaaaggagctttgaatcagctagcacgaaatttggcgtgtgaatgggcaaaagacggcattcgagccaacgcggttgcgcctaattttatcaccactgctctggctaaaccttttctcgaagacgctggttttaacgagattttgtcgagtagaactccacttggtcgcgctggagaaccaagagaggttgcctcacttgtggcttttctgtgtctacctgctgcttcatatattactggtcagaccatttgtgttgatggaggtatgactgctcttgtgaccggtggagccagtggaatcggttatgccatagtagaagagttggctggttttggagctagaatccatgtatgtgacatctctgaagctaagctcaatcaaagtttaagcgaatgggaaaagaaaggttttcaagtaagtggctcagtttgtgatgtagcctctcgtcccgagagagaagaactgatgcaaaccgtctcctcgcagttcgatggcaaactcaacattcttgtaagcaatgtgggcgtaatccgctcaaagccaacaacagaatataccgaagacgatttcgcttttcatatatcatcaaacgtggaagctgcttaccattttagccagctttcacatcctctcctaaaggcttcaggctatggaagcatcatctttgtttcctctattgcaggggttatatcttttgacgctggatccatttatggtctaacaaaaggagctttgattcagctagctaaaaatttggcatgtgaatgggcaaaagacggcataagagccaacgctgttgcgcctaatgtcatcaatactcctctgtctcaatcttatcttgaggacgtcagtttcaagaaggcattgttgagtaggactccacttggtcgtgttggagagccaaatgaagttgcatcactagtggccttcttgtgtctacctgcagcttcttatattactggtcagactatttgtgttgatggaggtctcaccgttaatggcttctcctatcagccagaggtttga

SEQ ID NO: 87982 - protein, 503 aa, Arabidopsis thaliana
  peptide (1)..(503): Ceres Seq. ID no. 12704775
MDKRWSLQGLTALVTGGASGIGHAIVEELAGFGAKIHVCDISKTLLNQSLSEWEKKGFQVSGSVCDASNRLERETLMQTVTTIFDGKLNILVNNVGTIRTKPTIEYEAEDFSFLISTNLESAYHLSQLSHPLLKASGNGIITFISSAAGIVSFDAASIYGLTKGALNQLARNLACEWAKDGIRANAVAPNFITTALAKPFLEDAGFNEILSSRTPLGRAGEPREVASLVAFLCLPAASYITGQTICVDGGMTALVTGGASGIGYAIVEELAGFGARIHVCDISEAKLNQSLSEWEKKGFQVSGSVCDVASRPEREELMQTVSSQFDGKLNILVSNVGVIRSKPTTEYTEDDFAFHISSNVEAAYHFSQLSHPLLKASGYGSIIFVSSIAGVISFDAGSIYGLTKGALIQLAKNLACEWAKDGIRANAVAPNVINTPLSQSYLEDVSFKKALLSRTPLGRVGEPNEVASLVAFLCLPAASYITGQTICVDGGLTVNGFSYQPEV

SEQ ID NO: 87983 - protein, 427 aa, Arabidopsis thaliana
  peptide (1)..(427): Ceres Seq. ID no. 12704776
MQTVTTIFDGKLNILVNNVGTIRTKPTIEYEAEDFSFLISTNLESAYHLSQLSHPLLKASGNGIITFISSAAGIVSFDAASIYGLTKGALNQLARNLACEWAKDGIRANAVAPNFITTALAKPFLEDAGFNEILSSRTPLGRAGEPREVASLVAFLCLPAASYITGQTICVDGGMTALVTGGASGIGYAIVEELAGFGARIHVCDISEAKLNQSLSEWEKKGFQVSGSVCDVASRPEREELMQTVSSQFDGKLNILVSNVGVIRSKPTTEYTEDDFAFHISSNVEAAYHFSQLSHPLLKASGYGSIIFVSSIAGVISFDAGSIYGLTKGALIQLAKNLACEWAKDGIRANAVAPNVINTPLSQSYLEDVSFKKALLSRTPLGRVGEPNEVASLVAFLCLPAASYITGQTICVDGGLTVNGFSYQPEV

SEQ ID NO: 87984 - protein, 253 aa, Arabidopsis thaliana
  peptide (1)..(253): Ceres Seq. ID no. 12704777
MTALVTGGASGIGYAIVEELAGFGARIHVCDISEAKLNQSLSEWEKKGFQVSGSVCDVASRPEREELMQTVSSQFDGKLNILVSNVGVIRSKPTTEYTEDDFAFHISSNVEAAYHFSQLSHPLLKASGYGSIIFVSSIAGVISFDAGSIYGLTKGALIQLAKNLACEWAKDGIRANAVAPNVINTPLSQSYLEDVSFKKALLSRTPLGRVGEPNEVASLVAFLCLPAASYITGQTICVDGGLTVNGFSYQPEV

SEQ ID NO: 87985 - DNA, 675 bp, Arabidopsis thaliana
  misc_feature (1)..(675): Ceres Seq. ID no. 12704778
  misc_feature (1)..(675): Ortholog of  Ceres SEQ ID NO 15172729 as cited in SEQ ID NO 56037
  misc_feature (1)..(675): Ortholog of  Ceres SEQ ID NO 13584899 as cited in SEQ ID NO 64830
  misc_feature (1)..(675): Ortholog of  Ceres SEQ ID NO 13654441 as cited in SEQ ID NO 67814
  misc_feature (1)..(675): Ortholog of  Ceres SEQ ID NO 13596128 as cited in SEQ ID NO 67831
  misc_feature (1)..(675): Ortholog of  Ceres SEQ ID NO 12585194 as cited in SEQ ID NO 68878
  misc_feature (1)..(675): Ortholog of  Ceres SEQ ID NO 12589186 as cited in SEQ ID NO 0
atggcggagaaagaagagagtgtgaagcttctagggttttgggcaagcccttttagtcgtcgagtcgagatggctctcaaactcaaaggcgtgccatacgaatacttggaagaagatttgcccaacaagacccctttgcttctggagctaaacccgcttcacaagaaagttccggttcttgtccacaatgacaaaatattactcgagtcacatctgattctcgaatacatcgatcagacgtggaagaacagtccaattcttcctcaagatccttacgagaaggccatggctcgattttgggccaagttcatcgatgaccagatcctaacactagggtttaggtcccttgtaaaagcagagaaaggaagagaggttgctattgaagagactcgggaactgcttatgtttcttgagaaagaagtcactggaaaagatttcttcggtggcaagacaatcggattcttggacatgatcgcaggaagtatgatcccattttgtctagctagactttggaaaggtattggaattgatatgattccagaggagaagtttccggaattaaatagatggatcaagaatttggaagaagttgaggcagtgaggggatgtattcctccaagagagaaacaaattgagcgcatgaccaaaattgcagagacaattaagtctgcctaa

SEQ ID NO: 87986 - protein, 224 aa, Arabidopsis thaliana; identical to SEQ ID NO: 77136
  peptide (1)..(224): Ceres Seq. ID no. 12704779

SEQ ID NO: 87987 - protein, 201 aa, Arabidopsis thaliana; identical to SEQ ID NO: 77137
  peptide (1)..(201): Ceres Seq. ID no. 12704780

SEQ ID NO: 87988 - protein, 129 aa, Arabidopsis thaliana; identical to SEQ ID NO: 77138
  peptide (1)..(129): Ceres Seq. ID no. 12704781

SEQ ID NO: 87989 - DNA, 691 bp, Arabidopsis thaliana
  misc_feature (1)..(691): Ceres Seq. ID no. 12704782
  misc_feature (1)..(691): Ortholog of  Ceres SEQ ID NO 12612272 as cited in SEQ ID NO 55946
  misc_feature (1)..(691): Ortholog of  Ceres SEQ ID NO 15169960 as cited in SEQ ID NO 57591
atcagaaatcgaaaaatcaaagttctcaagaagatatcaacaaaaaaaaaagtaaattctttaaaatgtcgatgattccaagtttcttcaacaacaacagacgaagcaacatctttgatccattctctcttgacgtatgggatccattcaaggaactaacatcatcatcactttctcgtgagaactcagcgatcgtgaacgcacgtgtggactggagagagacgcctgaggcccacgtgtttaaagctgacttgcctggattgaagaaggaggaagttaaagttgagattgaggaggatagtgttttgaagatcagtggagagagacacgtggagaaagaagataagaatgacacgtggcaccgtgtggagagatcgagtggacagtttacgaggaggtttaggttgccggagaatgtgaagatggatcaggttaaggctgcgatggagaatggtgtgttgactgttacggtgcctaaggctgagactaagaaggctgatgttaagtctattcagatctctggttgagtaatgggttcgagttttatcatcggagttgcttgtgtttttgtcatggttatggttcatgttttacttgagtgtgtgagtactctatctaaattataataatctccgattgagctatgaattatgatgtatcggatacatttgatcctaatgaagtatggaat

SEQ ID NO: 87990 - protein, 174 aa, Arabidopsis thaliana
  peptide (1)..(174): Ceres Seq. ID no. 12704783
QKSKNQSSQEDINKKKSKFFKMSMIPSFFNNNRRSNIFDPFSLDVWDPFKELTSSSLSRENSAIVNARVDWRETPEAHVFKADLPGLKKEEVKVEIEEDSVLKISGERHVEKEDKNDTWHRVERSSGQFTRRFRLPENVKMDQVKAAMENGVLTVTVPKAETKKADVKSIQISG

SEQ ID NO: 87991 - protein, 153 aa, Arabidopsis thaliana; identical to SEQ ID NO: 36027
  peptide (1)..(153): Ceres Seq. ID no. 12704784

SEQ ID NO: 87992 - protein, 151 aa, Arabidopsis thaliana; identical to SEQ ID NO: 36028
  peptide (1)..(151): Ceres Seq. ID no. 12704785

SEQ ID NO: 87993 - DNA, 1557 bp, Arabidopsis thaliana
  misc_feature (1)..(1557): Ceres Seq. ID no. 12704893
  misc_feature (1)..(1557): Ortholog of  Ceres SEQ ID NO 13597411 as cited in SEQ ID NO 64125
atgtctcggaagattctcccgtggttgagtctagtcgctattctctggcttcaatctttcaatggcaccaacttgagtttcccagcttactcttcacagcttaaagagcttctcaaaatctcccagtttaagctaaattatctttctttcgcctccgacgctggaaaagtcctaggttttatctccggtatcgccgccgtttatcttcctctccctcttgtccttctcgccggaggttcattagggttcgccggctacggtctccagtatctctccatcatcaagaagatgtttactttatcgttctctcagatgtggtgtttgagtttcttggccgggaacagtatctgttggatcaacacagcttgttacatcgtcgcaatcaatagttttccggtgaaccgtcaagtcgccgtggggatcacggcaagttatcaaggtttgagtgggaaaatctacaccgacatggtccactctttttttcacacgtctcaacgtgaagaagcttcgggttatctcttgctcaactctcttgttccattggtcgcttgtctcgtgacggctcctatgttgatgagacacggaggagacaaaacgatgtcgtattctaaggatgttaaagttggttttatcgttttgttcgtcttgactattgctacggggatttatgcggtggctacgagtcttgtctcggttcctgcggttttagtacttgtaggcattgctctgtttcttcttgctcctcttgctataccaattggagttggatttaaagagcttatgtcctctagaaaaactcaacaaaaggtgcacgatcttgaagctcctgtcgataaattttatttcgtagaagaagatcacacgaaagaagaagaagagtttgagaaggcaataattggagttaaagaagaggtcgagtggacacaactatggaagaaactcgatttttggatatactttggactctatttgttcggtccaacggtcgggctagtgtttacgaacaatcttggtcagatcgctgagtctcgtggctccaccgccaccagttccttggtcgctctctcgtcgtcgttcgggtttttcggccgcttgttaccatcattactcgactacttcttttctaggaacaaatacatgccatcaagtccggtttctatggcgggttcactggtagcaatggtagcttcgtttctcctcctccttattgactccgacattgctctctacatcggcacggcgatgattggcatcttctccggagccttgacttcactctctgtcacaatgacggcagagctttttgggacgaagcattttggagttaaccacaacattgttgtcggaagtattccccttggatctttttctttcggtttgttagccgctaaaatttaccgcgacggagctgctctttacggagatgatggcaagtgttttgggatgcattgctttcaaaccactttggtattttggggaatgctttgttcgatcgccgcacttctcgccgccgttttgtatatacgcaaccgcaagttctattcgcagaagccgtag

SEQ ID NO: 87994 - protein, 518 aa, Arabidopsis thaliana
  peptide (1)..(518): Ceres Seq. ID no. 12704894
MSRKILPWLSLVAILWLQSFNGTNLSFPAYSSQLKELLKISQFKLNYLSFASDAGKVLGFISGIAAVYLPLPLVLLAGGSLGFAGYGLQYLSIIKKMFTLSFSQMWCLSFLAGNSICWINTACYIVAINSFPVNRQVAVGITASYQGLSGKIYTDMVHSFFHTSQREEASGYLLLNSLVPLVACLVTAPMLMRHGGDKTMSYSKDVKVGFIVLFVLTIATGIYAVATSLVSVPAVLVLVGIALFLLAPLAIPIGVGFKELMSSRKTQQKVHDLEAPVDKFYFVEEDHTKEEEEFEKAIIGVKEEVEWTQLWKKLDFWIYFGLYLFGPTVGLVFTNNLGQIAESRGSTATSSLVALSSSFGFFGRLLPSLLDYFFSRNKYMPSSPVSMAGSLVAMVASFLLLLIDSDIALYIGTAMIGIFSGALTSLSVTMTAELFGTKHFGVNHNIVVGSIPLGSFSFGLLAAKIYRDGAALYGDDGKCFGMHCFQTTLVFWGMLCSIAALLAAVLYIRNRKFYSQKP

SEQ ID NO: 87995 - protein, 422 aa, Arabidopsis thaliana
  peptide (1)..(422): Ceres Seq. ID no. 12704895
MFTLSFSQMWCLSFLAGNSICWINTACYIVAINSFPVNRQVAVGITASYQGLSGKIYTDMVHSFFHTSQREEASGYLLLNSLVPLVACLVTAPMLMRHGGDKTMSYSKDVKVGFIVLFVLTIATGIYAVATSLVSVPAVLVLVGIALFLLAPLAIPIGVGFKELMSSRKTQQKVHDLEAPVDKFYFVEEDHTKEEEEFEKAIIGVKEEVEWTQLWKKLDFWIYFGLYLFGPTVGLVFTNNLGQIAESRGSTATSSLVALSSSFGFFGRLLPSLLDYFFSRNKYMPSSPVSMAGSLVAMVASFLLLLIDSDIALYIGTAMIGIFSGALTSLSVTMTAELFGTKHFGVNHNIVVGSIPLGSFSFGLLAAKIYRDGAALYGDDGKCFGMHCFQTTLVFWGMLCSIAALLAAVLYIRNRKFYSQKP

SEQ ID NO: 87996 - protein, 414 aa, Arabidopsis thaliana
  peptide (1)..(414): Ceres Seq. ID no. 12704896
MWCLSFLAGNSICWINTACYIVAINSFPVNRQVAVGITASYQGLSGKIYTDMVHSFFHTSQREEASGYLLLNSLVPLVACLVTAPMLMRHGGDKTMSYSKDVKVGFIVLFVLTIATGIYAVATSLVSVPAVLVLVGIALFLLAPLAIPIGVGFKELMSSRKTQQKVHDLEAPVDKFYFVEEDHTKEEEEFEKAIIGVKEEVEWTQLWKKLDFWIYFGLYLFGPTVGLVFTNNLGQIAESRGSTATSSLVALSSSFGFFGRLLPSLLDYFFSRNKYMPSSPVSMAGSLVAMVASFLLLLIDSDIALYIGTAMIGIFSGALTSLSVTMTAELFGTKHFGVNHNIVVGSIPLGSFSFGLLAAKIYRDGAALYGDDGKCFGMHCFQTTLVFWGMLCSIAALLAAVLYIRNRKFYSQKP

SEQ ID NO: 87997 - DNA, 1607 bp, Arabidopsis thaliana
  misc_feature (1)..(1607): Ceres Seq. ID no. 12704897
  misc_feature (1)..(1607): Ortholog of  Ceres SEQ ID NO 14304855 as cited in SEQ ID NO 53974
agttttatcctctttttcatttcaagatcaatttcataaaaaagtttccttttttagcgaatcctctgttttagaaatcttaaagttgtctcctttattaaagaccatcatgtcttccacttctttcaccgaccttcttggttcttccggcgttgactgttacgaagatgatgaagacttgagagtttctgggtcgagttttggtgggtactatccagagagaaccgggtctggtttacctaagttcaagacggctcaaccaccacctcttccgatttcacaatcttctcataacttcactttctccgattaccttgattctcctctgcttctcagctcctcacacagtttgatatctccaacaacaggaacgtttccattgcaaggctttaatggaacaacaaacaatcactcagattttccctggcagctacaatctcaaccatcaaacgcttcttctgctttgcaagaaacatatggtgttcaagatcacgagaagaagcaggagatgattcctaatgagattgcaacacaaaacaacaatcaaagttttggaacagaacgtcagataaagataccagcatacatggtgagtaggaactctaatgatggttatggttggagaaaatacggtcagaaacaagtgaagaagagcgaaaaccctaggagttacttcaagtgtacgtatcctgattgtgtttccaagaagattgttgagacggcttctgatggacagatcactgagatcatttataaaggtggtcataatcatcctaagcctgagttcaccaagagaccatctcaatcttcattaccatcatcggttaatgggaggcgcttgtttaatcctgcttctgttgttagtgaacctcatgatcaatcagagaactcttcgatttcgtttgactatagtgatcttgagcagaaaagttttaaatcagagtatggtgagatagatgaagaggaggaacaacctgagatgaagaggatgaaaagagaaggtgaagatgaagggatgtctatagaagtaagcaaaggagttaaagagccaagagttgtggttcagacaataagtgatattgatgttcttatagatggctttagatggaggaaatatggtcaaaaagttgtcaaaggaaatactaatccaaggagctactacaagtgcacattccaaggttgtggagtgaagaagcaagtggaaagatccgcagcagacgagagagcagttctcactacctatgaaggaagacacaatcacgatatcccaaccgcgctacgtcgctcgtgaaattattgggacttagtcactagtaatatgatttaggctttctaaaaacaaaaaatcttactatggcttatcttttgtgctcattcacagtttgtttatttgtttgttacacagtcaatactttgttttgtacagagtggtgcttagtagtgtttttattattatcttggccttatagaataacctctcttctcatctgtgtgactttaaacacttgagagtccattttatagttcttgtgtattggtcttttgtttgatttatgtacatttttaatattcaaatttgataaagcaataataatggtttgtaaccc

SEQ ID NO: 87998 - protein, 429 aa, Arabidopsis thaliana; identical to SEQ ID NO: 24030
  peptide (1)..(429): Ceres Seq. ID no. 12704898

SEQ ID NO: 87999 - protein, 393 aa, Arabidopsis thaliana; identical to SEQ ID NO: 24031
  peptide (1)..(393): Ceres Seq. ID no. 12704899

SEQ ID NO: 88000 - protein, 260 aa, Arabidopsis thaliana; identical to SEQ ID NO: 24032
  peptide (1)..(260): Ceres Seq. ID no. 12704900

SEQ ID NO: 88001 - DNA, 925 bp, Arabidopsis thaliana
  misc_feature (1)..(925): Ceres Seq. ID no. 12704901
  misc_feature (1)..(925): Ortholog of  Ceres SEQ ID NO 13638835 as cited in SEQ ID NO 52005
  misc_feature (1)..(925): Ortholog of  Ceres SEQ ID NO 12614289 as cited in SEQ ID NO 68735
  misc_feature (1)..(925): Ortholog of  Ceres SEQ ID NO 14309007 as cited in SEQ ID NO 0
ttcccaccattagggctctctctaaattcctcagtctcgagaatcttcatcgtcttcacgagctcactcgaagatgttaacggcagatataccaccgaatcaatcaatctacatccaaaacctcaacgaaaggatcaagaaagaggaattgaagagatctctttactgtttgttctctcagtttgggaggatacttgatgtggttgctttgaagactccgaagctccgaggacaagcttgggttacttttagtgaagtcactgctgctggtcatgctgttcgtcagatgcaaaattttcccttctatgataaaccaatgcgcttacaatatgcaaaagcaaagtcagattgtctagctaaagctgagggaactttcgttccaaaagataagaagaggaagcaagaagaaaaagttgaaagaaagcgtgaagattcccaacgaccaaacacggctaatggcccaagtgctaatggtccaagtgccaataacggagtccctgcgccttcgttccagccgagcgggcaagaaacaatgccaccaaacaacatactcttcattcagaatctcccacacgagacaacaagcatgatgctacagcttctcttcgaacagtaccctggattcaaagagataagaatgatcgacgcaaaaccaggaatcgcgtttgtagagtacgaagatgatgttcaagcttccatagctatgcaacctcttcaaggtttcaaaatcactccccagaatccaatggtcatctctttcgccaagaaatgataagagtcttgtttttgtttgtttgttgtcctttaagacgatagtactggaccaaccaaacctggtgtgtataaccaaccaacggttctattggttaacggattaatccggttttggtttaatcattgaaagagacccttgaaacgcggtttc

SEQ ID NO: 88002 - protein, 232 aa, Arabidopsis thaliana
  peptide (1)..(232): Ceres Seq. ID no. 12704902
MLTADIPPNQSIYIQNLNERIKKEELKRSLYCLFSQFGRILDVVALKTPKLRGQAWVTFSEVTAAGHAVRQMQNFPFYDKPMRLQYAKAKSDCLAKAEGTFVPKDKKRKQEEKVERKREDSQRPNTANGPSANGPSANNGVPAPSFQPSGQETMPPNNILFIQNLPHETTSMMLQLLFEQYPGFKEIRMIDAKPGIAFVEYEDDVQASIAMQPLQGFKITPQNPMVISFAKK

SEQ ID NO: 88003 - protein, 161 aa, Arabidopsis thaliana
  peptide (1)..(161): Ceres Seq. ID no. 12704903
MQNFPFYDKPMRLQYAKAKSDCLAKAEGTFVPKDKKRKQEEKVERKREDSQRPNTANGPSANGPSANNGVPAPSFQPSGQETMPPNNILFIQNLPHETTSMMLQLLFEQYPGFKEIRMIDAKPGIAFVEYEDDVQASIAMQPLQGFKITPQNPMVISFAKK

SEQ ID NO: 88004 - protein, 151 aa, Arabidopsis thaliana
  peptide (1)..(151): Ceres Seq. ID no. 12704904
MRLQYAKAKSDCLAKAEGTFVPKDKKRKQEEKVERKREDSQRPNTANGPSANGPSANNGVPAPSFQPSGQETMPPNNILFIQNLPHETTSMMLQLLFEQYPGFKEIRMIDAKPGIAFVEYEDDVQASIAMQPLQGFKITPQNPMVISFAKK

SEQ ID NO: 88005 - DNA, 1026 bp, Arabidopsis thaliana
  misc_feature (1)..(1026): Ceres Seq. ID no. 12704907
  misc_feature (1)..(1026): Ortholog of  Ceres SEQ ID NO 14306443 as cited in SEQ ID NO 53658
atggatggggtgggtgaaagttcgactcaaaatgaggtagaagagaagcctgtgattgttagagttaagcgaaaagttggacagtctctgctcgatgctttctggttggagataaatgaaagaccactcaaacggccgactctggatttctcaaagctatctatttcagattcaggggagagagaggatgtgaaaccgaagaaggtgctagtgcggcatttggagacagttacggactctgaaaccacagctgatattatccactctttctttgagtctgatcataatgagaaaagttgcagtaaaggaaagtttgaggagaggaaaattgctttcaagaaagacaatagaaaggaacagcgcctgaccaaatctgtacaaaagcaacagattgcttcagagaatgctcggtttgagcaaatatggcggagtaggaagggaaacaaggaaggcatccatgagaagtgtcatttctttgacgttattcgtgttgatactgaagaaagacgagacaatgcacaagagtttacatccctggaggaccagaaaatgctcgctagtttcttgcctctccttagagaatgtattccaacagcagctgaagagattgaagctgatatacaatctagtcacaccgaagaatacgtttatgattattatgctgtgaacgaagagatggatatcagcgaagatagttccaagaatcagtttcctcttgtcatagtagaggatgaagaagaattctgtgatggatctgatgaatcagactacgactctgaagattcaaacgctgaagatcatccaaagactgattacccagaggaggaagaagaagaagaagaagaagatgatgatgatgatgatgatgatgaatcagaagaagaaaagagtgaagcctctgatgaatcagacgacgaggagacttcaaaacgacatgtgagaagtgtccttggagatgacgagtttgatgattacgcagaggatgtgtatggttacagcgagagcgatgaggagtttgagtcttag

SEQ ID NO: 88006 - protein, 341 aa, Arabidopsis thaliana
  peptide (1)..(341): Ceres Seq. ID no. 12704908
MDGVGESSTQNEVEEKPVIVRVKRKVGQSLLDAFWLEINERPLKRPTLDFSKLSISDSGEREDVKPKKVLVRHLETVTDSETTADIIHSFFESDHNEKSCSKGKFEERKIAFKKDNRKEQRLTKSVQKQQIASENARFEQIWRSRKGNKEGIHEKCHFFDVIRVDTEERRDNAQEFTSLEDQKMLASFLPLLRECIPTAAEEIEADIQSSHTEEYVYDYYAVNEEMDISEDSSKNQFPLVIVEDEEEFCDGSDESDYDSEDSNAEDHPKTDYPEEEEEEEEEDDDDDDDDESEEEKSEASDESDDEETSKRHVRSVLGDDEFDDYAEDVYGYSESDEEFES

SEQ ID NO: 88007 - DNA, 1271 bp, Arabidopsis thaliana
  misc_feature (1)..(1271): Ceres Seq. ID no. 12704949
  misc_feature (1)..(1271): Ortholog of  Ceres SEQ ID NO 12608620 as cited in SEQ ID NO 60192
  misc_feature (1)..(1271): Ortholog of  Ceres SEQ ID NO 13662898 as cited in SEQ ID NO 66199
  misc_feature (1)..(1271): Ortholog of  Ceres SEQ ID NO 14313358 as cited in SEQ ID NO 67347
  misc_feature (1)..(1271): Ortholog of  Ceres SEQ ID NO 13654314 as cited in SEQ ID NO 67914
atgaaataaaaagaagcatcttctagagagagacatatagagaaagagagagaaagctttagggtttcaaaaaaaaaaaaaaagagaccctttagaaatctcctaacaggaaagttttctcaattgctatagaaaatgggagtcatgatcaatcaccatttcctcgcttttatcttcggcatcttaggaaacgtgatatccttccttgtattcctcgctccagtgccaactttttatagaatatacaagagaaaatcgacggaaagtttccagtcgctaccgtaccaagtgtcgctatttagctgcatgctatggctctactacgcattgattaagaaagacgcttttctcctaattaccatcaactcctttggctgcgtcgtggagactctctacatagccatgttcttcgcttacgccaccagggagaaaaggatatcggctatgaagttgttcatagcaatgaacgttgccttcttctcgttgattctaatggtaacacatttcgtggttaaaactcctcccctccaagtctctgtactcggctggatttgtgttgccatttctgtttctgttttcgctgcccctctaatgatcgtggctcgtgtgataaagacaaagagtgtggagtacatgcccttcacgctttctttcttcctcactataagcgccgttatgtggttcgcttatggtttattcctcaatgacatatgcatagcgattccaaacgtggtgggattcgtactagggctgttgcaaatggttttgtacttggtttacaggaactcaaatgagaaaccagagaagattaattcgtcagaacaacaacttaagagtattgtcgtgatgagtccgttaggtgtgtcggaagtgcacccagttgtgacggaatcggtggacccactctctgaagccgttcatcatgaggatctgtccaaagttactaaagtggaggagccgtcaattgaaaacggcaagtgctacgtggaggctactcgtcctgaaaccgtttgaagtgtcaatatgtgaagctcaaaatattgctctctctctctctctctttcactctctttctctcggctcgtcagggccggccaaaggaagaaattgtattatcggcggggtggtttgttaaatttccatttttgtttcgtatcttattgatgatgtactacttgcataaagttttgtgtttatttgaatatattatctttgtgtaagttgtaactagtgctctttggaaaatttgatataataaacctcaatagctt

SEQ ID NO: 88008 - protein, 292 aa, Arabidopsis thaliana; identical to SEQ ID NO: 24682
  peptide (1)..(292): Ceres Seq. ID no. 12704950

SEQ ID NO: 88009 - protein, 289 aa, Arabidopsis thaliana; identical to SEQ ID NO: 24683
  peptide (1)..(289): Ceres Seq. ID no. 12704951

SEQ ID NO: 88010 - protein, 235 aa, Arabidopsis thaliana; identical to SEQ ID NO: 24684
  peptide (1)..(235): Ceres Seq. ID no. 12704952

SEQ ID NO: 88011 - DNA, 1920 bp, Arabidopsis thaliana
  misc_feature (1)..(1920): Ceres Seq. ID no. 12704955
  misc_feature (1)..(1920): Ortholog of  Ceres SEQ ID NO 12586556 as cited in SEQ ID NO 64667
  misc_feature (1)..(1920): Ortholog of  Ceres SEQ ID NO 13660894 as cited in SEQ ID NO 67475
atggataaggctggtgtctccgttagctcgtattcttaccaatgtctctttgaggcttgcagagaattgaggtctttatctcatgggagactcttgcacgatcgcatgcggatgggtatcgagaatccttctgtgcttcttcagaactgtgtgcttcaaatgtactgtgagtgtcggagcttggaagatgcagataagctgttcgatgaaatgtctgagttaaatgcagtttctcgtacaacgatgatatctgcttacgccgaacaaggaattttggataaagctgttggtttgttctcgggaatgctagcgtcaggcgacaagcctccttcttccatgtatacgacactcttgaaatctttggtaaaccccagggctttagactttggtagacagattcatgctcatgttatacgtgctgggttatgtagcaacacatctatagagaccgggatcgtgaacatgtacgtgaaatgtggttggttagtgggtgctaagcgagtgttcgatcagatggcagtgaagaaaccagtggcttgtacgggattgatggtaggttatactcaagctggaagagcaagagatgctttgaaactatttgtggatttggtaacggaaggtgttgaatgggacagttttgtgttttcagttgttcttaaagcgtgtgcttctcttgaagagcttaatcttggcaagcaaattcatgcctgtgtcgctaagcttggattggaatctgaagtctcggttggaactccacttgttgatttttacatcaaatgttccagcttcgagtctgcttgtcgtgcatttcaagaaatccgtgagccaaacgatgtttcctggagcgcaatcatctccggatactattgcaacattggtggccaagtccatgcagatgctataaaaagaagtctgattggatctcagtatggagaaagcgctcttattacgatgtattcaaaatgtggatgcttagatgatgcaaatgaagtctttgagtccatggacaaccccgatattgttgcatggactgcttttatatcaggtcatgcttactatggaaatgcctctgaagctttgagattgtttgagaaaatggtgagttgtggtatgaagccaaactcagttacatttattgcggttttaaccgcgtgcagccatgcaggcctagttgaacagggaaagcattgcttggacacgatgcttcgaaaatataatgtggctccgactattgatcattatgattgtatgatcgacatttatgcccgttcgggactattagacgaagctctcaaatttatgaagaatatgccttttgaacctgatgcaatgagctggaaatgctttctaagtggatgttggactcataagaatcttgaactgggcgaaattgctggtgaggaacttcgccaactcgatccagaagatacagctggatatgtgctaccgtttaatctgtacacctgggctggaaaatgggaagaagctgctgaaatgatgaaactaatgaatgagaggatgttaaagaaggaactgagctgcagctggatccaagaaaagggtaagattcatcggtttatagtgggtgataaacaccatccacaaactcaggagatctatgagaagcttaaggagtttgatggtttcatggaaggtgatatgtttcagtgtaatatgacagagagaagagaacagcttcttgatcatagtgagagacttgccattgcatttgggctgatatcggtgcatggcaatgcccctgcacctattaaggtgttcaagaatcttcgggcatgcccagattgtcatgagtttgcaaagcatgtatctttggttacaggacatgaaatcgtcatccgagattccaggaggtttcaccatttcaaggagggaaagtgttcttgcaacgattactggtga

SEQ ID NO: 88012 - protein, 639 aa, Arabidopsis thaliana
  peptide (1)..(639): Ceres Seq. ID no. 12704956
MDKAGVSVSSYSYQCLFEACRELRSLSHGRLLHDRMRMGIENPSVLLQNCVLQMYCECRSLEDADKLFDEMSELNAVSRTTMISAYAEQGILDKAVGLFSGMLASGDKPPSSMYTTLLKSLVNPRALDFGRQIHAHVIRAGLCSNTSIETGIVNMYVKCGWLVGAKRVFDQMAVKKPVACTGLMVGYTQAGRARDALKLFVDLVTEGVEWDSFVFSVVLKACASLEELNLGKQIHACVAKLGLESEVSVGTPLVDFYIKCSSFESACRAFQEIREPNDVSWSAIISGYYCNIGGQVHADAIKRSLIGSQYGESALITMYSKCGCLDDANEVFESMDNPDIVAWTAFISGHAYYGNASEALRLFEKMVSCGMKPNSVTFIAVLTACSHAGLVEQGKHCLDTMLRKYNVAPTIDHYDCMIDIYARSGLLDEALKFMKNMPFEPDAMSWKCFLSGCWTHKNLELGEIAGEELRQLDPEDTAGYVLPFNLYTWAGKWEEAAEMMKLMNERMLKKELSCSWIQEKGKIHRFIVGDKHHPQTQEIYEKLKEFDGFMEGDMFQCNMTERREQLLDHSERLAIAFGLISVHGNAPAPIKVFKNLRACPDCHEFAKHVSLVTGHEIVIRDSRRFHHFKEGKCSCNDYW

SEQ ID NO: 88013 - protein, 604 aa, Arabidopsis thaliana
  peptide (1)..(604): Ceres Seq. ID no. 12704957
MRMGIENPSVLLQNCVLQMYCECRSLEDADKLFDEMSELNAVSRTTMISAYAEQGILDKAVGLFSGMLASGDKPPSSMYTTLLKSLVNPRALDFGRQIHAHVIRAGLCSNTSIETGIVNMYVKCGWLVGAKRVFDQMAVKKPVACTGLMVGYTQAGRARDALKLFVDLVTEGVEWDSFVFSVVLKACASLEELNLGKQIHACVAKLGLESEVSVGTPLVDFYIKCSSFESACRAFQEIREPNDVSWSAIISGYYCNIGGQVHADAIKRSLIGSQYGESALITMYSKCGCLDDANEVFESMDNPDIVAWTAFISGHAYYGNASEALRLFEKMVSCGMKPNSVTFIAVLTACSHAGLVEQGKHCLDTMLRKYNVAPTIDHYDCMIDIYARSGLLDEALKFMKNMPFEPDAMSWKCFLSGCWTHKNLELGEIAGEELRQLDPEDTAGYVLPFNLYTWAGKWEEAAEMMKLMNERMLKKELSCSWIQEKGKIHRFIVGDKHHPQTQEIYEKLKEFDGFMEGDMFQCNMTERREQLLDHSERLAIAFGLISVHGNAPAPIKVFKNLRACPDCHEFAKHVSLVTGHEIVIRDSRRFHHFKEGKCSCNDYW

SEQ ID NO: 88014 - protein, 602 aa, Arabidopsis thaliana
  peptide (1)..(602): Ceres Seq. ID no. 12704958
MGIENPSVLLQNCVLQMYCECRSLEDADKLFDEMSELNAVSRTTMISAYAEQGILDKAVGLFSGMLASGDKPPSSMYTTLLKSLVNPRALDFGRQIHAHVIRAGLCSNTSIETGIVNMYVKCGWLVGAKRVFDQMAVKKPVACTGLMVGYTQAGRARDALKLFVDLVTEGVEWDSFVFSVVLKACASLEELNLGKQIHACVAKLGLESEVSVGTPLVDFYIKCSSFESACRAFQEIREPNDVSWSAIISGYYCNIGGQVHADAIKRSLIGSQYGESALITMYSKCGCLDDANEVFESMDNPDIVAWTAFISGHAYYGNASEALRLFEKMVSCGMKPNSVTFIAVLTACSHAGLVEQGKHCLDTMLRKYNVAPTIDHYDCMIDIYARSGLLDEALKFMKNMPFEPDAMSWKCFLSGCWTHKNLELGEIAGEELRQLDPEDTAGYVLPFNLYTWAGKWEEAAEMMKLMNERMLKKELSCSWIQEKGKIHRFIVGDKHHPQTQEIYEKLKEFDGFMEGDMFQCNMTERREQLLDHSERLAIAFGLISVHGNAPAPIKVFKNLRACPDCHEFAKHVSLVTGHEIVIRDSRRFHHFKEGKCSCNDYW

SEQ ID NO: 88015 - DNA, 2430 bp, Arabidopsis thaliana
  misc_feature (1)..(2430): Ceres Seq. ID no. 12704963
  misc_feature (1)..(2430): Ortholog of  Ceres SEQ ID NO 13594958 as cited in SEQ ID NO 55996
  misc_feature (1)..(2430): Ortholog of  Ceres SEQ ID NO 15180204 as cited in SEQ ID NO 0
atggaggagagcgcagaaatattgcgggaaagaagtctcaagttttacaaaggatgccggaaatacactgaaggactaggcgaggcatacgatggggacattgctttcgcaagtgcacttgaaacatttggtggaggccataatgatccaataagtgtggcttttggaggaccggtaatgacgaaatttacaattgcgttgagggaaattgggacttataaggaagttcttcggtcacaggtggaacatatactgaatgacagattacttcagtttgccaatatggacttgcatgaagttaaggaagctcggaagcgctttgacaaggctagccttacctacgatcaggcccgtgagaagtttttatctttgaggaaaggtacaaaaagtgacgttgctgctgctttagaacaggaacttcatacttcgaggtctatgtttgagcaagctcggttcaaccttgtgactgctctatcaaatgttgaagctaagaaaaggtttgaatttttggaagcagtcagtggaacaatggatgcacatcttcggtacttcaaacagggttacgaattactgcatcagatggaaccatatatcaatcaggtcttgacatatgcgcaacaatccagagaaagatcaaattatgaacaagcagcacttaatgaaaagatgcaggagtacaaaagacaggttgatcgagagagcaggtggggttcaaatggttctaatggatcaccaaatggagatggcatacaagcaatcggtagaagctctcacaaaatgatagacgccgtaatgcaatctgctgcaagaggaaaggtgcaaacaataaggcaaggttatctctctaaacgatcttcaaacctgagaggagactggaaaagaaggttttttgttcttgacagccggggaatgctctattattaccgaaaacagtgtagcaaaccatctgggtctggaagccagctttctggacagagaaatagctccgagcttgggtctggactgcttagtaggtggctttcttcgaataatcatggacatggtggtgtccatgatgagaagtctgtagctcgtcatacagtgaacttactcacctcaacaattaaagtcgacgctgatcaatcagatctgaggttttgctttaggatcatatcacctacaaaaaactacacgttgcaggctgagagtgcactcgatcaaatggattggatagaaaagatcactggggttattgcatcactacttagttctcaggtccctgaacagcgtcttcctggtagtcccatgggaagtggccaccatcgatctgctagtgaaagtagctcatatgaaagttctgaatatgatcatcctactactgaagaatttgtatgtgagaggagctttttggggtacaatgaaaggccatcaagaagttttcagccgcaacggtccattagaaagggtgagaagcccattgatgctcttcgaaaggtctgtgggaatgacaaatgtgcggattgtggagctccagaaccagactgggcttctttaaatctgggggttcttgtctgtatcgaatgttctggtgttcaccgtaatcttggtgtgcatatatctaaggttaggtcactcactctcgacgtgaaagtatgggagccatctgttataagtttgttccaagctcttggaaatactttcgcaaacacagtttgggaggaattgcttcattcaaggagcgccatccattttgaccccggcttaacagtgtctgataaatccagggtgatggtcactggaaaacccagctatgctgatatgatatctatcaaggagaagtatatacaagctaagtatgcggagaagttatttgttcggagatcaagagacagcgatttcccacaatcagctgcacaacaaatgtgggacgcagtgagtggcaatgataaaaaagctgtttaccggctcattgtcaatggtgatgcggatgtgaattatgtgtatgaccaaacttccagttcttcgttaacactttccagagtaatattagtaccagaaaggccaaagcgtgaggatgttctactcagattaagaaatgagttacttgatagaacaggtagttcttcaaatatatctcctgagggaagcggaggttcctctctgcttcactgtgcttgtgagaaggcagaccttgggatggtagagcttttgctgcagtatggtgcaaatgtaaacgcctcagattcaagtggtcaaacgccgctgcactgttgtcttctcagaggaaaagtgacaatagcaagattgcttctcactaggggagcagacccggaagctatgaacagagaaggcaaaaccgctcttgatattgctgcagagtcaaattttactgatccagaagttcttgctctcctttcagacacaaatggatacaatcacagacagtgctga

SEQ ID NO: 88016 - protein, 809 aa, Arabidopsis thaliana
  peptide (1)..(809): Ceres Seq. ID no. 12704964
MEESAEILRERSLKFYKGCRKYTEGLGEAYDGDIAFASALETFGGGHNDPISVAFGGPVMTKFTIALREIGTYKEVLRSQVEHILNDRLLQFANMDLHEVKEARKRFDKASLTYDQAREKFLSLRKGTKSDVAAALEQELHTSRSMFEQARFNLVTALSNVEAKKRFEFLEAVSGTMDAHLRYFKQGYELLHQMEPYINQVLTYAQQSRERSNYEQAALNEKMQEYKRQVDRESRWGSNGSNGSPNGDGIQAIGRSSHKMIDAVMQSAARGKVQTIRQGYLSKRSSNLRGDWKRRFFVLDSRGMLYYYRKQCSKPSGSGSQLSGQRNSSELGSGLLSRWLSSNNHGHGGVHDEKSVARHTVNLLTSTIKVDADQSDLRFCFRIISPTKNYTLQAESALDQMDWIEKITGVIASLLSSQVPEQRLPGSPMGSGHHRSASESSSYESSEYDHPTTEEFVCERSFLGYNERPSRSFQPQRSIRKGEKPIDALRKVCGNDKCADCGAPEPDWASLNLGVLVCIECSGVHRNLGVHISKVRSLTLDVKVWEPSVISLFQALGNTFANTVWEELLHSRSAIHFDPGLTVSDKSRVMVTGKPSYADMISIKEKYIQAKYAEKLFVRRSRDSDFPQSAAQQMWDAVSGNDKKAVYRLIVNGDADVNYVYDQTSSSSLTLSRVILVPERPKREDVLLRLRNELLDRTGSSSNISPEGSGGSSLLHCACEKADLGMVELLLQYGANVNASDSSGQTPLHCCLLRGKVTIARLLLTRGADPEAMNREGKTALDIAAESNFTDPEVLALLSDTNGYNHRQC

SEQ ID NO: 88017 - protein, 750 aa, Arabidopsis thaliana
  peptide (1)..(750): Ceres Seq. ID no. 12704965
MTKFTIALREIGTYKEVLRSQVEHILNDRLLQFANMDLHEVKEARKRFDKASLTYDQAREKFLSLRKGTKSDVAAALEQELHTSRSMFEQARFNLVTALSNVEAKKRFEFLEAVSGTMDAHLRYFKQGYELLHQMEPYINQVLTYAQQSRERSNYEQAALNEKMQEYKRQVDRESRWGSNGSNGSPNGDGIQAIGRSSHKMIDAVMQSAARGKVQTIRQGYLSKRSSNLRGDWKRRFFVLDSRGMLYYYRKQCSKPSGSGSQLSGQRNSSELGSGLLSRWLSSNNHGHGGVHDEKSVARHTVNLLTSTIKVDADQSDLRFCFRIISPTKNYTLQAESALDQMDWIEKITGVIASLLSSQVPEQRLPGSPMGSGHHRSASESSSYESSEYDHPTTEEFVCERSFLGYNERPSRSFQPQRSIRKGEKPIDALRKVCGNDKCADCGAPEPDWASLNLGVLVCIECSGVHRNLGVHISKVRSLTLDVKVWEPSVISLFQALGNTFANTVWEELLHSRSAIHFDPGLTVSDKSRVMVTGKPSYADMISIKEKYIQAKYAEKLFVRRSRDSDFPQSAAQQMWDAVSGNDKKAVYRLIVNGDADVNYVYDQTSSSSLTLSRVILVPERPKREDVLLRLRNELLDRTGSSSNISPEGSGGSSLLHCACEKADLGMVELLLQYGANVNASDSSGQTPLHCCLLRGKVTIARLLLTRGADPEAMNREGKTALDIAAESNFTDPEVLALLSDTNGYNHRQC

SEQ ID NO: 88018 - protein, 715 aa, Arabidopsis thaliana
  peptide (1)..(715): Ceres Seq. ID no. 12704966
MDLHEVKEARKRFDKASLTYDQAREKFLSLRKGTKSDVAAALEQELHTSRSMFEQARFNLVTALSNVEAKKRFEFLEAVSGTMDAHLRYFKQGYELLHQMEPYINQVLTYAQQSRERSNYEQAALNEKMQEYKRQVDRESRWGSNGSNGSPNGDGIQAIGRSSHKMIDAVMQSAARGKVQTIRQGYLSKRSSNLRGDWKRRFFVLDSRGMLYYYRKQCSKPSGSGSQLSGQRNSSELGSGLLSRWLSSNNHGHGGVHDEKSVARHTVNLLTSTIKVDADQSDLRFCFRIISPTKNYTLQAESALDQMDWIEKITGVIASLLSSQVPEQRLPGSPMGSGHHRSASESSSYESSEYDHPTTEEFVCERSFLGYNERPSRSFQPQRSIRKGEKPIDALRKVCGNDKCADCGAPEPDWASLNLGVLVCIECSGVHRNLGVHISKVRSLTLDVKVWEPSVISLFQALGNTFANTVWEELLHSRSAIHFDPGLTVSDKSRVMVTGKPSYADMISIKEKYIQAKYAEKLFVRRSRDSDFPQSAAQQMWDAVSGNDKKAVYRLIVNGDADVNYVYDQTSSSSLTLSRVILVPERPKREDVLLRLRNELLDRTGSSSNISPEGSGGSSLLHCACEKADLGMVELLLQYGANVNASDSSGQTPLHCCLLRGKVTIARLLLTRGADPEAMNREGKTALDIAAESNFTDPEVLALLSDTNGYNHRQC

SEQ ID NO: 88019 - DNA, 1479 bp, Arabidopsis thaliana
  misc_feature (1)..(1479): Ceres Seq. ID no. 12705025
  misc_feature (1)..(1479): Ortholog of  Ceres SEQ ID NO 13654166 as cited in SEQ ID NO 68381
  misc_feature (1)..(1479): Ortholog of  Ceres SEQ ID NO 13599720 as cited in SEQ ID NO 0
atggcggaggagtacaaggaagcgttgttggagaagcagaactatcacgacggatgtcccggctgtaaggtggagcagatgaagcagctccggcgaggatatccttacctcgagctttccttcgtttggattatcgtcctctccacttctctaccaatttcctcactctatcccttcctctactatatgattgaggattttggtgtcgcaaagacggagaaagatattgggttttatgctggttttgttggttgctcttttatgcttggaagagcactgacttctgtgttctggggaattgtggctgatcgttatggaagaaaacccattatactcttgggaactatctcaatgttagtagtttactgcagtgcaattttcaacgctctttttggcttgagctcaaatttttggatggcaattggcacaaggtttcttcttgggagtttcaactgtttgcttggaacaatgaaggcctatgcatcagaaatatttcgtgatgaatatcaagctaccgcaatgtcagctgttagtactgcttggggcattggactgatcattggccctgctcttggtggttttttagctcagccggcagacaaatatccaaatgtgttctcccaagaatctctttttggcagattccggtatgcattgccttgctttacgatttcagcttttgccttgcttgtgacagtactatgctgcttcatcccggagacactgcacaatcataagctggacagcttatcacatgatgattcatacgatatacttgaagctgcatctcatgaatcatctccttctaccgggaaggcaggaaaaaacgaaagaaaggcttctcagtctctcttgaagaattggccgctgatgtcatctatcattgtgtattgtgttctgtgtcttcatgatactgcatactcggagatatttgcactatgggctaacagtccaaggaagtatggaggtctgagctactcaacgaatgaagtcggtacagttcttgctatctcaggtctcggcctattctcttttcaggtatttgtttatcctttggctgagaaactgctaggacctgttctggtcacccgatatgctggggcactgatgatacctatacaaatgagttatccatttatagcaggcttgtcaggtctcagtctaagcttgatgttaaattgtgcatcaatcctcataaatgtcttaagtgtgtctgccataaccggcctgttgatccttcaaaatagagcagtggatcagagccaaagaggggcggctaatggaatagctatgactgcgatgtctctatttaagacagttggaccagctggtgctggcatcttattttcttggagtgagaggcgactaaacgctgcatttctaccaggatcgcatatggtattcttcgtcttgaatgtgatagtagtggtcggagtagctctgacattcaagccatttctaacgacgagtcgaagatga

SEQ ID NO: 88020 - protein, 492 aa, Arabidopsis thaliana
  peptide (1)..(492): Ceres Seq. ID no. 12705026
MAEEYKEALLEKQNYHDGCPGCKVEQMKQLRRGYPYLELSFVWIIVLSTSLPISSLYPFLYYMIEDFGVAKTEKDIGFYAGFVGCSFMLGRALTSVFWGIVADRYGRKPIILLGTISMLVVYCSAIFNALFGLSSNFWMAIGTRFLLGSFNCLLGTMKAYASEIFRDEYQATAMSAVSTAWGIGLIIGPALGGFLAQPADKYPNVFSQESLFGRFRYALPCFTISAFALLVTVLCCFIPETLHNHKLDSLSHDDSYDILEAASHESSPSTGKAGKNERKASQSLLKNWPLMSSIIVYCVLCLHDTAYSEIFALWANSPRKYGGLSYSTNEVGTVLAISGLGLFSFQVFVYPLAEKLLGPVLVTRYAGALMIPIQMSYPFIAGLSGLSLSLMLNCASILINVLSVSAITGLLILQNRAVDQSQRGAANGIAMTAMSLFKTVGPAGAGILFSWSERRLNAAFLPGSHMVFFVLNVIVVVGVALTFKPFLTTSRR

SEQ ID NO: 88021 - protein, 466 aa, Arabidopsis thaliana
  peptide (1)..(466): Ceres Seq. ID no. 12705027
MKQLRRGYPYLELSFVWIIVLSTSLPISSLYPFLYYMIEDFGVAKTEKDIGFYAGFVGCSFMLGRALTSVFWGIVADRYGRKPIILLGTISMLVVYCSAIFNALFGLSSNFWMAIGTRFLLGSFNCLLGTMKAYASEIFRDEYQATAMSAVSTAWGIGLIIGPALGGFLAQPADKYPNVFSQESLFGRFRYALPCFTISAFALLVTVLCCFIPETLHNHKLDSLSHDDSYDILEAASHESSPSTGKAGKNERKASQSLLKNWPLMSSIIVYCVLCLHDTAYSEIFALWANSPRKYGGLSYSTNEVGTVLAISGLGLFSFQVFVYPLAEKLLGPVLVTRYAGALMIPIQMSYPFIAGLSGLSLSLMLNCASILINVLSVSAITGLLILQNRAVDQSQRGAANGIAMTAMSLFKTVGPAGAGILFSWSERRLNAAFLPGSHMVFFVLNVIVVVGVALTFKPFLTTSRR

SEQ ID NO: 88022 - protein, 430 aa, Arabidopsis thaliana
  peptide (1)..(430): Ceres Seq. ID no. 12705028
MIEDFGVAKTEKDIGFYAGFVGCSFMLGRALTSVFWGIVADRYGRKPIILLGTISMLVVYCSAIFNALFGLSSNFWMAIGTRFLLGSFNCLLGTMKAYASEIFRDEYQATAMSAVSTAWGIGLIIGPALGGFLAQPADKYPNVFSQESLFGRFRYALPCFTISAFALLVTVLCCFIPETLHNHKLDSLSHDDSYDILEAASHESSPSTGKAGKNERKASQSLLKNWPLMSSIIVYCVLCLHDTAYSEIFALWANSPRKYGGLSYSTNEVGTVLAISGLGLFSFQVFVYPLAEKLLGPVLVTRYAGALMIPIQMSYPFIAGLSGLSLSLMLNCASILINVLSVSAITGLLILQNRAVDQSQRGAANGIAMTAMSLFKTVGPAGAGILFSWSERRLNAAFLPGSHMVFFVLNVIVVVGVALTFKPFLTTSRR

SEQ ID NO: 88023 - DNA, 1472 bp, Arabidopsis thaliana
  misc_feature (1)..(1472): Ceres Seq. ID no. 12705056
  misc_feature (1)..(1472): Ortholog of  Ceres SEQ ID NO 15177384 as cited in SEQ ID NO 51085
  misc_feature (1)..(1472): Ortholog of  Ceres SEQ ID NO 14308787 as cited in SEQ ID NO 55614
  misc_feature (1)..(1472): Ortholog of  Ceres SEQ ID NO 13656547 as cited in SEQ ID NO 65935
aaatacacctaacttgtttagtacacaacagcaacatcaaactctaataaacccaagttggtgtatactataatggtgatggctggtgcttcttctttggatgagatcagacaggctcagagagctgatggacctgcaggcatcttggctattggcactgctaaccctgagaaccatgtgcttcaggcggagtatcctgactactacttccgcatcaccaacagtgaacacatgaccgacctcaaggagaagttcaagcgcatgtgcgacaagtcgacaattcggaaacgtcacatgcatctgacggaggaattcctcaaggaaaacccacacatgtgtgcttacatggctccttctctggacaccagacaggacatcgtggtggtcgaagtccctaagctaggcaaagaagcggcagtgaaggccatcaaggagtggggccagcccaagtcaaagatcactcatgtcgtcttctgcactacctccggcgtcgacatgcctggtgctgactaccagctcaccaagcttcttggtctccgtccttccgtcaagcgtctcatgatgtaccagcaaggttgcttcgccggcggtactgtcctccgtatcgctaaggatctcgccgagaacaatcgtggagcacgtgtcctcgttgtctgctctgagatcacagccgttaccttccgtggtccctctgacacccaccttgactccctcgtcggtcaggctcttttcagtgatggcgccgccgcactcattgtggggtcggaccctgacacatctgtcggagagaaacccatctttgagatggtgtctgccgctcagaccatccttccagactctgatggtgccatagacggacatttgagggaagttggtctcaccttccatctcctcaaggatgttcccggcctcatctccaagaacattgtgaagagtctagacgaagcgtttaaacctttggggataagtgactggaactccctcttctggatagcccaccctggaggtccagcgatcctagaccaggtggagataaagctaggactaaaggaagagaagatgagggcgacacgtcacgtgttgagcgagtatggaaacatgtcgagcgcgtgcgttctcttcatactagacgagatgaggaggaagtcagctaaggatggtgtggccacgacaggagaagggttggagtggggtgtcttgtttggtttcggaccaggtctcactgttgagacagtcgtcttgcacagcgttcctctctaaacagaacgcttgccttctatctgcctacctacctacgcaaaactttaatcctgtcttatgttttatataatataatcattatatgtttacgcaataattaaggaagaattcatttgatgtgatatgtgatatgtgctggacaggtctattcgactgtttttgtactctcttttttgtgtctttttacaatattaaatctatgggtcttgaat

SEQ ID NO: 88024 - protein, 395 aa, Arabidopsis thaliana; identical to SEQ ID NO: 24450
  peptide (1)..(395): Ceres Seq. ID no. 12705057

SEQ ID NO: 88025 - protein, 393 aa, Arabidopsis thaliana; identical to SEQ ID NO: 24451
  peptide (1)..(393): Ceres Seq. ID no. 12705058

SEQ ID NO: 88026 - protein, 342 aa, Arabidopsis thaliana; identical to SEQ ID NO: 24452
  peptide (1)..(342): Ceres Seq. ID no. 12705059

SEQ ID NO: 88027 - DNA, 1206 bp, Arabidopsis thaliana
  misc_feature (1)..(1206): Ceres Seq. ID no. 12705063
  misc_feature (1)..(1206): Ortholog of  Ceres SEQ ID NO 15175957 as cited in SEQ ID NO 20615
  misc_feature (1)..(1206): Ortholog of  Ceres SEQ ID NO 14301490 as cited in SEQ ID NO 66234
atggggtgtgctcaatctactattgctgttgtgggaaggaagaacaagaagaggatcattcaagaatctgtagtgtttgttctacagttccgtgttcctgttcagtctgatcttcagcgccaactcaaaggtgtttctcccaagacaaccatcaatcggttgacatgtttaagaaatcagattgagttggtagctgaggacacagggggttcagccatctctgagttgcgtacagctttggaggagtacttgtcacttctatccggtcttatcaagaaaagtaaagatggaatggagggctgcgtagagctcaaatggaggacccttggcgatggtcgacgagcagagatatgttgcacaaacctttggatggagatgttgatagtgatccacatgatggctgctttggcattgactgaagctaactctctcatgattccaaaggattgctatgcttctggttctggcaatggcgtccgtgtggtctccactgattgcaggagagatgcggttgacttgctgctcaaggcatctggatacttggagttctgcgtccgagagattctgactcaacttcctcatgatataaagagtaagttgccagatgatatgcaggaaagtgtattacaaactctctctatacaagcactaggccagggaactgagattcaacttggattagcagttgatagtcagaaagcaacattgtctgtgaagaggagaattgcatgtgagcaagtcatctacttcactcaggcatatcactgcttgtctagttgtgaagcagttagccatggatgcgccaagaaacttctccggtttatctactggaagtttctggaagcaaaggctgcagcatactactaccatggactggtaacagacaagggaagtgagccggcttgtcacttgagcgctgtgtgttgtttccttgcagctgcagagatcctaggagaaagcaaaaaagcctgtcttagcttctgcttagctcctcctgtcacaagggctcctcctatgtggggtgttatgaagcatttgagccagaagattccagaagttgcttttagaaagtcgcagacatatggatacttgcttgaagaagaagaaaaggcaatgcagtgtttgccagagcttccagactttcagttgtcattgagacccgacgactttgaactgcctgaaatagaggatgtctcttcctcatga

SEQ ID NO: 88028 - protein, 401 aa, Arabidopsis thaliana
  peptide (1)..(401): Ceres Seq. ID no. 12705064
MGCAQSTIAVVGRKNKKRIIQESVVFVLQFRVPVQSDLQRQLKGVSPKTTINRLTCLRNQIELVAEDTGGSAISELRTALEEYLSLLSGLIKKSKDGMEGCVELKWRTLGDGRRAEICCTNLWMEMLIVIHMMAALALTEANSLMIPKDCYASGSGNGVRVVSTDCRRDAVDLLLKASGYLEFCVREILTQLPHDIKSKLPDDMQESVLQTLSIQALGQGTEIQLGLAVDSQKATLSVKRRIACEQVIYFTQAYHCLSSCEAVSHGCAKKLLRFIYWKFLEAKAAAYYYHGLVTDKGSEPACHLSAVCCFLAAAEILGESKKACLSFCLAPPVTRAPPMWGVMKHLSQKIPEVAFRKSQTYGYLLEEEEKAMQCLPELPDFQLSLRPDDFELPEIEDVSSS

SEQ ID NO: 88029 - protein, 304 aa, Arabidopsis thaliana
  peptide (1)..(304): Ceres Seq. ID no. 12705065
MEGCVELKWRTLGDGRRAEICCTNLWMEMLIVIHMMAALALTEANSLMIPKDCYASGSGNGVRVVSTDCRRDAVDLLLKASGYLEFCVREILTQLPHDIKSKLPDDMQESVLQTLSIQALGQGTEIQLGLAVDSQKATLSVKRRIACEQVIYFTQAYHCLSSCEAVSHGCAKKLLRFIYWKFLEAKAAAYYYHGLVTDKGSEPACHLSAVCCFLAAAEILGESKKACLSFCLAPPVTRAPPMWGVMKHLSQKIPEVAFRKSQTYGYLLEEEEKAMQCLPELPDFQLSLRPDDFELPEIEDVSSS

SEQ ID NO: 88030 - protein, 278 aa, Arabidopsis thaliana
  peptide (1)..(278): Ceres Seq. ID no. 12705066
MEMLIVIHMMAALALTEANSLMIPKDCYASGSGNGVRVVSTDCRRDAVDLLLKASGYLEFCVREILTQLPHDIKSKLPDDMQESVLQTLSIQALGQGTEIQLGLAVDSQKATLSVKRRIACEQVIYFTQAYHCLSSCEAVSHGCAKKLLRFIYWKFLEAKAAAYYYHGLVTDKGSEPACHLSAVCCFLAAAEILGESKKACLSFCLAPPVTRAPPMWGVMKHLSQKIPEVAFRKSQTYGYLLEEEEKAMQCLPELPDFQLSLRPDDFELPEIEDVSSS

SEQ ID NO: 88031 - DNA, 1305 bp, Arabidopsis thaliana
  misc_feature (1)..(1305): Ceres Seq. ID no. 12705112
  misc_feature (1)..(1305): Ortholog of  Ceres SEQ ID NO 13663419 as cited in SEQ ID NO 66561
atgagaaaccttagcttcatcgtcttatttctattgaccctcttcttcattcatcatttggttgatgcttctttgctagtgaagtctcttcctggttttgaaggtcctcttccttttgagctcgagactggatatgtgagtattggtgaatctggagatgttgagctcttttactactttgtgaaatcagagaggaatccagaaaatgatcctctcatgatttggctcactggtggacctggctgcagctccatctgtggattgctcttcgcaaacggtcctttagcttttaaaggggatgagtataatgggacagtacctcctctagagttgacatctttttcatggacaaaggtggctaacattttatatttggaagctcctgctggctctggatactcttatgcgaaaactcggcgtgcttttgagtcgagcgacaccaaacaaatgcaccaaattgatcaatttcttaggagttggtttgtgaaacacccggagtttatatcgaatcctttttacgttggtggagattcatattccgggaaaattgttccaggagctgtgcaacaaatttcacttggaaatgagaagggcctcacaccactcataaatattcagggttatgttcttggaaaccctgtgacagataaaaacattgaaactaactatagagttccatttgctcatgggatgggacttatttcagatgagctctttgagtcacttgaaagaagttgtggaggcaaattcttcaacgtagacccaagtaatgcaagatgctcaaataatcttcaagcttatgatcattgtatgtcagagatatactcagagcatattttgttacgaaactgcaaagtagattacgtcttgacttataggtattttctgtctgccttttgggcaaacgatgaaaatgtacgcagagctctaggcgtgaaaaaggaagtaggaaaatggaaccgatgcaacagccaaaacataccatatacatttgagattttcaatgcagttccttatcacgtaaacaatagtcttaaaggcttccgctctctcatctacagtggtgatcatgattctatggtaccattttcttcaactcaagcatggatcagagctctcaactattccattgttgatgactggagaccttggatgatgagtagcaatcaagtcgcaggctatacaaggacttacgcaaacaagatgacatttgcaaccatcaagggaggaggacacacagcggagtatactccagatcaatgctctcttatgttcagaagatggattgatggagaacctctctaa

SEQ ID NO: 88032 - protein, 434 aa, Arabidopsis thaliana
  peptide (1)..(434): Ceres Seq. ID no. 12705113
MRNLSFIVLFLLTLFFIHHLVDASLLVKSLPGFEGPLPFELETGYVSIGESGDVELFYYFVKSERNPENDPLMIWLTGGPGCSSICGLLFANGPLAFKGDEYNGTVPPLELTSFSWTKVANILYLEAPAGSGYSYAKTRRAFESSDTKQMHQIDQFLRSWFVKHPEFISNPFYVGGDSYSGKIVPGAVQQISLGNEKGLTPLINIQGYVLGNPVTDKNIETNYRVPFAHGMGLISDELFESLERSCGGKFFNVDPSNARCSNNLQAYDHCMSEIYSEHILLRNCKVDYVLTYRYFLSAFWANDENVRRALGVKKEVGKWNRCNSQNIPYTFEIFNAVPYHVNNSLKGFRSLIYSGDHDSMVPFSSTQAWIRALNYSIVDDWRPWMMSSNQVAGYTRTYANKMTFATIKGGGHTAEYTPDQCSLMFRRWIDGEPL

SEQ ID NO: 88033 - protein, 362 aa, Arabidopsis thaliana
  peptide (1)..(362): Ceres Seq. ID no. 12705114
MIWLTGGPGCSSICGLLFANGPLAFKGDEYNGTVPPLELTSFSWTKVANILYLEAPAGSGYSYAKTRRAFESSDTKQMHQIDQFLRSWFVKHPEFISNPFYVGGDSYSGKIVPGAVQQISLGNEKGLTPLINIQGYVLGNPVTDKNIETNYRVPFAHGMGLISDELFESLERSCGGKFFNVDPSNARCSNNLQAYDHCMSEIYSEHILLRNCKVDYVLTYRYFLSAFWANDENVRRALGVKKEVGKWNRCNSQNIPYTFEIFNAVPYHVNNSLKGFRSLIYSGDHDSMVPFSSTQAWIRALNYSIVDDWRPWMMSSNQVAGYTRTYANKMTFATIKGGGHTAEYTPDQCSLMFRRWIDGEPL

SEQ ID NO: 88034 - protein, 285 aa, Arabidopsis thaliana
  peptide (1)..(285): Ceres Seq. ID no. 12705115
MHQIDQFLRSWFVKHPEFISNPFYVGGDSYSGKIVPGAVQQISLGNEKGLTPLINIQGYVLGNPVTDKNIETNYRVPFAHGMGLISDELFESLERSCGGKFFNVDPSNARCSNNLQAYDHCMSEIYSEHILLRNCKVDYVLTYRYFLSAFWANDENVRRALGVKKEVGKWNRCNSQNIPYTFEIFNAVPYHVNNSLKGFRSLIYSGDHDSMVPFSSTQAWIRALNYSIVDDWRPWMMSSNQVAGYTRTYANKMTFATIKGGGHTAEYTPDQCSLMFRRWIDGEPL

SEQ ID NO: 88035 - DNA, 1268 bp, Arabidopsis thaliana
  misc_feature (1)..(1268): Ceres Seq. ID no. 12705120
  misc_feature (1)..(1268): Ortholog of  Ceres SEQ ID NO 14314464 as cited in SEQ ID NO 52405
  misc_feature (1)..(1268): Ortholog of  Ceres SEQ ID NO 15177592 as cited in SEQ ID NO 58436
  misc_feature (1)..(1268): Ortholog of  Ceres SEQ ID NO 13655251 as cited in SEQ ID NO 62888
  misc_feature (1)..(1268): Ortholog of  Ceres SEQ ID NO 13597194 as cited in SEQ ID NO 63661
  misc_feature (1)..(1268): Ortholog of  Ceres SEQ ID NO 13662855 as cited in SEQ ID NO 69059
aaaactcttaaacagcttcctaacgagaggaaactgaggaacacaacaatggagtttcgtggagatgccaaccagaggattgctaggatttcagctcatctcactcctcagatggaggccaagaactctgtaatcggacgggaaaactgcagagctaaaggtggtaatccaggattcaaagtagcaattcttggagctgcaggtggaattggacaatctttatctttgctgatgaagatgaaccctcttgtctctttacttcatctctacgatgttgtcaatgctcctggcgtcactgctgacgtcagtcatatggacactggagctgttgtccgcgggttcttgggagcgaagcagcttgaggacgcgctaacgggtatggatcttgtgatcataccagccggtataccgaggaaaccagggatgacccgcgatgatctgtttaaaatcaatgctgggattgttaaaacactatgtgaaggtgtagcaaaatgttgtcctaatgctattgtcaacttgatcagcaaccctgtgaactctactgtccccattgccgctgaggttttcaagaaagctggaacttatgatcctaagaagctccttggagttactacactcgatgttgctcgtgccaacacatttgtggcagaagttcttggccttgatccaagagaagtcgatgtgccagtagttgggggacacgccggagtcacaatcttgccactactgtcacaggttaaacctcctagcagcttcacacctcaagaaattgagtacctgacaaaccggattcaaaatggtggaactgaagttgtggaggcaaaagctggagctggttctgcaacactttcaatggcatatgctgcagccaagtttgcagatgcttgccttcgcgggttaagaggagatgcgaatgtcgtagaatgctcttttgttgcttcacaggtgacagaattagctttctttgcaacaaaagtgcgccttggccgtacaggagcagaggaagtgtatcagcttggacccttaaacgaatacgaaaggattggtctggagaaagcaaaagatgaattagccggaagtattcagaaaggtgttgaattcatcagaaaatgaaactgagagataatcagagagatacaataagttatttcctcaactatatgatcatgtactcatcatcacatcatgcctatgtctcctctgcttctgatacaactttgtataaatccttatcagtttgtgtacgatatatgtgaccttttcaacgt

SEQ ID NO: 88036 - protein, 370 aa, Arabidopsis thaliana
  peptide (1)..(370): Ceres Seq. ID no. 12705121
KTLKQLPNERKLRNTTMEFRGDANQRIARISAHLTPQMEAKNSVIGRENCRAKGGNPGFKVAILGAAGGIGQSLSLLMKMNPLVSLLHLYDVVNAPGVTADVSHMDTGAVVRGFLGAKQLEDALTGMDLVIIPAGIPRKPGMTRDDLFKINAGIVKTLCEGVAKCCPNAIVNLISNPVNSTVPIAAEVFKKAGTYDPKKLLGVTTLDVARANTFVAEVLGLDPREVDVPVVGGHAGVTILPLLSQVKPPSSFTPQEIEYLTNRIQNGGTEVVEAKAGAGSATLSMAYAAAKFADACLRGLRGDANVVECSFVASQVTELAFFATKVRLGRTGAEEVYQLGPLNEYERIGLEKAKDELAGSIQKGVEFIRK

SEQ ID NO: 88037 - protein, 354 aa, Arabidopsis thaliana; identical to SEQ ID NO: 37396
  peptide (1)..(354): Ceres Seq. ID no. 12705122

SEQ ID NO: 88038 - protein, 333 aa, Arabidopsis thaliana; identical to SEQ ID NO: 37397
  peptide (1)..(333): Ceres Seq. ID no. 12705123

SEQ ID NO: 88039 - DNA, 1863 bp, Arabidopsis thaliana
  misc_feature (1)..(1863): Ceres Seq. ID no. 12705124
  misc_feature (1)..(1863): Ortholog of  Ceres SEQ ID NO 13657647 as cited in SEQ ID NO 66399
atgtcacctgacggagaacttgttccggtggattcatcggcggtagtcacggcgaagaggaagacatctcagttatcaaggagttggatttccatagacgccacggggcaaaaaactgtgcttgacgttgacaaacacgtgattatgcaccgtgttcaaatccacgctcgtgatctccggatccttgacccgaatctattttacccttctgctattttgggtcgagaaagagccattgttcttaacttagagcatatcaaggcgattatcactgccgaagaggttttgatccgagattcgtcagatgaaaatgttatccccgtcctggaggagtttcagagaagattacctgtaggaaacgaggcacatggtgttcacggagatggtgatttgggtgaagaagatgaatccccgtttgaattccgggcgctagaggtggccttggaagctatttgtagttttctagctgcaaggacaacagaactagagaagtttgcttatcctgctttggatgaacttaccttgaagataagtagccgtaacttggaaagagttcgtaaattgaagagtgccatgacccgtttgacagctcgggtccaaaaggtaagggatgagcttgaacagttgttggatgatgatggtgatatggctgatctctaccttacaaggaagcttgttggtgcatcttcatctgtcagcgtttcagatgaacccatttggtatcctacttccccaacaataggttctatgatttccagagcaagtagagtgagtttagtcacggttcgtggagacgacgaaactgatgttgaagagcttgaaatgttgcttgaggcatacttcatgcaaatagacagcactttgaacaaattaaccgagctacgcgagtatattgatgacacagaggattacattaacatccagttagacaatcatcgaaatcagctgattcagttagagctaatgttaagcgcaggaaccgtctgtgtatcagtgtactctatgatcgccggaatattcggcatgaacattcccaacacatggaaccacgaccatggttacattttcaaatggcctccagagaagaacatgattattctcataagaatccttgacggccaattagatctctccctctttcgtcgctctttgttttctccactggtctttgtttctcctttgattctctgtctggagcagtctcagatccaccagattaagctcaagatggatactagtagagatgatgatttcacattctcaaaggtttcaccaccagatagtgaagttaaagatcttgcatcagatgtaggtagtattacccttaaagatgggttagatcaacaaaaaagcaatggtcttatttggaaagacaagtctcttcctccaaaggaagaaacaataggttctttgtctttcacggtgactgattcttcgtcttcgaaaaagcaatccaatgaatcctctgagactttcaaaactccagctagaaagcctatcactcgtaccaaggttccatttgaaaagggttatagccaaatggattggttgaaacttacacgaacacatcccgatcttgcaggcctgaagggagagtcaaacaagaggcttattccaatggatgaagtaaagaaacaccgaacaggagattcgatgtggactgttttgaaaggtcgtgtatacaacatatcgccttatatgaattttcatcctggaggtgtcgatatgctgatgaaagcggttggaagagacggtacgctcttattcaacaaataccatgcctgggtcaatgttgatatcttacttgagaaatgccttgttggagttttggatgataccaaagtgaagaagcaagaaccctaa

SEQ ID NO: 88040 - protein, 620 aa, Arabidopsis thaliana
  peptide (1)..(620): Ceres Seq. ID no. 12705125
MSPDGELVPVDSSAVVTAKRKTSQLSRSWISIDATGQKTVLDVDKHVIMHRVQIHARDLRILDPNLFYPSAILGRERAIVLNLEHIKAIITAEEVLIRDSSDENVIPVLEEFQRRLPVGNEAHGVHGDGDLGEEDESPFEFRALEVALEAICSFLAARTTELEKFAYPALDELTLKISSRNLERVRKLKSAMTRLTARVQKVRDELEQLLDDDGDMADLYLTRKLVGASSSVSVSDEPIWYPTSPTIGSMISRASRVSLVTVRGDDETDVEELEMLLEAYFMQIDSTLNKLTELREYIDDTEDYINIQLDNHRNQLIQLELMLSAGTVCVSVYSMIAGIFGMNIPNTWNHDHGYIFKWPPEKNMIILIRILDGQLDLSLFRRSLFSPLVFVSPLILCLEQSQIHQIKLKMDTSRDDDFTFSKVSPPDSEVKDLASDVGSITLKDGLDQQKSNGLIWKDKSLPPKEETIGSLSFTVTDSSSSKKQSNESSETFKTPARKPITRTKVPFEKGYSQMDWLKLTRTHPDLAGLKGESNKRLIPMDEVKKHRTGDSMWTVLKGRVYNISPYMNFHPGGVDMLMKAVGRDGTLLFNKYHAWVNVDILLEKCLVGVLDDTKVKKQEP

SEQ ID NO: 88041 - protein, 572 aa, Arabidopsis thaliana
  peptide (1)..(572): Ceres Seq. ID no. 12705126
MHRVQIHARDLRILDPNLFYPSAILGRERAIVLNLEHIKAIITAEEVLIRDSSDENVIPVLEEFQRRLPVGNEAHGVHGDGDLGEEDESPFEFRALEVALEAICSFLAARTTELEKFAYPALDELTLKISSRNLERVRKLKSAMTRLTARVQKVRDELEQLLDDDGDMADLYLTRKLVGASSSVSVSDEPIWYPTSPTIGSMISRASRVSLVTVRGDDETDVEELEMLLEAYFMQIDSTLNKLTELREYIDDTEDYINIQLDNHRNQLIQLELMLSAGTVCVSVYSMIAGIFGMNIPNTWNHDHGYIFKWPPEKNMIILIRILDGQLDLSLFRRSLFSPLVFVSPLILCLEQSQIHQIKLKMDTSRDDDFTFSKVSPPDSEVKDLASDVGSITLKDGLDQQKSNGLIWKDKSLPPKEETIGSLSFTVTDSSSSKKQSNESSETFKTPARKPITRTKVPFEKGYSQMDWLKLTRTHPDLAGLKGESNKRLIPMDEVKKHRTGDSMWTVLKGRVYNISPYMNFHPGGVDMLMKAVGRDGTLLFNKYHAWVNVDILLEKCLVGVLDDTKVKKQEP

SEQ ID NO: 88042 - protein, 429 aa, Arabidopsis thaliana
  peptide (1)..(429): Ceres Seq. ID no. 12705127
MTRLTARVQKVRDELEQLLDDDGDMADLYLTRKLVGASSSVSVSDEPIWYPTSPTIGSMISRASRVSLVTVRGDDETDVEELEMLLEAYFMQIDSTLNKLTELREYIDDTEDYINIQLDNHRNQLIQLELMLSAGTVCVSVYSMIAGIFGMNIPNTWNHDHGYIFKWPPEKNMIILIRILDGQLDLSLFRRSLFSPLVFVSPLILCLEQSQIHQIKLKMDTSRDDDFTFSKVSPPDSEVKDLASDVGSITLKDGLDQQKSNGLIWKDKSLPPKEETIGSLSFTVTDSSSSKKQSNESSETFKTPARKPITRTKVPFEKGYSQMDWLKLTRTHPDLAGLKGESNKRLIPMDEVKKHRTGDSMWTVLKGRVYNISPYMNFHPGGVDMLMKAVGRDGTLLFNKYHAWVNVDILLEKCLVGVLDDTKVKKQEP

SEQ ID NO: 88043 - DNA, 712 bp, Arabidopsis thaliana
  misc_feature (1)..(712): Ceres Seq. ID no. 12705170
  misc_feature (1)..(712): Ortholog of  Ceres SEQ ID NO 15172846 as cited in SEQ ID NO 51978
  misc_feature (1)..(712): Ortholog of  Ceres SEQ ID NO 13585156 as cited in SEQ ID NO 68122
atattcatcactttcgttgttaagacggaaaaaaaaaaaaaagaggcagaaccaaaaaactttagggttcgatttcgctccttggtaatcaccatgtccggagaagaagaagagaacgccgccgaactcaagatcggagatgagtttttgaaggcaaagtgcttaatgaactgtgaagtctctttgattcttgagcacaagtttgaacagcttcagcaaatctcagaggatcctatgaatcaagtttctcaagtgtttgagaagtccttgcaatatgtgaagcgattcagccgctacaagaatccagatgctgttagacaagttcgagaaatactaagcagacatcaactcactgagtttgagctatgtgttcttggcaatctctgtcctgaaactgttgaagaagcagtggcaatggttccttctcttaagacaaaaggaagagctcatgatgatgaagctattgagaagatgctcaatgatctctcacttgtcaagagattcgagtagtgcagaagattctcaagatctaagattctgaacatttagcaggatgctttacttgccttctagctgatctggagttaattcgccacgtctgaaattataaagctttaatgcctagaatttctggaatgataccttcatgttaaatgaatgtaatttacaacggatgatccaagcttttaatgaaatataccatctctttttc

SEQ ID NO: 88044 - protein, 169 aa, Arabidopsis thaliana
  peptide (1)..(169): Ceres Seq. ID no. 12705171
IFITFVVKTEKKKKEAEPKNFRVRFRSLVITMSGEEEENAAELKIGDEFLKAKCLMNCEVSLILEHKFEQLQQISEDPMNQVSQVFEKSLQYVKRFSRYKNPDAVRQVREILSRHQLTEFELCVLGNLCPETVEEAVAMVPSLKTKGRAHDDEAIEKMLNDLSLVKRFE

SEQ ID NO: 88045 - protein, 138 aa, Arabidopsis thaliana; identical to SEQ ID NO: 34933
  peptide (1)..(138): Ceres Seq. ID no. 12705172

SEQ ID NO: 88046 - protein, 114 aa, Arabidopsis thaliana; identical to SEQ ID NO: 34934
  peptide (1)..(114): Ceres Seq. ID no. 12705173

SEQ ID NO: 88047 - DNA, 2844 bp, Arabidopsis thaliana
  misc_feature (1)..(2844): Ceres Seq. ID no. 12705177
  misc_feature (1)..(2844): Ortholog of  Ceres SEQ ID NO 12586556 as cited in SEQ ID NO 64667
  misc_feature (1)..(2844): Ortholog of  Ceres SEQ ID NO 13660894 as cited in SEQ ID NO 67475
atgtcgtttctaaacagctgcgttggacatagaggagctgctagattcttccattcccgattatataagaataggttagataaagatgtctacttgtgcaacaacctcatcaatgcttatcttgaaacgggtgattcggtttctgcacgtaaggtgtttgacgaaatgcctcttaggaactgtgtttcttgggcgtgtattgtttcaggatatagtcgtaatggagaacataaggaagctttagtgtttttgagagatatggttaaagaagggattttttctaatcaatacgcttttgttagtgttcttcgggcttgtcaggagataggttctgttgggattcttttcgggagacaaattcatggcctgatgttcaaactttcttatgcagtggatgcagttgtttctaatgtgctcatatcaatgtactggaaatgtatcgggtctgtcggttatgctctctgtgctttcggtgacatagaagttaagaattctgtttcatggaattcgattatttcggtttattcacaggctggggatcagagatctgcgtttaggattttctctagcatgcaatatgatggttctagaccaactgaatacacttttggtagtcttgtaactactgcttgttctttgactgaaccagatgttcgtttgctcgagcagatcatgtgcaccatacagaaatcagggttgctcacagatctttttgttggcagcggactggtgagtgcatttgcaaagtctggttcattgagttatgctaggaaggtttttaatcagatggaaacaagaaatgcggtcaccttaaatggtctaatggttgaggaagttggtctgaaaaaaggcagagaggttcatggacatgtaataacaactggcttagttgacttcatggttggcattggaaatggccttgttaatatgtatgctaagtgcggctcaatagctgacgctagacgtgttttctatttcatgaccgataaagattctgtctcctggaactccatgatcactggtcttgaccaaaacggctgtttcatagaagcagttgaacgctacaaaagtatgagacgacatgacatcttgcctggaagtttcacactgattagttcgctaagctcatgcgcgagcttgaaatgggcaaaattaggacaacagattcatggagagagcctcaagttggggattgatttgaatgtttcagtttcaaatgcgcttatgacactgtatgcagagaccggctatctcaatgaatgccgtaagatattttcctcaatgccagagcatgatcaggtgtcttggaattctataataggagctttagcccgttcagaacggtcattacctgaagccgtggtatgtttcttgaatgcacaacgagcaggacagaaacttaatagaataaccttttcaagcgttctttcagccgtttcatccctttcatttggtgaactgggcaagcagatacacggactagctttaaagaacaatattgcagatgaagcaaccactgaaaatgcgcttatagcttgttatgggaagtgtggggagatggatgggtgtgagaagatattttctagaatggcagagagaagagataatgtaacttggaactcaatgatctcggggtatatacataacgagctccttgccaaggccttggatttggtctggtttatgttgcagacaggtcagagattggatagtttcatgtatgcgactgttcttagcgcgtttgcttctgttgcaacgctagagcgtggtatggaagtgcatgcttgttcggtgagagcttgtttagaatctgacgtggtagttgggagtgcacttgttgacatgtattccaaatgtggaagactagattatgctttgaggttttttaacacaatgcctgtaagaaattcatattcttggaactctatgatttcgggctatgcacgacatgggcaaggagaagaagctttgaagctttttgaaactatgaagctcgatggccaaacaccacctgaccatgttacattcgtgggagtcttgtcagcttgtagccatgcgggtctgcttgaagaagggtttaaacatttcgaatctatgagtgattcatatggcttagctcctaggattgaacacttctcatgtatggctgacgtgctaggccgtgcaggtgaactcgataagttggaagatttcatcgagaaaatgccaatgaagcctaatgttctcatctggaggactgtacttggggcttgttgcagagcaaatggtcgaaaagcagaattaggaaagaaagcagcagaaatgctttttcaattggagccagaaaacgctgtaaactatgtgctacttggtaacatgtatgctgctggaggaagatgggaagatttagtaaaggcgagaaagaaaatgaaagatgcagatgtgaaaaaggaagctggttatagttgggtcaccatgaaggatggagtccatatgtttgttgctggggataagtcacacccagacgctgatgtgatctacaagaagctcaaggagctcaacagaaagatgagagacgcaggttatgtgccacagacaggatttgccttgtatgatctagagcaagagaacaaggaagagattctgagctatcacagcgagaagctcgctgtagcttttgttctcgcagcccagaggagctctacgctgccaatcagaataatgaagaacctcagagtttgcggtgattgccactctgccttcaagtatatatcaaagatcgaagggagacagataattctaagggattcaaacaggtttcatcattttcaagacggtgcatgttcttgtagtgatttctggtga

SEQ ID NO: 88048 - protein, 947 aa, Arabidopsis thaliana
  peptide (1)..(947): Ceres Seq. ID no. 12705178
MSFLNSCVGHRGAARFFHSRLYKNRLDKDVYLCNNLINAYLETGDSVSARKVFDEMPLRNCVSWACIVSGYSRNGEHKEALVFLRDMVKEGIFSNQYAFVSVLRACQEIGSVGILFGRQIHGLMFKLSYAVDAVVSNVLISMYWKCIGSVGYALCAFGDIEVKNSVSWNSIISVYSQAGDQRSAFRIFSSMQYDGSRPTEYTFGSLVTTACSLTEPDVRLLEQIMCTIQKSGLLTDLFVGSGLVSAFAKSGSLSYARKVFNQMETRNAVTLNGLMVEEVGLKKGREVHGHVITTGLVDFMVGIGNGLVNMYAKCGSIADARRVFYFMTDKDSVSWNSMITGLDQNGCFIEAVERYKSMRRHDILPGSFTLISSLSSCASLKWAKLGQQIHGESLKLGIDLNVSVSNALMTLYAETGYLNECRKIFSSMPEHDQVSWNSIIGALARSERSLPEAVVCFLNAQRAGQKLNRITFSSVLSAVSSLSFGELGKQIHGLALKNNIADEATTENALIACYGKCGEMDGCEKIFSRMAERRDNVTWNSMISGYIHNELLAKALDLVWFMLQTGQRLDSFMYATVLSAFASVATLERGMEVHACSVRACLESDVVVGSALVDMYSKCGRLDYALRFFNTMPVRNSYSWNSMISGYARHGQGEEALKLFETMKLDGQTPPDHVTFVGVLSACSHAGLLEEGFKHFESMSDSYGLAPRIEHFSCMADVLGRAGELDKLEDFIEKMPMKPNVLIWRTVLGACCRANGRKAELGKKAAEMLFQLEPENAVNYVLLGNMYAAGGRWEDLVKARKKMKDADVKKEAGYSWVTMKDGVHMFVAGDKSHPDADVIYKKLKELNRKMRDAGYVPQTGFALYDLEQENKEEILSYHSEKLAVAFVLAAQRSSTLPIRIMKNLRVCGDCHSAFKYISKIEGRQIILRDSNRFHHFQDGACSCSDFW

SEQ ID NO: 88049 - protein, 892 aa, Arabidopsis thaliana
  peptide (1)..(892): Ceres Seq. ID no. 12705179
MPLRNCVSWACIVSGYSRNGEHKEALVFLRDMVKEGIFSNQYAFVSVLRACQEIGSVGILFGRQIHGLMFKLSYAVDAVVSNVLISMYWKCIGSVGYALCAFGDIEVKNSVSWNSIISVYSQAGDQRSAFRIFSSMQYDGSRPTEYTFGSLVTTACSLTEPDVRLLEQIMCTIQKSGLLTDLFVGSGLVSAFAKSGSLSYARKVFNQMETRNAVTLNGLMVEEVGLKKGREVHGHVITTGLVDFMVGIGNGLVNMYAKCGSIADARRVFYFMTDKDSVSWNSMITGLDQNGCFIEAVERYKSMRRHDILPGSFTLISSLSSCASLKWAKLGQQIHGESLKLGIDLNVSVSNALMTLYAETGYLNECRKIFSSMPEHDQVSWNSIIGALARSERSLPEAVVCFLNAQRAGQKLNRITFSSVLSAVSSLSFGELGKQIHGLALKNNIADEATTENALIACYGKCGEMDGCEKIFSRMAERRDNVTWNSMISGYIHNELLAKALDLVWFMLQTGQRLDSFMYATVLSAFASVATLERGMEVHACSVRACLESDVVVGSALVDMYSKCGRLDYALRFFNTMPVRNSYSWNSMISGYARHGQGEEALKLFETMKLDGQTPPDHVTFVGVLSACSHAGLLEEGFKHFESMSDSYGLAPRIEHFSCMADVLGRAGELDKLEDFIEKMPMKPNVLIWRTVLGACCRANGRKAELGKKAAEMLFQLEPENAVNYVLLGNMYAAGGRWEDLVKARKKMKDADVKKEAGYSWVTMKDGVHMFVAGDKSHPDADVIYKKLKELNRKMRDAGYVPQTGFALYDLEQENKEEILSYHSEKLAVAFVLAAQRSSTLPIRIMKNLRVCGDCHSAFKYISKIEGRQIILRDSNRFHHFQDGACSCSDFW

SEQ ID NO: 88050 - protein, 861 aa, Arabidopsis thaliana
  peptide (1)..(861): Ceres Seq. ID no. 12705180
MVKEGIFSNQYAFVSVLRACQEIGSVGILFGRQIHGLMFKLSYAVDAVVSNVLISMYWKCIGSVGYALCAFGDIEVKNSVSWNSIISVYSQAGDQRSAFRIFSSMQYDGSRPTEYTFGSLVTTACSLTEPDVRLLEQIMCTIQKSGLLTDLFVGSGLVSAFAKSGSLSYARKVFNQMETRNAVTLNGLMVEEVGLKKGREVHGHVITTGLVDFMVGIGNGLVNMYAKCGSIADARRVFYFMTDKDSVSWNSMITGLDQNGCFIEAVERYKSMRRHDILPGSFTLISSLSSCASLKWAKLGQQIHGESLKLGIDLNVSVSNALMTLYAETGYLNECRKIFSSMPEHDQVSWNSIIGALARSERSLPEAVVCFLNAQRAGQKLNRITFSSVLSAVSSLSFGELGKQIHGLALKNNIADEATTENALIACYGKCGEMDGCEKIFSRMAERRDNVTWNSMISGYIHNELLAKALDLVWFMLQTGQRLDSFMYATVLSAFASVATLERGMEVHACSVRACLESDVVVGSALVDMYSKCGRLDYALRFFNTMPVRNSYSWNSMISGYARHGQGEEALKLFETMKLDGQTPPDHVTFVGVLSACSHAGLLEEGFKHFESMSDSYGLAPRIEHFSCMADVLGRAGELDKLEDFIEKMPMKPNVLIWRTVLGACCRANGRKAELGKKAAEMLFQLEPENAVNYVLLGNMYAAGGRWEDLVKARKKMKDADVKKEAGYSWVTMKDGVHMFVAGDKSHPDADVIYKKLKELNRKMRDAGYVPQTGFALYDLEQENKEEILSYHSEKLAVAFVLAAQRSSTLPIRIMKNLRVCGDCHSAFKYISKIEGRQIILRDSNRFHHFQDGACSCSDFW

SEQ ID NO: 88051 - DNA, 2541 bp, Arabidopsis thaliana
  misc_feature (1)..(2541): Ceres Seq. ID no. 12705275
  misc_feature (1)..(2541): Ortholog of  Ceres SEQ ID NO 14302621 as cited in SEQ ID NO 0
atggctttaaaggcgaagaaaagcttaagcgcgatatttcgctttgcgatgagaaacgctgccaaaactgccgaagttgaagccaaagccgtagccggagattctctgatttcagacactggaccagtgtcaatgtctttaataccggattttctctcatcgcttaagtctccggaagattcttccaacattggtcaagattttggtgaaccggcacttgcgggtcaggtctcgtctgcgttagatgttaaatctattggatataatcttcttcgagaaagaaatggcgagaaagtttttccgaagaacgtattggaaaccttagatttactgtctaggaaaggttgttcgtcgcaaaagccaaagcaggcttcacgtggtaggatgctgacagaaaattaccagaacaaacagtctgagattatggagaagcttgccaagggatgtgttcggaagttgggaactgagactatgtttgaggtgttgactaaaatggggaaagaagcgggtgagaaagaatacaatgcaatgactaaactttgcatacaacgtgcgaggagaagcaatgatgcagaatatgctcttgatcaaattgggaaggctattgaacatctcaaagaaatgagacagcttggattctctattggagaaggagcttatggccctttttttaagtacttagttgatatggaaatggtagcggagttccaaattctcaaggattttattaaggaggcatgtcctgagtcttgtgggagacttgtctactatgaaatgcttctttggatccaagtcaacgacgaagagaagatccacaaactttgcaataaagttgatgatagtgggctaagtttatcaatcctacaagaatattatttggttgcactgtgcgagaaagacagtaaggaaaattttcagaagctgttagaaattgtcgacataacaacagtatcttcaccagacgcattgaagagcatatttggataccttggaaaatcgctgttggagtctgttgcaatgaagctactttgggaactaagagactgtcgtaaagatggagtggagacagtttcaaatctcatattcagctatgcaacctgcatcccaaattcaacggtagaggatgccattttcaagtttaacaagttgcatgaagaactagatatcgtgccttcatctacatcttatgagaatcttgtcagttatctttgtggctcaaatgaggtggtcactgctcttgatatagttgaaaatatgtgtgaagcaggtctggtaatatcagcaaacatcctgcactcattgttacaggccattgagcagattcttgagtttaatttggtgcaaagaatctattcaataatgagcaacaagagtgtgaagccaaatagtgagactttcaggaaatctataaatttgtgcataagaatcaaagatactctagcaatgaagtatgaatatgctgtttctcacagaactttttgttatccaaccataacaatttgctatcaacctattggttccgtgcagtttgaaggtgcatataacatgcttggtaatttaaagaatttcaatttggcaccgaactctagcatgtacaattctataatggcaggatatttccgggagaaaaaagtgaacagtgccttaaaggtcctcaaggaaatgaaagaagctgatgttaaacctgattcggtgacttttagctatctaataaactattgtggcgaggaggcgactattgcgaagtattataaggagatgaagcaagcaggagttgaagttaataagcacgtttacatgtcccttgttaaagcatatgcatcatgcggacagtttgaaaaggcaaaacaggtgctcatggacctggaagttccggctaaggatcacaatgagctgaaaagtgtacttatatctgctctggcatcaaatggaaatataacagaggctttaagtatttatgaagaaatgaagaaactccgctgccccgtagagccaaaagctatcttatctcttatagagaactctgattcaaacgcagagctgggaacgttggttgaactcactcatgagctgcgtgattctaaattttggatagatggtttcttcaaaattatcgtgtttgctgttcgcaacaatagatcaagctctattctggatttgttagagcagaccaaaaaccacttgtccaaggatgacgtcggtgtggaatattggtttgaagaggtgtttaagtcaatagcggaaacagagtctagtgatgtgaaggtagggctggacttggtgagttttatgaaagaagagcttgagttatgtccttcaagaaaatgtctggattttcttctacatgcttgtgtcaatgccaaagataagcagagcgctctactggtatgggaagagtaccaatgtgcagaacttccttacaatgtcatcaactatttaaggcaagagctcttttatctcctacatttaaaagatgtatcaggttctagtagctgcaggagattcgaaaagtgcagaggcaatagtatcaaagattcctaa

SEQ ID NO: 88052 - protein, 846 aa, Arabidopsis thaliana
  peptide (1)..(846): Ceres Seq. ID no. 12705276
MALKAKKSLSAIFRFAMRNAAKTAEVEAKAVAGDSLISDTGPVSMSLIPDFLSSLKSPEDSSNIGQDFGEPALAGQVSSALDVKSIGYNLLRERNGEKVFPKNVLETLDLLSRKGCSSQKPKQASRGRMLTENYQNKQSEIMEKLAKGCVRKLGTETMFEVLTKMGKEAGEKEYNAMTKLCIQRARRSNDAEYALDQIGKAIEHLKEMRQLGFSIGEGAYGPFFKYLVDMEMVAEFQILKDFIKEACPESCGRLVYYEMLLWIQVNDEEKIHKLCNKVDDSGLSLSILQEYYLVALCEKDSKENFQKLLEIVDITTVSSPDALKSIFGYLGKSLLESVAMKLLWELRDCRKDGVETVSNLIFSYATCIPNSTVEDAIFKFNKLHEELDIVPSSTSYENLVSYLCGSNEVVTALDIVENMCEAGLVISANILHSLLQAIEQILEFNLVQRIYSIMSNKSVKPNSETFRKSINLCIRIKDTLAMKYEYAVSHRTFCYPTITICYQPIGSVQFEGAYNMLGNLKNFNLAPNSSMYNSIMAGYFREKKVNSALKVLKEMKEADVKPDSVTFSYLINYCGEEATIAKYYKEMKQAGVEVNKHVYMSLVKAYASCGQFEKAKQVLMDLEVPAKDHNELKSVLISALASNGNITEALSIYEEMKKLRCPVEPKAILSLIENSDSNAELGTLVELTHELRDSKFWIDGFFKIIVFAVRNNRSSSILDLLEQTKNHLSKDDVGVEYWFEEVFKSIAETESSDVKVGLDLVSFMKEELELCPSRKCLDFLLHACVNAKDKQSALLVWEEYQCAELPYNVINYLRQELFYLLHLKDVSGSSSCRRFEKCRGNSIKDS

SEQ ID NO: 88053 - protein, 830 aa, Arabidopsis thaliana
  peptide (1)..(830): Ceres Seq. ID no. 12705277
MRNAAKTAEVEAKAVAGDSLISDTGPVSMSLIPDFLSSLKSPEDSSNIGQDFGEPALAGQVSSALDVKSIGYNLLRERNGEKVFPKNVLETLDLLSRKGCSSQKPKQASRGRMLTENYQNKQSEIMEKLAKGCVRKLGTETMFEVLTKMGKEAGEKEYNAMTKLCIQRARRSNDAEYALDQIGKAIEHLKEMRQLGFSIGEGAYGPFFKYLVDMEMVAEFQILKDFIKEACPESCGRLVYYEMLLWIQVNDEEKIHKLCNKVDDSGLSLSILQEYYLVALCEKDSKENFQKLLEIVDITTVSSPDALKSIFGYLGKSLLESVAMKLLWELRDCRKDGVETVSNLIFSYATCIPNSTVEDAIFKFNKLHEELDIVPSSTSYENLVSYLCGSNEVVTALDIVENMCEAGLVISANILHSLLQAIEQILEFNLVQRIYSIMSNKSVKPNSETFRKSINLCIRIKDTLAMKYEYAVSHRTFCYPTITICYQPIGSVQFEGAYNMLGNLKNFNLAPNSSMYNSIMAGYFREKKVNSALKVLKEMKEADVKPDSVTFSYLINYCGEEATIAKYYKEMKQAGVEVNKHVYMSLVKAYASCGQFEKAKQVLMDLEVPAKDHNELKSVLISALASNGNITEALSIYEEMKKLRCPVEPKAILSLIENSDSNAELGTLVELTHELRDSKFWIDGFFKIIVFAVRNNRSSSILDLLEQTKNHLSKDDVGVEYWFEEVFKSIAETESSDVKVGLDLVSFMKEELELCPSRKCLDFLLHACVNAKDKQSALLVWEEYQCAELPYNVINYLRQELFYLLHLKDVSGSSSCRRFEKCRGNSIKDS

SEQ ID NO: 88054 - protein, 802 aa, Arabidopsis thaliana
  peptide (1)..(802): Ceres Seq. ID no. 12705278
MSLIPDFLSSLKSPEDSSNIGQDFGEPALAGQVSSALDVKSIGYNLLRERNGEKVFPKNVLETLDLLSRKGCSSQKPKQASRGRMLTENYQNKQSEIMEKLAKGCVRKLGTETMFEVLTKMGKEAGEKEYNAMTKLCIQRARRSNDAEYALDQIGKAIEHLKEMRQLGFSIGEGAYGPFFKYLVDMEMVAEFQILKDFIKEACPESCGRLVYYEMLLWIQVNDEEKIHKLCNKVDDSGLSLSILQEYYLVALCEKDSKENFQKLLEIVDITTVSSPDALKSIFGYLGKSLLESVAMKLLWELRDCRKDGVETVSNLIFSYATCIPNSTVEDAIFKFNKLHEELDIVPSSTSYENLVSYLCGSNEVVTALDIVENMCEAGLVISANILHSLLQAIEQILEFNLVQRIYSIMSNKSVKPNSETFRKSINLCIRIKDTLAMKYEYAVSHRTFCYPTITICYQPIGSVQFEGAYNMLGNLKNFNLAPNSSMYNSIMAGYFREKKVNSALKVLKEMKEADVKPDSVTFSYLINYCGEEATIAKYYKEMKQAGVEVNKHVYMSLVKAYASCGQFEKAKQVLMDLEVPAKDHNELKSVLISALASNGNITEALSIYEEMKKLRCPVEPKAILSLIENSDSNAELGTLVELTHELRDSKFWIDGFFKIIVFAVRNNRSSSILDLLEQTKNHLSKDDVGVEYWFEEVFKSIAETESSDVKVGLDLVSFMKEELELCPSRKCLDFLLHACVNAKDKQSALLVWEEYQCAELPYNVINYLRQELFYLLHLKDVSGSSSCRRFEKCRGNSIKDS

SEQ ID NO: 88055 - DNA, 966 bp, Arabidopsis thaliana
  misc_feature (1)..(966): Ceres Seq. ID no. 12705318
  misc_feature (1)..(966): Ortholog of  Ceres SEQ ID NO 13599324 as cited in SEQ ID NO 0
atgtatacgagtatatttttcatcttttcctttctttctgtgtcagaagcgcttgtgagaatcccgttgcagatagatcatgccttgtcaacaaacaatgatggagttcagttgaagaacgtaaaggactttctgtactatgggaagatccaaattggcaatccaggccaaactttcactgttctgtttgataccggaagaacaaaggcagagctcaagtatggaaagggttccctcacgggtttcctaagtgttgacaccgttacggttggtgggattagcatcacgtcacagaccttcatagagggcgttaagactccttacaaagagtttttcaagaaaatgccgtttgatggtatattgggactcaggttcacggacccgctcaatttcggtacatctgtttggcactctatggttttccaaggcaaaattgcaaaaaatgtgttctctatctggcttagacggttttctaactctggagaaatcaacggtggagaggtagtatttggaggaatcatcccagcgcatttctccggtgaccatacatacgttgacgtggaagggccaggaaacttcttcgcaatgtccaacatttgggtcggaggaaaaaacaccaacatttgctccagtggctgcaaagctattgttgactccggaagttcaaatattaatgttccaatggattccgctgacgagatccataggtatatcggagtagaaccaaactgcaataattttgagacgctgcctgatgtcacctttacgatcggcggaaaggccttcgtcctcacaccacttgattatatacgtcgttcgcggagtcaatgcacgagtaaattcgtgggaaaaacaaatcgtagccactggacattgggcatcccattcatgcgagtctttcacactgtttttgattaccagaacacacttgcagtgaaagttgggttcgctaagtcgactgattag

SEQ ID NO: 88056 - protein, 321 aa, Arabidopsis thaliana
  peptide (1)..(321): Ceres Seq. ID no. 12705319
MYTSIFFIFSFLSVSEALVRIPLQIDHALSTNNDGVQLKNVKDFLYYGKIQIGNPGQTFTVLFDTGRTKAELKYGKGSLTGFLSVDTVTVGGISITSQTFIEGVKTPYKEFFKKMPFDGILGLRFTDPLNFGTSVWHSMVFQGKIAKNVFSIWLRRFSNSGEINGGEVVFGGIIPAHFSGDHTYVDVEGPGNFFAMSNIWVGGKNTNICSSGCKAIVDSGSSNINVPMDSADEIHRYIGVEPNCNNFETLPDVTFTIGGKAFVLTPLDYIRRSRSQCTSKFVGKTNRSHWTLGIPFMRVFHTVFDYQNTLAVKVGFAKSTD

SEQ ID NO: 88057 - protein, 207 aa, Arabidopsis thaliana
  peptide (1)..(207): Ceres Seq. ID no. 12705320
MPFDGILGLRFTDPLNFGTSVWHSMVFQGKIAKNVFSIWLRRFSNSGEINGGEVVFGGIIPAHFSGDHTYVDVEGPGNFFAMSNIWVGGKNTNICSSGCKAIVDSGSSNINVPMDSADEIHRYIGVEPNCNNFETLPDVTFTIGGKAFVLTPLDYIRRSRSQCTSKFVGKTNRSHWTLGIPFMRVFHTVFDYQNTLAVKVGFAKSTD

SEQ ID NO: 88058 - protein, 183 aa, Arabidopsis thaliana
  peptide (1)..(183): Ceres Seq. ID no. 12705321
MVFQGKIAKNVFSIWLRRFSNSGEINGGEVVFGGIIPAHFSGDHTYVDVEGPGNFFAMSNIWVGGKNTNICSSGCKAIVDSGSSNINVPMDSADEIHRYIGVEPNCNNFETLPDVTFTIGGKAFVLTPLDYIRRSRSQCTSKFVGKTNRSHWTLGIPFMRVFHTVFDYQNTLAVKVGFAKSTD

SEQ ID NO: 88059 - DNA, 2496 bp, Arabidopsis thaliana
  misc_feature (1)..(2496): Ceres Seq. ID no. 12705334
  misc_feature (1)..(2496): Ortholog of  Ceres SEQ ID NO 15169142 as cited in SEQ ID NO 58748
atggcgacacttcaggatattggtgtatcagctgggataaacattctcagtgcctttgttttcttcataatctttgcggttttgaggcttcagcctttcaatgatagagtttacttctcaaaatggtatctcaaggggttaagaagcagccctgctcgtggtggcgcctttgcgcagaggtttgtgaacctggacttcaggtcttatatgaagttcttgaattggatgccagaggctctgaagatgcctgagcctgagcttattgatcatgctggtttggattcagttgtttatctccggatttactggctggggcttaagatctttactccaatagcagtgcttgcttgggcagttcttgtgccagtcaactggactaataacacattggagatggctaagcagttaaggaatgtaacttcgagcgacattgacaaactctctgtttcaaatattccagagtattcaatgaggttttggactcatatagtaatggcttatgcctttaccatctggacttgttatgtgctgatgaaagaatatgagacaattgctaacatgaggctccagtttgttgcatcagaagctcgtcgacctgaccagttcactgtccttgttaggaatgtacctccggacgcagatgaatctgtaagtgaactggtagagcattttttcctggtcaatcatcctgatcactacctaacacatcaggttgtatgcaatgcaaacaagctggccgatttggtgaaaaagaagaaaaagctgcagaattggcttgattactaccagctcaaatacgctaggaataactctcagagaattatggtgaagcttggctttcttgggctatggggacaaaaagtcgatgccattgaacattacattgctgaaattgacaaaatatcaaaagagatcagtaaagaaagagaggaagtggtgaatgatcctaaggccattatgccagcagcgtttgtctcctttaaaacacgatgggctgctgcggtttgtgctcagactcaacagacccgaaacccaacccaatggctgaccgaatgggctccagaaccgcgtgatgtgttttggtcaaatcttgctattccatatgtttctctgacagtaaggaggttgatcatgcatgttgccttcttcttcctaaccttcttcttcattgtccccatcgcgtttgttcaatctcttgctaccattgaagggattgtgaaagctgctccgttcttgaagtttattgtagatgataaattcatgaaatcggtgatacaaggtttccttccgggtattgcactgaagcttttcctcgcctttctgccatccattttgatgatcatgtccaaatttgaaggcttcacatcgatctcatctttagagagacgagcagcgtttcgatattacatcttcaacttagtgaacgtctttcttgctagcgttatcgctggagctgcgtttgaacagcttaactctttcctcaatcaatccgcaaaccaaatccccaaaaccattggtgtggcgataccgatgaaagcaactttcttcatcacgtatataatggttgatggttgggcaggagttgcaggagagattctaatgctgaaaccattgattatgttccatctcaaaaacgccttcttggttaagactgataaagacagagaggaagcaatggacccgggaagcattggttttaacacgggtgagcctcggatacagctctactttcttctcggtcttgtctacgctcctgtgacaccgatgcttcttccttttatcttggtcttcttcgcccttgcttacattgtatatcgccaccaaatcattaacgtatacaatcaagaatacgagagtgctgcagcgttttggccagacgttcatggacgagtcatagcagcattggtaatatcacagttgcttctgatgggtctattgggaacaaagcacgctgcattagctgcaccgtttctcattgctttgcctgtgcttaccattggtttccaccacttctgcaaaggtcgttatgagccagctttcatcagataccctttacaggaagctatgatgaaagatacattagaaaccgcaagagaaccaaacctgaaccttaaaggctacttgcaaaatgcttacgttcatccggttttcaaaggcgatgaagacgattatgacattgatgacaagctcgggaagtttgaggatgaagccattattgttcccaccaaacgtcagtcgaggagaaatactccggctcctagcataatcagtggggacgattcgccgtctttgccctttagtgaagtggaagctgtgttgaagccaatggaccaatgcggccggaaggatatatttttgggaggatgcggcagcaacggaagcaaaacatgcataaacgactttgttaagaaaggaggtgtagccgctaagcctagtagttgcgagtgtgatgactttggggaagaacatttatgtagatgttatgttccttgctag

SEQ ID NO: 88060 - protein, 831 aa, Arabidopsis thaliana
  peptide (1)..(831): Ceres Seq. ID no. 12705335
MATLQDIGVSAGINILSAFVFFIIFAVLRLQPFNDRVYFSKWYLKGLRSSPARGGAFAQRFVNLDFRSYMKFLNWMPEALKMPEPELIDHAGLDSVVYLRIYWLGLKIFTPIAVLAWAVLVPVNWTNNTLEMAKQLRNVTSSDIDKLSVSNIPEYSMRFWTHIVMAYAFTIWTCYVLMKEYETIANMRLQFVASEARRPDQFTVLVRNVPPDADESVSELVEHFFLVNHPDHYLTHQVVCNANKLADLVKKKKKLQNWLDYYQLKYARNNSQRIMVKLGFLGLWGQKVDAIEHYIAEIDKISKEISKEREEVVNDPKAIMPAAFVSFKTRWAAAVCAQTQQTRNPTQWLTEWAPEPRDVFWSNLAIPYVSLTVRRLIMHVAFFFLTFFFIVPIAFVQSLATIEGIVKAAPFLKFIVDDKFMKSVIQGFLPGIALKLFLAFLPSILMIMSKFEGFTSISSLERRAAFRYYIFNLVNVFLASVIAGAAFEQLNSFLNQSANQIPKTIGVAIPMKATFFITYIMVDGWAGVAGEILMLKPLIMFHLKNAFLVKTDKDREEAMDPGSIGFNTGEPRIQLYFLLGLVYAPVTPMLLPFILVFFALAYIVYRHQIINVYNQEYESAAAFWPDVHGRVIAALVISQLLLMGLLGTKHAALAAPFLIALPVLTIGFHHFCKGRYEPAFIRYPLQEAMMKDTLETAREPNLNLKGYLQNAYVHPVFKGDEDDYDIDDKLGKFEDEAIIVPTKRQSRRNTPAPSIISGDDSPSLPFSEVEAVLKPMDQCGRKDIFLGGCGSNGSKTCINDFVKKGGVAAKPSSCECDDFGEEHLCRCYVPC

SEQ ID NO: 88061 - protein, 762 aa, Arabidopsis thaliana
  peptide (1)..(762): Ceres Seq. ID no. 12705336
MKFLNWMPEALKMPEPELIDHAGLDSVVYLRIYWLGLKIFTPIAVLAWAVLVPVNWTNNTLEMAKQLRNVTSSDIDKLSVSNIPEYSMRFWTHIVMAYAFTIWTCYVLMKEYETIANMRLQFVASEARRPDQFTVLVRNVPPDADESVSELVEHFFLVNHPDHYLTHQVVCNANKLADLVKKKKKLQNWLDYYQLKYARNNSQRIMVKLGFLGLWGQKVDAIEHYIAEIDKISKEISKEREEVVNDPKAIMPAAFVSFKTRWAAAVCAQTQQTRNPTQWLTEWAPEPRDVFWSNLAIPYVSLTVRRLIMHVAFFFLTFFFIVPIAFVQSLATIEGIVKAAPFLKFIVDDKFMKSVIQGFLPGIALKLFLAFLPSILMIMSKFEGFTSISSLERRAAFRYYIFNLVNVFLASVIAGAAFEQLNSFLNQSANQIPKTIGVAIPMKATFFITYIMVDGWAGVAGEILMLKPLIMFHLKNAFLVKTDKDREEAMDPGSIGFNTGEPRIQLYFLLGLVYAPVTPMLLPFILVFFALAYIVYRHQIINVYNQEYESAAAFWPDVHGRVIAALVISQLLLMGLLGTKHAALAAPFLIALPVLTIGFHHFCKGRYEPAFIRYPLQEAMMKDTLETAREPNLNLKGYLQNAYVHPVFKGDEDDYDIDDKLGKFEDEAIIVPTKRQSRRNTPAPSIISGDDSPSLPFSEVEAVLKPMDQCGRKDIFLGGCGSNGSKTCINDFVKKGGVAAKPSSCECDDFGEEHLCRCYVPC

SEQ ID NO: 88062 - protein, 756 aa, Arabidopsis thaliana
  peptide (1)..(756): Ceres Seq. ID no. 12705337
MPEALKMPEPELIDHAGLDSVVYLRIYWLGLKIFTPIAVLAWAVLVPVNWTNNTLEMAKQLRNVTSSDIDKLSVSNIPEYSMRFWTHIVMAYAFTIWTCYVLMKEYETIANMRLQFVASEARRPDQFTVLVRNVPPDADESVSELVEHFFLVNHPDHYLTHQVVCNANKLADLVKKKKKLQNWLDYYQLKYARNNSQRIMVKLGFLGLWGQKVDAIEHYIAEIDKISKEISKEREEVVNDPKAIMPAAFVSFKTRWAAAVCAQTQQTRNPTQWLTEWAPEPRDVFWSNLAIPYVSLTVRRLIMHVAFFFLTFFFIVPIAFVQSLATIEGIVKAAPFLKFIVDDKFMKSVIQGFLPGIALKLFLAFLPSILMIMSKFEGFTSISSLERRAAFRYYIFNLVNVFLASVIAGAAFEQLNSFLNQSANQIPKTIGVAIPMKATFFITYIMVDGWAGVAGEILMLKPLIMFHLKNAFLVKTDKDREEAMDPGSIGFNTGEPRIQLYFLLGLVYAPVTPMLLPFILVFFALAYIVYRHQIINVYNQEYESAAAFWPDVHGRVIAALVISQLLLMGLLGTKHAALAAPFLIALPVLTIGFHHFCKGRYEPAFIRYPLQEAMMKDTLETAREPNLNLKGYLQNAYVHPVFKGDEDDYDIDDKLGKFEDEAIIVPTKRQSRRNTPAPSIISGDDSPSLPFSEVEAVLKPMDQCGRKDIFLGGCGSNGSKTCINDFVKKGGVAAKPSSCECDDFGEEHLCRCYVPC

SEQ ID NO: 88063 - DNA, 768 bp, Arabidopsis thaliana
  misc_feature (1)..(768): Ceres Seq. ID no. 12705464
  misc_feature (1)..(768): Ortholog of  Ceres SEQ ID NO 12567026 as cited in SEQ ID NO 1198
atggaaagatcttcgagttatggggttgaaaaacttcaaaaaagatgttaccatgagtggatgagtttacaaactaaacacatagatgatctcaaagaagcactcatgtgtcaacgaaacaacgatgacaaactcgaagacctcgttggtaaaatcgtcaatgactaccacacatatgcgggaaaacgatcagagctctcgtaccgatgctgcgctcactactttgcaccgtcgtggaacactcctatagagaacagtatgctatggatgggaggatgtcgtccttcttctttcattagacttatatacgcactttgtggatcccaggccgaaactcagctttctcaatatcttcttaagatcgatgacgacttcgatataaaccatggtggtttcatgagtgatcttaccgcgacacagcttggaaaactcaatgacttgcatttggaggtaataaagaaagaagacaagattacgaagacatctgcgaattttcaagacgatgtggcggatttgccaatcgcggatgtggtgcatgctgatgtagcggtggaggatgctttggataagcatgaagagggaatggcggttttactggcggaggctgataaactgaggtttgagacgcttaggaagattgtggacgttgtcacaccgcttcaagcggtggagtttttgcttgccggaaaaagattacagctgtcgttgcacgaccggggaagagttagagcagatgtttgtggaggagtggggggcgccgctgtctga

SEQ ID NO: 88064 - protein, 255 aa, Arabidopsis thaliana
  peptide (1)..(255): Ceres Seq. ID no. 12705465
MERSSSYGVEKLQKRCYHEWMSLQTKHIDDLKEALMCQRNNDDKLEDLVGKIVNDYHTYAGKRSELSYRCCAHYFAPSWNTPIENSMLWMGGCRPSSFIRLIYALCGSQAETQLSQYLLKIDDDFDINHGGFMSDLTATQLGKLNDLHLEVIKKEDKITKTSANFQDDVADLPIADVVHADVAVEDALDKHEEGMAVLLAEADKLRFETLRKIVDVVTPLQAVEFLLAGKRLQLSLHDRGRVRADVCGGVGGAAV

SEQ ID NO: 88065 - protein, 235 aa, Arabidopsis thaliana
  peptide (1)..(235): Ceres Seq. ID no. 12705466
MSLQTKHIDDLKEALMCQRNNDDKLEDLVGKIVNDYHTYAGKRSELSYRCCAHYFAPSWNTPIENSMLWMGGCRPSSFIRLIYALCGSQAETQLSQYLLKIDDDFDINHGGFMSDLTATQLGKLNDLHLEVIKKEDKITKTSANFQDDVADLPIADVVHADVAVEDALDKHEEGMAVLLAEADKLRFETLRKIVDVVTPLQAVEFLLAGKRLQLSLHDRGRVRADVCGGVGGAAV

SEQ ID NO: 88066 - protein, 220 aa, Arabidopsis thaliana
  peptide (1)..(220): Ceres Seq. ID no. 12705467
MCQRNNDDKLEDLVGKIVNDYHTYAGKRSELSYRCCAHYFAPSWNTPIENSMLWMGGCRPSSFIRLIYALCGSQAETQLSQYLLKIDDDFDINHGGFMSDLTATQLGKLNDLHLEVIKKEDKITKTSANFQDDVADLPIADVVHADVAVEDALDKHEEGMAVLLAEADKLRFETLRKIVDVVTPLQAVEFLLAGKRLQLSLHDRGRVRADVCGGVGGAAV

SEQ ID NO: 88067 - DNA, 849 bp, Arabidopsis thaliana
  misc_feature (1)..(849): Ceres Seq. ID no. 12705468
  misc_feature (1)..(849): Ortholog of  Ceres SEQ ID NO 12567026 as cited in SEQ ID NO 1198
atggcgactagttcttcgagttatgggattgaacaacttcaaaaaggatgttactatgagtggatgagtgtgcaggctaaacacatagttgatctcaaagaagcactcatgagtcatcgatccaaagaagatcacaagcttgaagaactcgttggtaaaatcgtcaatgacttccaaaaatacaccgaaaaacgatctgagctctctcgccgaagctgctcaagctactttgcaccgtcgtggaactctcctctagagaacggtttactatggatgggaggatgtcgtccatcgtctttcattagagttatttactctctttgtggatcccaagccgaaacgcagctttctcagtatcttctaaagatcgatgaaaatgtcgaagtaaaccatggtggttccatgagtgatctaaacgcgtcgcagcttgcaaaaatcaatgatttgcatataaaggttatagagaaagaggacaagataacaaagaaatcggcgaatttgcaagagaatgttgcggatatgcctatagccatcgcggcttatgccacggacttgatgaatggtgacgtggtggtggaagatgctttagataagtatgaggagggcatggcggttttaatggtggaagctgataaactgaggtttgagacgcttaggaagatcgtggatgttgttacgccggttcaagcggcggagtttttgctcgcagggaaaagattacacatatcattgcacgagtggggaagagttagagaagagcaacgttttgggtgtgtacgtacggatgcagcggctgccacgggaggagcgggaaccgagaagtcaaagaggtcaagcttgttgatgtga

SEQ ID NO: 88068 - protein, 282 aa, Arabidopsis thaliana
  peptide (1)..(282): Ceres Seq. ID no. 12705469
MATSSSSYGIEQLQKGCYYEWMSVQAKHIVDLKEALMSHRSKEDHKLEELVGKIVNDFQKYTEKRSELSRRSCSSYFAPSWNSPLENGLLWMGGCRPSSFIRVIYSLCGSQAETQLSQYLLKIDENVEVNHGGSMSDLNASQLAKINDLHIKVIEKEDKITKKSANLQENVADMPIAIAAYATDLMNGDVVVEDALDKYEEGMAVLMVEADKLRFETLRKIVDVVTPVQAAEFLLAGKRLHISLHEWGRVREEQRFGCVRTDAAAATGGAGTEKSKRSSLLM

SEQ ID NO: 88069 - protein, 261 aa, Arabidopsis thaliana
  peptide (1)..(261): Ceres Seq. ID no. 12705470
MSVQAKHIVDLKEALMSHRSKEDHKLEELVGKIVNDFQKYTEKRSELSRRSCSSYFAPSWNSPLENGLLWMGGCRPSSFIRVIYSLCGSQAETQLSQYLLKIDENVEVNHGGSMSDLNASQLAKINDLHIKVIEKEDKITKKSANLQENVADMPIAIAAYATDLMNGDVVVEDALDKYEEGMAVLMVEADKLRFETLRKIVDVVTPVQAAEFLLAGKRLHISLHEWGRVREEQRFGCVRTDAAAATGGAGTEKSKRSSLLM

SEQ ID NO: 88070 - protein, 246 aa, Arabidopsis thaliana
  peptide (1)..(246): Ceres Seq. ID no. 12705471
MSHRSKEDHKLEELVGKIVNDFQKYTEKRSELSRRSCSSYFAPSWNSPLENGLLWMGGCRPSSFIRVIYSLCGSQAETQLSQYLLKIDENVEVNHGGSMSDLNASQLAKINDLHIKVIEKEDKITKKSANLQENVADMPIAIAAYATDLMNGDVVVEDALDKYEEGMAVLMVEADKLRFETLRKIVDVVTPVQAAEFLLAGKRLHISLHEWGRVREEQRFGCVRTDAAAATGGAGTEKSKRSSLLM

SEQ ID NO: 88071 - DNA, 1169 bp, Arabidopsis thaliana
  misc_feature (1)..(1169): Ceres Seq. ID no. 12705521
  misc_feature (1)..(1169): Ortholog of  Ceres SEQ ID NO 13594193 as cited in SEQ ID NO 58558
  misc_feature (1)..(1169): Ortholog of  Ceres SEQ ID NO 15177545 as cited in SEQ ID NO 0
attctcacaagtcataaacagtcgtttatagttcaatccttttcctcttctttgtttctaaaaagagaaaagtcacttatggcggatatctcgggaaacggctatggcaacgccagagaagaagtagtaatggtgaatctcaaggatgaagtcgaacatcaacaagaaatggaagacattcataacccaagacccttgaagaaacaagactctctactctcagtctctgtccctttcttacaaaagttgatcgcggagtttcttggaacctactttttggtattcaccggttgtgcatcggtggttgtaaacatgcaaaacgacaatgtcgtgactcttccagggatcgctatcgtttggggactcaccattatggtcctcatttactctcttggtcacatctctggtgctcatatcaatccggccgttaccattgccttcgcctcttgtggccgtttccctctcaaacaggttccagcttatgtcatatcacaagtgataggatcaacgctcgcggctgcgacattacggttgttgttcggacttgatcacgacgtttgtagcggaaaacacgatgtgtttatcggatcatcaccagtgggatcagatcttcaggcgtttacgatggagtttatcgtcactttctatctaatgttcatcatttctggcgttgctaccgataatagagcgatcggagaacttgctggattagcaataggatcaacggtgctacttaacgtgctaattgccgcaccggtatcgagtgcgtcgatgaatccaggaagaagtttaggacctgcactggtctatggttgctacaaaggaatttggatatacttagttgcgccaactcttggtgcgattgcgggtgcatgggtttataacacagttagatataccgataaaccattgcgagaaatcactaaaagtggttcatttctaaagaccgtgagaatcggtagcacttgataagagaaaagaaaacatgggtggagttgatggagtattttcaaatgaatgtaacaactttcaccacaccttacgtatatggcctttgtattaattgctacgtttatctcttttattgttaacgccaagattctctatcttgttattaatgtgtaactgtatcgtatattttttaaataataaaattcaattctagaaag

SEQ ID NO: 88072 - protein, 322 aa, Arabidopsis thaliana; identical to SEQ ID NO: 39775
  peptide (1)..(322): Ceres Seq. ID no. 12705522

SEQ ID NO: 88073 - protein, 296 aa, Arabidopsis thaliana; identical to SEQ ID NO: 39776
  peptide (1)..(296): Ceres Seq. ID no. 12705523

SEQ ID NO: 88074 - protein, 279 aa, Arabidopsis thaliana; identical to SEQ ID NO: 39777
  peptide (1)..(279): Ceres Seq. ID no. 12705524

SEQ ID NO: 88075 - DNA, 492 bp, Arabidopsis thaliana
  misc_feature (1)..(492): Ceres Seq. ID no. 12705546
  misc_feature (1)..(492): Ortholog of  Ceres SEQ ID NO 15168904 as cited in SEQ ID NO 20611
atggcagaaacgaagaagatgatcatcctcaagagctccgacggtgaatccttcgaggtcgaggaagccgtcgcggtcgagtcccagacgattaagcacatgatcgaggacgactgcgtcgataacggaattccacttcccaatgtcaccggagccatcctcgcgaaggttatcgagtactgcaagaaacacgttgaagccgctgctgaggctggtggagacaaggatttctatggttccaccgagaaccacgagctcaagacttgggacaacgatttcgtcaaagttgatcatcctactctcttcgatctccttcgggctgccaactatttgaacatcagtggacttcttgaccttacgtgcaaggccgtggctgatcagatgagaggcaaaactccagcgcagatgcgtgaacacttcaacatcaagaacgactacacacctgaggaagaggccgaggttcgcaatgagaacaggtgggcgttcgagtga

SEQ ID NO: 88076 - protein, 163 aa, Arabidopsis thaliana; identical to SEQ ID NO: 77599
  peptide (1)..(163): Ceres Seq. ID no. 12705547

SEQ ID NO: 88077 - protein, 157 aa, Arabidopsis thaliana; identical to SEQ ID NO: 77600
  peptide (1)..(157): Ceres Seq. ID no. 12705548

SEQ ID NO: 88078 - protein, 130 aa, Arabidopsis thaliana
  peptide (1)..(130): Ceres Seq. ID no. 12705549
MIEDDCVDNGIPLPNVTGAILAKVIEYCKKHVEAAAEAGGDKDFYGSTENHELKTWDNDFVKVDHPTLFDLLRAANYLNISGLLDLTCKAVADQMRGKTPAQMREHFNIKNDYTPEEEAEVRNENRWAFE

SEQ ID NO: 88079 - DNA, 1806 bp, Arabidopsis thaliana
  misc_feature (1)..(1806): Ceres Seq. ID no. 12705564
  misc_feature (1)..(1806): Ortholog of  Ceres SEQ ID NO 13595900 as cited in SEQ ID NO 69289
atggatgagaacgacagtggtggtcaagcagctccagtgcctgatgatgaaggaaacgctcctccacttcctgaaaaggttcaggttggtaattcacccatgtacaagttagatagaaagctaggcaaaggtggttttggacaagtttatgttggtcgaaagatgggcacgagtacttctaatgctagatttggcccgggagctttggaggtggctttgaagtttgagcatagaaccagcaaaggatgtaactatgggccaccgtatgagtggcaagtttacaatgcacttggtggcagtcatggtgtgccacgagttcattttaagggtcggcagggcgatttttacgtgatggttatggatatccttgggcctagcttatgggatgtttggaatagtaccacccaggcgatgtcaacagagatggttgcatgcattgcaattgaggcaatatccatattagaaaagatgcattctagaggatatgtgcatggcgatgtaaaaccagagaattttctgcttgggcctcctggaactcctgaagagaaaaaacttttccttgtagacctcggcttagcatccaaatggcgagatactgcaactggactacatgttgaatatgaccagcgtcctgatgtttttagaggaacagtacgttatgctagtgtacatgctcatcttggcagaacttgcagtcggagggatgacctggaatctcttgcttacactcttgttttccttcttcgaggccggcttccatggcaagggtaccagggagagaacaaaggtttccttgtttgcaagaagaagatggccacttccccagaaactctttgctgcttctgtccccaaccttttcgtcagtttgtcgagtatgtggtcaatttgaagtttgatgaggagcctgattatgctaaatatgtctccctttttgatggaatagtcggcccaaacccagacattaggccaataaatactgagggtgcacagaagctcatacatcaagtgggtcaaaagagggggaggctgacaatggacgaggaggatgaacaaccaacaaagaagatcagattgggcatgccagcaacacaatggatcagcatttacagtgctcacagaccaatgaaacaacgatatcattataatgttactgatacaaggcttgcacaacacattgaaaaaggaaatgaggatgggttatttatcagcagtgtggcttcttgcacggatctctgggctttgatcatggatgcaggaagtggctttacggatcaagtttaccagttatcaccaagctttctccacaaggaatggattatggaacaatgggaaaagaattactatattacagcagtggcaggagcaaatagtgggaactcattcgtggttatgtcaaaagggacccagtatttacaacaatcctacaaagtcagtgattcttttcccttcaagtggataaataaaaagtggagggaagggttttatgttacatcaatggcaactgctggaagcaaatggggaattgtaatgtctcgtggggcttctttttctgatcaggttatagaactagattttctataccctagtgaaggtatacatcgtcgatgggaaaatggctacagaattacatcagttgctgcaacttgggatcaggctgcctttgttcttagtgtgccaagaaggaagcttaccgatgagacacaggagactcttagaacctctgcttttcctagtaatcatgtcaaggaaaaatggggcaagaatctttacattgcatcgatttgttatggtcgaactgtgtcatga

SEQ ID NO: 88080 - protein, 601 aa, Arabidopsis thaliana
  peptide (1)..(601): Ceres Seq. ID no. 12705565
MDENDSGGQAAPVPDDEGNAPPLPEKVQVGNSPMYKLDRKLGKGGFGQVYVGRKMGTSTSNARFGPGALEVALKFEHRTSKGCNYGPPYEWQVYNALGGSHGVPRVHFKGRQGDFYVMVMDILGPSLWDVWNSTTQAMSTEMVACIAIEAISILEKMHSRGYVHGDVKPENFLLGPPGTPEEKKLFLVDLGLASKWRDTATGLHVEYDQRPDVFRGTVRYASVHAHLGRTCSRRDDLESLAYTLVFLLRGRLPWQGYQGENKGFLVCKKKMATSPETLCCFCPQPFRQFVEYVVNLKFDEEPDYAKYVSLFDGIVGPNPDIRPINTEGAQKLIHQVGQKRGRLTMDEEDEQPTKKIRLGMPATQWISIYSAHRPMKQRYHYNVTDTRLAQHIEKGNEDGLFISSVASCTDLWALIMDAGSGFTDQVYQLSPSFLHKEWIMEQWEKNYYITAVAGANSGNSFVVMSKGTQYLQQSYKVSDSFPFKWINKKWREGFYVTSMATAGSKWGIVMSRGASFSDQVIELDFLYPSEGIHRRWENGYRITSVAATWDQAAFVLSVPRRKLTDETQETLRTSAFPSNHVKEKWGKNLYIASICYGRTVS

SEQ ID NO: 88081 - protein, 568 aa, Arabidopsis thaliana
  peptide (1)..(568): Ceres Seq. ID no. 12705566
MYKLDRKLGKGGFGQVYVGRKMGTSTSNARFGPGALEVALKFEHRTSKGCNYGPPYEWQVYNALGGSHGVPRVHFKGRQGDFYVMVMDILGPSLWDVWNSTTQAMSTEMVACIAIEAISILEKMHSRGYVHGDVKPENFLLGPPGTPEEKKLFLVDLGLASKWRDTATGLHVEYDQRPDVFRGTVRYASVHAHLGRTCSRRDDLESLAYTLVFLLRGRLPWQGYQGENKGFLVCKKKMATSPETLCCFCPQPFRQFVEYVVNLKFDEEPDYAKYVSLFDGIVGPNPDIRPINTEGAQKLIHQVGQKRGRLTMDEEDEQPTKKIRLGMPATQWISIYSAHRPMKQRYHYNVTDTRLAQHIEKGNEDGLFISSVASCTDLWALIMDAGSGFTDQVYQLSPSFLHKEWIMEQWEKNYYITAVAGANSGNSFVVMSKGTQYLQQSYKVSDSFPFKWINKKWREGFYVTSMATAGSKWGIVMSRGASFSDQVIELDFLYPSEGIHRRWENGYRITSVAATWDQAAFVLSVPRRKLTDETQETLRTSAFPSNHVKEKWGKNLYIASICYGRTVS

SEQ ID NO: 88082 - protein, 547 aa, Arabidopsis thaliana
  peptide (1)..(547): Ceres Seq. ID no. 12705567
MGTSTSNARFGPGALEVALKFEHRTSKGCNYGPPYEWQVYNALGGSHGVPRVHFKGRQGDFYVMVMDILGPSLWDVWNSTTQAMSTEMVACIAIEAISILEKMHSRGYVHGDVKPENFLLGPPGTPEEKKLFLVDLGLASKWRDTATGLHVEYDQRPDVFRGTVRYASVHAHLGRTCSRRDDLESLAYTLVFLLRGRLPWQGYQGENKGFLVCKKKMATSPETLCCFCPQPFRQFVEYVVNLKFDEEPDYAKYVSLFDGIVGPNPDIRPINTEGAQKLIHQVGQKRGRLTMDEEDEQPTKKIRLGMPATQWISIYSAHRPMKQRYHYNVTDTRLAQHIEKGNEDGLFISSVASCTDLWALIMDAGSGFTDQVYQLSPSFLHKEWIMEQWEKNYYITAVAGANSGNSFVVMSKGTQYLQQSYKVSDSFPFKWINKKWREGFYVTSMATAGSKWGIVMSRGASFSDQVIELDFLYPSEGIHRRWENGYRITSVAATWDQAAFVLSVPRRKLTDETQETLRTSAFPSNHVKEKWGKNLYIASICYGRTVS

SEQ ID NO: 88083 - DNA, 2991 bp, Arabidopsis thaliana
  misc_feature (1)..(2991): Ceres Seq. ID no. 12705572
  misc_feature (1)..(2991): Ortholog of  Ceres SEQ ID NO 14306148 as cited in SEQ ID NO 1370
atggctcatctcttcagggagctgtctctgggccactccaagagagagtctacgccgccgccgccgtcacattcggcgacttcacgttcttcttcaatgtcttccgatctacctccatcaccactcggacaactcgctgtccaactttccgattccgatctccgtctcactgcttacgagatcttcgtcgccgcatgtcgtagcgccaccggtaaacctctctcatcggctgtttcagtcgctgttttgaatcaggattctcccaatggctctcctgcttcgccggcgattcagcgttctctgacctcaaccgccgctagtaaaatgaagaaagctttggggttaaggtcgtcttcttcgctttcacctggatctaataagagttctggttctgcttcgggttctaatggtaagtcgaaacgtcctactactgtcggtgagcttatgcggatccaaatgcgagtatcggaggctgtcgattctcgtgttcgtagagcttttcttagaatcgctgcttcacaggttggaaggaagattgagtcagtagttcttcctttagagttgttacagcagctaaagtcttctgattttacggatcagcaagaatatgatgcttggctgaagagatcattgaaggttcttgaggcaggtcttttgttgcatcctcgtgtacctcttgataagacgaatagttctcaacgactgcgacagattattcatggtgctttagatcggcctttggagactggaaggaataatgagcaaatgcaaagtcttagatcagcggtcatgtctcttgcaactagatctgatgggtctttctctgattcttgtcactgggctgatggatctccgtttaatctcaggctttatgaattgcttttagaagcgtgttttgattctaatgatgcgacgtccatggttgaggaagttgacgacctaatggaacatataaagaagacgtgggtaattcttggaatcaatcaaatgctgcataacctctgttttacgtggcttttgtttagtcgttatgttgttactggacaagttgagatggacctgcttcatgcttgtgattctcaactggcagaagttgctaaagatgcaaagacaacaaaggatcctgaatactcccaggttttaagttctacactgagtgctatattaggatgggcagagaaaaggctccttgcataccatgacacttttgaccgaggaaatattcataccatggagggaattgtttctttgggtgtatcagctgccaggatattagttgaagatatatctaacgagtaccgtagaagaaggaaaggagaagttgatgtagctcgtaccaggattgagacgtacatcaggtcctcactacgaacttcttttgcgcaggcaagtatttgcattgtcgtggaggatagaatggagaaagcagattcaagccggagagcatctaggaaccagaaaaatcctcttcctgttctagccatccttgctaaggacattggtgagctagctattcaggaaaagcggatgttcagtccaatattgaagagatggcatccgtttgctgcaggggttgctgtggcgacccttcatgtttgttacggaaatgagattaaacagtttatagccggaatatctgaattgacacctgatgctgtccagatactaagagctgcagataagctagaaaaggatctggtgcaaatcgcagtagaggattctgttgacagtgatgatggtggcaaagcaattatccgtgaaatgcctcccttcgaagctgagaccgtaattgctaatttggtcaaagactggataaaggcaagaatagacagacttaaggaatgggttgacaggaatttgcagcaagaggtttggaaacccctggagaacctagaaggaggatatgcacagtctgctgccgaagtgttgcggattactgatgaaactttggaagctttttttcagcttcccatacctatgcatcctgctgtattacctgatttaattattggtttagacaaatatcttcagtattatgtctcaaaggcgaaatctggctgcggctctcggactacgtacatgcctacaatgcctgcactcaccagatgtacaacgggatcaaaattccaatggaagaagaaagaaaagacacctaccactcagaagagagaatctcaggtttcggttatgaacggtgagaattcttttggggtcacgcaaatatgtgtcagaataaacagcttgcacaaaatccgcagtgagcttgatgttgtggaaaaaagagtgatcacacatttgaggaactgtgagtcagctcacaccgatgacttttccaacggcttagaaaaaaagtttgagctcacaccagcggcttgcatagaaggcgttcaacagctttctgagtctctggcttataaggtcgtcttccacgacctaagccacacgttatgggacgggttatacatcggagacctctcttcctctagaatcgatcctttcctcaaggaactcgaacagaatttgacagtcatagcagagacagtacatgaaagagttcgaacacgcatcatcaccgatattatgagagcctctttagatggcttcttacttgtcctgcttgccggaggaccctctagggcgttcacaagacaagactctcagataatggaagaagatttcaaatcaatgaaagatatgttctgggctaacggagacggtctagccatggacctgatcgataaattctcaaccactgtcagaggcgtgcttcctctgttcagtacagatacagacagtttaatagagaggttcaagggaacgaccctcgaagcatatggttcttcagctaagtcgaggcttccgttgcctccaacatcaggccagtggaatggcatggagccaaacacactcttacgtgttttgtgttaccgtaacgacgaatctgccacgaggtttctcaagaagacatataatctacctaagaagctttag

SEQ ID NO: 88084 - protein, 996 aa, Arabidopsis thaliana
  peptide (1)..(996): Ceres Seq. ID no. 12705573
MAHLFRELSLGHSKRESTPPPPSHSATSRSSSMSSDLPPSPLGQLAVQLSDSDLRLTAYEIFVAACRSATGKPLSSAVSVAVLNQDSPNGSPASPAIQRSLTSTAASKMKKALGLRSSSSLSPGSNKSSGSASGSNGKSKRPTTVGELMRIQMRVSEAVDSRVRRAFLRIAASQVGRKIESVVLPLELLQQLKSSDFTDQQEYDAWLKRSLKVLEAGLLLHPRVPLDKTNSSQRLRQIIHGALDRPLETGRNNEQMQSLRSAVMSLATRSDGSFSDSCHWADGSPFNLRLYELLLEACFDSNDATSMVEEVDDLMEHIKKTWVILGINQMLHNLCFTWLLFSRYVVTGQVEMDLLHACDSQLAEVAKDAKTTKDPEYSQVLSSTLSAILGWAEKRLLAYHDTFDRGNIHTMEGIVSLGVSAARILVEDISNEYRRRRKGEVDVARTRIETYIRSSLRTSFAQASICIVVEDRMEKADSSRRASRNQKNPLPVLAILAKDIGELAIQEKRMFSPILKRWHPFAAGVAVATLHVCYGNEIKQFIAGISELTPDAVQILRAADKLEKDLVQIAVEDSVDSDDGGKAIIREMPPFEAETVIANLVKDWIKARIDRLKEWVDRNLQQEVWKPLENLEGGYAQSAAEVLRITDETLEAFFQLPIPMHPAVLPDLIIGLDKYLQYYVSKAKSGCGSRTTYMPTMPALTRCTTGSKFQWKKKEKTPTTQKRESQVSVMNGENSFGVTQICVRINSLHKIRSELDVVEKRVITHLRNCESAHTDDFSNGLEKKFELTPAACIEGVQQLSESLAYKVVFHDLSHTLWDGLYIGDLSSSRIDPFLKELEQNLTVIAETVHERVRTRIITDIMRASLDGFLLVLLAGGPSRAFTRQDSQIMEEDFKSMKDMFWANGDGLAMDLIDKFSTTVRGVLPLFSTDTDSLIERFKGTTLEAYGSSAKSRLPLPPTSGQWNGMEPNTLLRVLCYRNDESATRFLKKTYNLPKKL

SEQ ID NO: 88085 - protein, 964 aa, Arabidopsis thaliana
  peptide (1)..(964): Ceres Seq. ID no. 12705574
MSSDLPPSPLGQLAVQLSDSDLRLTAYEIFVAACRSATGKPLSSAVSVAVLNQDSPNGSPASPAIQRSLTSTAASKMKKALGLRSSSSLSPGSNKSSGSASGSNGKSKRPTTVGELMRIQMRVSEAVDSRVRRAFLRIAASQVGRKIESVVLPLELLQQLKSSDFTDQQEYDAWLKRSLKVLEAGLLLHPRVPLDKTNSSQRLRQIIHGALDRPLETGRNNEQMQSLRSAVMSLATRSDGSFSDSCHWADGSPFNLRLYELLLEACFDSNDATSMVEEVDDLMEHIKKTWVILGINQMLHNLCFTWLLFSRYVVTGQVEMDLLHACDSQLAEVAKDAKTTKDPEYSQVLSSTLSAILGWAEKRLLAYHDTFDRGNIHTMEGIVSLGVSAARILVEDISNEYRRRRKGEVDVARTRIETYIRSSLRTSFAQASICIVVEDRMEKADSSRRASRNQKNPLPVLAILAKDIGELAIQEKRMFSPILKRWHPFAAGVAVATLHVCYGNEIKQFIAGISELTPDAVQILRAADKLEKDLVQIAVEDSVDSDDGGKAIIREMPPFEAETVIANLVKDWIKARIDRLKEWVDRNLQQEVWKPLENLEGGYAQSAAEVLRITDETLEAFFQLPIPMHPAVLPDLIIGLDKYLQYYVSKAKSGCGSRTTYMPTMPALTRCTTGSKFQWKKKEKTPTTQKRESQVSVMNGENSFGVTQICVRINSLHKIRSELDVVEKRVITHLRNCESAHTDDFSNGLEKKFELTPAACIEGVQQLSESLAYKVVFHDLSHTLWDGLYIGDLSSSRIDPFLKELEQNLTVIAETVHERVRTRIITDIMRASLDGFLLVLLAGGPSRAFTRQDSQIMEEDFKSMKDMFWANGDGLAMDLIDKFSTTVRGVLPLFSTDTDSLIERFKGTTLEAYGSSAKSRLPLPPTSGQWNGMEPNTLLRVLCYRNDESATRFLKKTYNLPKKL

SEQ ID NO: 88086 - protein, 888 aa, Arabidopsis thaliana
  peptide (1)..(888): Ceres Seq. ID no. 12705575
MKKALGLRSSSSLSPGSNKSSGSASGSNGKSKRPTTVGELMRIQMRVSEAVDSRVRRAFLRIAASQVGRKIESVVLPLELLQQLKSSDFTDQQEYDAWLKRSLKVLEAGLLLHPRVPLDKTNSSQRLRQIIHGALDRPLETGRNNEQMQSLRSAVMSLATRSDGSFSDSCHWADGSPFNLRLYELLLEACFDSNDATSMVEEVDDLMEHIKKTWVILGINQMLHNLCFTWLLFSRYVVTGQVEMDLLHACDSQLAEVAKDAKTTKDPEYSQVLSSTLSAILGWAEKRLLAYHDTFDRGNIHTMEGIVSLGVSAARILVEDISNEYRRRRKGEVDVARTRIETYIRSSLRTSFAQASICIVVEDRMEKADSSRRASRNQKNPLPVLAILAKDIGELAIQEKRMFSPILKRWHPFAAGVAVATLHVCYGNEIKQFIAGISELTPDAVQILRAADKLEKDLVQIAVEDSVDSDDGGKAIIREMPPFEAETVIANLVKDWIKARIDRLKEWVDRNLQQEVWKPLENLEGGYAQSAAEVLRITDETLEAFFQLPIPMHPAVLPDLIIGLDKYLQYYVSKAKSGCGSRTTYMPTMPALTRCTTGSKFQWKKKEKTPTTQKRESQVSVMNGENSFGVTQICVRINSLHKIRSELDVVEKRVITHLRNCESAHTDDFSNGLEKKFELTPAACIEGVQQLSESLAYKVVFHDLSHTLWDGLYIGDLSSSRIDPFLKELEQNLTVIAETVHERVRTRIITDIMRASLDGFLLVLLAGGPSRAFTRQDSQIMEEDFKSMKDMFWANGDGLAMDLIDKFSTTVRGVLPLFSTDTDSLIERFKGTTLEAYGSSAKSRLPLPPTSGQWNGMEPNTLLRVLCYRNDESATRFLKKTYNLPKKL

SEQ ID NO: 88087 - DNA, 647 bp, Arabidopsis thaliana
  misc_feature (1)..(647): Ceres Seq. ID no. 12705584
  misc_feature (1)..(647): Ortholog of  Ceres SEQ ID NO 14314807 as cited in SEQ ID NO 52563
atggtaagcttattaaagctacaaaaacaacatagaacattaaatccatactctcttagaaaaagaaaaaaagaaatggcggatcatcaacaacatcagcaacaacaacaaccaataatgaggagtctccatgaatcatcaccatcgactcggcagatagtgagattcgtaacggcagctacgatcggcctatcactcctcgtgctctcaggactaacactaaccggaacggtgatcggtttgatcgtagcgacgccgttgatggttctgttcagcccggtgttggtaccggcagtgataacgatagggcttttgacgatgggattcctattctccggtggttgtggggtggcagcagctacggcgttaacgtggatttataagtacgttaccggaaaacacccgatgggagcggataaggtggattacgcgaggatgaggatagcggagaaagccaaagagttgggacattatacgcactcgcagccacaacaaacacaccaaaccacaacaactactcattagagtttaataattatatggatctatatgttgtattaagttttatgattatcctacgtatgtttttttaatactgttcttacctttttgaaaagatctatctaaaattttattttctattttcc

SEQ ID NO: 88088 - protein, 174 aa, Arabidopsis thaliana
  peptide (1)..(174): Ceres Seq. ID no. 12705585
MVSLLKLQKQHRTLNPYSLRKRKKEMADHQQHQQQQQPIMRSLHESSPSTRQIVRFVTAATIGLSLLVLSGLTLTGTVIGLIVATPLMVLFSPVLVPAVITIGLLTMGFLFSGGCGVAAATALTWIYKYVTGKHPMGADKVDYARMRIAEKAKELGHYTHSQPQQTHQTTTTTH

SEQ ID NO: 88089 - protein, 149 aa, Arabidopsis thaliana; identical to SEQ ID NO: 22577
  peptide (1)..(149): Ceres Seq. ID no. 12705586

SEQ ID NO: 88090 - protein, 135 aa, Arabidopsis thaliana; identical to SEQ ID NO: 22578
  peptide (1)..(135): Ceres Seq. ID no. 12705587

SEQ ID NO: 88091 - DNA, 1346 bp, Arabidopsis thaliana
  misc_feature (1)..(1346): Ceres Seq. ID no. 12705588
  misc_feature (1)..(1346): Ortholog of  Ceres SEQ ID NO 13582297 as cited in SEQ ID NO 56486
  misc_feature (1)..(1346): Ortholog of  Ceres SEQ ID NO 13586936 as cited in SEQ ID NO 0
agactcactaaacaaaaatgatgatcggcgaaaataaaaaccggccacatccaacgatccatatccctcaatgggatcaaatcaacgatccaacggccacaatctcttcaccattctcttccgtcaaccttaacagcgttaacgactacccacactctccgtcaccgtatctcgactccttcgcttctctcttccgttacctcccgtcaaacgagttaacaaacgattcagactcatcaagtggcgacgagtcatcaccactcaccgactcattctcctccgacgagtttcgcatctacgagttcaaaatccggcgatgcgctcgaggtcgatctcatgattggacggagtgtccgttcgcacatcccggagaaaaagctcgacgacgtgatccgagaaagtttcattactccggcaccgcttgtcctgagtttcgtaaaggaagttgtagaagaggtgattcgtgtgagttctctcatggagttttcgagtgttggctccatccttctcgttaccgtactcagccgtgtaaagacggaactagctgccggagaagaatctgtttcttcgctcatacgacggagcagttacgtgtattaccttgttcgttagatccagatcttggattcttctcaggattagctacttctccgacttcgattcttgtttctccttcgttttcaccaccgtcggaatctccgccgctttctccgagtaccggtgaacttattgcgtcgatgaggaaaatgcaattgaacggaggtggttgttcgtggagttctccgatgagatctgcagttaggttacctttttcgtcgtctctgcgtccgattcaggcggcaacgtggccgaggataagagagtttgagatcgaagaagctccggcgatggaatttgtggaatctgggaaagagctgagagcggagatgtatgcaagactcagtagagagaactcactcggttgagtcgacttggatcgagtctttgatgacgtggcgactcgatctgattttgtgaatattttagagatttttaaggtgttgtggataaatgacgtggcgggtcgatcttagtgacggtacaatcggacgatgaagaaaaaagcgttaagagtaacaaaaaaaggaagaatttgtaaagagatgataatgagagaatttgagagctattcttctggcttttttctctgcagttttttttattgttttcgttattttcttgtttttattttggttttcggctttattttgtttgttgtttattaatgttatatcattttgtaattagttctcaaatgtatttggataacatcttagtttgagactttagaaaagaacatttcattt

SEQ ID NO: 88092 - protein, 315 aa, Arabidopsis thaliana
  peptide (1)..(315): Ceres Seq. ID no. 12705589
MMIGENKNRPHPTIHIPQWDQINDPTATISSPFSSVNLNSVNDYPHSPSPYLDSFASLFRYLPSNELTNDSDSSSGDESSPLTDSFSSDEFRIYEFKIRRCARGRSHDWTECPFAHPGEKARRRDPRKFHYSGTACPEFRKGSCRRGDSCEFSHGVFECWLHPSRYRTQPCKDGTSCRRRICFFAHTTEQLRVLPCSLDPDLGFFSGLATSPTSILVSPSFSPPSESPPLSPSTGELIASMRKMQLNGGGCSWSSPMRSAVRLPFSSSLRPIQAATWPRIREFEIEEAPAMEFVESGKELRAEMYARLSRENSLG

SEQ ID NO: 88093 - protein, 314 aa, Arabidopsis thaliana
  peptide (1)..(314): Ceres Seq. ID no. 12705590
MIGENKNRPHPTIHIPQWDQINDPTATISSPFSSVNLNSVNDYPHSPSPYLDSFASLFRYLPSNELTNDSDSSSGDESSPLTDSFSSDEFRIYEFKIRRCARGRSHDWTECPFAHPGEKARRRDPRKFHYSGTACPEFRKGSCRRGDSCEFSHGVFECWLHPSRYRTQPCKDGTSCRRRICFFAHTTEQLRVLPCSLDPDLGFFSGLATSPTSILVSPSFSPPSESPPLSPSTGELIASMRKMQLNGGGCSWSSPMRSAVRLPFSSSLRPIQAATWPRIREFEIEEAPAMEFVESGKELRAEMYARLSRENSLG

SEQ ID NO: 88094 - DNA, 1101 bp, Arabidopsis thaliana
  misc_feature (1)..(1101): Ceres Seq. ID no. 12705595
  misc_feature (1)..(1101): Ortholog of  Ceres SEQ ID NO 15170501 as cited in SEQ ID NO 52774
atgactagtacggagaacaacaacaacggctctgatgaaactcagacgacgaagttacacttcgaggatgctgatgaatcaatgcacgatggagatgacaacaatgccgatgttgctgatgacattaccagcgccgattactacttcgattcttactctcatttcggtattcatgaagaaatgttaaaggatgtagtgaggacaaagagttatcaagatgttatttacaagaacaagtttcttatcaaggacaaaattgttcttgatgttggagctggaactggaatcttgtctctcttctgtgctaaagcaggagcagctcacgtttacgcagttgagtgttctcaaatggctgacacagcaaaggagattgttaagtcgaatggattctcagatgttataacggttttgaaagggaagattgaggagatcgaacttccagttcctaaagtggatgtgattatctctgaatggatgggttactttctgttgtatgaaaatatgcttgacaccgtcttgtatgctcgcaataaatggcttgttgatggtggaattgttctaccagataaagcttctctttatgttactgccattgaggatgctcattataaagacgacaaagtagagttttgggacgacgtgtatgggtttgacatgtcgtgcatcaagagaagagcaattacagaaccgcttgttgacaccgttgatggtaaccaaatcgtgactgatagcaagctgctgaagacaatggatatctctaagatggctgctggagatgcttccttcacagctccgtttaagctcgtcgcacaacgaaatgaccatatccatgcccttgtagcctacttcgatgtgtcattcactatgtgtcacaagaagatgggtttctcaacaggaccgaaatcgcgggctacgcattggaaacaaactgtgctgtacctggaagatgtgttaaccatatgcgagggtgaaacaatcacaggaagcatgaccattgcacaaaacaaaaagaatcccagagacgtcgacataaagctcagctattctttgaacggccaacattgcaatatctcaaggacccacttctataagatgcgctaa

SEQ ID NO: 88095 - protein, 366 aa, Arabidopsis thaliana
  peptide (1)..(366): Ceres Seq. ID no. 12705596
MTSTENNNNGSDETQTTKLHFEDADESMHDGDDNNADVADDITSADYYFDSYSHFGIHEEMLKDVVRTKSYQDVIYKNKFLIKDKIVLDVGAGTGILSLFCAKAGAAHVYAVECSQMADTAKEIVKSNGFSDVITVLKGKIEEIELPVPKVDVIISEWMGYFLLYENMLDTVLYARNKWLVDGGIVLPDKASLYVTAIEDAHYKDDKVEFWDDVYGFDMSCIKRRAITEPLVDTVDGNQIVTDSKLLKTMDISKMAAGDASFTAPFKLVAQRNDHIHALVAYFDVSFTMCHKKMGFSTGPKSRATHWKQTVLYLEDVLTICEGETITGSMTIAQNKKNPRDVDIKLSYSLNGQHCNISRTHFYKMR

SEQ ID NO: 88096 - protein, 339 aa, Arabidopsis thaliana
  peptide (1)..(339): Ceres Seq. ID no. 12705597
MHDGDDNNADVADDITSADYYFDSYSHFGIHEEMLKDVVRTKSYQDVIYKNKFLIKDKIVLDVGAGTGILSLFCAKAGAAHVYAVECSQMADTAKEIVKSNGFSDVITVLKGKIEEIELPVPKVDVIISEWMGYFLLYENMLDTVLYARNKWLVDGGIVLPDKASLYVTAIEDAHYKDDKVEFWDDVYGFDMSCIKRRAITEPLVDTVDGNQIVTDSKLLKTMDISKMAAGDASFTAPFKLVAQRNDHIHALVAYFDVSFTMCHKKMGFSTGPKSRATHWKQTVLYLEDVLTICEGETITGSMTIAQNKKNPRDVDIKLSYSLNGQHCNISRTHFYKMR

SEQ ID NO: 88097 - protein, 306 aa, Arabidopsis thaliana
  peptide (1)..(306): Ceres Seq. ID no. 12705598
MLKDVVRTKSYQDVIYKNKFLIKDKIVLDVGAGTGILSLFCAKAGAAHVYAVECSQMADTAKEIVKSNGFSDVITVLKGKIEEIELPVPKVDVIISEWMGYFLLYENMLDTVLYARNKWLVDGGIVLPDKASLYVTAIEDAHYKDDKVEFWDDVYGFDMSCIKRRAITEPLVDTVDGNQIVTDSKLLKTMDISKMAAGDASFTAPFKLVAQRNDHIHALVAYFDVSFTMCHKKMGFSTGPKSRATHWKQTVLYLEDVLTICEGETITGSMTIAQNKKNPRDVDIKLSYSLNGQHCNISRTHFYKMR

SEQ ID NO: 88098 - DNA, 522 bp, Arabidopsis thaliana
  misc_feature (1)..(522): Ceres Seq. ID no. 12705636
  misc_feature (1)..(522): Ortholog of  Ceres SEQ ID NO 13663631 as cited in SEQ ID NO 67073
atgtcgttctttggttatagtttcatcgtagtagcattattcttcgatttaactcaagcctatcgtcacactcccgctcaaccgccaaaagcaaacgcaaacggtgatgtcaaaccgcaagaaacgctcgtggttcacaacaaggcccgagccatggtcggagtcggaccaatggtgtggaacgaaactcttgcgacctatgcacagagctacgcacatgaacgagccagagactgtgccatgaagcattccttgggaccattcggcgagaatctagccgcgggttggggaacgatgagcggtccggtagcaactgagtattggatgacggagaaggaaaattacgattatgatagtaacacgtgtggtggtgatggtgtgtgtggacactacactcagatcgtgtggcgtgactcggttcgacttggttgtgcctccgtgagatgtaagaatgatgagtatatttgggtgatttgtagctatgatcctccggggaattacatcggtcaacgtccatattag

SEQ ID NO: 88099 - protein, 173 aa, Arabidopsis thaliana; identical to SEQ ID NO: 70348
  peptide (1)..(173): Ceres Seq. ID no. 12705637

SEQ ID NO: 88100 - protein, 122 aa, Arabidopsis thaliana; identical to SEQ ID NO: 70349
  peptide (1)..(122): Ceres Seq. ID no. 12705638

SEQ ID NO: 88101 - protein, 116 aa, Arabidopsis thaliana
  peptide (1)..(116): Ceres Seq. ID no. 12705639
MVWNETLATYAQSYAHERARDCAMKHSLGPFGENLAAGWGTMSGPVATEYWMTEKENYDYDSNTCGGDGVCGHYTQIVWRDSVRLGCASVRCKNDEYIWVICSYDPPGNYIGQRPY

SEQ ID NO: 88102 - DNA, 1437 bp, Arabidopsis thaliana
  misc_feature (1)..(1437): Ceres Seq. ID no. 12705666
  misc_feature (1)..(1437): Ortholog of  Ceres SEQ ID NO 14308698 as cited in SEQ ID NO 58663
atgcatcattttgtccctgacttcgataccgatgatgattatgtcaacaaccataattcttctttgaatcatcttcctagaaaatccattactactatgggtgaagatgatgatcttatggagcttttatggcagaacggtcaagttgttgttcaaaaccagagacttcacaccaagaaaccttcttcttctccaccgaagcttcttccttctatggatcctcagcagcaaccttcttcagatcagaatctttttattcaagaagatgaaatgacttcttggcttcattatcctctccgtgacgatgatttctgctcagatcttctcttctccgccgcacctactgcgacggctaccgcgacggtgagtcaagtcaccgccgcgagaccgccagtatcttcgacgaatgagtcgaggccgccggtgaggaacttcatgaatttctcgaggctgagaggggattttaataacggtagaggtggtgaatctggaccgttgctttcgaaggcggttgtgagagaatctacgcaggtaagtcctagcgcaacaccgtcggcggcggcgagtgaatccggtttaacacggcggacggatggtactgacagttccgccgtagctggaggcggcgcgtataatcggaagggaaaagcagtggctatgacggcgccggcgatcgagataaccggtacatcgtcatctgtagtgtcaaagagcgaaatcgaaccggagaagacgaacgtcgatgataggaaacgaaaagagagagaagccaccactactgatgaaactgaatcccgtagcgaggaaacaaaacaagcacgtgtatcaacaacatctaccaagagatctcgtgctgctgaagttcataatctctctgaaagaaaacggagagataggatcaatgagagaatgaaagctttgcaagaacttatacctcgctgcaacaagtcagataaagcttcgatgctagatgaagctattgagtacatgaaatctcttcagcttcaaatacagatgatgtcaatgggatgtggaatgatgccaatgatgtatccgggcatgcaacagtacatgcctcatatggcgatgggtatgggtatgaaccagcctattcctcctccttccttcatgccattccccaacatgttagccgctcaaagacctttgcctacacaaactcacatggccgggtcaggaccgcaataccctgttcatgcttctgacccgtcaagagtctttgtaccgaaccagcagtatgatccaacctcgggccagcctcagtatccagctggttacacggatccatatcagcagttccgcggtctccacccgacccaaccacctcagtttcagaatcaagcaacatcgtacccaagttcgagcagggtgagtagtagtaaggaatctgaggatcacggaaaccacacaacaggttaa

SEQ ID NO: 88103 - protein, 478 aa, Arabidopsis thaliana
  peptide (1)..(478): Ceres Seq. ID no. 12705667
MHHFVPDFDTDDDYVNNHNSSLNHLPRKSITTMGEDDDLMELLWQNGQVVVQNQRLHTKKPSSSPPKLLPSMDPQQQPSSDQNLFIQEDEMTSWLHYPLRDDDFCSDLLFSAAPTATATATVSQVTAARPPVSSTNESRPPVRNFMNFSRLRGDFNNGRGGESGPLLSKAVVRESTQVSPSATPSAAASESGLTRRTDGTDSSAVAGGGAYNRKGKAVAMTAPAIEITGTSSSVVSKSEIEPEKTNVDDRKRKEREATTTDETESRSEETKQARVSTTSTKRSRAAEVHNLSERKRRDRINERMKALQELIPRCNKSDKASMLDEAIEYMKSLQLQIQMMSMGCGMMPMMYPGMQQYMPHMAMGMGMNQPIPPPSFMPFPNMLAAQRPLPTQTHMAGSGPQYPVHASDPSRVFVPNQQYDPTSGQPQYPAGYTDPYQQFRGLHPTQPPQFQNQATSYPSSSRVSSSKESEDHGNHTTG

SEQ ID NO: 88104 - protein, 446 aa, Arabidopsis thaliana
  peptide (1)..(446): Ceres Seq. ID no. 12705668
MGEDDDLMELLWQNGQVVVQNQRLHTKKPSSSPPKLLPSMDPQQQPSSDQNLFIQEDEMTSWLHYPLRDDDFCSDLLFSAAPTATATATVSQVTAARPPVSSTNESRPPVRNFMNFSRLRGDFNNGRGGESGPLLSKAVVRESTQVSPSATPSAAASESGLTRRTDGTDSSAVAGGGAYNRKGKAVAMTAPAIEITGTSSSVVSKSEIEPEKTNVDDRKRKEREATTTDETESRSEETKQARVSTTSTKRSRAAEVHNLSERKRRDRINERMKALQELIPRCNKSDKASMLDEAIEYMKSLQLQIQMMSMGCGMMPMMYPGMQQYMPHMAMGMGMNQPIPPPSFMPFPNMLAAQRPLPTQTHMAGSGPQYPVHASDPSRVFVPNQQYDPTSGQPQYPAGYTDPYQQFRGLHPTQPPQFQNQATSYPSSSRVSSSKESEDHGNHTTG

SEQ ID NO: 88105 - protein, 439 aa, Arabidopsis thaliana
  peptide (1)..(439): Ceres Seq. ID no. 12705669
MELLWQNGQVVVQNQRLHTKKPSSSPPKLLPSMDPQQQPSSDQNLFIQEDEMTSWLHYPLRDDDFCSDLLFSAAPTATATATVSQVTAARPPVSSTNESRPPVRNFMNFSRLRGDFNNGRGGESGPLLSKAVVRESTQVSPSATPSAAASESGLTRRTDGTDSSAVAGGGAYNRKGKAVAMTAPAIEITGTSSSVVSKSEIEPEKTNVDDRKRKEREATTTDETESRSEETKQARVSTTSTKRSRAAEVHNLSERKRRDRINERMKALQELIPRCNKSDKASMLDEAIEYMKSLQLQIQMMSMGCGMMPMMYPGMQQYMPHMAMGMGMNQPIPPPSFMPFPNMLAAQRPLPTQTHMAGSGPQYPVHASDPSRVFVPNQQYDPTSGQPQYPAGYTDPYQQFRGLHPTQPPQFQNQATSYPSSSRVSSSKESEDHGNHTTG

SEQ ID NO: 88106 - DNA, 1440 bp, Arabidopsis thaliana
  misc_feature (1)..(1440): Ceres Seq. ID no. 12705681
  misc_feature (1)..(1440): Ortholog of  Ceres SEQ ID NO 15176887 as cited in SEQ ID NO 58804
  misc_feature (1)..(1440): Ortholog of  Ceres SEQ ID NO 15174867 as cited in SEQ ID NO 67357
atggactcagagcaattgagagagtacggacatctgatggttgatttcattgctgattactacaaaaccatcgaagatttccctgttcttagccaagttcagcctggttatcttcataagcttttgcctgattctgcacctgaccaccctgaaactctggaccaagttcttgatgatgttcgagcaaagatattgcctggagtaacgcattggcaaagcccgagtttctttgcttattatccttctaacagcagtgttgctgggttcttgggtgagatgttgagtgctggtcttggcattgttggttttagttgggttacttctccagctgccacagagctagaaatgatcgttcttgattgggttgctaaacttctcaacctacccgagcagtttatgtccaaaggaaatggaggtggagttatacaagggtcagctagtgaagctgttcttgttgttctgattgctgcacgcgacaaggttttaagaagcgttggcaaaaacgcgcttgagaagctcgttgtctactcctctgaccagactcattcagctttacagaaggcttgccagattgctggaatccatccagagaattgcagggtgctgacaacagactcttctacaaattacgctctgcgtccagaatcgcttcaagaagctgtttctagggatcttgaagctggattgattccattcttcttatgtgctaatgttgggaccacttcttcaaccgcagttgatccattagctgcactggggaagattgctaatagcaatggaatttggtttcacgtggatgcagcatatgctggaagtgcctgtatatgtccagagtatcggcaatacattgacggtgtagaaactgcagactcttttaacatgaatgctcacaaatggttcctcactaacttcgattgttcccttctttgggtaaaggatcaagattctcttacattagctctttcaacaaatccagagtttctcaaaaacaaggcctctcaggcaaacttggttgttgattacaaagattggcaaatccctctcggacgaagattcagatcattgaaactatggatggttttaaggctctatggatctgagaccttgaagagctatataagaaaccatatcaaactggctaaagaattcgaacaacttgtctctcaagatcctaacttcgagattgtcacacctcggatctttgctcttgtctgtttccgcctcgtgcctgtgaaagacgaagaaaagaagtgtaataaccgaaaccgtgaactcctagacgcagtgaactcttcagggaaactcttcatgtcgcacactgctttatcggggaaaatcgtactacgttgcgcaataggagcgccattgacggaggagaagcacgttaaggaggcgtggaagattattcaggaagaagcatcttacttgcttcacaagtaa

SEQ ID NO: 88107 - protein, 479 aa, Arabidopsis thaliana
  peptide (1)..(479): Ceres Seq. ID no. 12705682
MDSEQLREYGHLMVDFIADYYKTIEDFPVLSQVQPGYLHKLLPDSAPDHPETLDQVLDDVRAKILPGVTHWQSPSFFAYYPSNSSVAGFLGEMLSAGLGIVGFSWVTSPAATELEMIVLDWVAKLLNLPEQFMSKGNGGGVIQGSASEAVLVVLIAARDKVLRSVGKNALEKLVVYSSDQTHSALQKACQIAGIHPENCRVLTTDSSTNYALRPESLQEAVSRDLEAGLIPFFLCANVGTTSSTAVDPLAALGKIANSNGIWFHVDAAYAGSACICPEYRQYIDGVETADSFNMNAHKWFLTNFDCSLLWVKDQDSLTLALSTNPEFLKNKASQANLVVDYKDWQIPLGRRFRSLKLWMVLRLYGSETLKSYIRNHIKLAKEFEQLVSQDPNFEIVTPRIFALVCFRLVPVKDEEKKCNNRNRELLDAVNSSGKLFMSHTALSGKIVLRCAIGAPLTEEKHVKEAWKIIQEEASYLLHK

SEQ ID NO: 88108 - protein, 467 aa, Arabidopsis thaliana
  peptide (1)..(467): Ceres Seq. ID no. 12705683
MVDFIADYYKTIEDFPVLSQVQPGYLHKLLPDSAPDHPETLDQVLDDVRAKILPGVTHWQSPSFFAYYPSNSSVAGFLGEMLSAGLGIVGFSWVTSPAATELEMIVLDWVAKLLNLPEQFMSKGNGGGVIQGSASEAVLVVLIAARDKVLRSVGKNALEKLVVYSSDQTHSALQKACQIAGIHPENCRVLTTDSSTNYALRPESLQEAVSRDLEAGLIPFFLCANVGTTSSTAVDPLAALGKIANSNGIWFHVDAAYAGSACICPEYRQYIDGVETADSFNMNAHKWFLTNFDCSLLWVKDQDSLTLALSTNPEFLKNKASQANLVVDYKDWQIPLGRRFRSLKLWMVLRLYGSETLKSYIRNHIKLAKEFEQLVSQDPNFEIVTPRIFALVCFRLVPVKDEEKKCNNRNRELLDAVNSSGKLFMSHTALSGKIVLRCAIGAPLTEEKHVKEAWKIIQEEASYLLHK

SEQ ID NO: 88109 - protein, 387 aa, Arabidopsis thaliana
  peptide (1)..(387): Ceres Seq. ID no. 12705684
MLSAGLGIVGFSWVTSPAATELEMIVLDWVAKLLNLPEQFMSKGNGGGVIQGSASEAVLVVLIAARDKVLRSVGKNALEKLVVYSSDQTHSALQKACQIAGIHPENCRVLTTDSSTNYALRPESLQEAVSRDLEAGLIPFFLCANVGTTSSTAVDPLAALGKIANSNGIWFHVDAAYAGSACICPEYRQYIDGVETADSFNMNAHKWFLTNFDCSLLWVKDQDSLTLALSTNPEFLKNKASQANLVVDYKDWQIPLGRRFRSLKLWMVLRLYGSETLKSYIRNHIKLAKEFEQLVSQDPNFEIVTPRIFALVCFRLVPVKDEEKKCNNRNRELLDAVNSSGKLFMSHTALSGKIVLRCAIGAPLTEEKHVKEAWKIIQEEASYLLHK

SEQ ID NO: 88110 - DNA, 664 bp, Arabidopsis thaliana
  misc_feature (1)..(664): Ceres Seq. ID no. 12705800
  misc_feature (1)..(664): Ortholog of  Ceres SEQ ID NO 14304167 as cited in SEQ ID NO 56367
ttttggaatctgaagtgaatcgtcggaaaaatttatcagtttcgagattcggagatctgcaagggagaagatgatcgtttgcgtcgccgtcgtcggccaccagaacaatccgctttacatacaaagcttcacggatgctgacgatgctctcaagctccaccacattgttcattgctcccttgatgtcatcgaagagcgagtgaacaatccgaaaaagtctggtacaacactgaacgaggcttttcttggcttgctctatcctactgtgaactacaaagtgtatggttacttgactaataccaaggttaaatttatattggtcactactgatttggatgttagagacaccgatgtgagaagtttcttcaggaagttccatgctgcttacgttgatgcagtctcaaacccctttcatgtccctggcaaaaagataacctcgagaacctttgcgcaaactgtaagcaacatcgttggatcgtacggtttgaactgaccttctcttataagttgctttttgtacctcaaacttgtgttttacggagcattgagcaagtctcatttctttatcatcatatgttgttaatatcaactctgaaattgctgtaaggtgacttgttgcttcacatgttacctttttactcgactagttcctctcaatttgacc

SEQ ID NO: 88111 - protein, 140 aa, Arabidopsis thaliana
  peptide (1)..(140): Ceres Seq. ID no. 12705801
MIVCVAVVGHQNNPLYIQSFTDADDALKLHHIVHCSLDVIEERVNNPKKSGTTLNEAFLGLLYPTVNYKVYGYLTNTKVKFILVTTDLDVRDTDVRSFFRKFHAAYVDAVSNPFHVPGKKITSRTFAQTVSNIVGSYGLN

SEQ ID NO: 88112 - DNA, 1188 bp, Arabidopsis thaliana
  misc_feature (1)..(1188): Ceres Seq. ID no. 12705839
  misc_feature (1)..(1188): Ortholog of  Ceres SEQ ID NO 13597334 as cited in SEQ ID NO 64244
atgattgctcgttttgtgctcagcattctaatcgtagcggcgatagtttctggtagtgagttttctgatactcgtgatgcaaaagtagaaaaaatcttaaagaaactcaacaaacctgctcttaaatctatcaagagtccagatggagatataatagactgcgttcatatgaataatcatccaatttatgatcatcctttattcaaaaactacacgattcagatgaaaccaagttcttaccctaaaggtaaaaataatgaatcttcagacaaagagaaacaaagtgttgtgactcaactatggacagttaacgggaaatgccccaaaaacagtattccgatcagaagaacgagaagaaaagaaattttgcgaaccgaatatatgcaaagatatgacaaaaagaatccaaacataataaatcatcctaaagcatcaactagtaactccatacatgagtacgcgcaaatccaagcgaaaggaaagtttcatggagcccatgcggatataaatgtttggaaaccttttgtacaaacaccaaaagagtttagcctagcacaaatgtgggttatggctggtccgttttctgaagttaatagcgttgaagctggttggcaggtgtatcaagatcgttatggcgatgacaacccaagatactttattttttggactgcggatgggtaccactcaggctgttacaatcttgattgccaaggatttgttcctgtcagccaaaaatttgcccttggtgcagccgttagcaatgtttccaccttcgatggtcaacaataccatatttccacaactatatggaaggatccaaattcagggaattggtggttaaaatttggtgatgaatttgtcggatattggccttccatattgttcaaccatctaaaagatggtgcgacagaaattcagtggggaggtgaaataataaattttaaagatggtgcactacacaccacgacgagaatggggagtggacattttgcagagtctggatatcaaaaagcaagttatttcaaggatgttgagataattgatgaacgtgatattcatagtagtcctaaagaaggttattcttatatgacgcaagagagttgttataacatcaggtctggctatgctaaagtatggggagtttatttttattatggtggcccaggtcgaaatctgaattgtaaataa

SEQ ID NO: 88113 - protein, 395 aa, Arabidopsis thaliana; identical to SEQ ID NO: 70510
  peptide (1)..(395): Ceres Seq. ID no. 12705840

SEQ ID NO: 88114 - protein, 339 aa, Arabidopsis thaliana; identical to SEQ ID NO: 70511
  peptide (1)..(339): Ceres Seq. ID no. 12705841

SEQ ID NO: 88115 - protein, 321 aa, Arabidopsis thaliana
  peptide (1)..(321): Ceres Seq. ID no. 12705842
MKPSSYPKGKNNESSDKEKQSVVTQLWTVNGKCPKNSIPIRRTRRKEILRTEYMQRYDKKNPNIINHPKASTSNSIHEYAQIQAKGKFHGAHADINVWKPFVQTPKEFSLAQMWVMAGPFSEVNSVEAGWQVYQDRYGDDNPRYFIFWTADGYHSGCYNLDCQGFVPVSQKFALGAAVSNVSTFDGQQYHISTTIWKDPNSGNWWLKFGDEFVGYWPSILFNHLKDGATEIQWGGEIINFKDGALHTTTRMGSGHFAESGYQKASYFKDVEIIDERDIHSSPKEGYSYMTQESCYNIRSGYAKVWGVYFYYGGPGRNLNCK

SEQ ID NO: 88116 - DNA, 696 bp, Arabidopsis thaliana
  misc_feature (1)..(696): Ceres Seq. ID no. 12705902
  misc_feature (1)..(696): Ortholog of  Ceres SEQ ID NO 13598420 as cited in SEQ ID NO 63088
atggagtcggatatcgagattttgtctgaagctgatgcgtctatgcggaagctacgcattttcggaattgatgatcgcgaagatgagaatgggagaagaagaatcaaagatgttgaagtttatgttccgattgtgtgtggatcgattgctttttatcttggaaagaaagccacagaatatcgaacacataagtggactgtttatgtacgtggagctacgaatgaggatcttggtgtggttatcaagcgggttatcttccatttgcatccaagttttaataatccaactagagtggttgatgctcctccctttgcattgtctgagtgtggttggggagaattcaaaatcgacataaccgttttcttccataccgatgtctgtgaaaagaagttggagttgtctcacgtcttaaagctgaacccggagaatgcatatggtcctattcctaagtctattaagatacccgttgtcgctgagtcttacaatgaagttgtctttccagacccttttgagagttttgtcgcccgtgttcataatcacccggctatacagatctctaacatcccagatggtttgaacctgcctcctccagctcgtcagaaggtacaagctgatattgccaagctaaaaagacagttgataatggtagatgggcaacctgaaggacttgagtcttcctctggctatgaatgttaa

SEQ ID NO: 88117 - protein, 231 aa, Arabidopsis thaliana
  peptide (1)..(231): Ceres Seq. ID no. 12705903
MESDIEILSEADASMRKLRIFGIDDREDENGRRRIKDVEVYVPIVCGSIAFYLGKKATEYRTHKWTVYVRGATNEDLGVVIKRVIFHLHPSFNNPTRVVDAPPFALSECGWGEFKIDITVFFHTDVCEKKLELSHVLKLNPENAYGPIPKSIKIPVVAESYNEVVFPDPFESFVARVHNHPAIQISNIPDGLNLPPPARQKVQADIAKLKRQLIMVDGQPEGLESSSGYEC

SEQ ID NO: 88118 - protein, 217 aa, Arabidopsis thaliana
  peptide (1)..(217): Ceres Seq. ID no. 12705904
MRKLRIFGIDDREDENGRRRIKDVEVYVPIVCGSIAFYLGKKATEYRTHKWTVYVRGATNEDLGVVIKRVIFHLHPSFNNPTRVVDAPPFALSECGWGEFKIDITVFFHTDVCEKKLELSHVLKLNPENAYGPIPKSIKIPVVAESYNEVVFPDPFESFVARVHNHPAIQISNIPDGLNLPPPARQKVQADIAKLKRQLIMVDGQPEGLESSSGYEC

SEQ ID NO: 88119 - protein, 117 aa, Arabidopsis thaliana
  peptide (1)..(117): Ceres Seq. ID no. 12705905
WSRISRFCLKLMRLCGSYAFSELMIAKMRMGEEESKMLKFMFRLCVDRLLFILERKPQNIEHISGLFMYVELRMRILVWLSSGLSSICIQVLIIQLEWLMLLPLHCLSVVGENSKST

SEQ ID NO: 88120 - DNA, 654 bp, Arabidopsis thaliana
  misc_feature (1)..(654): Ceres Seq. ID no. 12705917
  misc_feature (1)..(654): Ortholog of  Ceres SEQ ID NO 13659881 as cited in SEQ ID NO 66938
atggctgggacaggatcatcaagaaacaacgaagaagacaatcaacaaaacacaaattgggtttggtacaaacacaccaataataacctaagtacgagccacaacaatcagatatggcagcagccaagcctcgatctatatccgggtcagatcgacgtctgtgatatgaccacgtcatcgagatctctaacgataagctgtcaagagtgtggaaaccaagccaagaaagggtgcacgcacgggcggtgtagaacttgctgcaagagtaacggactccactgtcccacccacgtgaggagcacgtggatccccattgccaaacgccgtgagcggcagcagcagctacagacgccaacctccaacccaaccggcggtagcggcagagttgggaagtatagagacattaatcaacatgctactttagactcatcagggttagagatgggagagacaagatttccagatgaagtgagctcggatgcacttttccgatgcgtcagaatgagtggtaccgatgatggagagggccaatacgcataccaaacgacggtgggcatagctggtcatctctttaaaggaattctctataaccaaggtccagaaaacaagtccatgcgcagtacacaattctacgagaacccaccaagatcttaa

SEQ ID NO: 88121 - protein, 217 aa, Arabidopsis thaliana; identical to SEQ ID NO: 83723
  peptide (1)..(217): Ceres Seq. ID no. 12705918

SEQ ID NO: 88122 - protein, 162 aa, Arabidopsis thaliana; identical to SEQ ID NO: 83724
  peptide (1)..(162): Ceres Seq. ID no. 12705919

SEQ ID NO: 88123 - DNA, 1248 bp, Arabidopsis thaliana
  misc_feature (1)..(1248): Ceres Seq. ID no. 12705920
  misc_feature (1)..(1248): Ortholog of  Ceres SEQ ID NO 13594727 as cited in SEQ ID NO 52169
  misc_feature (1)..(1248): Ortholog of  Ceres SEQ ID NO 14314050 as cited in SEQ ID NO 59952
  misc_feature (1)..(1248): Ortholog of  Ceres SEQ ID NO 13596474 as cited in SEQ ID NO 62169
  misc_feature (1)..(1248): Ortholog of  Ceres SEQ ID NO 13598714 as cited in SEQ ID NO 62656
  misc_feature (1)..(1248): Ortholog of  Ceres SEQ ID NO 13596969 as cited in SEQ ID NO 63375
  misc_feature (1)..(1248): Ortholog of  Ceres SEQ ID NO 14302434 as cited in SEQ ID NO 63410
  misc_feature (1)..(1248): Ortholog of  Ceres SEQ ID NO 13597519 as cited in SEQ ID NO 64759
  misc_feature (1)..(1248): Ortholog of  Ceres SEQ ID NO 14302388 as cited in SEQ ID NO 65655
  misc_feature (1)..(1248): Ortholog of  Ceres SEQ ID NO 15170183 as cited in SEQ ID NO 65667
  misc_feature (1)..(1248): Ortholog of  Ceres SEQ ID NO 13587054 as cited in SEQ ID NO 0
atatctcctaccatcacaaagtcatctccttcttctttcttgatctagctagcggaaaatttgacaatggcaagaatcggaagctttctcattattctttacctcatttacgctcttactctctgcatctgcgacgacgacgagagtaactatggcggcgacaaagggaacctcttcccaggtttctacagaagctcgtgccctagagccgaggagatcgtgaggtcagttgtagccaaagctgttgcaagggagactcgtatggctgcttctctcatgaggctccatttccacgattgtttcgttcagggttgtgatggatcgttgcttctagacaccagtgggagtatagttactgagaagaactctaacccgaacagcagatcggctcgcgggtttgaagttgttgacgagatcaaggcagcattagagaacgaatgccctaacactgtttcttgtgctgatgccttaactctagccgctagagactcctctgttcttactggtggaccaagctggatggttcctttgggaagaagagattcgacaagtgcaagcttgagtggatcaaacaacaacattcctgcacccaacaacactttcaacacaattgtcacgagatttaacaaccaaggtctcgatctcaccgacgttgttgctctctccgggagccacaccattggattttcaagatgcactagtttcagacagagactgtacaaccaatccggaaacggaagtcccgacagaaccttagagcaatcctacgctgctaacttgcgccaaaggtgccctagatcgggtggggaccagaacctgtcagagcttgacatcaacagcgctggaagatttgataacagctacttcaagaacttgatcgagaacatgggactgttgaattccgacgaggtcttgttctctagcaatgagcaatcaagagagctcgtcaagaagtatgcagaggatcaagaagagttcttcgagcagttcgcggagtcgatgatcaagatggggaatatctctcccttgacaggttcgagtggtgagatcagaaagaattgcaggaaaattaataactcttgatttcctagtatcggatgggagaaatagaaatgtgacatgttttggaggaaggaatttatgtttatgtttttttttatattgtatgagtctgtatttctttgtgtcaagaatttgaattttgtaagtttaaatgattgaaactatctataattaaaatgttattac

SEQ ID NO: 88124 - protein, 338 aa, Arabidopsis thaliana; identical to SEQ ID NO: 42050
  peptide (1)..(338): Ceres Seq. ID no. 12705921

SEQ ID NO: 88125 - protein, 273 aa, Arabidopsis thaliana; identical to SEQ ID NO: 42051
  peptide (1)..(273): Ceres Seq. ID no. 12705922

SEQ ID NO: 88126 - protein, 268 aa, Arabidopsis thaliana; identical to SEQ ID NO: 42052
  peptide (1)..(268): Ceres Seq. ID no. 12705923

SEQ ID NO: 88127 - DNA, 1563 bp, Arabidopsis thaliana
  misc_feature (1)..(1563): Ceres Seq. ID no. 12705928
  misc_feature (1)..(1563): Ortholog of  Ceres SEQ ID NO 15175771 as cited in SEQ ID NO 55443
atgtctctcaacgttgatcttgacgtatgtgttttggagagacccaatgtgtgttcttttaaaaagaggagttgctccaagttgagttgttccttgacgaagaagagaagaagtagcaaggtgatgtccgtggagatcttcgaggatgagcatgacgcggaggagttaaaggtggttgatgcattccgccaagtgcttattctcgatgaactacttccggacaaacatgatgattaccatatgatgcttaggtttttgaaggctagaaaatttgatcttgagaaaacaaatcaaatgtggtctgacatgctccgatggaggaaggagtttggtgctgacacagttatggaggattttgaatttaaggaaattgatgaagtgttgaaatactaccctcaaggacaccatggagtcgacaaggaaggaagaccggtgtacattgagaggctaggtcaagtagactctaccaagttgatgcaagtcacaaccatggatagatatgtgaactaccatgtgatggagtttgagaggactttcaatgttaagttcccagcatgctccatcgcggcaaagaagcacattgatcaaagtacaacaattcttgatgtccaaggagtggggctgaaaaacttcaacaaggcagcaagggatttgattacgcgtcttcaaaaggtcgatggtgacaactatccagagaccttgaacaggatgtttatcatcaatgctggctcaggattcaggatgttgtggaacacggttaagtctttccttgacccaaagactacagcaaagatccatgttcttggcaacaagtaccaaagcaagttgcttgaaataattgatgctagtgagctgcctgagttcttgggaggttcttgtacttgtgctgacaatgggggttgcatgcgctcggacaaaggaccatggaacaatccagatattatgaaggggaataactctgcagttgaggaagctcctgaaactgaccagtcacagccctctccttgtcaaaatgtcgtggttgctcatccagcttggaacataccagaagctcacaaattttccctctcaaaaagggatgtttacgccattcaagaagcttgcaaagctacaaatgaaagtggaaggtctcctattttcactggagtcatggcttttgtaatgggtgtagtcaccatgattagagtgactaaaaacgttccaaggaagctaaccgagtcaactatatactctagcccggtttactgcgacgaaaactcgatgaacaagagctcgatgcatgggaagaaaatggcaacaacaaccatctcaggggaagatttcatggcggtcatgaaacgaatggctgagcttgagcagaaagtcacaaacttgagtgcacagccagcaactatgcctcctgaaaaggaagagatgcttaatgctgccattagccgagccgatttcttggaacaagaacttgctgcaaccaagaaggctcttgatgattctcttacccgacaagaggaccttgtggcatacgttgagagaaagaagaagaagaagaagctgttcacttggtaa

SEQ ID NO: 88128 - protein, 520 aa, Arabidopsis thaliana
  peptide (1)..(520): Ceres Seq. ID no. 12705929
MSLNVDLDVCVLERPNVCSFKKRSCSKLSCSLTKKRRSSKVMSVEIFEDEHDAEELKVVDAFRQVLILDELLPDKHDDYHMMLRFLKARKFDLEKTNQMWSDMLRWRKEFGADTVMEDFEFKEIDEVLKYYPQGHHGVDKEGRPVYIERLGQVDSTKLMQVTTMDRYVNYHVMEFERTFNVKFPACSIAAKKHIDQSTTILDVQGVGLKNFNKAARDLITRLQKVDGDNYPETLNRMFIINAGSGFRMLWNTVKSFLDPKTTAKIHVLGNKYQSKLLEIIDASELPEFLGGSCTCADNGGCMRSDKGPWNNPDIMKGNNSAVEEAPETDQSQPSPCQNVVVAHPAWNIPEAHKFSLSKRDVYAIQEACKATNESGRSPIFTGVMAFVMGVVTMIRVTKNVPRKLTESTIYSSPVYCDENSMNKSSMHGKKMATTTISGEDFMAVMKRMAELEQKVTNLSAQPATMPPEKEEMLNAAISRADFLEQELAATKKALDDSLTRQEDLVAYVERKKKKKKLFTW

SEQ ID NO: 88129 - protein, 479 aa, Arabidopsis thaliana
  peptide (1)..(479): Ceres Seq. ID no. 12705930
MSVEIFEDEHDAEELKVVDAFRQVLILDELLPDKHDDYHMMLRFLKARKFDLEKTNQMWSDMLRWRKEFGADTVMEDFEFKEIDEVLKYYPQGHHGVDKEGRPVYIERLGQVDSTKLMQVTTMDRYVNYHVMEFERTFNVKFPACSIAAKKHIDQSTTILDVQGVGLKNFNKAARDLITRLQKVDGDNYPETLNRMFIINAGSGFRMLWNTVKSFLDPKTTAKIHVLGNKYQSKLLEIIDASELPEFLGGSCTCADNGGCMRSDKGPWNNPDIMKGNNSAVEEAPETDQSQPSPCQNVVVAHPAWNIPEAHKFSLSKRDVYAIQEACKATNESGRSPIFTGVMAFVMGVVTMIRVTKNVPRKLTESTIYSSPVYCDENSMNKSSMHGKKMATTTISGEDFMAVMKRMAELEQKVTNLSAQPATMPPEKEEMLNAAISRADFLEQELAATKKALDDSLTRQEDLVAYVERKKKKKKLFTW

SEQ ID NO: 88130 - protein, 440 aa, Arabidopsis thaliana
  peptide (1)..(440): Ceres Seq. ID no. 12705931
MMLRFLKARKFDLEKTNQMWSDMLRWRKEFGADTVMEDFEFKEIDEVLKYYPQGHHGVDKEGRPVYIERLGQVDSTKLMQVTTMDRYVNYHVMEFERTFNVKFPACSIAAKKHIDQSTTILDVQGVGLKNFNKAARDLITRLQKVDGDNYPETLNRMFIINAGSGFRMLWNTVKSFLDPKTTAKIHVLGNKYQSKLLEIIDASELPEFLGGSCTCADNGGCMRSDKGPWNNPDIMKGNNSAVEEAPETDQSQPSPCQNVVVAHPAWNIPEAHKFSLSKRDVYAIQEACKATNESGRSPIFTGVMAFVMGVVTMIRVTKNVPRKLTESTIYSSPVYCDENSMNKSSMHGKKMATTTISGEDFMAVMKRMAELEQKVTNLSAQPATMPPEKEEMLNAAISRADFLEQELAATKKALDDSLTRQEDLVAYVERKKKKKKLFTW

SEQ ID NO: 88131 - DNA, 1866 bp, Arabidopsis thaliana
  misc_feature (1)..(1866): Ceres Seq. ID no. 12705961
  misc_feature (1)..(1866): Ortholog of  Ceres SEQ ID NO 13654989 as cited in SEQ ID NO 63117
  misc_feature (1)..(1866): Ortholog of  Ceres SEQ ID NO 13655640 as cited in SEQ ID NO 63844
  misc_feature (1)..(1866): Ortholog of  Ceres SEQ ID NO 13584744 as cited in SEQ ID NO 69137
atggcttcttctcctgaatctgctcctccaacaaactccacctcttctccatctccaccgtctaataccaattcaaccacctcttctccgccggctccgtctcctccttctcctacacctcctcaaggagactcatcatcatcgccacctcctgattccacatctccaccagctccacaagctcctaaccctcctaattcctctaataactctccttcccctccgtcacagggcggtggaggagaaagaggaaatggaggaaacaatggtggcaatgatactccaccgtcacgcggctctcctccttctcctccttctaggagtaatggagataatggtggtagcagatcatcgccaccaggagacactggaggctctcgctcagacaaccctccttctagcggaggaagcagtggaggaggtggaggtggaagaagtaatacgaatacagcgatcatagttggtgtattagtcggagctggacttttgatgatcgttcttattattgtgtgtcttagacgcaaaaagaagagaaaagactccttctaccctgaacccatgaaaggaaaccaatatcaatactatggaaacaacaacaacaacaatgcttcacagaattatccgaattggcacctaaattcacaaggccaaaaccaacaatctactggtggttggggaggcggtggaccatcaccgcctcctcctccgcggatgcctacaagcggagaagattcttccatgtactcaggcccatcacgcccagttttacctcctccttcgcctgctctagccctcggattcaacaagagcacttttacttaccaagagcttgcggctgcaacaggagggtttacggatgctaaccttttgggacagggaggatttgggtatgtccataaaggagtcttgcctagcgggaaagaagtagcagttaagagtttaaaagcgggtagcggacaaggagagagggagtttcaagctgaggtcgatatcattagccgtgtgcatcatcggtatcttgtttctttggttggatattgcatagctgatggacagaggatgttggtttatgagtttgttcctaacaaaactttggaatatcatcttcatgggaaaaatcttccggtaatggagttctccactaggttgcgtatcgccttaggtgctgcgaaaggactcgcttaccttcacgaagactgccatcctcggatcattcaccgcgacatcaagtctgcaaatattctcttggacttcaactttgatgctatggtggctgattttggattagctaagttaacatctgataacaacactcatgtatctactcgtgtgatgggaactttcggatatctagctccagaatatgcttcaagcggtaaattaaccgagaaatccgatgttttctcttacggagttatgttattggaacttataactggaaaacgaccggttgataatagcatcaccatggacgacaccttagtagattgggtattcatgcatgctcggcctcttatggctcgcgcgctagaagatggaaactttaatgagctcgcagatgcgaggcttgaaggcaactacaacccgcaagaaatggctcgaatggtgacttgtgccgctgctagcattcgtcattcggggcgtaaacgtccaaagatgagccagatagtaagagcgttagaaggagaagtgtccttagatgctttaaacgaaggtgtgaagccaggacacagtaacgtttacgggtcattgggagcaagctcggattatagtcagacatcttacaatgcagacatgaagaaattcagacagatagctttgtcgagccaagaattcccaatcgttacgtatgtgtatgattcttga

SEQ ID NO: 88132 - protein, 621 aa, Arabidopsis thaliana
  peptide (1)..(621): Ceres Seq. ID no. 12705962
MASSPESAPPTNSTSSPSPPSNTNSTTSSPPAPSPPSPTPPQGDSSSSPPPDSTSPPAPQAPNPPNSSNNSPSPPSQGGGGERGNGGNNGGNDTPPSRGSPPSPPSRSNGDNGGSRSSPPGDTGGSRSDNPPSSGGSSGGGGGGRSNTNTAIIVGVLVGAGLLMIVLIIVCLRRKKKRKDSFYPEPMKGNQYQYYGNNNNNNASQNYPNWHLNSQGQNQQSTGGWGGGGPSPPPPPRMPTSGEDSSMYSGPSRPVLPPPSPALALGFNKSTFTYQELAAATGGFTDANLLGQGGFGYVHKGVLPSGKEVAVKSLKAGSGQGEREFQAEVDIISRVHHRYLVSLVGYCIADGQRMLVYEFVPNKTLEYHLHGKNLPVMEFSTRLRIALGAAKGLAYLHEDCHPRIIHRDIKSANILLDFNFDAMVADFGLAKLTSDNNTHVSTRVMGTFGYLAPEYASSGKLTEKSDVFSYGVMLLELITGKRPVDNSITMDDTLVDWVFMHARPLMARALEDGNFNELADARLEGNYNPQEMARMVTCAAASIRHSGRKRPKMSQIVRALEGEVSLDALNEGVKPGHSNVYGSLGASSDYSQTSYNADMKKFRQIALSSQEFPIVTYVYDS

SEQ ID NO: 88133 - protein, 458 aa, Arabidopsis thaliana
  peptide (1)..(458): Ceres Seq. ID no. 12705963
MIVLIIVCLRRKKKRKDSFYPEPMKGNQYQYYGNNNNNNASQNYPNWHLNSQGQNQQSTGGWGGGGPSPPPPPRMPTSGEDSSMYSGPSRPVLPPPSPALALGFNKSTFTYQELAAATGGFTDANLLGQGGFGYVHKGVLPSGKEVAVKSLKAGSGQGEREFQAEVDIISRVHHRYLVSLVGYCIADGQRMLVYEFVPNKTLEYHLHGKNLPVMEFSTRLRIALGAAKGLAYLHEDCHPRIIHRDIKSANILLDFNFDAMVADFGLAKLTSDNNTHVSTRVMGTFGYLAPEYASSGKLTEKSDVFSYGVMLLELITGKRPVDNSITMDDTLVDWVFMHARPLMARALEDGNFNELADARLEGNYNPQEMARMVTCAAASIRHSGRKRPKMSQIVRALEGEVSLDALNEGVKPGHSNVYGSLGASSDYSQTSYNADMKKFRQIALSSQEFPIVTYVYDS

SEQ ID NO: 88134 - protein, 435 aa, Arabidopsis thaliana
  peptide (1)..(435): Ceres Seq. ID no. 12705964
MKGNQYQYYGNNNNNNASQNYPNWHLNSQGQNQQSTGGWGGGGPSPPPPPRMPTSGEDSSMYSGPSRPVLPPPSPALALGFNKSTFTYQELAAATGGFTDANLLGQGGFGYVHKGVLPSGKEVAVKSLKAGSGQGEREFQAEVDIISRVHHRYLVSLVGYCIADGQRMLVYEFVPNKTLEYHLHGKNLPVMEFSTRLRIALGAAKGLAYLHEDCHPRIIHRDIKSANILLDFNFDAMVADFGLAKLTSDNNTHVSTRVMGTFGYLAPEYASSGKLTEKSDVFSYGVMLLELITGKRPVDNSITMDDTLVDWVFMHARPLMARALEDGNFNELADARLEGNYNPQEMARMVTCAAASIRHSGRKRPKMSQIVRALEGEVSLDALNEGVKPGHSNVYGSLGASSDYSQTSYNADMKKFRQIALSSQEFPIVTYVYDS

SEQ ID NO: 88135 - DNA, 1047 bp, Arabidopsis thaliana
  misc_feature (1)..(1047): Ceres Seq. ID no. 12706036
  misc_feature (1)..(1047): Ortholog of  Ceres SEQ ID NO 14315035 as cited in SEQ ID NO 56880
  misc_feature (1)..(1047): Ortholog of  Ceres SEQ ID NO 13594276 as cited in SEQ ID NO 57728
  misc_feature (1)..(1047): Ortholog of  Ceres SEQ ID NO 13594147 as cited in SEQ ID NO 58975
  misc_feature (1)..(1047): Ortholog of  Ceres SEQ ID NO 13655302 as cited in SEQ ID NO 63307
  misc_feature (1)..(1047): Ortholog of  Ceres SEQ ID NO 13597380 as cited in SEQ ID NO 64054
  misc_feature (1)..(1047): Ortholog of  Ceres SEQ ID NO 12625474 as cited in SEQ ID NO 64169
  misc_feature (1)..(1047): Ortholog of  Ceres SEQ ID NO 13597502 as cited in SEQ ID NO 64681
atggttgaaagaatgtctaaagcttgttggttagttgctgccatcatatttacagcggccacggtggtttacggacaacaagcgccgtgtttcttcgtttttggagactcaatgtccgataatggcaataataataacttgaaatccgaggcaaaagtcaacttttcaccttatggtaatgactttcctaaaggcccgaccggccgtttttcaaatggccgcactatccctgatattatcggtgaattatccggttttaaggattttataccgccattcgccgaagcatcacctgaacaagctcacaccgggatgaactacgcttccggtggaagtggacttcgtgaagaaactagcgaacacttgggagatagaatcagtataagaaagcaactacaaaatcacaagacgtccataacgaaagcgaatgtaccagcagaaagattgcaacaatgtctctacatgatcaacattggaagcaacgattacatcaacaattacttcatgtcaaagccgtacaacactaaacgacgctacactcctaaacaatacgcatattctctcattattatttaccgttcccacttaaagaatttgcaccgtctaggagcgaggaaggtggcagttttcggactcagccagattgggtgcacaccaaagataatgaagtcacacagtgacggtaaaatctgttcccgcgaagtgaatgaagcagtgaagatttttaataagaaccttgacgaccttgtcatggatttcaataagaaggtcagaggtgcaaagtttacctacgtcgatcttttctccggtggagatccccaagccttcattttcctaggatttaaggttggaggtaagagttgttgcacagtaaacccgggggaagaactttgtgtcccaaaccagccggtttgtgcaaacaggactgaatatgtcttttgggatgatcttcacagcacggaagccactaatatggtagtggcgaagggctcgttcgacggaatcataagtaaaccgtatagtatcgcccagcttgcgaaggaatag

SEQ ID NO: 88136 - protein, 348 aa, Arabidopsis thaliana
  peptide (1)..(348): Ceres Seq. ID no. 12706037
MVERMSKACWLVAAIIFTAATVVYGQQAPCFFVFGDSMSDNGNNNNLKSEAKVNFSPYGNDFPKGPTGRFSNGRTIPDIIGELSGFKDFIPPFAEASPEQAHTGMNYASGGSGLREETSEHLGDRISIRKQLQNHKTSITKANVPAERLQQCLYMINIGSNDYINNYFMSKPYNTKRRYTPKQYAYSLIIIYRSHLKNLHRLGARKVAVFGLSQIGCTPKIMKSHSDGKICSREVNEAVKIFNKNLDDLVMDFNKKVRGAKFTYVDLFSGGDPQAFIFLGFKVGGKSCCTVNPGEELCVPNQPVCANRTEYVFWDDLHSTEATNMVVAKGSFDGIISKPYSIAQLAKE

SEQ ID NO: 88137 - protein, 344 aa, Arabidopsis thaliana; identical to SEQ ID NO: 72114
  peptide (1)..(344): Ceres Seq. ID no. 12706038

SEQ ID NO: 88138 - protein, 311 aa, Arabidopsis thaliana; identical to SEQ ID NO: 72115
  peptide (1)..(311): Ceres Seq. ID no. 12706039

SEQ ID NO: 88139 - DNA, 1143 bp, Arabidopsis thaliana
  misc_feature (1)..(1143): Ceres Seq. ID no. 12706071
  misc_feature (1)..(1143): Ortholog of  Ceres SEQ ID NO 13647016 as cited in SEQ ID NO 20325
  misc_feature (1)..(1143): Ortholog of  Ceres SEQ ID NO 15179824 as cited in SEQ ID NO 66250
  misc_feature (1)..(1143): Ortholog of  Ceres SEQ ID NO 13657872 as cited in SEQ ID NO 66357
atggtgcgttttgtcgtggaaaaaccacagataatgtcagctagtcaaaacattgtcgtatcagagactacaatgtcaagtatcatccccaacaacaacaacaacaacaacaactcttcttcacagaaactccctccttgtttaatctcaatttccaagaaaaagcttctcaagaacatcgacatcatcaatggtggtggacaaagaatcaacgcttgggtagattcaatgcgtgcttcttctcctactcatctcaaatctcttccttcttctatctccacacagcaacaactcaactcatggatcatgcaacatccttcagcactagaaaaattcgaacagataatggaagcttcgagagggaaacaaatcgtaatgtttcttgattatgacggtactctctctcccattgttgatgatccagacaaagctttcatgtcaagcaagatgagaagaacagtgaaaaaactggctaagtgtttccccactgctatagttactggtagatgcatagacaaggtgtataactttgtgaagcttgctgagctgtattatgctggaagccatggcatggacattaaaggtccagcaaaaggcttctccagacacaagagggttaaacagtctcttctgtaccaaccagctaatgactatcttcccatgatcgatgaagtttatagacaactcttggaaaaaacaaaatcgactccaggagccaaagtagaaaaccacaagttttgtgcttctgtgcactttcgctgcgtcgatgagaagaaatggagcgaactggttctacaggttcggtcggtattaaagaaattccctacgctgcaactgacccaaggtcggaaggttttcgaaatccgtccaatgattgaatgggataaaggaaaggctcttgagttcttgttagaatcacttggatttgggaacactaacaatgttttcccggtttatattggtgacgatcgaactgacgaagatgcatttaagatgctacgagacagaggcgaaggctttggcattcttgtctccaagtttcccaaggatactgatgcttcgtattctttgcaagatccatccgaggtgatggatttcttacgacgattggtggaatggaaacaaatgcagccaagaatgtga

SEQ ID NO: 88140 - protein, 380 aa, Arabidopsis thaliana
  peptide (1)..(380): Ceres Seq. ID no. 12706072
MVRFVVEKPQIMSASQNIVVSETTMSSIIPNNNNNNNNSSSQKLPPCLISISKKKLLKNIDIINGGGQRINAWVDSMRASSPTHLKSLPSSISTQQQLNSWIMQHPSALEKFEQIMEASRGKQIVMFLDYDGTLSPIVDDPDKAFMSSKMRRTVKKLAKCFPTAIVTGRCIDKVYNFVKLAELYYAGSHGMDIKGPAKGFSRHKRVKQSLLYQPANDYLPMIDEVYRQLLEKTKSTPGAKVENHKFCASVHFRCVDEKKWSELVLQVRSVLKKFPTLQLTQGRKVFEIRPMIEWDKGKALEFLLESLGFGNTNNVFPVYIGDDRTDEDAFKMLRDRGEGFGILVSKFPKDTDASYSLQDPSEVMDFLRRLVEWKQMQPRM

SEQ ID NO: 88141 - protein, 369 aa, Arabidopsis thaliana
  peptide (1)..(369): Ceres Seq. ID no. 12706073
MSASQNIVVSETTMSSIIPNNNNNNNNSSSQKLPPCLISISKKKLLKNIDIINGGGQRINAWVDSMRASSPTHLKSLPSSISTQQQLNSWIMQHPSALEKFEQIMEASRGKQIVMFLDYDGTLSPIVDDPDKAFMSSKMRRTVKKLAKCFPTAIVTGRCIDKVYNFVKLAELYYAGSHGMDIKGPAKGFSRHKRVKQSLLYQPANDYLPMIDEVYRQLLEKTKSTPGAKVENHKFCASVHFRCVDEKKWSELVLQVRSVLKKFPTLQLTQGRKVFEIRPMIEWDKGKALEFLLESLGFGNTNNVFPVYIGDDRTDEDAFKMLRDRGEGFGILVSKFPKDTDASYSLQDPSEVMDFLRRLVEWKQMQPRM

SEQ ID NO: 88142 - protein, 356 aa, Arabidopsis thaliana
  peptide (1)..(356): Ceres Seq. ID no. 12706074
MSSIIPNNNNNNNNSSSQKLPPCLISISKKKLLKNIDIINGGGQRINAWVDSMRASSPTHLKSLPSSISTQQQLNSWIMQHPSALEKFEQIMEASRGKQIVMFLDYDGTLSPIVDDPDKAFMSSKMRRTVKKLAKCFPTAIVTGRCIDKVYNFVKLAELYYAGSHGMDIKGPAKGFSRHKRVKQSLLYQPANDYLPMIDEVYRQLLEKTKSTPGAKVENHKFCASVHFRCVDEKKWSELVLQVRSVLKKFPTLQLTQGRKVFEIRPMIEWDKGKALEFLLESLGFGNTNNVFPVYIGDDRTDEDAFKMLRDRGEGFGILVSKFPKDTDASYSLQDPSEVMDFLRRLVEWKQMQPRM

SEQ ID NO: 88143 - DNA, 1818 bp, Arabidopsis thaliana
  misc_feature (1)..(1818): Ceres Seq. ID no. 12706095
  misc_feature (1)..(1818): Ortholog of  Ceres SEQ ID NO 15179672 as cited in SEQ ID NO 0
atggctatggcttttactctcttgttttttgcctgtttatgctcatttgtgtctccagatgctcaaggggatgcactgtttgcgttgaggatctccttacgtgcattaccgaatcagctaagtgactggaatcagaaccaagttaatccttgcacttggtcccaagttatttgtgatgacaaaaactttgtcacttctcttacattgtcagatatgaacttctcgggaaccttgtcttcaagagtaggaatcctagaaaatctcaagactcttactttaaagggaaatggaattacgggtgaaataccagaagactttggaaatctgactagcttgactagtttggatttggaggacaatcagctaactggtcgtataccatccactatcggtaatctcaagaaacttcagttcttgaccttgagtaggaacaaacttaatgggactattccggagtcactcactggtcttccaaacctgttaaacctgctgcttgattccaatagtctcagtggtcagattcctcaaagtctgtttgagatcccaaaatataatttcacgtcaaacaacttgaattgtggcggtcgtcaacctcacccttgtgtatccgcggttgcccattcaggtgattcaagcaagcctaaaactggcattattgctggagttgttgctggagttacagttgttctctttggaatcttgttgtttctgttctgcaaggataggcataaaggatatagacgtgatgtgtttgtggatgttgcaggtgaagtggacaggagaattgcatttggacagttgaaaaggtttgcatggagagagctccagttagcgacagataacttcagcgaaaagaatgtacttggtcaaggaggctttgggaaagtttacaaaggagtgcttccggataacaccaaagttgctgtgaagagattgacggatttcgaaagtcctggtggagatgctgctttccaaagggaagtagagatgataagtgtagctgttcataggaatctactccgtcttatcgggttctgcaccacacaaacagaacgccttttggtttatcccttcatgcagaatctaagtcttgcacatcgtctgagagagatcaaagcaggcgacccggttctagattgggagacgaggaaacggattgccttaggagcagcgcgtggttttgagtatcttcatgaacattgcaatccgaagatcatacatcgtgatgtgaaagcagctaatgtgttactagatgaagattttgaagcagtggttggtgattttggtttagccaagctagtagatgttagaaggactaatgtgactactcaagttcgaggaacaatgggtcacattgcaccagaatatttatcaacagggaaatcatcagagagaaccgatgttttcgggtatggaattatgcttcttgagcttgttacaggacaacgcgcaatagacttttcacgtttggaggaagaagatgatgtcttgttacttgaccacgtgaagaaactggaaagagagaagagattaggagcaatcgtagataagaatttggatggagagtatataaaagaagaagtagagatgatgatacaagtggctttgctttgtacacaaggttcaccagaagaccgaccagtgatgtctgaagttgtgaggatgttagaaggagaagggcttgcggagagatgggaagagtggcaaaacgtggaagtcacgagacgtcatgagtttgaacggttgcagaggagatttgattggggtgaagattctatgcataaccaagatgccattgaattatctggtggaagatga

SEQ ID NO: 88144 - protein, 605 aa, Arabidopsis thaliana; identical to SEQ ID NO: 79474
  peptide (1)..(605): Ceres Seq. ID no. 12706096

SEQ ID NO: 88145 - protein, 603 aa, Arabidopsis thaliana
  peptide (1)..(603): Ceres Seq. ID no. 12706097
MAFTLLFFACLCSFVSPDAQGDALFALRISLRALPNQLSDWNQNQVNPCTWSQVICDDKNFVTSLTLSDMNFSGTLSSRVGILENLKTLTLKGNGITGEIPEDFGNLTSLTSLDLEDNQLTGRIPSTIGNLKKLQFLTLSRNKLNGTIPESLTGLPNLLNLLLDSNSLSGQIPQSLFEIPKYNFTSNNLNCGGRQPHPCVSAVAHSGDSSKPKTGIIAGVVAGVTVVLFGILLFLFCKDRHKGYRRDVFVDVAGEVDRRIAFGQLKRFAWRELQLATDNFSEKNVLGQGGFGKVYKGVLPDNTKVAVKRLTDFESPGGDAAFQREVEMISVAVHRNLLRLIGFCTTQTERLLVYPFMQNLSLAHRLREIKAGDPVLDWETRKRIALGAARGFEYLHEHCNPKIIHRDVKAANVLLDEDFEAVVGDFGLAKLVDVRRTNVTTQVRGTMGHIAPEYLSTGKSSERTDVFGYGIMLLELVTGQRAIDFSRLEEEDDVLLLDHVKKLEREKRLGAIVDKNLDGEYIKEEVEMMIQVALLCTQGSPEDRPVMSEVVRMLEGEGLAERWEEWQNVEVTRRHEFERLQRRFDWGEDSMHNQDAIELSGGR

SEQ ID NO: 88146 - protein, 534 aa, Arabidopsis thaliana
  peptide (1)..(534): Ceres Seq. ID no. 12706098
MNFSGTLSSRVGILENLKTLTLKGNGITGEIPEDFGNLTSLTSLDLEDNQLTGRIPSTIGNLKKLQFLTLSRNKLNGTIPESLTGLPNLLNLLLDSNSLSGQIPQSLFEIPKYNFTSNNLNCGGRQPHPCVSAVAHSGDSSKPKTGIIAGVVAGVTVVLFGILLFLFCKDRHKGYRRDVFVDVAGEVDRRIAFGQLKRFAWRELQLATDNFSEKNVLGQGGFGKVYKGVLPDNTKVAVKRLTDFESPGGDAAFQREVEMISVAVHRNLLRLIGFCTTQTERLLVYPFMQNLSLAHRLREIKAGDPVLDWETRKRIALGAARGFEYLHEHCNPKIIHRDVKAANVLLDEDFEAVVGDFGLAKLVDVRRTNVTTQVRGTMGHIAPEYLSTGKSSERTDVFGYGIMLLELVTGQRAIDFSRLEEEDDVLLLDHVKKLEREKRLGAIVDKNLDGEYIKEEVEMMIQVALLCTQGSPEDRPVMSEVVRMLEGEGLAERWEEWQNVEVTRRHEFERLQRRFDWGEDSMHNQDAIELSGGR

SEQ ID NO: 88147 - DNA, 936 bp, Arabidopsis thaliana
  misc_feature (1)..(936): Ceres Seq. ID no. 12706099
  misc_feature (1)..(936): Ortholog of  Ceres SEQ ID NO 13638849 as cited in SEQ ID NO 52046
  misc_feature (1)..(936): Ortholog of  Ceres SEQ ID NO 13599613 as cited in SEQ ID NO 0
aactttatcacgctattctcaaacaagcaaagaaccttaaccaaaaagaaaacgtctacggagacatatggagaggaaacatcacttcgtgttagttcacaacgcttatcatggagcctggatctggtacaagctcaagcccctccttgaatcagccggccaccgcgttactgctgtcgaactcgccgcctccgggatcgacccacgaccaatccaggccgttgaaaccgtcgacgaatactccaaaccgttgatcgaaaccctcaaatctcttccagagaacgaagaggtaattctggttggattcagcttcggaggcatcaacatcgctctcgccgccgacatatttccggcgaagattaaggttcttgtgttcctcaacgccttcttgcccgacacaacccacgtgccttctcacgttctggacaagtatatggagatgcctggaggtttgggagattgtgagttttcatctcatgaaacaagaaatgggacgatgagtttattgaagatgggaccaaaattcatgaaggcacgtctttaccaaaattgtcccatagaggattacgagctggcaaaaatgttgcataggcaagggtcatttttcacagaggatctatcaaagaaagaaaagtttagcgaggaaggatatggttcggtgcaacgagtttacgtaatgagtagtgaagacaaagccatcccctgcgatttcattcgttggatgattgataatttcaacgtctcgaaagtctacgagatcgatggcggagatcacatggtgatgctctccaaaccccaaaaactctttgactctctctctgctattgccaccgattatatgtaataatcttaagtccgttttacttttttctcatcgttactaataaaacaaacccctttttccgggcaactttcatcaaaaaaacaaaacttatg

SEQ ID NO: 88148 - protein, 258 aa, Arabidopsis thaliana; identical to SEQ ID NO: 34831
  peptide (1)..(258): Ceres Seq. ID no. 12706100

SEQ ID NO: 88149 - protein, 136 aa, Arabidopsis thaliana; identical to SEQ ID NO: 34832
  peptide (1)..(136): Ceres Seq. ID no. 12706101

SEQ ID NO: 88150 - protein, 134 aa, Arabidopsis thaliana; identical to SEQ ID NO: 34833
  peptide (1)..(134): Ceres Seq. ID no. 12706102

SEQ ID NO: 88151 - DNA, 720 bp, Arabidopsis thaliana
  misc_feature (1)..(720): Ceres Seq. ID no. 12706111
  misc_feature (1)..(720): Ortholog of  Ceres SEQ ID NO 13581889 as cited in SEQ ID NO 50900
  misc_feature (1)..(720): Ortholog of  Ceres SEQ ID NO 13581902 as cited in SEQ ID NO 52223
  misc_feature (1)..(720): Ortholog of  Ceres SEQ ID NO 12585528 as cited in SEQ ID NO 62991
atggctcgtaccaagcaaacagctcgtaaatccaccggaggaaaggcaccaaggaagcaactcgcgaccaaagctgcgaggaaatcagctccagccaccggaggagtgaagaagccacacagattccgtccaggaacggtggcgttgagagaaatcaggaagtatcagaagagtactgagcttttgatccgtaagcttccgttccagagattggttcgtgagattgctcaagatttcaagacggatctgaggttccagagcagtgccgtcgcagctcttcaggaagcagctgaggcttatcttgttgggctctttgaagatactaatctctgtgcgattcatgctaagagggttacgattatgcctaaggatatccagcttgcggcaaggaaatctgctccggccaccggaggagtgaagaagccgcatagattccgtccaggaactgttgccttgagagagatcaggaagtatcagaagagcactgagcttctgatccgtaagcttcctttccagcgtctggttcgtgagatagctcaggatttcaagacggatctgaggtttcagagcagtgctgttgctgctttacaagaggctgctgaggcttaccttgttggtttgtttgaagacactaatctttgcgccattcacgctaagagggtcaccatcatgcctaaggatatccagctcgcgaggagaatcagaggagaaagagcttga

SEQ ID NO: 88152 - protein, 239 aa, Arabidopsis thaliana
  peptide (1)..(239): Ceres Seq. ID no. 12706112
MARTKQTARKSTGGKAPRKQLATKAARKSAPATGGVKKPHRFRPGTVALREIRKYQKSTELLIRKLPFQRLVREIAQDFKTDLRFQSSAVAALQEAAEAYLVGLFEDTNLCAIHAKRVTIMPKDIQLAARKSAPATGGVKKPHRFRPGTVALREIRKYQKSTELLIRKLPFQRLVREIAQDFKTDLRFQSSAVAALQEAAEAYLVGLFEDTNLCAIHAKRVTIMPKDIQLARRIRGERA

SEQ ID NO: 88153 - protein, 119 aa, Arabidopsis thaliana
  peptide (1)..(119): Ceres Seq. ID no. 12706113
MPKDIQLAARKSAPATGGVKKPHRFRPGTVALREIRKYQKSTELLIRKLPFQRLVREIAQDFKTDLRFQSSAVAALQEAAEAYLVGLFEDTNLCAIHAKRVTIMPKDIQLARRIRGERA

SEQ ID NO: 88154 - DNA, 1047 bp, Arabidopsis thaliana
  misc_feature (1)..(1047): Ceres Seq. ID no. 12706114
  misc_feature (1)..(1047): Ortholog of  Ceres SEQ ID NO 14303051 as cited in SEQ ID NO 66608
agttcttcttcttctcgtcacaggaagaaaaatgttctgttcctcgcagctctcacagccaatgaatggcctcaaagacatagttgagacgagaaattttaaggcttggctcttagatcagtatggagttcttcatgatggcaaaaaaccttaccccggtgctatctcaacattgaaaaatcttgcaacagcgggtgccaaaattgtgatcattagtaattcttctagacgtgcttcaactacaatggaaaagttgaaaggccttggctttgatccttctttcttcaccggagctataactagtggtgaactaactcatcaatctttgcagaggagagatgatccttggtttgctgcactgggaaggaggtgcattcacattacttggaatgaccgaggagcaatctctttggagggtctagatctaaatgttgtggagaatgtggaagaagctgactttgttttagcgcacggcactgaagccctaggacttccttcaggcagtgtatctccaaggactattgatgagctagagaagattttggagaaatctgcagctcgaggacttcccatgatcgtagctaatccagattacgtgactgttgaagcaaatgtttttcatatcatgccaggtacactagcttccaagtatgaagaactgggaggagaagtgaagtcgatgggaaaacctcataagatgatctatgagtctgctatagcaattgcgggagtcaatccgtctgagtctatcgcagtaggagattcgctacatcatgatataaggggagcaaatgtttcaggaattgaatcaatattcatcactggagggattcatggtaatgagcttggtctcacttcttttgatgaaactgcaagtctagactcagtcaagacccttactgctaaacacaatgcattcccaacttatgtattatcagcctttaaatggtagttttcgttttgttgtacaaatcatattattgcttcttgaactacattttgccttcatttaacactcagagagagtaatttaaaaagctcatttgc

SEQ ID NO: 88155 - protein, 316 aa, Arabidopsis thaliana; identical to SEQ ID NO: 29173
  peptide (1)..(316): Ceres Seq. ID no. 12706115

SEQ ID NO: 88156 - protein, 306 aa, Arabidopsis thaliana; identical to SEQ ID NO: 29174
  peptide (1)..(306): Ceres Seq. ID no. 12706116

SEQ ID NO: 88157 - protein, 296 aa, Arabidopsis thaliana; identical to SEQ ID NO: 29175
  peptide (1)..(296): Ceres Seq. ID no. 12706117

SEQ ID NO: 88158 - DNA, 2121 bp, Arabidopsis thaliana
  misc_feature (1)..(2121): Ceres Seq. ID no. 12711096
  misc_feature (1)..(2121): Ortholog of  Ceres SEQ ID NO 15174477 as cited in SEQ ID NO 20777
atggcgagaaaagctaacaatagttttttccttgaagaatggttaaggactgtgagtggaagtagtgtctctggtgatctagtgaagcaaaattctgctccatctgctaggtcgattattcaagcatggtctgagattcgtgaatctcttcaaaaccaaaactttgattcacgttaccttcaagctttgagagctttggttagctctgagtccactatccatgttgcagatccccaagcaaagctacttatttctatactagcttttcaagatgtatctcttccgtctgagtcttacacacttgttctcagactactctatgtgtggattaggaaagcatttcgaccgtctcaagcacttgttggtgtagcggttcaggccattcgtggcgttgttgatgacaggcgtaatctccaaccagccttagtagcgcagagtgttctggtttctggtgcgtttgcgtgtgttccttctctgtcaggagacgtgaaagtcttatgcttggaattgttatgcaggcttttggaagaagagtactctttagtgggatctcaagaagaacttgttcctgtagtgcttgcaggaattgggtatgctttatcttcttcgttggatgttcattacgtcagactattggatttattgtttggcatttggttaaaagacgagggtcctcgtggcactgtcacttacggtctgatgattcttcatttgattgagtgggttgtgtcaggttatatgcggtctaattctatcaacaagatgtctctttttgcgaacgaggtactagagacttctaaggaaaagtatgctgttttcgctgtcttcatggcagcagctggggtagtgagagcttccacggcaggattcagtagtggtgcacagagtttggagatttctaaactaagaaattcagctgaaaagcgaatagaatttgtagctcaaattttagtttctaatggtaatgttgttacacttccaaccacacagagagaaggtcccctgttgaagtgctttgctattgcattggctcgatgtgggtctgtttcttcctctgctcctctgcttttgtgtctcacttctgcattgttaactcaggtatttcctttaggccagatatatgaatcattttgcaatgcttttggcaaagagcctattggaccaagactcatttgggtcagggagcatctttctgatgttcttttcaaggaatcaggggccatatctggggctttctgcaatcaatattcatcagcaagtgaagagaacaagtatattgtggagaatatgatttgggatttctgtcaaaatctctacttacagcaccgtcaaattgctatgttgctttgtggtatagaagatacattgcttggagacatcgagaaaattgcagaatcatctttccttatggttgtcgtctttgcgctagctgttacgaaacaatggctaaaaccaatagtgtctaaagaaagaaaaatggagaatgatgctccttgtgtttcatttgtagagtccattcctgcctatgatagcttgacgaatccgaaaggggagtggttgcatcaaccatcatttctctcttcagcaaaagaatcagaggaggacgaacgaactcaattcaaagaacaacttgttttctattacatgcaacgatctttggaggtttaccctgagatcacaccttttgaaggtttagcttccggcgttgcaaccttggtccagcatctacctgcgggaagtcctgctatattttattctgttcatagccttgttgagaaggcttctacatttagcaccgaatcattgcaaggcagaaagtctgatcctggtaatcagattcttgagttgcttttgcgacttgtctctttggttgatatacaagtgttgccatatcttatgaagtcattggcacagctagttataaagttaccaaaagaaagacagaacgttgtgcttggtgaattgtatggtcaagtggctgagtcagacgatgtgattcgcaagccttctttggtctcttggctacagtcactgaactacttatgttctaataaccgtactgaagttttagcttctggatcaacgatagacacttcgaaccagttggctgctcgactctag

SEQ ID NO: 88159 - protein, 706 aa, Arabidopsis thaliana
  peptide (1)..(706): Ceres Seq. ID no. 12711097
MARKANNSFFLEEWLRTVSGSSVSGDLVKQNSAPSARSIIQAWSEIRESLQNQNFDSRYLQALRALVSSESTIHVADPQAKLLISILAFQDVSLPSESYTLVLRLLYVWIRKAFRPSQALVGVAVQAIRGVVDDRRNLQPALVAQSVLVSGAFACVPSLSGDVKVLCLELLCRLLEEEYSLVGSQEELVPVVLAGIGYALSSSLDVHYVRLLDLLFGIWLKDEGPRGTVTYGLMILHLIEWVVSGYMRSNSINKMSLFANEVLETSKEKYAVFAVFMAAAGVVRASTAGFSSGAQSLEISKLRNSAEKRIEFVAQILVSNGNVVTLPTTQREGPLLKCFAIALARCGSVSSSAPLLLCLTSALLTQVFPLGQIYESFCNAFGKEPIGPRLIWVREHLSDVLFKESGAISGAFCNQYSSASEENKYIVENMIWDFCQNLYLQHRQIAMLLCGIEDTLLGDIEKIAESSFLMVVVFALAVTKQWLKPIVSKERKMENDAPCVSFVESIPAYDSLTNPKGEWLHQPSFLSSAKESEEDERTQFKEQLVFYYMQRSLEVYPEITPFEGLASGVATLVQHLPAGSPAIFYSVHSLVEKASTFSTESLQGRKSDPGNQILELLLRLVSLVDIQVLPYLMKSLAQLVIKLPKERQNVVLGELYGQVAESDDVIRKPSLVSWLQSLNYLCSNNRTEVLASGSTIDTSNQLAARL

SEQ ID NO: 88160 - protein, 473 aa, Arabidopsis thaliana
  peptide (1)..(473): Ceres Seq. ID no. 12711098
MILHLIEWVVSGYMRSNSINKMSLFANEVLETSKEKYAVFAVFMAAAGVVRASTAGFSSGAQSLEISKLRNSAEKRIEFVAQILVSNGNVVTLPTTQREGPLLKCFAIALARCGSVSSSAPLLLCLTSALLTQVFPLGQIYESFCNAFGKEPIGPRLIWVREHLSDVLFKESGAISGAFCNQYSSASEENKYIVENMIWDFCQNLYLQHRQIAMLLCGIEDTLLGDIEKIAESSFLMVVVFALAVTKQWLKPIVSKERKMENDAPCVSFVESIPAYDSLTNPKGEWLHQPSFLSSAKESEEDERTQFKEQLVFYYMQRSLEVYPEITPFEGLASGVATLVQHLPAGSPAIFYSVHSLVEKASTFSTESLQGRKSDPGNQILELLLRLVSLVDIQVLPYLMKSLAQLVIKLPKERQNVVLGELYGQVAESDDVIRKPSLVSWLQSLNYLCSNNRTEVLASGSTIDTSNQLAARL

SEQ ID NO: 88161 - protein, 460 aa, Arabidopsis thaliana
  peptide (1)..(460): Ceres Seq. ID no. 12711099
MRSNSINKMSLFANEVLETSKEKYAVFAVFMAAAGVVRASTAGFSSGAQSLEISKLRNSAEKRIEFVAQILVSNGNVVTLPTTQREGPLLKCFAIALARCGSVSSSAPLLLCLTSALLTQVFPLGQIYESFCNAFGKEPIGPRLIWVREHLSDVLFKESGAISGAFCNQYSSASEENKYIVENMIWDFCQNLYLQHRQIAMLLCGIEDTLLGDIEKIAESSFLMVVVFALAVTKQWLKPIVSKERKMENDAPCVSFVESIPAYDSLTNPKGEWLHQPSFLSSAKESEEDERTQFKEQLVFYYMQRSLEVYPEITPFEGLASGVATLVQHLPAGSPAIFYSVHSLVEKASTFSTESLQGRKSDPGNQILELLLRLVSLVDIQVLPYLMKSLAQLVIKLPKERQNVVLGELYGQVAESDDVIRKPSLVSWLQSLNYLCSNNRTEVLASGSTIDTSNQLAARL

SEQ ID NO: 88162 - DNA, 757 bp, Arabidopsis thaliana
  misc_feature (1)..(757): Ceres Seq. ID no. 12717600
  misc_feature (1)..(757): Ortholog of  Ceres SEQ ID NO 13499585 as cited in SEQ ID NO 244
atcgattgaggagccttctctctcttaacacactcttattcttcagagagagaatgagaattccggcgacaactggtttttttgttttatacatagtttctgacttttgacggatctctctttccgcttagtcagattttaataattttcggtttagcttggttcgtttccggttaagatcggattatttttagttttattttttttccctctttctacaggatttcagtgtaaatcccgcttgctgtcaattggtttctttcatgttcatctgttggcttgactcttctccaaagttagagtaatatcttcgccgtaatgtcttcgtcgttatgcgaagtggacctctctatcggtcttgggcggagcttcttcctttgaagttggggttgagatgaagatctacaaaatctcctattactcaaggtggaaacaacatacccaatttgatttgtggcggtaatatctgtagaaggatggctccaagagcgtgaattgaagccttcacctggtggttaagaccgtcgtcggacgtgacggcaaattaaaaatttggcggtgagcaaccaaaggtgttcccgcggttttctcgcttgtgccacatgaatccattaggtttttgcatcaaacacgtgtctcttacgtgtcttctttgtgtaatttggttcattttaaaattgggtttcaaaaggctttgtatcacgtatcttgtaatttgtcctttatggatttcgttataagacgaaaaattgcctgc

SEQ ID NO: 88163 - protein, 45 aa, Arabidopsis thaliana
  peptide (1)..(45): Ceres Seq. ID no. 12717601
MNPLGFCIKHVSLTCLLCVIWFILKLGFKRLCITYLVICPLWISL

SEQ ID NO: 88164 - protein, 35 aa, Arabidopsis thaliana
  peptide (1)..(35): Ceres Seq. ID no. 12717602
RLRSLLSLNTLLFFRERMRIPATTGFFVLYIVSDF

SEQ ID NO: 88165 - DNA, 2100 bp, Arabidopsis thaliana
  misc_feature (1)..(2100): Ceres Seq. ID no. 12721372
  misc_feature (1)..(2100): Ortholog of  Ceres SEQ ID NO 15174477 as cited in SEQ ID NO 20777
atggcgagaaaagctaacaatagttttttccttgaagaatggttaaggactgtgagtggaagtagtgtctctggtgatctagtgaagcaaaattctgctccatctgctaggtcgattattcaagcatggtctgagattcgtgaatctcttcaaaaccaaaactttgattcacgttaccttcaagctttgagagctttggttagctctgagtccactatccatgttgcagatccccaagcaaagctacttatttctatactagcttttcaagatgtatctcttccgtctgagtcttacacacttgttctcagactactctatgtgtggattaggaaagcatttcgaccgtctcaagcacttgttggtgtagcggttcaggccattcgtggcgttgttgatgacaggcgtaatctccaaccagccttagtagcgcagagtgttctggtttctggtgcgtttgcgtgtgttccttctctgtcaggagacgtgaaagtcttatgcttggaattgttatgcaggcttttggaagaagagtactctttagtgggatctcaagaagaacttgttcctgtagtgcttgcaggaattgggtatgctttatcttcttcgttggatgttcattacgtcagactattggatttattgtttggcatttggttaaaagacgagggtcctcgtggcactgtcacttacggtctgatgattcttcatttgattgagtgggttgtgtcaggttatatgcggtctaattctatcaacaagatgtctctttttgcgaacgaggtactagagacttctaaggaaaagtatgctgttttcgctgtcttcatggcagcagctggggtagtgagagcttccacggcaggattcagtagtggtgcacagagtttggagatttctaaactaagaaattcagctgaaaagcgaatagaatttgtagctcaaattttagtttctaatggtaatgttgttacacttccaaccacacagagagaaggtcccctgttgaagtgctttgctattgcattggctcgatgtgggtctgtttcttcctctgctcctctgcttttgtgtctcacttctgcattgttaactcaggtatttcctttaggccagatatatgaatcattttgcaatgcttttggcaaagagcctattggaccaagactcatttgggtcagggagcatctttctgatgttcttttcaaggaatcaggggccatatctggggctttctgcaatcaatattcatcagcaagtgaagagaacaagtatattgtggagaatatgatttgggatttctgtcaaaatctctacttacagcaccgtcaaattgctatgttgctttgtggtatagaagatacattgcttggagacatcgagaaaattgcagaatcatctttccttatggttgtcgtctttgcgctagctgttacgaaacaatggctaaaaccaatagtgtctaaagaaagaaaaatggagaatgatgctccttgtgtttcatttgtagagtccattcctgcctatgatagcttgacgaatccgaaagcatttctctcttcagcaaaagaatcagaggaggacgaacgaactcaattcaaagaacaacttgttttctattacatgcaacgatctttggaggtttaccctgagatcacaccttttgaaggtttagcttccggcgttgcaaccttggtccagcatctacctgcgggaagtcctgctatattttattctgttcatagccttgttgagaaggcttctacatttagcaccgaatcattgcaaggcagaaagtctgatcctggtaatcagattcttgagttgcttttgcgacttgtctctttggttgatatacaagtgttgccatatcttatgaagtcattggcacagctagttataaagttaccaaaagaaagacagaacgttgtgcttggtgaattgtatggtcaagtggctgagtcagacgatgtgattcgcaagccttctttggtctcttggctacagtcactgaactacttatgttctaataaccgtactgaagttttagcttctggatcaacgatagacacttcgaaccagttggctgctcgactctag

SEQ ID NO: 88166 - protein, 699 aa, Arabidopsis thaliana
  peptide (1)..(699): Ceres Seq. ID no. 12721373
MARKANNSFFLEEWLRTVSGSSVSGDLVKQNSAPSARSIIQAWSEIRESLQNQNFDSRYLQALRALVSSESTIHVADPQAKLLISILAFQDVSLPSESYTLVLRLLYVWIRKAFRPSQALVGVAVQAIRGVVDDRRNLQPALVAQSVLVSGAFACVPSLSGDVKVLCLELLCRLLEEEYSLVGSQEELVPVVLAGIGYALSSSLDVHYVRLLDLLFGIWLKDEGPRGTVTYGLMILHLIEWVVSGYMRSNSINKMSLFANEVLETSKEKYAVFAVFMAAAGVVRASTAGFSSGAQSLEISKLRNSAEKRIEFVAQILVSNGNVVTLPTTQREGPLLKCFAIALARCGSVSSSAPLLLCLTSALLTQVFPLGQIYESFCNAFGKEPIGPRLIWVREHLSDVLFKESGAISGAFCNQYSSASEENKYIVENMIWDFCQNLYLQHRQIAMLLCGIEDTLLGDIEKIAESSFLMVVVFALAVTKQWLKPIVSKERKMENDAPCVSFVESIPAYDSLTNPKAFLSSAKESEEDERTQFKEQLVFYYMQRSLEVYPEITPFEGLASGVATLVQHLPAGSPAIFYSVHSLVEKASTFSTESLQGRKSDPGNQILELLLRLVSLVDIQVLPYLMKSLAQLVIKLPKERQNVVLGELYGQVAESDDVIRKPSLVSWLQSLNYLCSNNRTEVLASGSTIDTSNQLAARL

SEQ ID NO: 88167 - protein, 466 aa, Arabidopsis thaliana
  peptide (1)..(466): Ceres Seq. ID no. 12721374
MILHLIEWVVSGYMRSNSINKMSLFANEVLETSKEKYAVFAVFMAAAGVVRASTAGFSSGAQSLEISKLRNSAEKRIEFVAQILVSNGNVVTLPTTQREGPLLKCFAIALARCGSVSSSAPLLLCLTSALLTQVFPLGQIYESFCNAFGKEPIGPRLIWVREHLSDVLFKESGAISGAFCNQYSSASEENKYIVENMIWDFCQNLYLQHRQIAMLLCGIEDTLLGDIEKIAESSFLMVVVFALAVTKQWLKPIVSKERKMENDAPCVSFVESIPAYDSLTNPKAFLSSAKESEEDERTQFKEQLVFYYMQRSLEVYPEITPFEGLASGVATLVQHLPAGSPAIFYSVHSLVEKASTFSTESLQGRKSDPGNQILELLLRLVSLVDIQVLPYLMKSLAQLVIKLPKERQNVVLGELYGQVAESDDVIRKPSLVSWLQSLNYLCSNNRTEVLASGSTIDTSNQLAARL

SEQ ID NO: 88168 - protein, 453 aa, Arabidopsis thaliana
  peptide (1)..(453): Ceres Seq. ID no. 12721375
MRSNSINKMSLFANEVLETSKEKYAVFAVFMAAAGVVRASTAGFSSGAQSLEISKLRNSAEKRIEFVAQILVSNGNVVTLPTTQREGPLLKCFAIALARCGSVSSSAPLLLCLTSALLTQVFPLGQIYESFCNAFGKEPIGPRLIWVREHLSDVLFKESGAISGAFCNQYSSASEENKYIVENMIWDFCQNLYLQHRQIAMLLCGIEDTLLGDIEKIAESSFLMVVVFALAVTKQWLKPIVSKERKMENDAPCVSFVESIPAYDSLTNPKAFLSSAKESEEDERTQFKEQLVFYYMQRSLEVYPEITPFEGLASGVATLVQHLPAGSPAIFYSVHSLVEKASTFSTESLQGRKSDPGNQILELLLRLVSLVDIQVLPYLMKSLAQLVIKLPKERQNVVLGELYGQVAESDDVIRKPSLVSWLQSLNYLCSNNRTEVLASGSTIDTSNQLAARL

SEQ ID NO: 88169 - DNA, 3432 bp, Arabidopsis thaliana
  misc_feature (1)..(3432): Ceres Seq. ID no. 12706139
  misc_feature (1)..(3432): Ortholog of  Ceres SEQ ID NO 13594209 as cited in SEQ ID NO 59089
  misc_feature (1)..(3432): Ortholog of  Ceres SEQ ID NO 15169611 as cited in SEQ ID NO 65939
  misc_feature (1)..(3432): Ortholog of  Ceres SEQ ID NO 13502874 as cited in SEQ ID NO 66298
  misc_feature (1)..(3432): Ortholog of  Ceres SEQ ID NO 12614124 as cited in SEQ ID NO 68392
atggaaaatctctgggtcatcttcttgctcacagctactttgaccttcttcatcaccaagttcctatggagtcaaaaccctaaactacctccaagtcctactccacttccgatcatcggtcatcttcatctcatcaataagtatcctttaccacaagctctacatcatctctcttcaaactacggcccggttctgttcctcaaattcggatgccgtgaagttttgatcctctcttctccagattccatcgaagaatgcttcaccaatcacgacatagcccttgcgaatcgtcccaagaccattacctccgatcacttcagctacggctacaaaaactttggatttgctccttatggcgatctctggcggactctccgtcgtctctccactctcgaagtcttctcctccgtcagcttacagaagaactcttccatacgaactgaagaagtctccaatctctgttcgagtctcttcagattctccggtggtaattcttgtaaagtggatctcaggtatcaattcactcttctcaccgctcacgtcatgcttagattagtatctggaaatcgcggggtcaatgagagtgattcagaatcagagacgaagttcttagatgaattcaaatcaaggtttttctcgagcctatcgtcgatgaatgtctgtgactatttcccagtgttgagatggattgggtacaaaggtcttgagaacagagtgattgagatacagaggatgagagatgagtatcttcagcgactcattgatgatattcgaatgaagaagtttgattccactggttcagtagtggagaaattcttgaagcttcaagaatcagaacctgaattttactctgatgatgttatcaaaggaattgtagtgttaatgttcaacgccggatcggatacttcaccggtgacaatggaatgggcaatggcgcttttactgaaccatccagataagcttgacaaggtcagagaagaaatcaaatctaatgttaaacacaaagggattatacaagactcggatctctcaagcttaccttatcttcgatgtgtcatctatgagacgcttaggctacaccctgcagctcctatcttgcctcctcactgttcatccaagagattcaacttaggcaactacgagatccctgaaaatacagtgttgttggtgaatgcttgggctgttcatagggacggtgagctttgggaagaagcagatgttttcaagccggagagatttgaagagtttgttggcgatagagatggttttaggtttttgccatttggagttgggaggcgggcgtgccctgcagctggacttgcaatgagggtagtgtcgcttgctgttggagcattggttcaatgttttgagtgggagaaggtagaaaaagaagacatagacatgaggcctgcgttcagtgtggcaatggatagggctgagccgcttattgcattgcttaagccatgcccagaaatggaagcaaattttggttgcaaactttcgacttacagtaacagtttctcatacaactaccagcaaagaagctttttagcaatacagtttcatacatcatcaatgatggaccatggaggaaagtctaatggccacattagctcgcttcctcagttgtcttccatgtccataagctacacctttatacaaaacgatatcctaaatgatgattgtttttctctcttccgattgaatcacgagattgaccaaaaaaggaaaatggaagacctctggttcatcttcttctccttcctcacagctactttaatcttcttcatcaccaagaagttcctgtggagtctaaattctaaattacctccaagccctacgcctctccctatcatcggccatcttcacctcatcaagaagtatcctttaccacaagctctacgtcatctctcttcaaactacggcccggttctgttcctcaaatttggatgccgtaacgttttgactctctcttctccagattccatcgaagaatgcttcaccaatcacgacgtaaccctcgcgaatcgtcccaagaccatcacctccgatcacttcagctacggctataaaaactttggatttgctccttacggtgacctctggcgaactctccgtcgtctctccactctcgaggtcttctcctccgctagcctgcagaagaactcttccatccgaaacgaggaagtctccaacctctgtttgattatcttcagattatcccgtgactctcggatagtggatctcaagtatcaattcactcttctcacggctcatatcatgcttagattagtatctgggaagcgtggggtcaaaaagagcgatcccgaatcagagaagaggttcttggatgattttaaattgaggtttttctcgagcatgtcgatgaatgtctgcgactattttccagtgttgaggtggattgggtacaaaggtttggagaagagagtgattgatatgcagagaatgagagatgagtatcttcagcgactcattgatgatattcgaatgaagaacattgattcctctggttccgtagtagagaaattcttgaagcttcaagaatcagaacctgaattttacgcagatgatgttatcaaaggaatcatagtgctaatgttcaatggcggaacggatacatcacctgtggcaatggaatgggcagtgtcacttttactaaaccatccagataagcttgagaagctcagagaagaaatcaaatctaatgttaaacacaaagggcttatacaagactcggatctctcgagcttaccttatcttcgatgtgtcatctatgagacgcttaggctataccctgcagctccactcttgcttcctcactgctcatccaagagattcaacttaggcaactacgagattccagaaaacataatgttattggtgaatgcttgggctgttcatagggacggtgagctttgggaagaagccaatgttttcaagccggagagatttgaagggtttgttggcgatagagatggttttaggtttctgccatttggagttgggaggcgggcgtgtcctgcagctggacttggaatgagggtagtgtcgcttgctgttggagcattggttcagtgttttgagtgggagaaggtagaagcaggagatatagacatgaggcccgtgtttggtgtggcaatggctaaggctgagccgcttgtcgcattgccgaagccatggtctgaaatggaccatggaggaaagtctaatggtcacattagctcgcttcctcacttgcgttccatgtccgtaagctccacctatacaaaacgagatccgcgaagctccctgaaaacagatatagccacactaaggctgagtgaccatcttaagcttatcaatcataaagacagtttctccaagatgagactagattcaaacccaacaagtcattacatacaatcaatttga

SEQ ID NO: 88170 - protein, 1143 aa, Arabidopsis thaliana
  peptide (1)..(1143): Ceres Seq. ID no. 12706140
MENLWVIFLLTATLTFFITKFLWSQNPKLPPSPTPLPIIGHLHLINKYPLPQALHHLSSNYGPVLFLKFGCREVLILSSPDSIEECFTNHDIALANRPKTITSDHFSYGYKNFGFAPYGDLWRTLRRLSTLEVFSSVSLQKNSSIRTEEVSNLCSSLFRFSGGNSCKVDLRYQFTLLTAHVMLRLVSGNRGVNESDSESETKFLDEFKSRFFSSLSSMNVCDYFPVLRWIGYKGLENRVIEIQRMRDEYLQRLIDDIRMKKFDSTGSVVEKFLKLQESEPEFYSDDVIKGIVVLMFNAGSDTSPVTMEWAMALLLNHPDKLDKVREEIKSNVKHKGIIQDSDLSSLPYLRCVIYETLRLHPAAPILPPHCSSKRFNLGNYEIPENTVLLVNAWAVHRDGELWEEADVFKPERFEEFVGDRDGFRFLPFGVGRRACPAAGLAMRVVSLAVGALVQCFEWEKVEKEDIDMRPAFSVAMDRAEPLIALLKPCPEMEANFGCKLSTYSNSFSYNYQQRSFLAIQFHTSSMMDHGGKSNGHISSLPQLSSMSISYTFIQNDILNDDCFSLFRLNHEIDQKRKMEDLWFIFFSFLTATLIFFITKKFLWSLNSKLPPSPTPLPIIGHLHLIKKYPLPQALRHLSSNYGPVLFLKFGCRNVLTLSSPDSIEECFTNHDVTLANRPKTITSDHFSYGYKNFGFAPYGDLWRTLRRLSTLEVFSSASLQKNSSIRNEEVSNLCLIIFRLSRDSRIVDLKYQFTLLTAHIMLRLVSGKRGVKKSDPESEKRFLDDFKLRFFSSMSMNVCDYFPVLRWIGYKGLEKRVIDMQRMRDEYLQRLIDDIRMKNIDSSGSVVEKFLKLQESEPEFYADDVIKGIIVLMFNGGTDTSPVAMEWAVSLLLNHPDKLEKLREEIKSNVKHKGLIQDSDLSSLPYLRCVIYETLRLYPAAPLLLPHCSSKRFNLGNYEIPENIMLLVNAWAVHRDGELWEEANVFKPERFEGFVGDRDGFRFLPFGVGRRACPAAGLGMRVVSLAVGALVQCFEWEKVEAGDIDMRPVFGVAMAKAEPLVALPKPWSEMDHGGKSNGHISSLPHLRSMSVSSTYTKRDPRSSLKTDIATLRLSDHLKLINHKDSFSKMRLDSNPTSHYIQSI

SEQ ID NO: 88171 - protein, 962 aa, Arabidopsis thaliana
  peptide (1)..(962): Ceres Seq. ID no. 12706141
MLRLVSGNRGVNESDSESETKFLDEFKSRFFSSLSSMNVCDYFPVLRWIGYKGLENRVIEIQRMRDEYLQRLIDDIRMKKFDSTGSVVEKFLKLQESEPEFYSDDVIKGIVVLMFNAGSDTSPVTMEWAMALLLNHPDKLDKVREEIKSNVKHKGIIQDSDLSSLPYLRCVIYETLRLHPAAPILPPHCSSKRFNLGNYEIPENTVLLVNAWAVHRDGELWEEADVFKPERFEEFVGDRDGFRFLPFGVGRRACPAAGLAMRVVSLAVGALVQCFEWEKVEKEDIDMRPAFSVAMDRAEPLIALLKPCPEMEANFGCKLSTYSNSFSYNYQQRSFLAIQFHTSSMMDHGGKSNGHISSLPQLSSMSISYTFIQNDILNDDCFSLFRLNHEIDQKRKMEDLWFIFFSFLTATLIFFITKKFLWSLNSKLPPSPTPLPIIGHLHLIKKYPLPQALRHLSSNYGPVLFLKFGCRNVLTLSSPDSIEECFTNHDVTLANRPKTITSDHFSYGYKNFGFAPYGDLWRTLRRLSTLEVFSSASLQKNSSIRNEEVSNLCLIIFRLSRDSRIVDLKYQFTLLTAHIMLRLVSGKRGVKKSDPESEKRFLDDFKLRFFSSMSMNVCDYFPVLRWIGYKGLEKRVIDMQRMRDEYLQRLIDDIRMKNIDSSGSVVEKFLKLQESEPEFYADDVIKGIIVLMFNGGTDTSPVAMEWAVSLLLNHPDKLEKLREEIKSNVKHKGLIQDSDLSSLPYLRCVIYETLRLYPAAPLLLPHCSSKRFNLGNYEIPENIMLLVNAWAVHRDGELWEEANVFKPERFEGFVGDRDGFRFLPFGVGRRACPAAGLGMRVVSLAVGALVQCFEWEKVEAGDIDMRPVFGVAMAKAEPLVALPKPWSEMDHGGKSNGHISSLPHLRSMSVSSTYTKRDPRSSLKTDIATLRLSDHLKLINHKDSFSKMRLDSNPTSHYIQSI

SEQ ID NO: 88172 - protein, 926 aa, Arabidopsis thaliana
  peptide (1)..(926): Ceres Seq. ID no. 12706142
MNVCDYFPVLRWIGYKGLENRVIEIQRMRDEYLQRLIDDIRMKKFDSTGSVVEKFLKLQESEPEFYSDDVIKGIVVLMFNAGSDTSPVTMEWAMALLLNHPDKLDKVREEIKSNVKHKGIIQDSDLSSLPYLRCVIYETLRLHPAAPILPPHCSSKRFNLGNYEIPENTVLLVNAWAVHRDGELWEEADVFKPERFEEFVGDRDGFRFLPFGVGRRACPAAGLAMRVVSLAVGALVQCFEWEKVEKEDIDMRPAFSVAMDRAEPLIALLKPCPEMEANFGCKLSTYSNSFSYNYQQRSFLAIQFHTSSMMDHGGKSNGHISSLPQLSSMSISYTFIQNDILNDDCFSLFRLNHEIDQKRKMEDLWFIFFSFLTATLIFFITKKFLWSLNSKLPPSPTPLPIIGHLHLIKKYPLPQALRHLSSNYGPVLFLKFGCRNVLTLSSPDSIEECFTNHDVTLANRPKTITSDHFSYGYKNFGFAPYGDLWRTLRRLSTLEVFSSASLQKNSSIRNEEVSNLCLIIFRLSRDSRIVDLKYQFTLLTAHIMLRLVSGKRGVKKSDPESEKRFLDDFKLRFFSSMSMNVCDYFPVLRWIGYKGLEKRVIDMQRMRDEYLQRLIDDIRMKNIDSSGSVVEKFLKLQESEPEFYADDVIKGIIVLMFNGGTDTSPVAMEWAVSLLLNHPDKLEKLREEIKSNVKHKGLIQDSDLSSLPYLRCVIYETLRLYPAAPLLLPHCSSKRFNLGNYEIPENIMLLVNAWAVHRDGELWEEANVFKPERFEGFVGDRDGFRFLPFGVGRRACPAAGLGMRVVSLAVGALVQCFEWEKVEAGDIDMRPVFGVAMAKAEPLVALPKPWSEMDHGGKSNGHISSLPHLRSMSVSSTYTKRDPRSSLKTDIATLRLSDHLKLINHKDSFSKMRLDSNPTSHYIQSI

SEQ ID NO: 88173 - DNA, 2067 bp, Arabidopsis thaliana
  misc_feature (1)..(2067): Ceres Seq. ID no. 12706146
  misc_feature (1)..(2067): Ortholog of  Ceres SEQ ID NO 13655744 as cited in SEQ ID NO 64032
atgaagaagaagctgctgctgaaccaaaggaagaaattgctaaaacgcaagggctttggcgatgtgctatctgtacatatgacaatgttgagactatgtttgtgtgtgatatctgcggtgttcttcgtcatcctgtcgccggaaatcaaagtatcaataagaatacagggacctctgcctggaatttcccgtgggaatattcatgatctttacaaggcctttagttctaaaaattcctgcgttagtatagctgttcgtgttgtgagtctctttgcaattgtggtgttgcaaaggcgttattctgacagttccttttcaacttatgtagcacctttcaagtttgatgctccatcgccagatgatttagtctccaatggactaacatcctcaaaaactggtccaaaaggctcaggtgatgctagcatgagacagaaggagaagcaagatagcgtagaacagaaacctttaaagaaaggaggagatagttcagaaacaagctcccgaggtagacatgataaacttgatgataagggcggtgctggcggcataaaatcaggcaaaagtttgccaaaagcaaaagcagatatgtctaatgagacaagttcgtcctctaaatatatggagacgtcggagagtcttactggtactatgaacaagatgtctttgattggggaaacagaaaactctagcgatattaaaattagaggaccaaaatcacaatctaagcataagccagaggagtggatgcttcttgataaagaatcagatgcactaagccagcttaatcttgccatcgtggggcatgttgattccggtaagtctacactttcgggtagattattgcatcttttgggaagaatatcgcagaagcaaatgcacaagtatgagaaagaagcaaagttgcagggcaaagggtcctttgcatatgcctgggcattggatgagagtgctgaagagagggaacgaggaataacaatgactgtggctgttgcttatttcaattccaaaagacatcatgttgttttgctcgactctcctggacacaaagattttgttccaaacatgatagcaggagcaacacaagcagatgctgcgattcttgtcatagatgcatctgttggtgcttttgaagctggttttgataatttgaaagggcagacaagggagcatgcacgggttctgagaggttttggcgtggagcaagtcatagttgcaatcaacaaaatggatattgttggctactcaaaggaaagatttgatttgattaagcagcacgttggatcttttttgcaatcctgtcgttttaaggattcttctctgacatggattccattaagtgccatggaaaaccaaaacttggtggcagctccctctgataaccgcctatcctcatggtatcaaggtccatgtttattggatgccgtcgactctgtcaagtctcctgatagagacgtctcaaagcctctactcatgcctatatgtgacgctgtaagatcaacttcgcaagggcaggtatctgcatgtggcaaacttgaagctggagctgtccggccaggatctaaggtaatggttatgccatcaggagatcaaggaaccatacgatcactagagcgtgactctcaggcttgcaccattgcaagagctggagataacgtagcgttagcgttgcaagggatcgatgcaaatcaagtaatggcaggagatgtattgtgccatcctgatttccctgtatcagtagcaactcatttggaattgatggtgctcgtcttggaaggcgcaacaccgatcttgctcggttctcagttggagtttcatgtgcatcatgcaaaggaagcagcaacagttgtgaaacttgtggcaatgcttgatcccaaaacagggcagccaacaaagaagtctcctcgttgtctaactgctaaacagagcgcaatgcttgaggttagtctccaaaatccagtatgtgtggagacattttctgagagtagagctcttggaagagtgttccttagatcatcgggaagaactgttgctatgggcaaagttactcggattatccaagactcataa

SEQ ID NO: 88174 - protein, 688 aa, Arabidopsis thaliana
  peptide (1)..(688): Ceres Seq. ID no. 12706147
MKKKLLLNQRKKLLKRKGFGDVLSVHMTMLRLCLCVISAVFFVILSPEIKVSIRIQGPLPGISRGNIHDLYKAFSSKNSCVSIAVRVVSLFAIVVLQRRYSDSSFSTYVAPFKFDAPSPDDLVSNGLTSSKTGPKGSGDASMRQKEKQDSVEQKPLKKGGDSSETSSRGRHDKLDDKGGAGGIKSGKSLPKAKADMSNETSSSSKYMETSESLTGTMNKMSLIGETENSSDIKIRGPKSQSKHKPEEWMLLDKESDALSQLNLAIVGHVDSGKSTLSGRLLHLLGRISQKQMHKYEKEAKLQGKGSFAYAWALDESAEERERGITMTVAVAYFNSKRHHVVLLDSPGHKDFVPNMIAGATQADAAILVIDASVGAFEAGFDNLKGQTREHARVLRGFGVEQVIVAINKMDIVGYSKERFDLIKQHVGSFLQSCRFKDSSLTWIPLSAMENQNLVAAPSDNRLSSWYQGPCLLDAVDSVKSPDRDVSKPLLMPICDAVRSTSQGQVSACGKLEAGAVRPGSKVMVMPSGDQGTIRSLERDSQACTIARAGDNVALALQGIDANQVMAGDVLCHPDFPVSVATHLELMVLVLEGATPILLGSQLEFHVHHAKEAATVVKLVAMLDPKTGQPTKKSPRCLTAKQSAMLEVSLQNPVCVETFSESRALGRVFLRSSGRTVAMGKVTRIIQDS

SEQ ID NO: 88175 - protein, 662 aa, Arabidopsis thaliana
  peptide (1)..(662): Ceres Seq. ID no. 12706148
MTMLRLCLCVISAVFFVILSPEIKVSIRIQGPLPGISRGNIHDLYKAFSSKNSCVSIAVRVVSLFAIVVLQRRYSDSSFSTYVAPFKFDAPSPDDLVSNGLTSSKTGPKGSGDASMRQKEKQDSVEQKPLKKGGDSSETSSRGRHDKLDDKGGAGGIKSGKSLPKAKADMSNETSSSSKYMETSESLTGTMNKMSLIGETENSSDIKIRGPKSQSKHKPEEWMLLDKESDALSQLNLAIVGHVDSGKSTLSGRLLHLLGRISQKQMHKYEKEAKLQGKGSFAYAWALDESAEERERGITMTVAVAYFNSKRHHVVLLDSPGHKDFVPNMIAGATQADAAILVIDASVGAFEAGFDNLKGQTREHARVLRGFGVEQVIVAINKMDIVGYSKERFDLIKQHVGSFLQSCRFKDSSLTWIPLSAMENQNLVAAPSDNRLSSWYQGPCLLDAVDSVKSPDRDVSKPLLMPICDAVRSTSQGQVSACGKLEAGAVRPGSKVMVMPSGDQGTIRSLERDSQACTIARAGDNVALALQGIDANQVMAGDVLCHPDFPVSVATHLELMVLVLEGATPILLGSQLEFHVHHAKEAATVVKLVAMLDPKTGQPTKKSPRCLTAKQSAMLEVSLQNPVCVETFSESRALGRVFLRSSGRTVAMGKVTRIIQDS

SEQ ID NO: 88176 - protein, 660 aa, Arabidopsis thaliana
  peptide (1)..(660): Ceres Seq. ID no. 12706149
MLRLCLCVISAVFFVILSPEIKVSIRIQGPLPGISRGNIHDLYKAFSSKNSCVSIAVRVVSLFAIVVLQRRYSDSSFSTYVAPFKFDAPSPDDLVSNGLTSSKTGPKGSGDASMRQKEKQDSVEQKPLKKGGDSSETSSRGRHDKLDDKGGAGGIKSGKSLPKAKADMSNETSSSSKYMETSESLTGTMNKMSLIGETENSSDIKIRGPKSQSKHKPEEWMLLDKESDALSQLNLAIVGHVDSGKSTLSGRLLHLLGRISQKQMHKYEKEAKLQGKGSFAYAWALDESAEERERGITMTVAVAYFNSKRHHVVLLDSPGHKDFVPNMIAGATQADAAILVIDASVGAFEAGFDNLKGQTREHARVLRGFGVEQVIVAINKMDIVGYSKERFDLIKQHVGSFLQSCRFKDSSLTWIPLSAMENQNLVAAPSDNRLSSWYQGPCLLDAVDSVKSPDRDVSKPLLMPICDAVRSTSQGQVSACGKLEAGAVRPGSKVMVMPSGDQGTIRSLERDSQACTIARAGDNVALALQGIDANQVMAGDVLCHPDFPVSVATHLELMVLVLEGATPILLGSQLEFHVHHAKEAATVVKLVAMLDPKTGQPTKKSPRCLTAKQSAMLEVSLQNPVCVETFSESRALGRVFLRSSGRTVAMGKVTRIIQDS

SEQ ID NO: 88177 - DNA, 1165 bp, Arabidopsis thaliana
  misc_feature (1)..(1165): Ceres Seq. ID no. 12706162
  misc_feature (1)..(1165): Ortholog of  Ceres SEQ ID NO 14315461 as cited in SEQ ID NO 57150
atttttgtcacaccacacaaagtcgtctttggagagagagaagggccaacgaccacacatacacacacagaccaataaaccatgagcccttccaagcagcgacatcgtagctctaccggagaaaacaagtcaaagccggtcagatccgcttcatcctccgccataccggaatggattaccgaatcaaccaacggcggatctctccgtcgcgtagatcccgatacaggtaccgacggctgggcttctcctcccggcgatgttttctctctccgctccgattcttacttgtccaaaaaacaaaaaactcccgccggtgattacctcctttctcccgccggcatggactggctcaaatcaagtaccaaactcgagaacgcgctcgctcgtcccgataaccgtgtagctcacgcgcttagaaaagctcaatctcgcggtcaatctctcaagagcttcatcttcgccgtgaatctccagattccaggtaaggatcatcacagcgccgtgttctacttcgcgacggaagaaccgattccttccggttcgcttctccaccggttcatcaacggcgacgatgccttccggaaccagagattcaaaatcgtgaatcggattgtgaaaggtccttgggtagttaaagccgcggtggggaactatagcgcttgtcttctaggtaaagccttgacgtgcaattaccacagaggtcctaactactttgaaattgacgtcgacattagcagctcagcgatcgcaacggcgattctacggctggctttagggtacgtgacgagcgtgacaatcgatatggggttcttagcagaggcacaaacggaagaggagctgccggagagattaatcggagctgttagagtttgccaaatggagatgtcgtcagcgtttgttgtcgacgcgccaccaccgcagcaactgccgtcacaaccgtgtagaacattaagttcggcgaaagttaaccatgacgaggacgaggattgagattaaaccacaacatgtcaatgaagtatttttctctttactgtctctcaaagaatctgaaacaattttcattaatctcaatcaaatttatattaattatttttttgttaatggattttgtaattaatcaagaggtttcatgatatatttaatggaattaaattgaagttcgacg

SEQ ID NO: 88178 - protein, 302 aa, Arabidopsis thaliana
  peptide (1)..(302): Ceres Seq. ID no. 12706163
MSPSKQRHRSSTGENKSKPVRSASSSAIPEWITESTNGGSLRRVDPDTGTDGWASPPGDVFSLRSDSYLSKKQKTPAGDYLLSPAGMDWLKSSTKLENALARPDNRVAHALRKAQSRGQSLKSFIFAVNLQIPGKDHHSAVFYFATEEPIPSGSLLHRFINGDDAFRNQRFKIVNRIVKGPWVVKAAVGNYSACLLGKALTCNYHRGPNYFEIDVDISSSAIATAILRLALGYVTSVTIDMGFLAEAQTEEELPERLIGAVRVCQMEMSSAFVVDAPPPQQLPSQPCRTLSSAKVNHDEDED

SEQ ID NO: 88179 - protein, 216 aa, Arabidopsis thaliana; identical to SEQ ID NO: 26282
  peptide (1)..(216): Ceres Seq. ID no. 12706164

SEQ ID NO: 88180 - DNA, 1788 bp, Arabidopsis thaliana
  misc_feature (1)..(1788): Ceres Seq. ID no. 12706214
  misc_feature (1)..(1788): Ortholog of  Ceres SEQ ID NO 13656177 as cited in SEQ ID NO 64997
atggctttccttacaaatcagagatttcgaaaccctagtcgatttcgagatccaaccaactctgctccttatctcagcttgttgaatttgcgaagtatgggagacgctagagacaacgaagcctacgaggaggagctcttggactatgaagaagaagacgagaaggtcccagattctggaaacaaagttaacggtgaagccgtgaaaaaagggtacgtgggaatacacagttctggattcagagacttccttttaaaaccggagcttctcagagctattgttgactctggatttgaacatccatctgaagtgcaacatgaatgtatccctcaagctatcttgggcatggatgtcatctgccaagcaaagtctggtatggggaagactgctgtgtttgtcctgtctactctacaacagattgaaccatctcctggccaggtttctgcacttgtcttgtgccatacaagagagctagcttaccagatctgcaatgagtttgtgcgattcagtacctatctgcctgatacaaaggtttcggtgttctatggtggagtcaacattaaaattcacaaagacttgctgaagaatgaatgtcctcacattgttgttggtacccctggtcgggtgcttgcacttgccagggagaaagatctctctttgaagaatgtgaggcattttattcttgatgaatgtgataaaatgctcgagtcacttgacatgcgaagggatgtgcaggagattttcaagatgactcctcatgacaaacaagtaatgatgttctcagcaacgctcagcaaagagatacgcccagtctgcaaaaaatttatgcaagatccaatggaaatatatgtcgatgatgaagccaagttgactcttcatgggcttgtccagcactatatcaaactgagcgagatggagaaaacccggaagttgaatgaccttcttgatgcgttggacttcaatcaagttgtcatttttgtgaagagcgtgagcagggctgctgagctgaacaagttactggtggaatgcaatttcccctcaatatgcatccactctggaatgtctcaagaagagaggttgactcgatacaaaagtttcaaggaagggcacaaaaggatccttgtggcgactgacttggtaggaagagggattgacattgagcgtgtcaacattgtcatcaactatgacatgccagattctgctgatacctatcttcacagggttggcagagctggtagatttggaaccaagggtcttgcaatcacatttgttgcatctgcttcagattcagaggttcttaaccaggtacaagagaggtttgaggttgatataaaggaacttccggagcagattgatacttcaacctacataagtgtgaaatcccttaccaattgtttgtttaaaagcttggttttgtctggttgtgatattaatgttgtttcttcttctttctttgttcagtgccttcttaaacaagtagcacgtccctcaggaaagaagctcttcagatttcaaccttgtaggtgttcaaagggtcatgggggttcacaactatctctcgctccgtttgttttagtgttttctatgacgacatttttttccatatgtttagaacgtctgttgtactctttaaaggagattcgagtcactctccaaatcgcacagttaaaagctgtccagttttttgtacaagagattattatgtttgaaatatcaggatttagtctcgacctgattactgtgttccttaggaatcgatctattatcaatttatcatggtgttgctaa

SEQ ID NO: 88181 - protein, 595 aa, Arabidopsis thaliana
  peptide (1)..(595): Ceres Seq. ID no. 12706215
MAFLTNQRFRNPSRFRDPTNSAPYLSLLNLRSMGDARDNEAYEEELLDYEEEDEKVPDSGNKVNGEAVKKGYVGIHSSGFRDFLLKPELLRAIVDSGFEHPSEVQHECIPQAILGMDVICQAKSGMGKTAVFVLSTLQQIEPSPGQVSALVLCHTRELAYQICNEFVRFSTYLPDTKVSVFYGGVNIKIHKDLLKNECPHIVVGTPGRVLALAREKDLSLKNVRHFILDECDKMLESLDMRRDVQEIFKMTPHDKQVMMFSATLSKEIRPVCKKFMQDPMEIYVDDEAKLTLHGLVQHYIKLSEMEKTRKLNDLLDALDFNQVVIFVKSVSRAAELNKLLVECNFPSICIHSGMSQEERLTRYKSFKEGHKRILVATDLVGRGIDIERVNIVINYDMPDSADTYLHRVGRAGRFGTKGLAITFVASASDSEVLNQVQERFEVDIKELPEQIDTSTYISVKSLTNCLFKSLVLSGCDINVVSSSFFVQCLLKQVARPSGKKLFRFQPCRCSKGHGGSQLSLAPFVLVFSMTTFFSICLERLLYSLKEIRVTLQIAQLKAVQFFVQEIIMFEISGFSLDLITVFLRNRSIINLSWCC

SEQ ID NO: 88182 - protein, 563 aa, Arabidopsis thaliana
  peptide (1)..(563): Ceres Seq. ID no. 12706216
MGDARDNEAYEEELLDYEEEDEKVPDSGNKVNGEAVKKGYVGIHSSGFRDFLLKPELLRAIVDSGFEHPSEVQHECIPQAILGMDVICQAKSGMGKTAVFVLSTLQQIEPSPGQVSALVLCHTRELAYQICNEFVRFSTYLPDTKVSVFYGGVNIKIHKDLLKNECPHIVVGTPGRVLALAREKDLSLKNVRHFILDECDKMLESLDMRRDVQEIFKMTPHDKQVMMFSATLSKEIRPVCKKFMQDPMEIYVDDEAKLTLHGLVQHYIKLSEMEKTRKLNDLLDALDFNQVVIFVKSVSRAAELNKLLVECNFPSICIHSGMSQEERLTRYKSFKEGHKRILVATDLVGRGIDIERVNIVINYDMPDSADTYLHRVGRAGRFGTKGLAITFVASASDSEVLNQVQERFEVDIKELPEQIDTSTYISVKSLTNCLFKSLVLSGCDINVVSSSFFVQCLLKQVARPSGKKLFRFQPCRCSKGHGGSQLSLAPFVLVFSMTTFFSICLERLLYSLKEIRVTLQIAQLKAVQFFVQEIIMFEISGFSLDLITVFLRNRSIINLSWCC

SEQ ID NO: 88183 - protein, 480 aa, Arabidopsis thaliana
  peptide (1)..(480): Ceres Seq. ID no. 12706217
MDVICQAKSGMGKTAVFVLSTLQQIEPSPGQVSALVLCHTRELAYQICNEFVRFSTYLPDTKVSVFYGGVNIKIHKDLLKNECPHIVVGTPGRVLALAREKDLSLKNVRHFILDECDKMLESLDMRRDVQEIFKMTPHDKQVMMFSATLSKEIRPVCKKFMQDPMEIYVDDEAKLTLHGLVQHYIKLSEMEKTRKLNDLLDALDFNQVVIFVKSVSRAAELNKLLVECNFPSICIHSGMSQEERLTRYKSFKEGHKRILVATDLVGRGIDIERVNIVINYDMPDSADTYLHRVGRAGRFGTKGLAITFVASASDSEVLNQVQERFEVDIKELPEQIDTSTYISVKSLTNCLFKSLVLSGCDINVVSSSFFVQCLLKQVARPSGKKLFRFQPCRCSKGHGGSQLSLAPFVLVFSMTTFFSICLERLLYSLKEIRVTLQIAQLKAVQFFVQEIIMFEISGFSLDLITVFLRNRSIINLSWCC

SEQ ID NO: 88184 - DNA, 1551 bp, Arabidopsis thaliana
  misc_feature (1)..(1551): Ceres Seq. ID no. 12706251
  misc_feature (1)..(1551): Ortholog of  Ceres SEQ ID NO 13654989 as cited in SEQ ID NO 63117
  misc_feature (1)..(1551): Ortholog of  Ceres SEQ ID NO 13584744 as cited in SEQ ID NO 69137
atgggaaactgtctaaagcctctcaaagaacaacctccttcagcttctcccaagcctctcaccatcccttcaagttcagtggagccagtaaaggagaatttgaaagagtttagatttgccgaattgaacaaggcaacaaagagattcagaaaatacatggtcataaaaggtaatgataatgggtttactcgaacattctacgaaggctgcatcaatgagacaacctttgctccatcaagaactggaatcactgtttctgtcatggaatgttatcaagataattcgcagactctacaagactggaagttacttatgcatctgatgggtacaaaaactattgagttgcaggaagaagtgaagtctcttggacgtatttctcatcccaatttagtcaaacttttaggctattgttgtgaagaaaacaaatcattcttagttttcgaatacttgcataaaggaagtttgaaccgttacattttcggaaaagaagaagaagcattaccgtgggaaacacgggtcaagatagccataggagcagctcaaagtattgcatttctacattgggtcaagaacagcgcgctatatcgagaactcagaatgtataacattttgcttgacgagcactacaacacaaaattgttctatcttggatcaaagaaactatgtttgttagaagaaagcgtgacgactgcattcataggaagaactgtatatatacctcctgaatatgtaatctcaggtcatttgggaacgaagagtgatgtgtatacatttggtgtgatattgttagagattttaactggtttgaaagcttcagatggtaaaaagaatgagaacatgcaaagcttacatgtatggactaaacctttcttgtctgatcaatctaaaatccgggaaatcatcgatcctcgacttgggaacgattatcctgtgaatgcagcgacacaaatgggaaaactcatcaaaagatgcatcaagttggacacaaggaaacgaccatcgatgcaacaagtctttgatgaagaagaagaggcattgccatgggaaatacgggttaagatagccattggaacagctcaaggtctcgcgtttcttcactcgatcaagaacagccccctaaaccgagaactcaggatgcataacattatgcttgacgaggtgaaattaatatctaagtttggatttcatcagcaatacaatgcaaaaactgttctatctcgaaccaaccaaacgaagcttggtattttggatatgacgaccgatgtttacatttttggtatgatcttgcttgaacttttaatgggttccaaggatagaaaaaagattaaggaagagcaaggcttagtagattactggacctcatctttcttgccagataattataagattgaggaaataatcgatccccgacttgggagcgattattctgcgaatgcggcgacacagatgggcacactcatcaaccgatgcacagcgcataatacaaagaaacggccattgatgcaacaagtattggatggtcttaatcatattgcagagattaaggactaa

SEQ ID NO: 88185 - protein, 516 aa, Arabidopsis thaliana
  peptide (1)..(516): Ceres Seq. ID no. 12706252
MGNCLKPLKEQPPSASPKPLTIPSSSVEPVKENLKEFRFAELNKATKRFRKYMVIKGNDNGFTRTFYEGCINETTFAPSRTGITVSVMECYQDNSQTLQDWKLLMHLMGTKTIELQEEVKSLGRISHPNLVKLLGYCCEENKSFLVFEYLHKGSLNRYIFGKEEEALPWETRVKIAIGAAQSIAFLHWVKNSALYRELRMYNILLDEHYNTKLFYLGSKKLCLLEESVTTAFIGRTVYIPPEYVISGHLGTKSDVYTFGVILLEILTGLKASDGKKNENMQSLHVWTKPFLSDQSKIREIIDPRLGNDYPVNAATQMGKLIKRCIKLDTRKRPSMQQVFDEEEEALPWEIRVKIAIGTAQGLAFLHSIKNSPLNRELRMHNIMLDEVKLISKFGFHQQYNAKTVLSRTNQTKLGILDMTTDVYIFGMILLELLMGSKDRKKIKEEQGLVDYWTSSFLPDNYKIEEIIDPRLGSDYSANAATQMGTLINRCTAHNTKKRPLMQQVLDGLNHIAEIKD

SEQ ID NO: 88186 - protein, 464 aa, Arabidopsis thaliana
  peptide (1)..(464): Ceres Seq. ID no. 12706253
MVIKGNDNGFTRTFYEGCINETTFAPSRTGITVSVMECYQDNSQTLQDWKLLMHLMGTKTIELQEEVKSLGRISHPNLVKLLGYCCEENKSFLVFEYLHKGSLNRYIFGKEEEALPWETRVKIAIGAAQSIAFLHWVKNSALYRELRMYNILLDEHYNTKLFYLGSKKLCLLEESVTTAFIGRTVYIPPEYVISGHLGTKSDVYTFGVILLEILTGLKASDGKKNENMQSLHVWTKPFLSDQSKIREIIDPRLGNDYPVNAATQMGKLIKRCIKLDTRKRPSMQQVFDEEEEALPWEIRVKIAIGTAQGLAFLHSIKNSPLNRELRMHNIMLDEVKLISKFGFHQQYNAKTVLSRTNQTKLGILDMTTDVYIFGMILLELLMGSKDRKKIKEEQGLVDYWTSSFLPDNYKIEEIIDPRLGSDYSANAATQMGTLINRCTAHNTKKRPLMQQVLDGLNHIAEIKD

SEQ ID NO: 88187 - protein, 429 aa, Arabidopsis thaliana
  peptide (1)..(429): Ceres Seq. ID no. 12706254
MECYQDNSQTLQDWKLLMHLMGTKTIELQEEVKSLGRISHPNLVKLLGYCCEENKSFLVFEYLHKGSLNRYIFGKEEEALPWETRVKIAIGAAQSIAFLHWVKNSALYRELRMYNILLDEHYNTKLFYLGSKKLCLLEESVTTAFIGRTVYIPPEYVISGHLGTKSDVYTFGVILLEILTGLKASDGKKNENMQSLHVWTKPFLSDQSKIREIIDPRLGNDYPVNAATQMGKLIKRCIKLDTRKRPSMQQVFDEEEEALPWEIRVKIAIGTAQGLAFLHSIKNSPLNRELRMHNIMLDEVKLISKFGFHQQYNAKTVLSRTNQTKLGILDMTTDVYIFGMILLELLMGSKDRKKIKEEQGLVDYWTSSFLPDNYKIEEIIDPRLGSDYSANAATQMGTLINRCTAHNTKKRPLMQQVLDGLNHIAEIKD

SEQ ID NO: 88188 - DNA, 1462 bp, Arabidopsis thaliana
  misc_feature (1)..(1462): Ceres Seq. ID no. 12706262
  misc_feature (1)..(1462): Ortholog of  Ceres SEQ ID NO 13598741 as cited in SEQ ID NO 62749
  misc_feature (1)..(1462): Ortholog of  Ceres SEQ ID NO 12587535 as cited in SEQ ID NO 64020
  misc_feature (1)..(1462): Ortholog of  Ceres SEQ ID NO 15176854 as cited in SEQ ID NO 64525
  misc_feature (1)..(1462): Ortholog of  Ceres SEQ ID NO 12586366 as cited in SEQ ID NO 68983
  misc_feature (1)..(1462): Ortholog of  Ceres SEQ ID NO 15178891 as cited in SEQ ID NO 0
cccataatttactaaatatcactttctagtctcttctctttactttggtcgtccacaatgaaaggaggcagcctctcgtttctcttcgttctcctaatcgccaccatcacttccgtcatttgcttcagtgacgggatgttaccaaacggcgactttgaactaggaccaaaaccatcggacatgaaaggaacgcaagtaataaacaagaaggcgattcctagctgggagctttcaggcttcgtcgaatacataaagtccggtcaaaaacaaggagacatgcttctcgtagtcccggccggaaagttcgcaatccggctaggcaacgaggcatcgatcaaacaaagacttaacgttacaaaaggaatgtattactcactgacgttcagtgccgcaaggacatgtgcccaagacgaacggctcaacatatcggtggcacctgactcaggcgttattcctatacagacggtgtacagtagcagtggatgggacctttacgcatgggcgttccaagccgagagtaacgtggcagagatcgtgattcataatcctggtgaggaggaagatcctgcttgtggaccactcattgatggtgtggcaatcaaagctctataccctcctcggcccaccaataagaatatattgaagaacggaggatttgaagaaggtccctacgtactcccaaacgcaacaaccggcgttctggttcctccctttatagaagatgaccactctcctttacccgcgtggatggtcgaatcactcaaagccatcaaatacgttgatgtcgagcatttctcggtcccacaaggccgtcgagccgtggagctagtggcaggcaaagaaagcgcaatcgctcaggtagctaggaccgttgtgggaaaaacttacgtgctttcgtttgcggttggagatgctaacaatgcttgccaaggatcgatggtggtcgaggcatttgcgggaaaagacactctaaaggtaccttatgagtctcgaggcaaaggagggttcaaacgcgcttctctacggtttgtggcggtttcgacccgcacaagagttatgttttacagcacattttactcgatgagaagcgatgatttctcatcactgtgtgggcccgtgatcgatgatgttaagctcctcagtgctcgtaagccgtaagatggccattgttttatttctaaggttcttcgtataagccagtgtggttttttatataaatatgattttcttaatctctaatgcttttgaaatgagatgagtaatactgaaagggtgtttgtggtgtagggttttatataaggcaaaaaggtcttgcttatatatattttcttgtatgagaaggctaaagaaatgttgtctgtttttactaaattgggttctttcaaggagatcgggtgattgtgagaataaaaatgtaatacagatatatatggtagagaggaatgaggataataatttaact

SEQ ID NO: 88189 - protein, 366 aa, Arabidopsis thaliana; identical to SEQ ID NO: 35908
  peptide (1)..(366): Ceres Seq. ID no. 12706263

SEQ ID NO: 88190 - protein, 340 aa, Arabidopsis thaliana; identical to SEQ ID NO: 35909
  peptide (1)..(340): Ceres Seq. ID no. 12706264

SEQ ID NO: 88191 - protein, 325 aa, Arabidopsis thaliana; identical to SEQ ID NO: 35910
  peptide (1)..(325): Ceres Seq. ID no. 12706265

SEQ ID NO: 88192 - DNA, 1155 bp, Arabidopsis thaliana
  misc_feature (1)..(1155): Ceres Seq. ID no. 12706276
  misc_feature (1)..(1155): Ortholog of  Ceres SEQ ID NO 14307202 as cited in SEQ ID NO 54330
aatttcgtaaacttctaggggagaaacaagggagatagagaagtgagagagggggaaaccctagattcgatctccattcgatttgattcgtttctcgaatcgaagcgatggttttctacttcaaggcccgtcctgatgctggcgactacaccatcttcatggggcttgataagttcgagaacgaggagctcatcaagtacggcttccctgaagatgtctggtttcacgtggataaaatgtcgtcagctcatgtttacttgaggcttcatagaggccaaagttttgatgacattagtgaaggtgtgctggaggactgtgctcagcttgtgaaagctaactccattcaaggcaacaaggtgaacaacgttgatgttgtgtacactccgtggtccaacttgaagaaaactgcctccatggatgttggtcaagttggtttccacaattcaaagatggtccggactatcagagtggagaagcgagtcaatgaaatagttaacagactgaacaaaacaaaagttgaaagaacccctgatctgagagccgagagagaagcagtgaatgccgcagaaagggcagagaggaaacaacatctgagggagaagaagaaacgtgaagagatagataggcttgagaaggagaggcaatcagagatgaggagttacaagggactaatggtaactgataaaatgacatccaacaaagacattgcttcaagcaacaaatcgcttcaagaacttgaagacgatttcatgtaaaagctctgaagaaatgagaaacaaaacaaaccaagtcggtaacattctgccagagatgatctggtaccgtccttcaaagaaggcttatgatgttctactcgccttaactatgatgttgatggttgtccggttctatgttttctttaaaaaaatcttgaatacctaaaaccctaatctggttcttggactccttggtccattgaaatgtttcaaaaggattgaatctgatctgtgggaaaaaggagagcattatattctatatatgacacaggtgaaccagtgatctggtgcaattatggtttactctgcattgctgtgtaacctgaaatttgtttactaccccataaagcttcatgtgttactctgcattgggttgggttttggaatcactttattcttg

SEQ ID NO: 88193 - protein, 215 aa, Arabidopsis thaliana; identical to SEQ ID NO: 25265
  peptide (1)..(215): Ceres Seq. ID no. 12706277

SEQ ID NO: 88194 - protein, 198 aa, Arabidopsis thaliana; identical to SEQ ID NO: 25266
  peptide (1)..(198): Ceres Seq. ID no. 12706278

SEQ ID NO: 88195 - protein, 172 aa, Arabidopsis thaliana; identical to SEQ ID NO: 25267
  peptide (1)..(172): Ceres Seq. ID no. 12706279

SEQ ID NO: 88196 - DNA, 2020 bp, Arabidopsis thaliana
  misc_feature (1)..(2020): Ceres Seq. ID no. 12706323
  misc_feature (1)..(2020): Ortholog of  Ceres SEQ ID NO 13596244 as cited in SEQ ID NO 69307
agcagcggtctagtctaacgcaaaatccgtttcgtcgtcttcctcgctttacttttcaatctcctccttctccattaatcatctctttctctctctcacggattcgtaagttaatctcagtgcttctccgtcatcttcgcattattggttcttcctttttccctgtaagctcgacacgtggattattcctctgctttttttgttttcccttttcgtgaagattcgtttcctgtatctccgtgaagacttgatggagttagtttcttaaagtagctccttcttagatccgagtttcgatttgcttcactggtgaagaattagtgattgattcaactagatactatcgatttcgttggatttgtactgaaaacttggctgattttgttgattctgtcttgctggtgaagtctcaagctacttcgtgattagaggaggagatctggatttctagttttagcaattcatttgacttccgagttttccagaatcattgaagtgttaggcttacttgattcagattcagaacatagctttagataacgttagaagcagaatcagaatctgcaaatcggctctttagattgctgctactagaaatttgaaattagcttttggtagtgttaaggatgcagaataggattgtacagttggaagaaggaaaagaaaatggaatcacagttcgatcagggcattataaaggatttccatcgaaactgctacttctgctagggttgtttcttacattttctgttactgtcttcatcattagtgtatctactatcaagtatactggaatacaaagtgtagtaaccacagtcacttcaagctttgtgccatgccgtgagggggaaccgaatagtttgagtaaatggatacaacctcctgcggttttgatgcataacatgagcgatgaagagcttctttggcgtgcttctttttggcctcgtagaaaagaatatccgtttaaacgggttccaaaggttgcgtttatgttcttgactaaaggccccttaccgcttgcttcgctttgggagaggttcttgaagggtcacaaagggctttactcggtttaccttcatccacacccttcttttacagccaagtttccagctagctctgttttccaccggaggcaaattccaagccaggttgcagaatgggggagaatgtccatgtgcgatgcagagaagcggcttcttgccaacgccctgcttgatgtgtccaacgaatggtttgttctcgtctcagagtcatgcattccactctacaacttcacaaccatttacagctacttaagccgatcaaaacacagcttcatgggtgcttttgatgaccctggaccgtttgggcgtggccgctacaacgggaacatggaacctgaagttccccttaccaaatggcgaaaagggtctcaatggtttgaggttaaccgggacctggcagctaccattgtcaaagacacattgtattacccgaaattcaaagagttctgcaggcctgcttgctatgtggacgagcattacttcccaacaatgttgacgattgagaaaccaacagtcttggctaaccggagcttgacatgggtggactggtcgaggggcggtccccacccagctacgtttgggcgatcggacattacagaaaacttctttggaaaaatctttgatggaagaaactgcagttacaatggtcgcaacacttccatgtgttatctctttgcgaggaagtttgctccgagtgctttggagcctttgcttcacattgctcccaagattcttggattttgagtagtttagttatgtctctgaagtctgaacctcttgacatcaaatattttattttgtttgttgtgatactagtttggaagaaatgagattttagtagagagaactaggttgcacgacaggatagtcatatgtaaactttatatttcaaagaattactatgcatagatcaaatagtcttctactctttgggactatcttttcagatgcattattgaatcacaaatttgttttct

SEQ ID NO: 88197 - protein, 386 aa, Arabidopsis thaliana; identical to SEQ ID NO: 28879
  peptide (1)..(386): Ceres Seq. ID no. 12706324

SEQ ID NO: 88198 - protein, 297 aa, Arabidopsis thaliana; identical to SEQ ID NO: 28880
  peptide (1)..(297): Ceres Seq. ID no. 12706325

SEQ ID NO: 88199 - protein, 294 aa, Arabidopsis thaliana; identical to SEQ ID NO: 28881
  peptide (1)..(294): Ceres Seq. ID no. 12706326

SEQ ID NO: 88200 - DNA, 3744 bp, Arabidopsis thaliana
  misc_feature (1)..(3744): Ceres Seq. ID no. 12706359
  misc_feature (1)..(3744): Ortholog of  Ceres SEQ ID NO 12586556 as cited in SEQ ID NO 64667
  misc_feature (1)..(3744): Ortholog of  Ceres SEQ ID NO 13660894 as cited in SEQ ID NO 67475
atggacggcgaaggggaagggagcggaatacggctgagcaagagattcgctggcgggaaggtcaccggcggtagcttagaagtcgattacaagaccaaatccggtaccgcttggagccactctttcctgaatcagaagccatggcatcctctttcttatcccaatcagcgccgcaaatggatcgccgagcagactcatgcccaacacgatcgaagagcggaagaggtggctcgcgagtttgcgcaagagcaggaatttttcaagcaagcagctcttatctcgaagaaagaaagagagaagatcgaaacgatgaaagctgtgagctttatgtatgttcgtccacctggctatgatcctgaaagtgccaaagcagcagaatacaaggatgagaaacacaagggtcagggttcttcaactcaggatccagtggcggacgacaatgttggttctagaccagaagaatcacaaggtgggggagaacgcacacaggaaaggaagaaaccacgacccaaagatgtgtttggtcgtgctcttcctactgaagaagaatttgaggttcttaaaaatgcaccaaggatggagactggtattcctgggagagtaaagccatttgcagttgaagtgcgtaatgtgaaatgtctgagatgtggaaactttgggcaccaaagcggtgatcgtgactgcccattaaaggatgcagtaatgccaaatgaagaacttcgattgaaaagagatgacccgttgactgctatcattgcacatacagatcctagtgagcctctgaagtgggaattaaaacaaaagccgggcttgagtcctcctcgtggtggttttgatcctgatgatccaaatcaacaaatcgtcgctgaagatatatttgacgaatatggagggttccttgagggcagcatcccaatagaaatactgaagagtatgtcgtcggataagaaaagaaaatccaaaaagaacaaaaggcacaagaagcattcatctcggactgttgaggaaactgatgaatcttcaacaggctcagaagatagtagagagaagaggggatcaaagaagcgcaagaaacttaagaagaagagcaagaagcagtatgattctgattcactctcctttgaaggttcaggctctgatagttaccgtctaagtaggagaagacacaccaagcatgtagatccatctgcctcattaaaatctgaggtttaccatcaaggaaacagtcacagagaaaagcattactacgacgagaagcaccagaaacggaaggaaatcgtggatagaccgtctgcttcatccgatgattcagattattatagaagtaacagtagtagaaagaaaagatcagaagatgattacaaaagccatcacagggagagaaagcaagtgcatagtaacgatcctgtttcagagaaaagtcagaaacagcattattcggagtctggaaagattcagagagtcgagaaagagcatagatatgatgagagaagacacagatacgtcgatatggagtctgaaaatcgtaatagatccgagaagaaaccgagatatgatgatcgtgattctgagaagcatcacaggagtgtgaagggcaaagaaaagcatgtgtatgaagcatctgatgatcctgaagagttttctgacagatacagaagcacaaagaaaactgaatctgattcggaatcaaaccgtagaagtagaaagaagaagcatgagttgtcttccgaagaagaagaaggggagtctcgagtcattggagagcaagtgagaaaatccatgtccttgattcaccgacggctatatcgtatatctggattatcgtctgttaatgcttggaatttgcagatacgagaagcggttaatagaaatgatccggtggaatcacttcttctgtttcgagaaatgaagcgcggaggatttgaaccgaacaactttacttttccatttgtggcgaaggcgtgtgctaggctcgctgatgttgggtgctgtgagatggttcatgcacatttgataaagtctccgttttggtctgatgtgttcgttgggacagcgacggttgacatgtttgtgaaatgtaattctgtggattatgccgccaaggtgtttgagagaatgcctgagagagatgctaccacttggaacgcaatgctgtctggtttctgtcagtcgggtcacacggataaggcgttttctctatttcgtgaaatgagactcaacgagattacacctgattctgtgactgttatgaccttgattcaatctgcatcgtttgaaaaaagtttgaagcttttggaggctatgcatgcggttgggatacgtttaggtgtagatgtacaagttacagttgccaatacttggatttctacttatgggaaatgtggtgatttggattcagcaaagttggttttcgaagctattgacagaggtgacagaactgttgtgtcttggaattctatgttcaaagcatattcagtttttggtgaagcatttgatgcttttggtctttactgtttgatgctgcgtgaagagtttaagccggatttgagtacgtttattaacttggctgcatcgtgtcagaaccctgaaacactaacacaaggaagattgattcattctcatgcaatccatctcggtacagatcaagatatagaagcgatcaatacctttatttctatgtattcgaaatccgaggatacctgttcagcgaggcttttgtttgacataatgacttccagaacatgtgtttcttggactgtgatgataagcgggtatgctgagaagggcgacatggatgaagctttggccttatttcatgccatgatcaaatcaggagagaaaccagatctagttaccttactctccctcatttcaggttgtggaaaatttggttcacttgagactggaaaatggatagatgctagagcagatatatatgggtgcaagagagataatgtcatgatttgcaatgctcttattgatatgtactcaaaatgtggaagtatacatgaagctcgagacatattcgataacacgcctgagaaaactgttgtcacatggactacaatgatagctggatatgctttgaacggtatctttctcgaagctttgaaactttttagcaagatgatagatttggattataaaccaaaccacataacattccttgccgtccttcaagcttgtgctcattcgggttctctggagaaaggttgggagtatttccacatcatgaaacaagtatacaacatcagccctggactagaccattactcttgtatggtagatcttcttggaagaaaaggaaagctcgaagaagcattagaactcatccgtaacatgtcagctaaacccgatgctggcatatggggtgcattgctaaatgcctgcaagatccaccgtaatgtaaagatagctgagcaagccgctgagagtctttttaacttagaaccgcaaatggcagctccttatgtagaaatggcaaacatatatgcagctgctggtatgtgggatggttttgcgaggattagatcaattatgaaacagaggaacattaagaagtatccaggtgaaagcgtgatccaggtaaacggaaagaatcacagtttcactgtaggagaacatggtcatgtagagaatgaagtcatatactttacgctgaatggtttgagtttgtttgccaaagataaacacgtattgtataaagatgtgtacaaagaacaaagttatgaacttttcatttga

SEQ ID NO: 88201 - protein, 1247 aa, Arabidopsis thaliana
  peptide (1)..(1247): Ceres Seq. ID no. 12706360
MDGEGEGSGIRLSKRFAGGKVTGGSLEVDYKTKSGTAWSHSFLNQKPWHPLSYPNQRRKWIAEQTHAQHDRRAEEVAREFAQEQEFFKQAALISKKEREKIETMKAVSFMYVRPPGYDPESAKAAEYKDEKHKGQGSSTQDPVADDNVGSRPEESQGGGERTQERKKPRPKDVFGRALPTEEEFEVLKNAPRMETGIPGRVKPFAVEVRNVKCLRCGNFGHQSGDRDCPLKDAVMPNEELRLKRDDPLTAIIAHTDPSEPLKWELKQKPGLSPPRGGFDPDDPNQQIVAEDIFDEYGGFLEGSIPIEILKSMSSDKKRKSKKNKRHKKHSSRTVEETDESSTGSEDSREKRGSKKRKKLKKKSKKQYDSDSLSFEGSGSDSYRLSRRRHTKHVDPSASLKSEVYHQGNSHREKHYYDEKHQKRKEIVDRPSASSDDSDYYRSNSSRKKRSEDDYKSHHRERKQVHSNDPVSEKSQKQHYSESGKIQRVEKEHRYDERRHRYVDMESENRNRSEKKPRYDDRDSEKHHRSVKGKEKHVYEASDDPEEFSDRYRSTKKTESDSESNRRSRKKKHELSSEEEEGESRVIGEQVRKSMSLIHRRLYRISGLSSVNAWNLQIREAVNRNDPVESLLLFREMKRGGFEPNNFTFPFVAKACARLADVGCCEMVHAHLIKSPFWSDVFVGTATVDMFVKCNSVDYAAKVFERMPERDATTWNAMLSGFCQSGHTDKAFSLFREMRLNEITPDSVTVMTLIQSASFEKSLKLLEAMHAVGIRLGVDVQVTVANTWISTYGKCGDLDSAKLVFEAIDRGDRTVVSWNSMFKAYSVFGEAFDAFGLYCLMLREEFKPDLSTFINLAASCQNPETLTQGRLIHSHAIHLGTDQDIEAINTFISMYSKSEDTCSARLLFDIMTSRTCVSWTVMISGYAEKGDMDEALALFHAMIKSGEKPDLVTLLSLISGCGKFGSLETGKWIDARADIYGCKRDNVMICNALIDMYSKCGSIHEARDIFDNTPEKTVVTWTTMIAGYALNGIFLEALKLFSKMIDLDYKPNHITFLAVLQACAHSGSLEKGWEYFHIMKQVYNISPGLDHYSCMVDLLGRKGKLEEALELIRNMSAKPDAGIWGALLNACKIHRNVKIAEQAAESLFNLEPQMAAPYVEMANIYAAAGMWDGFARIRSIMKQRNIKKYPGESVIQVNGKNHSFTVGEHGHVENEVIYFTLNGLSLFAKDKHVLYKDVYKEQSYELFI

SEQ ID NO: 88202 - protein, 1144 aa, Arabidopsis thaliana
  peptide (1)..(1144): Ceres Seq. ID no. 12706361
MKAVSFMYVRPPGYDPESAKAAEYKDEKHKGQGSSTQDPVADDNVGSRPEESQGGGERTQERKKPRPKDVFGRALPTEEEFEVLKNAPRMETGIPGRVKPFAVEVRNVKCLRCGNFGHQSGDRDCPLKDAVMPNEELRLKRDDPLTAIIAHTDPSEPLKWELKQKPGLSPPRGGFDPDDPNQQIVAEDIFDEYGGFLEGSIPIEILKSMSSDKKRKSKKNKRHKKHSSRTVEETDESSTGSEDSREKRGSKKRKKLKKKSKKQYDSDSLSFEGSGSDSYRLSRRRHTKHVDPSASLKSEVYHQGNSHREKHYYDEKHQKRKEIVDRPSASSDDSDYYRSNSSRKKRSEDDYKSHHRERKQVHSNDPVSEKSQKQHYSESGKIQRVEKEHRYDERRHRYVDMESENRNRSEKKPRYDDRDSEKHHRSVKGKEKHVYEASDDPEEFSDRYRSTKKTESDSESNRRSRKKKHELSSEEEEGESRVIGEQVRKSMSLIHRRLYRISGLSSVNAWNLQIREAVNRNDPVESLLLFREMKRGGFEPNNFTFPFVAKACARLADVGCCEMVHAHLIKSPFWSDVFVGTATVDMFVKCNSVDYAAKVFERMPERDATTWNAMLSGFCQSGHTDKAFSLFREMRLNEITPDSVTVMTLIQSASFEKSLKLLEAMHAVGIRLGVDVQVTVANTWISTYGKCGDLDSAKLVFEAIDRGDRTVVSWNSMFKAYSVFGEAFDAFGLYCLMLREEFKPDLSTFINLAASCQNPETLTQGRLIHSHAIHLGTDQDIEAINTFISMYSKSEDTCSARLLFDIMTSRTCVSWTVMISGYAEKGDMDEALALFHAMIKSGEKPDLVTLLSLISGCGKFGSLETGKWIDARADIYGCKRDNVMICNALIDMYSKCGSIHEARDIFDNTPEKTVVTWTTMIAGYALNGIFLEALKLFSKMIDLDYKPNHITFLAVLQACAHSGSLEKGWEYFHIMKQVYNISPGLDHYSCMVDLLGRKGKLEEALELIRNMSAKPDAGIWGALLNACKIHRNVKIAEQAAESLFNLEPQMAAPYVEMANIYAAAGMWDGFARIRSIMKQRNIKKYPGESVIQVNGKNHSFTVGEHGHVENEVIYFTLNGLSLFAKDKHVLYKDVYKEQSYELFI

SEQ ID NO: 88203 - protein, 1138 aa, Arabidopsis thaliana
  peptide (1)..(1138): Ceres Seq. ID no. 12706362
MYVRPPGYDPESAKAAEYKDEKHKGQGSSTQDPVADDNVGSRPEESQGGGERTQERKKPRPKDVFGRALPTEEEFEVLKNAPRMETGIPGRVKPFAVEVRNVKCLRCGNFGHQSGDRDCPLKDAVMPNEELRLKRDDPLTAIIAHTDPSEPLKWELKQKPGLSPPRGGFDPDDPNQQIVAEDIFDEYGGFLEGSIPIEILKSMSSDKKRKSKKNKRHKKHSSRTVEETDESSTGSEDSREKRGSKKRKKLKKKSKKQYDSDSLSFEGSGSDSYRLSRRRHTKHVDPSASLKSEVYHQGNSHREKHYYDEKHQKRKEIVDRPSASSDDSDYYRSNSSRKKRSEDDYKSHHRERKQVHSNDPVSEKSQKQHYSESGKIQRVEKEHRYDERRHRYVDMESENRNRSEKKPRYDDRDSEKHHRSVKGKEKHVYEASDDPEEFSDRYRSTKKTESDSESNRRSRKKKHELSSEEEEGESRVIGEQVRKSMSLIHRRLYRISGLSSVNAWNLQIREAVNRNDPVESLLLFREMKRGGFEPNNFTFPFVAKACARLADVGCCEMVHAHLIKSPFWSDVFVGTATVDMFVKCNSVDYAAKVFERMPERDATTWNAMLSGFCQSGHTDKAFSLFREMRLNEITPDSVTVMTLIQSASFEKSLKLLEAMHAVGIRLGVDVQVTVANTWISTYGKCGDLDSAKLVFEAIDRGDRTVVSWNSMFKAYSVFGEAFDAFGLYCLMLREEFKPDLSTFINLAASCQNPETLTQGRLIHSHAIHLGTDQDIEAINTFISMYSKSEDTCSARLLFDIMTSRTCVSWTVMISGYAEKGDMDEALALFHAMIKSGEKPDLVTLLSLISGCGKFGSLETGKWIDARADIYGCKRDNVMICNALIDMYSKCGSIHEARDIFDNTPEKTVVTWTTMIAGYALNGIFLEALKLFSKMIDLDYKPNHITFLAVLQACAHSGSLEKGWEYFHIMKQVYNISPGLDHYSCMVDLLGRKGKLEEALELIRNMSAKPDAGIWGALLNACKIHRNVKIAEQAAESLFNLEPQMAAPYVEMANIYAAAGMWDGFARIRSIMKQRNIKKYPGESVIQVNGKNHSFTVGEHGHVENEVIYFTLNGLSLFAKDKHVLYKDVYKEQSYELFI

SEQ ID NO: 88204 - DNA, 2307 bp, Arabidopsis thaliana
  misc_feature (1)..(2307): Ceres Seq. ID no. 12706402
  misc_feature (1)..(2307): Ortholog of  Ceres SEQ ID NO 14313151 as cited in SEQ ID NO 54664
atggagaatcacagctgccttcagaaagatacgacgtcggcggccaaattagacgtcgaaactggaaacctccggcagagagatgaaacgaagccgttttatgcaaactcactgacgccacgtgagatggaatctcttgttgcgatctgcgataccttcatatcctccatcgacgactctggagtaggacacgtggatgattgcgtcgctggatatttctccgcctccgcttctcagaccggaactcccgaccgcgtggcgaggttaatgagtgagagacttcaccacccaaagaagtggatactaagagctggattgtggttactctctacttggatcggaagtctagtcttgtgtggttggagaagtttcaccggcgagtttccttacttccggagattctgccggcttccggagaaacggagagaagagatattgctgaattggtcttcaagctatttctcacttcttagaatgttatttaggaccatcaaacttataagtgcccttgtcttcttcactcaggttgatgaaaaaggaaggaacttggcgtggaaagcaataggttacaatggacccagccctgatcatagtgatcatgaagtagaactaaacgaggagaagaagaagaagaaacctgaggagatctttggaccactttacaatggcatcgttgatctaaaaagccctagagaagccgtggaaaagaagctagccggtcgtgggttcgcagtttcaaatcaaaagaggaatacaaacggatcatctatctctgacccggtgatgaaaatccagtgtgatgctgtggtggttgggtctggatccggtggaggagtggcggcaggagtgttagccaaggctggttacaaagtgttggtgattgagtcagggaattactatgcaagaagcaaactttctttacttgaagggcaagctatggatgacatgtatttatccggtgggttattagcgacgtccgatacgaacgtagtgattcttgcgggatccacagtcggaggtggttctacaatcaattggtccgcctcgatcaagacaccagaacatgtgatgaaggaatgggcagaaaagtcaaaactcgaaatgttcggaagtgatttgtatcgagaggcaatggatgttgtctgtaagaggatgggtgttcaatgcggatttgtagaagaagggtttaataatgaggtattgagaaaaggttgtgaaaagttagggttaccagtgaagaatattccgaggaatgctccatccgatcattactgtgggttttgttgcttgggttgcaagaaaggtcaaaagcaggggacttcagagacttggcttgtagatttggtggaatctgataatggtttaatccttccaggttgtcaagcgacggaagtcatgtacgactgtgaacaggggaagaagaagaaggcaactggagttgcgtttgcgtttggggaagagatttatgtggtggagtctagagtgacaatagtggcttgcggtgcgcttagaacgccgcatctgttgaaacgtagcggtttgaagaatagtaacattgggagaaacctttgtctacatccggttgttatggcttggggatggtttccagaggaagataagtggccggaaaagaagaaaaagagctacgaggggggaataatgactgcgatgtctagcgttgtaattgaagaaacgcatagttcttatggtgaaatggttatccagacacctgctctacatccaggaatgttctcagggatcattccctggacatcaagcaaggatttcaaaacccgaatgctcaaattttcaagaaccgcacacatttttgcgcttctgagagataaaggaaccggaacaatagattccaagacctacattgactacaacttaaacgatgaagacgaagagagtctaaagaacggtcttgaaagagtcttgaagattctggccgcagccggagccgaggagattgggacgcatcattcagaaggtaggagtctgaatgttagaacagcgagttcgttagagattgagcggtttgtgagagaagagagttcaaagccgttgaaggatttgtcaggtcagatatgttcagctcaccaaatgggaagttgtaggatgggaattaggccggaggaatccgcggtgaggccaacaggagagacttgggaggtcgaaaggttatttgtggcggacacaagtgtttttccgaccgctttaggggttaatccgatggtcaccgttcagtctattgcttattgtattggacttaatgttgttgatgttcttaagaagaagaagtga

SEQ ID NO: 88205 - protein, 768 aa, Arabidopsis thaliana
  peptide (1)..(768): Ceres Seq. ID no. 12706403
MENHSCLQKDTTSAAKLDVETGNLRQRDETKPFYANSLTPREMESLVAICDTFISSIDDSGVGHVDDCVAGYFSASASQTGTPDRVARLMSERLHHPKKWILRAGLWLLSTWIGSLVLCGWRSFTGEFPYFRRFCRLPEKRREEILLNWSSSYFSLLRMLFRTIKLISALVFFTQVDEKGRNLAWKAIGYNGPSPDHSDHEVELNEEKKKKKPEEIFGPLYNGIVDLKSPREAVEKKLAGRGFAVSNQKRNTNGSSISDPVMKIQCDAVVVGSGSGGGVAAGVLAKAGYKVLVIESGNYYARSKLSLLEGQAMDDMYLSGGLLATSDTNVVILAGSTVGGGSTINWSASIKTPEHVMKEWAEKSKLEMFGSDLYREAMDVVCKRMGVQCGFVEEGFNNEVLRKGCEKLGLPVKNIPRNAPSDHYCGFCCLGCKKGQKQGTSETWLVDLVESDNGLILPGCQATEVMYDCEQGKKKKATGVAFAFGEEIYVVESRVTIVACGALRTPHLLKRSGLKNSNIGRNLCLHPVVMAWGWFPEEDKWPEKKKKSYEGGIMTAMSSVVIEETHSSYGEMVIQTPALHPGMFSGIIPWTSSKDFKTRMLKFSRTAHIFALLRDKGTGTIDSKTYIDYNLNDEDEESLKNGLERVLKILAAAGAEEIGTHHSEGRSLNVRTASSLEIERFVREESSKPLKDLSGQICSAHQMGSCRMGIRPEESAVRPTGETWEVERLFVADTSVFPTALGVNPMVTVQSIAYCIGLNVVDVLKKKK

SEQ ID NO: 88206 - protein, 726 aa, Arabidopsis thaliana
  peptide (1)..(726): Ceres Seq. ID no. 12706404
MESLVAICDTFISSIDDSGVGHVDDCVAGYFSASASQTGTPDRVARLMSERLHHPKKWILRAGLWLLSTWIGSLVLCGWRSFTGEFPYFRRFCRLPEKRREEILLNWSSSYFSLLRMLFRTIKLISALVFFTQVDEKGRNLAWKAIGYNGPSPDHSDHEVELNEEKKKKKPEEIFGPLYNGIVDLKSPREAVEKKLAGRGFAVSNQKRNTNGSSISDPVMKIQCDAVVVGSGSGGGVAAGVLAKAGYKVLVIESGNYYARSKLSLLEGQAMDDMYLSGGLLATSDTNVVILAGSTVGGGSTINWSASIKTPEHVMKEWAEKSKLEMFGSDLYREAMDVVCKRMGVQCGFVEEGFNNEVLRKGCEKLGLPVKNIPRNAPSDHYCGFCCLGCKKGQKQGTSETWLVDLVESDNGLILPGCQATEVMYDCEQGKKKKATGVAFAFGEEIYVVESRVTIVACGALRTPHLLKRSGLKNSNIGRNLCLHPVVMAWGWFPEEDKWPEKKKKSYEGGIMTAMSSVVIEETHSSYGEMVIQTPALHPGMFSGIIPWTSSKDFKTRMLKFSRTAHIFALLRDKGTGTIDSKTYIDYNLNDEDEESLKNGLERVLKILAAAGAEEIGTHHSEGRSLNVRTASSLEIERFVREESSKPLKDLSGQICSAHQMGSCRMGIRPEESAVRPTGETWEVERLFVADTSVFPTALGVNPMVTVQSIAYCIGLNVVDVLKKKK

SEQ ID NO: 88207 - protein, 679 aa, Arabidopsis thaliana
  peptide (1)..(679): Ceres Seq. ID no. 12706405
MSERLHHPKKWILRAGLWLLSTWIGSLVLCGWRSFTGEFPYFRRFCRLPEKRREEILLNWSSSYFSLLRMLFRTIKLISALVFFTQVDEKGRNLAWKAIGYNGPSPDHSDHEVELNEEKKKKKPEEIFGPLYNGIVDLKSPREAVEKKLAGRGFAVSNQKRNTNGSSISDPVMKIQCDAVVVGSGSGGGVAAGVLAKAGYKVLVIESGNYYARSKLSLLEGQAMDDMYLSGGLLATSDTNVVILAGSTVGGGSTINWSASIKTPEHVMKEWAEKSKLEMFGSDLYREAMDVVCKRMGVQCGFVEEGFNNEVLRKGCEKLGLPVKNIPRNAPSDHYCGFCCLGCKKGQKQGTSETWLVDLVESDNGLILPGCQATEVMYDCEQGKKKKATGVAFAFGEEIYVVESRVTIVACGALRTPHLLKRSGLKNSNIGRNLCLHPVVMAWGWFPEEDKWPEKKKKSYEGGIMTAMSSVVIEETHSSYGEMVIQTPALHPGMFSGIIPWTSSKDFKTRMLKFSRTAHIFALLRDKGTGTIDSKTYIDYNLNDEDEESLKNGLERVLKILAAAGAEEIGTHHSEGRSLNVRTASSLEIERFVREESSKPLKDLSGQICSAHQMGSCRMGIRPEESAVRPTGETWEVERLFVADTSVFPTALGVNPMVTVQSIAYCIGLNVVDVLKKKK

SEQ ID NO: 88208 - DNA, 1719 bp, Arabidopsis thaliana
  misc_feature (1)..(1719): Ceres Seq. ID no. 12706427
  misc_feature (1)..(1719): Ortholog of  Ceres SEQ ID NO 13597411 as cited in SEQ ID NO 64125
atggcgggacagtcacgaaaatggatgatactggtggcgacgatatggattcaagctttcaccgggacgaatttcgatttctcagcttactcgtcagatttgaaatcggttctagggatttcacaggtgcagctaaactacctcgccgtggcttcggatctcggaaaagtattcggatggtcgtcgggactagcgcttatgtatttcccgctttggacggtgcttttcgcggcggcgtttatgggattcgtcggttatggagttcagtggcttgtcatcactcatttcatctctttgccttatatcatggtgtttctctgttgcttacttgctggtttaagtatctgttggttcaacactgtctgctttgtgctctgcattagtaacttccctgcaaacagatcacttgctctttccctcacagtgagtttcaatggtgtaagcgctgctttatatactcttgcttacaacgcaatcaatccaacttctccagagctatatcttcttttgaacgctcttataccgctcattgtctctttcactgctatcatcccgattcttcgtcaaccgccttttgagcctcttccaccagatggagttcgtcgtgactctctcatgtttctattgctcaacatactcgctgctttaaacggtgtttatctccttctctttggatcaaactcctctgatttaacctctgctcgtctactctttggtggagcaatcctcctcttggtattccctttatgtattcccggtttagtcatcgcccggaattggtataaccgcacaatccacactagtttccgtctagaaggttctggtttcattcttgttgatcctgatgagcttgagttgcataaagggatgcttgcacatgaagcaaaccgtgaaggttaccaattgctgagtgacgatgtggtgcaaaacccggttaagtccgtagctgttgaggaagaggatagtgatgagtcatgttgcaagaaacttatcacaagagatcagcttgaaggtttggggattgaacattctttgtcgctgctcttaaccagatcagatttttggttatactatatcacgtacttctgcggtggaaccattggacttgtgtacagcaacaaccttggacagattgctcaatctttaggacaaagctcaaataccacaactcttgtcacactttattctgctttctcattctttggaagattgctttctgcaacaccagattatatccgagcgaaggtttattttgccagaaccgggtggttagcaatcgcgctattaccaacccccttcgcacttttcttgcttgcatcatcaggaactgcatcagcattacaagctggaacagcgctgatgggtttaagctccgggtttatctttgcagcagcggtttccatcacatcagagctttttggaccaaacagtgttggagttaaccacaatatcttaatcacaaacataccgataggatcattgatctatggattcttggctgcattggtctatgactcacatggtttcaccgggaccaaatcaatgacctcggagtcggtggtgtgtatgggacgagattgttattacttgacctttgtgtggtggggttgcttgtctcttcttgggctaggttcgagtcttgtgttgtttattagaactagacgagcttatcaacggtttgaacaagctcgtataagttcgaacatcaacgactcttag

SEQ ID NO: 88209 - protein, 572 aa, Arabidopsis thaliana; identical to SEQ ID NO: 38704
  peptide (1)..(572): Ceres Seq. ID no. 12706428

SEQ ID NO: 88210 - protein, 564 aa, Arabidopsis thaliana; identical to SEQ ID NO: 38705
  peptide (1)..(564): Ceres Seq. ID no. 12706429

SEQ ID NO: 88211 - protein, 506 aa, Arabidopsis thaliana; identical to SEQ ID NO: 38706
  peptide (1)..(506): Ceres Seq. ID no. 12706430

SEQ ID NO: 88212 - DNA, 1267 bp, Arabidopsis thaliana
  misc_feature (1)..(1267): Ceres Seq. ID no. 12706519
  misc_feature (1)..(1267): Ortholog of  Ceres SEQ ID NO 15225973 as cited in SEQ ID NO 50947
aaagcaaaattagggtttctcttggttttcgcaaattagggattttttctctcgttctcatgaaaagatgagtttgatttccaaatccttggcaagaattgaatgttcgccatttttttatccaagagcttcagaaatcactaccggaaaacggataacctctccgcaaatccgtttatacactgcggcggccgtcggcgggaaaactggaaatggagaaaggaaacaaagagccaaagcaccggcgaaaactccggaggcagtgacacctgtgaaaccgctggagattgcgtcagtcacggcgacgacggagaatgaattgcctcggcctaatgagatagcttacgagagtgaagtagcgaattgggttaatctgattggatttgttgatcaaccagttcaattcgaagcttcttctgatggcaaattctgggctggtactgttatttcccagaggtctgcttcagattcctctggtttctggattccgataatatttgaaggcgatttagctaaaaccgcagctcgatatgtaagcaaagacgatcaaattcatgtgtctgggaagctgtttatagattctcctcctccaaatatgacttatgcacaagccaatgttcaggtattggtccagaatcttaactttatacagcctatgtccccgtctccgtcgccatttatggttatgtcatcatctgaaaaggaagaaagtggtatcaagaagcagcctgctagagctaagcaggatatagtcattgatgaagcttcagattcttggaatcacctcattgaaaatcctaaagaatggtgggatcaccgggaaaataaagtcaatggattggtaaaacctaggcatcctgatttcaaaagcaaggacagtagtttttcgctgtggctcaataaggctcctaattgggttttgccaaaactcgaaggactcgagttcgatgttctagtccctaaagccagagttgtaaaacaacttaaaggagaagaatcatggaaggacttggttcagaacccagataaatggtgggacaatagaatcgacaagagaaatgcaaaagcccctgatttcaagcacaaggagacaggtgaagcactgtggctaaacgagtctcctacttgggtattaccgaaactgccaccagtcaagaagaaacaagaaagtattgtcttttagctttagaaacattatctccatgtaaagagctccaagtgtttacaaaattcatcatttctattcaaagtggtcttcaaagttccg

SEQ ID NO: 88213 - protein, 371 aa, Arabidopsis thaliana
  peptide (1)..(371): Ceres Seq. ID no. 12706520
MSLISKSLARIECSPFFYPRASEITTGKRITSPQIRLYTAAAVGGKTGNGERKQRAKAPAKTPEAVTPVKPLEIASVTATTENELPRPNEIAYESEVANWVNLIGFVDQPVQFEASSDGKFWAGTVISQRSASDSSGFWIPIIFEGDLAKTAARYVSKDDQIHVSGKLFIDSPPPNMTYAQANVQVLVQNLNFIQPMSPSPSPFMVMSSSEKEESGIKKQPARAKQDIVIDEASDSWNHLIENPKEWWDHRENKVNGLVKPRHPDFKSKDSSFSLWLNKAPNWVLPKLEGLEFDVLVPKARVVKQLKGEESWKDLVQNPDKWWDNRIDKRNAKAPDFKHKETGEALWLNESPTWVLPKLPPVKKKQESIVF

SEQ ID NO: 88214 - protein, 195 aa, Arabidopsis thaliana; identical to SEQ ID NO: 25290
  peptide (1)..(195): Ceres Seq. ID no. 12706521

SEQ ID NO: 88215 - DNA, 1221 bp, Arabidopsis thaliana
  misc_feature (1)..(1221): Ceres Seq. ID no. 12706522
  misc_feature (1)..(1221): Ortholog of  Ceres SEQ ID NO 12778345 as cited in SEQ ID NO 62792
  misc_feature (1)..(1221): Ortholog of  Ceres SEQ ID NO 13662513 as cited in SEQ ID NO 63303
atggctatgatatctcaccgtctccgacgagctttactcactgcgacttcctatgttaaccgatcaattagctcttcgatcacaccagcgtctgatttcccttctgtgtcggcggcggtgttaaagagatccgttatagggcgttcgacggaagtagctactcgagcaccggcgagactgttttcaacgaggcagtacaagctttacaaagaaggtgatgagatcacggaagacactgtgttgttcgaaggatgtgattataatcactggcttatcactatggatttctccaaagaggaaactcctaagtctccagaagaaatggtcgctgcttatgaagaaacttgcgcccaaggacttggcatcagcgtggaagaggctaagcaaaggatgtatgcttgtagcacaactacttaccaaggatttcaagcaatcatgactgaacaagaatcagaaaagttcaaggatctacccggagtggttttcatcttgccagattcctacattgatccccagaacaaagagtatggaggagataaatacgagaatggagtgataacacacaggccaccaccgattcagagtggcagagcaagacctcgtcctagatttgaccgttcaggaggaggaagtggtggtccccaaaacttccaaagaaacacacagtatggtcagcaaccaccaatgcaaggtggtggagggagctatggtcctcaacagggctatgccactccaggacaaggtcagggaactcaagcgcctccaccatttcaaggaggttataaccaaggcccgagatctccaccacctccatatcaggcaggttacaatcaaggccagggatctccagtgcctccatatcaggcaggttacaatcaagtccagggatctccagtgcctccataccaaggaacacaaagcagttacggtcaaggtggatctgggaactatagtcaagggccacaaggtggttacaaccaaggaggacctaggaattacaatccacagggagctggaaactttggtcctgcatctggagctggaaacttaggtcctgcacctggagctggaaatcctggctatggtcaggggtattctggaccaggacaagagcagaatcagacattcccacaggcagatcagaggaatcgagactggaacaacaataatccagcaggccagcccgggtctgaccaatttccacagggaagaaggtactag

SEQ ID NO: 88216 - protein, 406 aa, Arabidopsis thaliana
  peptide (1)..(406): Ceres Seq. ID no. 12706523
MAMISHRLRRALLTATSYVNRSISSSITPASDFPSVSAAVLKRSVIGRSTEVATRAPARLFSTRQYKLYKEGDEITEDTVLFEGCDYNHWLITMDFSKEETPKSPEEMVAAYEETCAQGLGISVEEAKQRMYACSTTTYQGFQAIMTEQESEKFKDLPGVVFILPDSYIDPQNKEYGGDKYENGVITHRPPPIQSGRARPRPRFDRSGGGSGGPQNFQRNTQYGQQPPMQGGGGSYGPQQGYATPGQGQGTQAPPPFQGGYNQGPRSPPPPYQAGYNQGQGSPVPPYQAGYNQVQGSPVPPYQGTQSSYGQGGSGNYSQGPQGGYNQGGPRNYNPQGAGNFGPASGAGNLGPAPGAGNPGYGQGYSGPGQEQNQTFPQADQRNRDWNNNNPAGQPGSDQFPQGRRY

SEQ ID NO: 88217 - protein, 404 aa, Arabidopsis thaliana
  peptide (1)..(404): Ceres Seq. ID no. 12706524
MISHRLRRALLTATSYVNRSISSSITPASDFPSVSAAVLKRSVIGRSTEVATRAPARLFSTRQYKLYKEGDEITEDTVLFEGCDYNHWLITMDFSKEETPKSPEEMVAAYEETCAQGLGISVEEAKQRMYACSTTTYQGFQAIMTEQESEKFKDLPGVVFILPDSYIDPQNKEYGGDKYENGVITHRPPPIQSGRARPRPRFDRSGGGSGGPQNFQRNTQYGQQPPMQGGGGSYGPQQGYATPGQGQGTQAPPPFQGGYNQGPRSPPPPYQAGYNQGQGSPVPPYQAGYNQVQGSPVPPYQGTQSSYGQGGSGNYSQGPQGGYNQGGPRNYNPQGAGNFGPASGAGNLGPAPGAGNPGYGQGYSGPGQEQNQTFPQADQRNRDWNNNNPAGQPGSDQFPQGRRY

SEQ ID NO: 88218 - protein, 313 aa, Arabidopsis thaliana; identical to SEQ ID NO: 76789
  peptide (1)..(313): Ceres Seq. ID no. 12706525

SEQ ID NO: 88219 - DNA, 1609 bp, Arabidopsis thaliana
  misc_feature (1)..(1609): Ceres Seq. ID no. 12706529
  misc_feature (1)..(1609): Ortholog of  Ceres SEQ ID NO 15176444 as cited in SEQ ID NO 53249
agccattctcttatttggctcattcgattattataggaggaaaccatggagctaaggaaatctcaagtggccatgcctgttttcttggcaataatgagtctaatggtgagtcaagtggtcttcgccgagaaagattcaggttcaatgtcccctcatgatcgggcattagcagaaatgcaagcccttaaagcttcattggttcggcgaaatctaccggctttggtatctcctcctcctacccctcctcaggccgtacccggtccgcgcgtgtaccaagtgatatcatatggtgccgatcccacagggaaattggatagcacggatgcaatattaaaagctatggaagaagcatttgatggtccaaatcatggagttttgatgcaaggtataaatgatctcggaggagcaagaattgatcttcaaggtggaagctacttaatcagccgtcctctacggtttccctcagccggcgccggaaatcttcttataagcggaggtacattaagagcatcaaatgatttcccggtcgataggtacttaatcgaactcaaagacgaatcgtcaaagttacaatacatcttcgaatacataactctcagagatcttctcatcgattgcaactaccgcggcggagcaatcgccgtcatcaactctctccggacaagcatagacaactgttacatcacacggttcggagacacgaacgggattcttgtcaaaagtggacacgagacttatatccgaaactcgtttcttggtcaacacataaccgccggtggagacagaggagaaagaagcttttccggcaccgccatcaatttgatgggaaacgataacgccgttactgacaccgttatattctccgccaggatcggagtaatggtatcgggacaagctaacttattgtccggcgtgcattgctataacaaagcaaccggttttggaggaaccgggatttatttgagattacccggtttaactcagaaccggattgtgaattcgtatttggattataccggtatcgtcgcggaagatccggttcagttacagatttcagggacgttttttttgggagatgcgtttattttgttgaaatcgatagccggatatattcgtggggttagtattgttgacaatatgttttccgggtcgggtcatggggtccagattgttcaattggatcagaggaacactgcgtttgatgacgttggccaggtggtcgttgaccgtaacagtgtgaacggaatggtagagaaatcgacggtggctagaggttcggtagatggaaacgggacgtcttggaccgttgattttaacccggttttgttgttcccggatttaatcaaccacgtgcagtacacacttgtggcgagtgaagctggcgtgtttcctctgcacgcgctaaggaacgtttctgataaccgggtggtcgttgagacaaacgctcctgttactgggacagtttatgtaacagtgaatcaaggagtttaatgtcgtgtttttgccgtttaatggttttataattttataaaatgatttatacttgttggtttttatttgtaatttttcctgtaagggggaaatttattttttatacagctaataaatg

SEQ ID NO: 88220 - protein, 481 aa, Arabidopsis thaliana
  peptide (1)..(481): Ceres Seq. ID no. 12706530
MELRKSQVAMPVFLAIMSLMVSQVVFAEKDSGSMSPHDRALAEMQALKASLVRRNLPALVSPPPTPPQAVPGPRVYQVISYGADPTGKLDSTDAILKAMEEAFDGPNHGVLMQGINDLGGARIDLQGGSYLISRPLRFPSAGAGNLLISGGTLRASNDFPVDRYLIELKDESSKLQYIFEYITLRDLLIDCNYRGGAIAVINSLRTSIDNCYITRFGDTNGILVKSGHETYIRNSFLGQHITAGGDRGERSFSGTAINLMGNDNAVTDTVIFSARIGVMVSGQANLLSGVHCYNKATGFGGTGIYLRLPGLTQNRIVNSYLDYTGIVAEDPVQLQISGTFFLGDAFILLKSIAGYIRGVSIVDNMFSGSGHGVQIVQLDQRNTAFDDVGQVVVDRNSVNGMVEKSTVARGSVDGNGTSWTVDFNPVLLFPDLINHVQYTLVASEAGVFPLHALRNVSDNRVVVETNAPVTGTVYVTVNQGV

SEQ ID NO: 88221 - protein, 472 aa, Arabidopsis thaliana
  peptide (1)..(472): Ceres Seq. ID no. 12706531
MPVFLAIMSLMVSQVVFAEKDSGSMSPHDRALAEMQALKASLVRRNLPALVSPPPTPPQAVPGPRVYQVISYGADPTGKLDSTDAILKAMEEAFDGPNHGVLMQGINDLGGARIDLQGGSYLISRPLRFPSAGAGNLLISGGTLRASNDFPVDRYLIELKDESSKLQYIFEYITLRDLLIDCNYRGGAIAVINSLRTSIDNCYITRFGDTNGILVKSGHETYIRNSFLGQHITAGGDRGERSFSGTAINLMGNDNAVTDTVIFSARIGVMVSGQANLLSGVHCYNKATGFGGTGIYLRLPGLTQNRIVNSYLDYTGIVAEDPVQLQISGTFFLGDAFILLKSIAGYIRGVSIVDNMFSGSGHGVQIVQLDQRNTAFDDVGQVVVDRNSVNGMVEKSTVARGSVDGNGTSWTVDFNPVLLFPDLINHVQYTLVASEAGVFPLHALRNVSDNRVVVETNAPVTGTVYVTVNQGV

SEQ ID NO: 88222 - protein, 465 aa, Arabidopsis thaliana
  peptide (1)..(465): Ceres Seq. ID no. 12706532
MSLMVSQVVFAEKDSGSMSPHDRALAEMQALKASLVRRNLPALVSPPPTPPQAVPGPRVYQVISYGADPTGKLDSTDAILKAMEEAFDGPNHGVLMQGINDLGGARIDLQGGSYLISRPLRFPSAGAGNLLISGGTLRASNDFPVDRYLIELKDESSKLQYIFEYITLRDLLIDCNYRGGAIAVINSLRTSIDNCYITRFGDTNGILVKSGHETYIRNSFLGQHITAGGDRGERSFSGTAINLMGNDNAVTDTVIFSARIGVMVSGQANLLSGVHCYNKATGFGGTGIYLRLPGLTQNRIVNSYLDYTGIVAEDPVQLQISGTFFLGDAFILLKSIAGYIRGVSIVDNMFSGSGHGVQIVQLDQRNTAFDDVGQVVVDRNSVNGMVEKSTVARGSVDGNGTSWTVDFNPVLLFPDLINHVQYTLVASEAGVFPLHALRNVSDNRVVVETNAPVTGTVYVTVNQGV

SEQ ID NO: 88223 - DNA, 2028 bp, Arabidopsis thaliana
  misc_feature (1)..(2028): Ceres Seq. ID no. 12706533
  misc_feature (1)..(2028): Ortholog of  Ceres SEQ ID NO 13657677 as cited in SEQ ID NO 66119
atgcccaaatgcccaatcccaatccgtatcagcttcttcagctactttctcaaagaaagtcgaatcctttcgagtaacccagttaacttctctatccatcttcgcttctcttcttctgtttcggtttctcctaacccgtcaatggaagtggtggagaatccattggaagctccaatctcggagaagatgtttaaatcagctcccaaaatgggttctttcaagttgggtgattctactttatcttcaatgattgagagttacgccaattcgggtgattttgattcggtagagaagcttttgagtcgaattagattagagaacagagtgattatagagcgtagtttcattgttgtctttagagcttatgggaaagcacatttgcctgataaagctgtagacttgtttcatagaatggttgatgagtttcgatgtaaacgtagtgttaagtcgtttaactctgtgttgaatgtgattataaacgagggtctttatcatcgaggattggagttttatgattatgttgtgaattccaacatgaacatgaacatttctcctaatgggttgagttttaatttggtcattaaggctctttgtaagttaagatttgtggatagagctattgaggtcttcagaggaatgcctgagagaaagtgtttgcctgatggttatacgtattgtacattgatggatgggttgtgtaaggaggaaaggattgatgaggcggttttactgttggatgagatgcagagcgaggggtgttcaccgagtccggttatatataatgtgttgattgatggattgtgcaagaaaggggatttgacacgggtgacaaagcttgtggataatatgtttcttaagggatgtgttcctaatgaggttacttataatacgcttattcatggtctatgtcttaagggtaagttagataaagctgttagtctcttggagcggatggtgtctagcaaatgtatcccaaatgatgtcacatatggaacgctgattaatgggttggttaagcaaagacgagcaacggatgcggttaggttgttgagctctatggaagaaagagggtatcatttgaatcagcatatttattcggtccttataagtgggttgttcaaagagggaaaggccgaggaggctatgtccttgtggaggaaaatggcagagaaaggatgcaagcccaatattgttgtgtacagtgttcttgtagatggtttatgccgcgaagggaaaccaaatgaagctaaagagatccttaatagaatgattgctagtggctgcttgcccaatgcgtatacgtatagctcattgatgaaaggattcttcaaaactggtctttgtgaagaagcggttcaagtgtggaaagagatggataaaaccggatgttctcgaaataagttttgttatagtgttctaatcgatggtctttgtggggttgggagagttaaggaggctatgatggtgtggtcaaagatgctcactatcgggatcaaacctgatacagtagcttatagctcaattataaaaggtctttgtggtattggctcgatggatgcggccttaaaactttaccatgagatgttatgccaagaagaacccaagtcacaacctgatgttgttacttataatatacttcttgatggcttatgtatgcaaaaagatatctctagagcagtagatctcttgaactctatgttagatagaggttgtgatcccgatgttattacgtgtaacacctttttgaatactttgagcgagaagtcaaattcttgtgacaaagggaggagttttctagaagagcttgttgtaaggctcttaaagcgtcagagagtatcaggcgcgtgtacgattgtggaagtaatgctggatcccgtttccaccttaagagtctccatgcgtgggaactttttgcgcttctggagttttggaataccagaaatgcgcgcgaaaaacagcttgaaccaaaatgaaagatcttcgaagtctgattgggtctctttatggctgaaaacctcgagctcctag

SEQ ID NO: 88224 - protein, 675 aa, Arabidopsis thaliana
  peptide (1)..(675): Ceres Seq. ID no. 12706534
MPKCPIPIRISFFSYFLKESRILSSNPVNFSIHLRFSSSVSVSPNPSMEVVENPLEAPISEKMFKSAPKMGSFKLGDSTLSSMIESYANSGDFDSVEKLLSRIRLENRVIIERSFIVVFRAYGKAHLPDKAVDLFHRMVDEFRCKRSVKSFNSVLNVIINEGLYHRGLEFYDYVVNSNMNMNISPNGLSFNLVIKALCKLRFVDRAIEVFRGMPERKCLPDGYTYCTLMDGLCKEERIDEAVLLLDEMQSEGCSPSPVIYNVLIDGLCKKGDLTRVTKLVDNMFLKGCVPNEVTYNTLIHGLCLKGKLDKAVSLLERMVSSKCIPNDVTYGTLINGLVKQRRATDAVRLLSSMEERGYHLNQHIYSVLISGLFKEGKAEEAMSLWRKMAEKGCKPNIVVYSVLVDGLCREGKPNEAKEILNRMIASGCLPNAYTYSSLMKGFFKTGLCEEAVQVWKEMDKTGCSRNKFCYSVLIDGLCGVGRVKEAMMVWSKMLTIGIKPDTVAYSSIIKGLCGIGSMDAALKLYHEMLCQEEPKSQPDVVTYNILLDGLCMQKDISRAVDLLNSMLDRGCDPDVITCNTFLNTLSEKSNSCDKGRSFLEELVVRLLKRQRVSGACTIVEVMLDPVSTLRVSMRGNFLRFWSFGIPEMRAKNSLNQNERSSKSDWVSLWLKTSSS

SEQ ID NO: 88225 - protein, 628 aa, Arabidopsis thaliana
  peptide (1)..(628): Ceres Seq. ID no. 12706535
MEVVENPLEAPISEKMFKSAPKMGSFKLGDSTLSSMIESYANSGDFDSVEKLLSRIRLENRVIIERSFIVVFRAYGKAHLPDKAVDLFHRMVDEFRCKRSVKSFNSVLNVIINEGLYHRGLEFYDYVVNSNMNMNISPNGLSFNLVIKALCKLRFVDRAIEVFRGMPERKCLPDGYTYCTLMDGLCKEERIDEAVLLLDEMQSEGCSPSPVIYNVLIDGLCKKGDLTRVTKLVDNMFLKGCVPNEVTYNTLIHGLCLKGKLDKAVSLLERMVSSKCIPNDVTYGTLINGLVKQRRATDAVRLLSSMEERGYHLNQHIYSVLISGLFKEGKAEEAMSLWRKMAEKGCKPNIVVYSVLVDGLCREGKPNEAKEILNRMIASGCLPNAYTYSSLMKGFFKTGLCEEAVQVWKEMDKTGCSRNKFCYSVLIDGLCGVGRVKEAMMVWSKMLTIGIKPDTVAYSSIIKGLCGIGSMDAALKLYHEMLCQEEPKSQPDVVTYNILLDGLCMQKDISRAVDLLNSMLDRGCDPDVITCNTFLNTLSEKSNSCDKGRSFLEELVVRLLKRQRVSGACTIVEVMLDPVSTLRVSMRGNFLRFWSFGIPEMRAKNSLNQNERSSKSDWVSLWLKTSSS

SEQ ID NO: 88226 - protein, 613 aa, Arabidopsis thaliana
  peptide (1)..(613): Ceres Seq. ID no. 12706536
MFKSAPKMGSFKLGDSTLSSMIESYANSGDFDSVEKLLSRIRLENRVIIERSFIVVFRAYGKAHLPDKAVDLFHRMVDEFRCKRSVKSFNSVLNVIINEGLYHRGLEFYDYVVNSNMNMNISPNGLSFNLVIKALCKLRFVDRAIEVFRGMPERKCLPDGYTYCTLMDGLCKEERIDEAVLLLDEMQSEGCSPSPVIYNVLIDGLCKKGDLTRVTKLVDNMFLKGCVPNEVTYNTLIHGLCLKGKLDKAVSLLERMVSSKCIPNDVTYGTLINGLVKQRRATDAVRLLSSMEERGYHLNQHIYSVLISGLFKEGKAEEAMSLWRKMAEKGCKPNIVVYSVLVDGLCREGKPNEAKEILNRMIASGCLPNAYTYSSLMKGFFKTGLCEEAVQVWKEMDKTGCSRNKFCYSVLIDGLCGVGRVKEAMMVWSKMLTIGIKPDTVAYSSIIKGLCGIGSMDAALKLYHEMLCQEEPKSQPDVVTYNILLDGLCMQKDISRAVDLLNSMLDRGCDPDVITCNTFLNTLSEKSNSCDKGRSFLEELVVRLLKRQRVSGACTIVEVMLDPVSTLRVSMRGNFLRFWSFGIPEMRAKNSLNQNERSSKSDWVSLWLKTSSS

SEQ ID NO: 88227 - DNA, 3633 bp, Arabidopsis thaliana
  misc_feature (1)..(3633): Ceres Seq. ID no. 12706545
  misc_feature (1)..(3633): Ortholog of  Ceres SEQ ID NO 14303870 as cited in SEQ ID NO 53632
  misc_feature (1)..(3633): Ortholog of  Ceres SEQ ID NO 13656662 as cited in SEQ ID NO 65594
atgcaaccactagttcttctcctcctcttcatcctctgtttttccggtttaggtcaaccgggtatcatcaacaacgatcttcagactcttctcgaggtgaagaaatctttggtcacgaatccacaagaagacgatcctctccgacaatggaactctgataacatcaactactgttcttggaccggagtcacatgcgacaataccggtttatttcgtgtaattgctctaaaccttaccggtttaggattaaccggttcaatttcaccttggtttggccggtttgacaacctaatccaccttgatctatcttccaacaatctagttggtcccatcccaactgctctctccaaccttacttccttggagtctctgtttctcttttctaaccaactcaccggcgagattccgagccagctcggctccctcgttaatatccggtcgctaaggatcggagacaatgagcttgttggagatatcccggagacgttagggaacttggtgaatctccagatgcttgctctggcttcttgtagactcaccggtcctataccgagtcagctcggtcgtctcgtccgagttcagtcgttgatattgcaagataactatctcgaaggaccgattccggctgagttaggaaactgctctgatctcactgtgttcactgcggcggagaacatgctcaacgggacgataccggcggagcttggacgccttgaaaacctcgaaatactcaacctggcgaacaacagtctcaccggagagataccgagtcaattaggtgaaatgagccaactccagtatcttagcttgatggcaaatcaacttcaaggtcttatccccaagagtttggctgatctgggaaatcttcaaactcttgatttatcggcgaataatcttaccggagagatacctgaagaattctggaacatgagtcagcttcttgatttggttctagcaaacaatcatctctctggttcattaccaaagagcatttgttctaacaacacaaacttggagcaactggttttgtctggaactcagctttctggtgaaatccctgtggaattaagcaaatgtcaatcgcttaagcagcttgatttgtcgaacaattctctcgctggctcgatccctgaagcattgtttgagctagtcgaactcacagatctttatctccacaataataccttggagggtacgttatctccttcgatatcaaacctcactaatctacagtggcttgtgttgtatcacaataacttggaaggcaagttaccgaaggagatcagcgcactcagaaaattagaggttctgtttctgtatgagaatcgtttctcaggggaaatcccacaggagattggaaactgcacaagcttgaagatgattgatatgttcgggaatcatttcgaaggagagatacctccttcaataggaagattaaaagagcttaacttgcttcacttgagacagaacgagcttgtgggtggacttcccgccagtttaggtaactgtcatcaactgaacatcttggatttggcggataatcagctctcgggatcaattccttcatccttcgggttcttaaagggcttggaacagttgatgctttacaacaattctcttcaaggaaatcttcctgattcacttatcagtctgaggaacctcaccagaatcaatctctctcacaacaggctcaatggtacgattcatccattatgtggttcgagctcatatctctcattcgatgtcaccaacaacgggtttgaagatgaaatccccctggagctaggaaactctcaaaatcttgatcgtctcaggttaggcaagaatcaattgacaggaaaaatcccttggacgttggggaaaatccgcgagctgtccttgttagatatgtcaagcaacgctctcacaggaaccattccgctacagctcgtcttgtgcaagaaactgacacacatcgatctcaataacaattttctatcaggtcctatacctccatggcttggaaaactttcacagttaggagagctcaagctttcttcgaatcagtttgttgagtctttacctactgaactgttcaactgtacaaagctgcttgtgttgtctcttgatggaaattcgcttaatgggtcgattccacaagagattggtaacttgggagctctcaatgtccttaaccttgataagaaccagttttcaggttcacttcctcaagctatgggaaagctcagcaagctgtatgagcttcggttatcaagaaacagcttaacaggagaaatcccagttgagattggacagcttcaggatcttcaaagtgctttagacctcagctacaataacttcactggagatataccttcgacaattgggacattatcaaagctggaaacacttgatctttctcacaatcagcttacaggggaagttcctggctcggttggggatatgaagagtttgggatatctcaatgtttctttcaataacctcggagggaagctcaagaaacagttctcaagatggccagctgattcctttttaggcaacacaggtctttgtggaagcccactaagtcgctgcaacagagttagaagtaataacaagcaacaaggtcttagtgccagatcagttgtgataatatcagcaatctcagcattgacggcgattggcttgatgatacttgtaatcgctctcttcttcaaacaaaggtgggaggacatcatggaagctacacataatctaagcgaggagttcatgattggatcaggaggctctgggaaggtttacaaggcggagcttgaaaatggtgagactgttgcagtgaaaaagattctctggaaggatgatctcatgtcaaacaagagcttcagcagagaagttaagacgcttggaagaatcaggcataggcatctggttaagctaatgggttactgcagcagcaagtcagaaggattgaatctgttgatatatgagtacatgaagaacggaagcatctgggattggcttcatgaggacaaacccgtgctcgaaaaaaagaagaagcttttagactgggaagcaagattgagaatagcagtaggattggctcaaggagtagagtaccttcatcatgactgtgttcctcctatcgttcaccgtgatatcaaatccagtaatgtgctcctcgattcaaacatggaagcgcatttaggagatttcggtcttgccaaggtcttaactgagaactgtgataccaacacagattcaaatacctggtttgcatgctcttatggctacattgctccagagtatgcttactcgttgaaggcgactgagaagagcgacgtttacagtatggggatcgtgttgatggagattgtgactgggaaaatgccaaccgactcagtgtttggtgcagagatggacatggtgagatgggttgaaacacatcttgaagtagcgggttctgcgagagataaactcatagatccaaagcttaagccacttctgccatttgaggaagacgcagcttgtcaggtgcttgagattgcacttcagtgcacaaaaacttctccccaagagagaccatcttctaggcaagcttgtgatagtcttctccatgtctacaacaacagaacggccggttataagaagctgtaa

SEQ ID NO: 88228 - protein, 1210 aa, Arabidopsis thaliana
  peptide (1)..(1210): Ceres Seq. ID no. 12706546
MQPLVLLLLFILCFSGLGQPGIINNDLQTLLEVKKSLVTNPQEDDPLRQWNSDNINYCSWTGVTCDNTGLFRVIALNLTGLGLTGSISPWFGRFDNLIHLDLSSNNLVGPIPTALSNLTSLESLFLFSNQLTGEIPSQLGSLVNIRSLRIGDNELVGDIPETLGNLVNLQMLALASCRLTGPIPSQLGRLVRVQSLILQDNYLEGPIPAELGNCSDLTVFTAAENMLNGTIPAELGRLENLEILNLANNSLTGEIPSQLGEMSQLQYLSLMANQLQGLIPKSLADLGNLQTLDLSANNLTGEIPEEFWNMSQLLDLVLANNHLSGSLPKSICSNNTNLEQLVLSGTQLSGEIPVELSKCQSLKQLDLSNNSLAGSIPEALFELVELTDLYLHNNTLEGTLSPSISNLTNLQWLVLYHNNLEGKLPKEISALRKLEVLFLYENRFSGEIPQEIGNCTSLKMIDMFGNHFEGEIPPSIGRLKELNLLHLRQNELVGGLPASLGNCHQLNILDLADNQLSGSIPSSFGFLKGLEQLMLYNNSLQGNLPDSLISLRNLTRINLSHNRLNGTIHPLCGSSSYLSFDVTNNGFEDEIPLELGNSQNLDRLRLGKNQLTGKIPWTLGKIRELSLLDMSSNALTGTIPLQLVLCKKLTHIDLNNNFLSGPIPPWLGKLSQLGELKLSSNQFVESLPTELFNCTKLLVLSLDGNSLNGSIPQEIGNLGALNVLNLDKNQFSGSLPQAMGKLSKLYELRLSRNSLTGEIPVEIGQLQDLQSALDLSYNNFTGDIPSTIGTLSKLETLDLSHNQLTGEVPGSVGDMKSLGYLNVSFNNLGGKLKKQFSRWPADSFLGNTGLCGSPLSRCNRVRSNNKQQGLSARSVVIISAISALTAIGLMILVIALFFKQRWEDIMEATHNLSEEFMIGSGGSGKVYKAELENGETVAVKKILWKDDLMSNKSFSREVKTLGRIRHRHLVKLMGYCSSKSEGLNLLIYEYMKNGSIWDWLHEDKPVLEKKKKLLDWEARLRIAVGLAQGVEYLHHDCVPPIVHRDIKSSNVLLDSNMEAHLGDFGLAKVLTENCDTNTDSNTWFACSYGYIAPEYAYSLKATEKSDVYSMGIVLMEIVTGKMPTDSVFGAEMDMVRWVETHLEVAGSARDKLIDPKLKPLLPFEEDAACQVLEIALQCTKTSPQERPSSRQACDSLLHVYNNRTAGYKKL

SEQ ID NO: 88229 - protein, 1040 aa, Arabidopsis thaliana
  peptide (1)..(1040): Ceres Seq. ID no. 12706547
MLALASCRLTGPIPSQLGRLVRVQSLILQDNYLEGPIPAELGNCSDLTVFTAAENMLNGTIPAELGRLENLEILNLANNSLTGEIPSQLGEMSQLQYLSLMANQLQGLIPKSLADLGNLQTLDLSANNLTGEIPEEFWNMSQLLDLVLANNHLSGSLPKSICSNNTNLEQLVLSGTQLSGEIPVELSKCQSLKQLDLSNNSLAGSIPEALFELVELTDLYLHNNTLEGTLSPSISNLTNLQWLVLYHNNLEGKLPKEISALRKLEVLFLYENRFSGEIPQEIGNCTSLKMIDMFGNHFEGEIPPSIGRLKELNLLHLRQNELVGGLPASLGNCHQLNILDLADNQLSGSIPSSFGFLKGLEQLMLYNNSLQGNLPDSLISLRNLTRINLSHNRLNGTIHPLCGSSSYLSFDVTNNGFEDEIPLELGNSQNLDRLRLGKNQLTGKIPWTLGKIRELSLLDMSSNALTGTIPLQLVLCKKLTHIDLNNNFLSGPIPPWLGKLSQLGELKLSSNQFVESLPTELFNCTKLLVLSLDGNSLNGSIPQEIGNLGALNVLNLDKNQFSGSLPQAMGKLSKLYELRLSRNSLTGEIPVEIGQLQDLQSALDLSYNNFTGDIPSTIGTLSKLETLDLSHNQLTGEVPGSVGDMKSLGYLNVSFNNLGGKLKKQFSRWPADSFLGNTGLCGSPLSRCNRVRSNNKQQGLSARSVVIISAISALTAIGLMILVIALFFKQRWEDIMEATHNLSEEFMIGSGGSGKVYKAELENGETVAVKKILWKDDLMSNKSFSREVKTLGRIRHRHLVKLMGYCSSKSEGLNLLIYEYMKNGSIWDWLHEDKPVLEKKKKLLDWEARLRIAVGLAQGVEYLHHDCVPPIVHRDIKSSNVLLDSNMEAHLGDFGLAKVLTENCDTNTDSNTWFACSYGYIAPEYAYSLKATEKSDVYSMGIVLMEIVTGKMPTDSVFGAEMDMVRWVETHLEVAGSARDKLIDPKLKPLLPFEEDAACQVLEIALQCTKTSPQERPSSRQACDSLLHVYNNRTAGYKKL

SEQ ID NO: 88230 - protein, 985 aa, Arabidopsis thaliana
  peptide (1)..(985): Ceres Seq. ID no. 12706548
MLNGTIPAELGRLENLEILNLANNSLTGEIPSQLGEMSQLQYLSLMANQLQGLIPKSLADLGNLQTLDLSANNLTGEIPEEFWNMSQLLDLVLANNHLSGSLPKSICSNNTNLEQLVLSGTQLSGEIPVELSKCQSLKQLDLSNNSLAGSIPEALFELVELTDLYLHNNTLEGTLSPSISNLTNLQWLVLYHNNLEGKLPKEISALRKLEVLFLYENRFSGEIPQEIGNCTSLKMIDMFGNHFEGEIPPSIGRLKELNLLHLRQNELVGGLPASLGNCHQLNILDLADNQLSGSIPSSFGFLKGLEQLMLYNNSLQGNLPDSLISLRNLTRINLSHNRLNGTIHPLCGSSSYLSFDVTNNGFEDEIPLELGNSQNLDRLRLGKNQLTGKIPWTLGKIRELSLLDMSSNALTGTIPLQLVLCKKLTHIDLNNNFLSGPIPPWLGKLSQLGELKLSSNQFVESLPTELFNCTKLLVLSLDGNSLNGSIPQEIGNLGALNVLNLDKNQFSGSLPQAMGKLSKLYELRLSRNSLTGEIPVEIGQLQDLQSALDLSYNNFTGDIPSTIGTLSKLETLDLSHNQLTGEVPGSVGDMKSLGYLNVSFNNLGGKLKKQFSRWPADSFLGNTGLCGSPLSRCNRVRSNNKQQGLSARSVVIISAISALTAIGLMILVIALFFKQRWEDIMEATHNLSEEFMIGSGGSGKVYKAELENGETVAVKKILWKDDLMSNKSFSREVKTLGRIRHRHLVKLMGYCSSKSEGLNLLIYEYMKNGSIWDWLHEDKPVLEKKKKLLDWEARLRIAVGLAQGVEYLHHDCVPPIVHRDIKSSNVLLDSNMEAHLGDFGLAKVLTENCDTNTDSNTWFACSYGYIAPEYAYSLKATEKSDVYSMGIVLMEIVTGKMPTDSVFGAEMDMVRWVETHLEVAGSARDKLIDPKLKPLLPFEEDAACQVLEIALQCTKTSPQERPSSRQACDSLLHVYNNRTAGYKKL

SEQ ID NO: 88231 - DNA, 858 bp, Arabidopsis thaliana
  misc_feature (1)..(858): Ceres Seq. ID no. 12706558
  misc_feature (1)..(858): Ortholog of  Ceres SEQ ID NO 13594209 as cited in SEQ ID NO 59089
atgaagagtttatgcactgtccatctcctcggcaggcaaatggttaggtcctttgagaaagtaagagaagaagagataacatcagtgatatggggaagcttgagaaacaaagttcttcttctttgccgaattgctgtgggaagaaaatatagccgggaggaaaacactagcgattttgaaaatcaactgagaaaagtcatggagcttctaggcgcatttcctgtcggagattacataccgggtttggcgtggatagataaagtccgcggcttggatcgtaaaatggaggaaattcaactagagaagacaaacgaatttgagcttgaaagaagcgacatcaggctcatcattttggaattcttcctaggaggaacgacaacaactttcacggccatcgattgggcaatgacacttgtcgtaagacatccagaatctatgaaaaaactccaagaagagatccaaacatattccaggaataagttatatgtaccagaagaagaagttgagaacatgaaatacttaaaagctgtgattaaagaagtctttcgtctacatcctccaggcccattgtcaattcccagacagcttagtgaagatgtattcatcaacgcttgggccatccatcgagataccgaaaaatggggaccatatgcagaagagtttaagccagagaggcatttggatctaccactgaatttccaaggacaagatttcaacttcattccattcggatcgggaagaaggttatgtcctgacatagattttgcaacaatgttaattgaggtgggattggcaaacttcgtgtaccgcttcaactggagagttgagactagaccacttggagatgatgatggttga

SEQ ID NO: 88232 - protein, 285 aa, Arabidopsis thaliana
  peptide (1)..(285): Ceres Seq. ID no. 12706559
MKSLCTVHLLGRQMVRSFEKVREEEITSVIWGSLRNKVLLLCRIAVGRKYSREENTSDFENQLRKVMELLGAFPVGDYIPGLAWIDKVRGLDRKMEEIQLEKTNEFELERSDIRLIILEFFLGGTTTTFTAIDWAMTLVVRHPESMKKLQEEIQTYSRNKLYVPEEEVENMKYLKAVIKEVFRLHPPGPLSIPRQLSEDVFINAWAIHRDTEKWGPYAEEFKPERHLDLPLNFQGQDFNFIPFGSGRRLCPDIDFATMLIEVGLANFVYRFNWRVETRPLGDDDG

SEQ ID NO: 88233 - protein, 272 aa, Arabidopsis thaliana
  peptide (1)..(272): Ceres Seq. ID no. 12706560
MVRSFEKVREEEITSVIWGSLRNKVLLLCRIAVGRKYSREENTSDFENQLRKVMELLGAFPVGDYIPGLAWIDKVRGLDRKMEEIQLEKTNEFELERSDIRLIILEFFLGGTTTTFTAIDWAMTLVVRHPESMKKLQEEIQTYSRNKLYVPEEEVENMKYLKAVIKEVFRLHPPGPLSIPRQLSEDVFINAWAIHRDTEKWGPYAEEFKPERHLDLPLNFQGQDFNFIPFGSGRRLCPDIDFATMLIEVGLANFVYRFNWRVETRPLGDDDG

SEQ ID NO: 88234 - protein, 219 aa, Arabidopsis thaliana
  peptide (1)..(219): Ceres Seq. ID no. 12706561
MELLGAFPVGDYIPGLAWIDKVRGLDRKMEEIQLEKTNEFELERSDIRLIILEFFLGGTTTTFTAIDWAMTLVVRHPESMKKLQEEIQTYSRNKLYVPEEEVENMKYLKAVIKEVFRLHPPGPLSIPRQLSEDVFINAWAIHRDTEKWGPYAEEFKPERHLDLPLNFQGQDFNFIPFGSGRRLCPDIDFATMLIEVGLANFVYRFNWRVETRPLGDDDG

SEQ ID NO: 88235 - DNA, 4626 bp, Arabidopsis thaliana
  misc_feature (1)..(4626): Ceres Seq. ID no. 12706578
  misc_feature (1)..(4626): Ortholog of  Ceres SEQ ID NO 14310375 as cited in SEQ ID NO 59612
atggatggtaaggagaagaaatctggttccaagagaggatctaaggtttttcagtttgacgatgatgctgatgatgatgaacctattggatctctcttagagattatgaagcataaaagtcccaagaaggataaggttgagacagaaagtactggtaaacagaggcagaaacaggttgtggaaaagaagctgagtgctttgggcaaggcttctgaagatatggatgacacattagccagttttaggaagaggttgaagggtaacaagaaaggtgttgaatcaggaacctcaagagttaggaaccacgagggtgttgatactgtaacaaattctaatttgaaaccaattgaggaagccaacaaaaacgaggtgcagagtgtattacttagggaaaacggtgcttctaattctattcaaaaatgtgcttcagaaactggaaccctcttgcataagttttctggtaaagataaggcagcctctcccagtcatgaaaaagtagaaacagtatccagtgagaaggaagcagatgtctttcatcaaattacaaaggaggaatccgagataccaatgtcagagaaggctgtggagctatccagggtgtctgtccccatgccagatgtccatggcgaagttaattgtactattgctcctgataaggacatacacttgggagagccaacttcagagtccggttattaccgagagaagaatttagttatgtgtgattgtggtacccaatttaattttgaggatcgttcctttgagtctaatactcaggttactctctgtcaaaagtgcaagtattcttcacaccataatgcttctaatggaggtggtattcaagttaatactctagaagatggaactgctcaagcttcgccggtttctataattccctgcgaagatgaaaatttccgaggggatgcaatttcactacctaattctgggaagccatcgaccttgcaacgcccagagcgtattgctaaaaagcgtaagcttggaaacatggtgtatgaaggagacgtgaaatgggagaatgagcaaggctttcttgattgtcaaagtgacaagtcctttaagggaagcgacaagtgtggttttgttccatctatttccaaggaaattgaaattggtagagcagctgcggtaacagctggacttaaagcccagtcagtaagtccaattgagaagattatacttaaagaggtgttgaagcgcaaaggtagcaatcaggagtacctagtttgcaggaactctatcttaggcctgtggagtaaaaatgtcagccgaatcttacctgtcactgaatgtggtgttaccggaggcccttctgagagtgaattgccttcagcttcccttatcagagaagtctataagtttcttgatcagagaggttatataaatgctggaatttcatctgtgaatggaaaggcggcatcttcgactaatcaagactatgatctcctccaggggagacagcttgaagaaagttctatggcttctgttgcagattctgaagagggagttgcttttatccttggtcaggtcaaagccgttgaatcaactagtgagggtaagaaatgtgctctccaaaacgatgaaagggacttggtaggatgtgcgacctcggaaatgttggaatctatcagcaaaaaatgcgaagcaagcattattgatgataacaaacgttctgtgagcatgaatgctttacaggatagtactgcatctaatgttgaaaagcatcctgaaacattttcagtagcgaagcctgctttgtctagcacactctcctctgcacatagtaatcaaatgagaggaagggactgtgttccatgtgaggttatagatgagaagaaagttatagtaattggagctggtcctgctggattaacagcagcacgtcatttacagcgccagggtttttctgtaaccgttcttgaggcaaggagtagagtaggtggtcgtgtatttacagaccggtcgtctctttcagttcctgtggatcttggggctagcataattacaggcattgaggctgatgtgccatctgaaagaatgccagatccatcggtattggtctgtaaccaattaggtctggagttgagcgtgttacatggattctgtcctctttatgatactgtaacagggaaaaaggttcctgcagaattagatgatgctctacaagcagagttcaacagtctaattgacgatgtagatttgcttgttgaggaaataggcaaggaaagagcaaataaaatgtctcttgaggatggtctagaatatggccttcaacggctgagaatgccacatgacaaggtgaacattgacaaatttgggcttctcaattcaagctcaaaaacgggcatcagaggtccctttatgcaggatgaaagctggaaagatgattttttgaatcctttggagcgaagagttatgaattggcattttgctcacacagaatatggttgtgctgctgtcctcaaggaagtttcgcttcctcactggaatcaagatgagttttatggcgggtttggagggcctcatgctatgattaagggtggttatagccgagttgttgagtcgcttgcagaaggactggacattcacttaaacaaaatagtttcagatgtatcttatgtctctgatgtatctgccatggataacagcaagcataaagtcagagttagtacatcaaatggctgtgagtatcttggagatgctgttctggtaactgttccacttggatgcttgaaagcagaaactattaagttttcaccacccttgccggactggaaatatgcgtcaatcaaacaacttggttttggagttctaaataaagttgttttggagttcccaacggtattttgggatgatagtgttgattactttggggcaactgctgaggaaacagatctaagaggtgagtgctttatgttttggaatgtcaaaaaaactgttggtgctcctgtcctgatagctttggtggttgggaaggctgcttttgaatatacaaacaagagtaagtctgagcacgtgaaccatgcaatgatggttcttcggaagctttttggtggggatctggttcctgatcctgtcgcctcggtagttactgactggggcactgaaccttacagttatggtgcctactcgtatgttgctattggtgcttctggtgaagattatgatgtattgggaaggcctgttcagaattgtttgttttttgctggtgaggcaacatgcaaagagcatcctgacactgttggtggtgcaatgatgactggagtccgggaagctgtgcgtataattgatatacttagaagtggaaatgattacacagccgaaatagaaacactagaaaaagcgcagaggaaatctgtacctgtaagggatgaagtcagagacctaataaagaggctggaagttgttgagctgtctaatgtgctagccaggcaatcattgctacgaaacatgttcttctctgccaaaacaactgtcgggcgtttgcatttagccaaggagttgcttaacctacctggtgaaaccttgaaatcctttgcaggtacaaaagaagggcttgcagtgctgaactcttggatcctggattcgatgggtaagaatggaacccagcttttacgtcactgtgtacatattcttgttcgagttacgagtgacctctttgccttgaggctatcaggtattgggaagactgtgaaagaaaagatgaagagtttgaggacaaccagctacctatgtcagaggaagagaaggctgtgtttgctgaagctgaggcggctcgtgcagcagcagaagcagctgcaaaggcaagcattttctgaggcctatcataatacttcattgcagcttcctaagatcccctcatttcataagtttgccaggcgagagcagtatgcaaagatggacgaatctgatttcaggaaaaagtttcctggaaatgtcttaggaagacaagattgtatgtcagagattgactcgaggaactgcaaagttagggactggtatgattttcctgcctcgtgccttgaccttgacagtgcaaggattccagttgataactattcacagcctagccattcgaatgagcttgtatctcattcgaagttcagagaatgttctggagaaagtgtggctgcggataccagtttcttaactggggcatgggttgatactggtggtagtagcgatggtttcaaggattctcaggctatagatagatggcaatctcaagctgctgctgctgatcctgaatttttcaaccgtactttgcatataaaggatgaagaagattcgattgcttgttcgactggccctcctagttggaagcatgaccaacgagcgaatgaatgttccgtgtcacagggagttgtagattttgttgcatcgttgcttatggccccgtatagagcaaagaaaattgatagagatgtatacaagtcaattatgaagaagacagcaacaaaggttatgcaacatacaacagatgtggagaaagctatggctgttacacagttcctcgactcaaagcggaaaaataagattcgtgactttgtggacaaacaagttgacaagtacatggtgatacctcaagtatctgaattcatttcttga

SEQ ID NO: 88236 - protein, 1541 aa, Arabidopsis thaliana
  peptide (1)..(1541): Ceres Seq. ID no. 12706579
MDGKEKKSGSKRGSKVFQFDDDADDDEPIGSLLEIMKHKSPKKDKVETESTGKQRQKQVVEKKLSALGKASEDMDDTLASFRKRLKGNKKGVESGTSRVRNHEGVDTVTNSNLKPIEEANKNEVQSVLLRENGASNSIQKCASETGTLLHKFSGKDKAASPSHEKVETVSSEKEADVFHQITKEESEIPMSEKAVELSRVSVPMPDVHGEVNCTIAPDKDIHLGEPTSESGYYREKNLVMCDCGTQFNFEDRSFESNTQVTLCQKCKYSSHHNASNGGGIQVNTLEDGTAQASPVSIIPCEDENFRGDAISLPNSGKPSTLQRPERIAKKRKLGNMVYEGDVKWENEQGFLDCQSDKSFKGSDKCGFVPSISKEIEIGRAAAVTAGLKAQSVSPIEKIILKEVLKRKGSNQEYLVCRNSILGLWSKNVSRILPVTECGVTGGPSESELPSASLIREVYKFLDQRGYINAGISSVNGKAASSTNQDYDLLQGRQLEESSMASVADSEEGVAFILGQVKAVESTSEGKKCALQNDERDLVGCATSEMLESISKKCEASIIDDNKRSVSMNALQDSTASNVEKHPETFSVAKPALSSTLSSAHSNQMRGRDCVPCEVIDEKKVIVIGAGPAGLTAARHLQRQGFSVTVLEARSRVGGRVFTDRSSLSVPVDLGASIITGIEADVPSERMPDPSVLVCNQLGLELSVLHGFCPLYDTVTGKKVPAELDDALQAEFNSLIDDVDLLVEEIGKERANKMSLEDGLEYGLQRLRMPHDKVNIDKFGLLNSSSKTGIRGPFMQDESWKDDFLNPLERRVMNWHFAHTEYGCAAVLKEVSLPHWNQDEFYGGFGGPHAMIKGGYSRVVESLAEGLDIHLNKIVSDVSYVSDVSAMDNSKHKVRVSTSNGCEYLGDAVLVTVPLGCLKAETIKFSPPLPDWKYASIKQLGFGVLNKVVLEFPTVFWDDSVDYFGATAEETDLRGECFMFWNVKKTVGAPVLIALVVGKAAFEYTNKSKSEHVNHAMMVLRKLFGGDLVPDPVASVVTDWGTEPYSYGAYSYVAIGASGEDYDVLGRPVQNCLFFAGEATCKEHPDTVGGAMMTGVREAVRIIDILRSGNDYTAEIETLEKAQRKSVPVRDEVRDLIKRLEVVELSNVLARQSLLRNMFFSAKTTVGRLHLAKELLNLPGETLKSFAGTKEGLAVLNSWILDSMGKNGTQLLRHCVHILVRVTSDLFALRLSGIGKTVKEKMKSLRTTSYLCQRKRRLCLLKLRRLVQQQKQLQRQAFSEAYHNTSLQLPKIPSFHKFARREQYAKMDESDFRKKFPGNVLGRQDCMSEIDSRNCKVRDWYDFPASCLDLDSARIPVDNYSQPSHSNELVSHSKFRECSGESVAADTSFLTGAWVDTGGSSDGFKDSQAIDRWQSQAAAADPEFFNRTLHIKDEEDSIACSTGPPSWKHDQRANECSVSQGVVDFVASLLMAPYRAKKIDRDVYKSIMKKTATKVMQHTTDVEKAMAVTQFLDSKRKNKIRDFVDKQVDKYMVIPQVSEFIS

SEQ ID NO: 88237 - protein, 1506 aa, Arabidopsis thaliana
  peptide (1)..(1506): Ceres Seq. ID no. 12706580
MKHKSPKKDKVETESTGKQRQKQVVEKKLSALGKASEDMDDTLASFRKRLKGNKKGVESGTSRVRNHEGVDTVTNSNLKPIEEANKNEVQSVLLRENGASNSIQKCASETGTLLHKFSGKDKAASPSHEKVETVSSEKEADVFHQITKEESEIPMSEKAVELSRVSVPMPDVHGEVNCTIAPDKDIHLGEPTSESGYYREKNLVMCDCGTQFNFEDRSFESNTQVTLCQKCKYSSHHNASNGGGIQVNTLEDGTAQASPVSIIPCEDENFRGDAISLPNSGKPSTLQRPERIAKKRKLGNMVYEGDVKWENEQGFLDCQSDKSFKGSDKCGFVPSISKEIEIGRAAAVTAGLKAQSVSPIEKIILKEVLKRKGSNQEYLVCRNSILGLWSKNVSRILPVTECGVTGGPSESELPSASLIREVYKFLDQRGYINAGISSVNGKAASSTNQDYDLLQGRQLEESSMASVADSEEGVAFILGQVKAVESTSEGKKCALQNDERDLVGCATSEMLESISKKCEASIIDDNKRSVSMNALQDSTASNVEKHPETFSVAKPALSSTLSSAHSNQMRGRDCVPCEVIDEKKVIVIGAGPAGLTAARHLQRQGFSVTVLEARSRVGGRVFTDRSSLSVPVDLGASIITGIEADVPSERMPDPSVLVCNQLGLELSVLHGFCPLYDTVTGKKVPAELDDALQAEFNSLIDDVDLLVEEIGKERANKMSLEDGLEYGLQRLRMPHDKVNIDKFGLLNSSSKTGIRGPFMQDESWKDDFLNPLERRVMNWHFAHTEYGCAAVLKEVSLPHWNQDEFYGGFGGPHAMIKGGYSRVVESLAEGLDIHLNKIVSDVSYVSDVSAMDNSKHKVRVSTSNGCEYLGDAVLVTVPLGCLKAETIKFSPPLPDWKYASIKQLGFGVLNKVVLEFPTVFWDDSVDYFGATAEETDLRGECFMFWNVKKTVGAPVLIALVVGKAAFEYTNKSKSEHVNHAMMVLRKLFGGDLVPDPVASVVTDWGTEPYSYGAYSYVAIGASGEDYDVLGRPVQNCLFFAGEATCKEHPDTVGGAMMTGVREAVRIIDILRSGNDYTAEIETLEKAQRKSVPVRDEVRDLIKRLEVVELSNVLARQSLLRNMFFSAKTTVGRLHLAKELLNLPGETLKSFAGTKEGLAVLNSWILDSMGKNGTQLLRHCVHILVRVTSDLFALRLSGIGKTVKEKMKSLRTTSYLCQRKRRLCLLKLRRLVQQQKQLQRQAFSEAYHNTSLQLPKIPSFHKFARREQYAKMDESDFRKKFPGNVLGRQDCMSEIDSRNCKVRDWYDFPASCLDLDSARIPVDNYSQPSHSNELVSHSKFRECSGESVAADTSFLTGAWVDTGGSSDGFKDSQAIDRWQSQAAAADPEFFNRTLHIKDEEDSIACSTGPPSWKHDQRANECSVSQGVVDFVASLLMAPYRAKKIDRDVYKSIMKKTATKVMQHTTDVEKAMAVTQFLDSKRKNKIRDFVDKQVDKYMVIPQVSEFIS

SEQ ID NO: 88238 - protein, 1468 aa, Arabidopsis thaliana
  peptide (1)..(1468): Ceres Seq. ID no. 12706581
MDDTLASFRKRLKGNKKGVESGTSRVRNHEGVDTVTNSNLKPIEEANKNEVQSVLLRENGASNSIQKCASETGTLLHKFSGKDKAASPSHEKVETVSSEKEADVFHQITKEESEIPMSEKAVELSRVSVPMPDVHGEVNCTIAPDKDIHLGEPTSESGYYREKNLVMCDCGTQFNFEDRSFESNTQVTLCQKCKYSSHHNASNGGGIQVNTLEDGTAQASPVSIIPCEDENFRGDAISLPNSGKPSTLQRPERIAKKRKLGNMVYEGDVKWENEQGFLDCQSDKSFKGSDKCGFVPSISKEIEIGRAAAVTAGLKAQSVSPIEKIILKEVLKRKGSNQEYLVCRNSILGLWSKNVSRILPVTECGVTGGPSESELPSASLIREVYKFLDQRGYINAGISSVNGKAASSTNQDYDLLQGRQLEESSMASVADSEEGVAFILGQVKAVESTSEGKKCALQNDERDLVGCATSEMLESISKKCEASIIDDNKRSVSMNALQDSTASNVEKHPETFSVAKPALSSTLSSAHSNQMRGRDCVPCEVIDEKKVIVIGAGPAGLTAARHLQRQGFSVTVLEARSRVGGRVFTDRSSLSVPVDLGASIITGIEADVPSERMPDPSVLVCNQLGLELSVLHGFCPLYDTVTGKKVPAELDDALQAEFNSLIDDVDLLVEEIGKERANKMSLEDGLEYGLQRLRMPHDKVNIDKFGLLNSSSKTGIRGPFMQDESWKDDFLNPLERRVMNWHFAHTEYGCAAVLKEVSLPHWNQDEFYGGFGGPHAMIKGGYSRVVESLAEGLDIHLNKIVSDVSYVSDVSAMDNSKHKVRVSTSNGCEYLGDAVLVTVPLGCLKAETIKFSPPLPDWKYASIKQLGFGVLNKVVLEFPTVFWDDSVDYFGATAEETDLRGECFMFWNVKKTVGAPVLIALVVGKAAFEYTNKSKSEHVNHAMMVLRKLFGGDLVPDPVASVVTDWGTEPYSYGAYSYVAIGASGEDYDVLGRPVQNCLFFAGEATCKEHPDTVGGAMMTGVREAVRIIDILRSGNDYTAEIETLEKAQRKSVPVRDEVRDLIKRLEVVELSNVLARQSLLRNMFFSAKTTVGRLHLAKELLNLPGETLKSFAGTKEGLAVLNSWILDSMGKNGTQLLRHCVHILVRVTSDLFALRLSGIGKTVKEKMKSLRTTSYLCQRKRRLCLLKLRRLVQQQKQLQRQAFSEAYHNTSLQLPKIPSFHKFARREQYAKMDESDFRKKFPGNVLGRQDCMSEIDSRNCKVRDWYDFPASCLDLDSARIPVDNYSQPSHSNELVSHSKFRECSGESVAADTSFLTGAWVDTGGSSDGFKDSQAIDRWQSQAAAADPEFFNRTLHIKDEEDSIACSTGPPSWKHDQRANECSVSQGVVDFVASLLMAPYRAKKIDRDVYKSIMKKTATKVMQHTTDVEKAMAVTQFLDSKRKNKIRDFVDKQVDKYMVIPQVSEFIS

SEQ ID NO: 88239 - DNA, 678 bp, Arabidopsis thaliana
  misc_feature (1)..(678): Ceres Seq. ID no. 12706590
  misc_feature (1)..(678): Ortholog of  Ceres SEQ ID NO 15169809 as cited in SEQ ID NO 52839
atgatgcaatgtttagatggattaaagcacttagccttaattctgttgacttgttgtgatgctgatcctcccaaggttcgtcagaaccctaaggatgtggctagaggcactgtgtttacagtgaatgagattgaagctctttacgaactgttcaagagcattagcaaaaacgggcttatcgacaaggaacaatttcaattggtactattcaaaatgaacacaacgagaagcctttttgctgatagggtgtttgacttgtttgataccaagaatactgggattctagattttgaagcctttgctcgttcactttcggtctttcaccctaatgctaaatttgaggataagattgagttctctttcaagctgtatgatctgaatcagcaaggttatataaagagacaggaggtgaagcaaatggttgtgcggactctagctgaatctggcatgaacctttctgatcatgtgattgagagcatcatagacaagacatttgaagaagctgatactaaactggacgggaagattgataaggaagagtggaggagtcttgtgttgcgccacccctctctgttacagaacatgagccttcaacatctcaaagacgtaacaaagacgtttccaaattttgtatttcacactatagtgacagacactcctagtgagctggatggatga

SEQ ID NO: 88240 - protein, 225 aa, Arabidopsis thaliana; identical to SEQ ID NO: 81789
  peptide (1)..(225): Ceres Seq. ID no. 12706591

SEQ ID NO: 88241 - protein, 224 aa, Arabidopsis thaliana; identical to SEQ ID NO: 81790
  peptide (1)..(224): Ceres Seq. ID no. 12706592

SEQ ID NO: 88242 - protein, 154 aa, Arabidopsis thaliana
  peptide (1)..(154): Ceres Seq. ID no. 12706593
MNTTRSLFADRVFDLFDTKNTGILDFEAFARSLSVFHPNAKFEDKIEFSFKLYDLNQQGYIKRQEVKQMVVRTLAESGMNLSDHVIESIIDKTFEEADTKLDGKIDKEEWRSLVLRHPSLLQNMSLQHLKDVTKTFPNFVFHTIVTDTPSELDG

SEQ ID NO: 88243 - DNA, 774 bp, Arabidopsis thaliana
  misc_feature (1)..(774): Ceres Seq. ID no. 12706630
  misc_feature (1)..(774): Ortholog of  Ceres SEQ ID NO 13581740 as cited in SEQ ID NO 58200
atgggaggtcacggtggtttgaatattcttccacagaagaggtggaacgtttacaacttcgacaatcgagaaaaagtccgaaaggcggaagaagctgccgctagagaagagcagatcaaacgcgaggaagctagaaaacgagatgctgaatctcgtctcgaagtgcttcgtaacgtccgtggcttggcgcctctcaaacgagcgtctccggaggcagagaagggtaaggatgaagcggtggtggcggcggctgttgttaaatcgactgctgttgttgtggagagtgttgaatcggaggagcctaagacggagaaggaagaagatgaggaaagaagcggctgcaacggcgagagctctgcgaaagatgctgctgcgagagctggtgatcctgatgaggagaagtatagattgggatatggagttgctggtaaaggtgtgaagcgtccttggtaccttgagaaacgtaacgatgaaaatgatagtgttcgaggtgaggatgatgatggtggatgtggtggttatgaagctaagaagaagaagatgagtgggaagaagagcttaaaggagttgagggaagaaaggttgaagagggagagggttgagaaggaaagagagagagcccttttcatgaaacagagccagagagccggtggtttttcccggagtgctgatagaaccatgtacataggttggagtttgatagatatttggccatttggggatctaggaatcaatagtttatcagatagaaaaagaggaaatgatgtgaagtga

SEQ ID NO: 88244 - protein, 257 aa, Arabidopsis thaliana
  peptide (1)..(257): Ceres Seq. ID no. 12706631
MGGHGGLNILPQKRWNVYNFDNREKVRKAEEAAAREEQIKREEARKRDAESRLEVLRNVRGLAPLKRASPEAEKGKDEAVVAAAVVKSTAVVVESVESEEPKTEKEEDEERSGCNGESSAKDAAARAGDPDEEKYRLGYGVAGKGVKRPWYLEKRNDENDSVRGEDDDGGCGGYEAKKKKMSGKKSLKELREERLKRERVEKERERALFMKQSQRAGGFSRSADRTMYIGWSLIDIWPFGDLGINSLSDRKRGNDVK

SEQ ID NO: 88245 - DNA, 665 bp, Arabidopsis thaliana
  misc_feature (1)..(665): Ceres Seq. ID no. 12706632
  misc_feature (1)..(665): Ortholog of  Ceres SEQ ID NO 13600689 as cited in SEQ ID NO 0
  misc_feature (1)..(665): Ortholog of  Ceres SEQ ID NO 15178120 as cited in SEQ ID NO 0
atttgctttttctttcatattttttcgttaattgttgttgttatcttcaacgatagcgttgtgctctggagaagtgtttgatcgcagaaaagcttcgttctttgtagtctacaggcgtggaaggaatggcaaaaagctcgttcaagcaagagcatgacttagagaagagaagggcagaggctgctaggattagagagaagtatcctgataggattccggtgattgttgagaaggctgagaagagtgatataccaaccatcgacaagaaaaagtacctagtcccggctgatctgactgtggggcagtttgtgtatgtcattcgcaaaagaatcaaattgagtgcagaaaaggctatcttcatattcgtggacaatgttcttcctccagcaggtgcgctcatgtcttctgtgtacgaagagaaaaaggatgatgatgggttcctctatgtcacttacagcggagaaaacacatttggatttggatctccataatagagacctcttgctggatatttcattttactcctctctattttcaccaaatatttcatcttcttattaattactaagcaagcaagccacctatgtacttattctctaaggacctttggtcgggcgttaatatgtacagaaaacataaaataatgtatataatcttctttcaag

SEQ ID NO: 88246 - protein, 121 aa, Arabidopsis thaliana
  peptide (1)..(121): Ceres Seq. ID no. 12706633
MAKSSFKQEHDLEKRRAEAARIREKYPDRIPVIVEKAEKSDIPTIDKKKYLVPADLTVGQFVYVIRKRIKLSAEKAIFIFVDNVLPPAGALMSSVYEEKKDDDGFLYVTYSGENTFGFGSP

SEQ ID NO: 88247 - protein, 62 aa, Arabidopsis thaliana
  peptide (1)..(62): Ceres Seq. ID no. 12706634
MFFLQQVRSCLLCTKRKRMMMGSSMSLTAEKTHLDLDLHNRDLLLDISFYSSLFSPNISSSY

SEQ ID NO: 88248 - DNA, 828 bp, Arabidopsis thaliana
  misc_feature (1)..(828): Ceres Seq. ID no. 12706635
  misc_feature (1)..(828): Ortholog of  Ceres SEQ ID NO 13581740 as cited in SEQ ID NO 58200
atgggaggtcacggtggtttgaatattcttccacagaagaggtggaacgtttacaacttcgacaatcgagaaaaagtccgaaaggcggaagaagctgccgctagagaagagcagatcaaacgcgaggaagctagaaaacgagatgctgaatctcgtctcgaagtgcttcgtaacgtccgtggcttggcgcctctcaaacgagcgtctccggaggcagagaagggtaaggatgaagcggtggtggcggcggctgttgttaaatcgactgctgttgttgtggagagtgttgaatcggaggagcctaagacgggtcatattaatctgttcgaagggattaggatttttgatccgattgagatcaagaagaatgataaatcagagaaggaagaagatgaggaaagaagcggctgcaacggcgagagctctgcgaaagatgctgctgcgagagctggtgatcctgatgaggagaagtatagattgggatatggagttgctggtaaaggtgtgaagcgtccttggtaccttgagaaacgtaacgatgaaaatgatagtgttcgaggtgaggatgatgatggtggatgtggtggttatgaagctaagaagaagaagatgagtgggaagaagagcttaaaggagttgagggaagaaaggttgaagagggagagggttgagaaggaaagagagagagcccttttcatgaaacagagccagagagccggtggtttttcccggagtgctgatagaaccatgtacataggttggagtttgatagatatttggccatttggggatctaggaatcaatagtttatcaggtcctatcctttag

SEQ ID NO: 88249 - protein, 275 aa, Arabidopsis thaliana
  peptide (1)..(275): Ceres Seq. ID no. 12706636
MGGHGGLNILPQKRWNVYNFDNREKVRKAEEAAAREEQIKREEARKRDAESRLEVLRNVRGLAPLKRASPEAEKGKDEAVVAAAVVKSTAVVVESVESEEPKTGHINLFEGIRIFDPIEIKKNDKSEKEEDEERSGCNGESSAKDAAARAGDPDEEKYRLGYGVAGKGVKRPWYLEKRNDENDSVRGEDDDGGCGGYEAKKKKMSGKKSLKELREERLKRERVEKERERALFMKQSQRAGGFSRSADRTMYIGWSLIDIWPFGDLGINSLSGPIL

SEQ ID NO: 88250 - DNA, 1563 bp, Arabidopsis thaliana
  misc_feature (1)..(1563): Ceres Seq. ID no. 12706649
  misc_feature (1)..(1563): Ortholog of  Ceres SEQ ID NO 13595521 as cited in SEQ ID NO 59840
atgtctctatttctgaagcccttcctcttcctatacgacaccactcttagtcttctcttacttctgttcaatggatggagtcttgaggatacagcagcagcccaaaagaggcgtgaagcagacaaaaatgctgcagaaactgaatggatccaactccaatacttgtggaccaaaacaaggagtgttgtactacttcccgttttcaagggtttggtggttatgtgtttggttctatccattatagtgttcttcgagagtttttacatgaactttgtgatactcttcgtcaagttatttaaacgtaaaccccataaagtgtacaaatgggaggccatgcaagaagatgttgaggttggacccgataactacccaatggttcttatccaaataccaatgtacaatgaaaaagaggaaggtgtggacgtagagattgcaaaatggcaaagccaaggcataaacataaggtgtgaaaggagagataacaggaacggctacaaagccggagctatgaaagaagctcttacgcagagctacgtcaagcaatgcgacttcgtagcagtcttcgatgctgatttccaacccgagcccgattatctcatccgcgctgtccctttccttgtccacaaccctgacgttgctctagttcaagcccgatggatatttgttaacgcgaacaaatgcttgatgacgaggatgcaagagatgtctctcaactatcatttcaaagtggaacaagaatcagggtcgactagacatgctttcttcgggtttaatggaaccgcgggtgtatggagaatatcggcaatggaagcagcaggaggatggaaatcaaggaccacagtagaggacatggacttggctgttcgtgttggtcttcatggctggaaatttgtctaccttaacgacctcacggtgagaaacgagcttccaagcaaatttaaggcctacagattccagcaacataggtggtcctgtggaccggcgaatctatttagaaaaatgacgatggagatcattttcaataagagagtatcaatttggaagaagttttatgtgatctacagctttttcttcgtaaggaaagtggcggtacacttcttgacattcttcttctactgtataattgtgccaacaagtgtcttcttccctgaaatccacatcccatcttggtctaccatttacgttccctctttgatcagtatcttccacaccctggcaactccaagatccttctacctcgtgatattttgggtcttgttcgagaatgtaatggctatgcatcgaaccaaaggtacgtgcattggcctacttgaaggaggaagagtaaacgaatgggttgtgaccgaaaaactaggagatgctttgaagagtaagctactctctcgggtagtccaaagaaaatcttgttatcaaagagtgaattccaaggaagtgatggtgggggtatacatattaggatgtgcactctatggcctgatctatgggcacacatggttacatttctatctttttcttcaggccacagcctttttcgtctccggttttggttttgtcggaacctaa

SEQ ID NO: 88251 - protein, 520 aa, Arabidopsis thaliana
  peptide (1)..(520): Ceres Seq. ID no. 12706650
MSLFLKPFLFLYDTTLSLLLLLFNGWSLEDTAAAQKRREADKNAAETEWIQLQYLWTKTRSVVLLPVFKGLVVMCLVLSIIVFFESFYMNFVILFVKLFKRKPHKVYKWEAMQEDVEVGPDNYPMVLIQIPMYNEKEEGVDVEIAKWQSQGINIRCERRDNRNGYKAGAMKEALTQSYVKQCDFVAVFDADFQPEPDYLIRAVPFLVHNPDVALVQARWIFVNANKCLMTRMQEMSLNYHFKVEQESGSTRHAFFGFNGTAGVWRISAMEAAGGWKSRTTVEDMDLAVRVGLHGWKFVYLNDLTVRNELPSKFKAYRFQQHRWSCGPANLFRKMTMEIIFNKRVSIWKKFYVIYSFFFVRKVAVHFLTFFFYCIIVPTSVFFPEIHIPSWSTIYVPSLISIFHTLATPRSFYLVIFWVLFENVMAMHRTKGTCIGLLEGGRVNEWVVTEKLGDALKSKLLSRVVQRKSCYQRVNSKEVMVGVYILGCALYGLIYGHTWLHFYLFLQATAFFVSGFGFVGT

SEQ ID NO: 88252 - protein, 447 aa, Arabidopsis thaliana
  peptide (1)..(447): Ceres Seq. ID no. 12706651
MCLVLSIIVFFESFYMNFVILFVKLFKRKPHKVYKWEAMQEDVEVGPDNYPMVLIQIPMYNEKEEGVDVEIAKWQSQGINIRCERRDNRNGYKAGAMKEALTQSYVKQCDFVAVFDADFQPEPDYLIRAVPFLVHNPDVALVQARWIFVNANKCLMTRMQEMSLNYHFKVEQESGSTRHAFFGFNGTAGVWRISAMEAAGGWKSRTTVEDMDLAVRVGLHGWKFVYLNDLTVRNELPSKFKAYRFQQHRWSCGPANLFRKMTMEIIFNKRVSIWKKFYVIYSFFFVRKVAVHFLTFFFYCIIVPTSVFFPEIHIPSWSTIYVPSLISIFHTLATPRSFYLVIFWVLFENVMAMHRTKGTCIGLLEGGRVNEWVVTEKLGDALKSKLLSRVVQRKSCYQRVNSKEVMVGVYILGCALYGLIYGHTWLHFYLFLQATAFFVSGFGFVGT

SEQ ID NO: 88253 - protein, 432 aa, Arabidopsis thaliana
  peptide (1)..(432): Ceres Seq. ID no. 12706652
MNFVILFVKLFKRKPHKVYKWEAMQEDVEVGPDNYPMVLIQIPMYNEKEEGVDVEIAKWQSQGINIRCERRDNRNGYKAGAMKEALTQSYVKQCDFVAVFDADFQPEPDYLIRAVPFLVHNPDVALVQARWIFVNANKCLMTRMQEMSLNYHFKVEQESGSTRHAFFGFNGTAGVWRISAMEAAGGWKSRTTVEDMDLAVRVGLHGWKFVYLNDLTVRNELPSKFKAYRFQQHRWSCGPANLFRKMTMEIIFNKRVSIWKKFYVIYSFFFVRKVAVHFLTFFFYCIIVPTSVFFPEIHIPSWSTIYVPSLISIFHTLATPRSFYLVIFWVLFENVMAMHRTKGTCIGLLEGGRVNEWVVTEKLGDALKSKLLSRVVQRKSCYQRVNSKEVMVGVYILGCALYGLIYGHTWLHFYLFLQATAFFVSGFGFVGT

SEQ ID NO: 88254 - DNA, 1719 bp, Arabidopsis thaliana
  misc_feature (1)..(1719): Ceres Seq. ID no. 12706702
  misc_feature (1)..(1719): Ortholog of  Ceres SEQ ID NO 12586556 as cited in SEQ ID NO 64667
  misc_feature (1)..(1719): Ortholog of  Ceres SEQ ID NO 13660894 as cited in SEQ ID NO 67475
atgcccatcagtaaccctaggaaacggccaatctgtgtcgcccaatcgtttctcagcaaacacgcaacgaaagcagagctctctcaggccgtatctcgtctcgagtccttgactcaacaagggattcgattaccctttgacctcctagcatctctgctccagcagtgtggagatacaaagtctttgaaacaaggcaaatggattcatcgtcacttgaagattactggattcaagagacccaacacgcttttgtccaatcatttaatcggaatgtacatgaaatgcggtaaacctattgatgcttggatgttggtgcgtgcacgcgtagtgttcgatagtatgcctgagagagatgttgtttcttggaacacgatggttattgggtatgctcaggatgggaatctacacgaggcgttgtggttttataaagagtttaggagatctggaatcaagttcaacgagttcagcttcgctgggcttttgacggcatgtgtgaaatctaggcagctccagctcaatcggcaagctcacgggcaggttttggttgctgggtttttgtcaaatgtggtactttcgtgttctatcatcgatgcttatgcgaaatgtggtcagatggagagtgctaaaagatgttttgatgagatgacagtgaaggatattcatatttggactactctgatctctgggtatgccaaactgggagatatggaagctgctgaaaagttattctgtgagatgcctgagaaaaatccagtctcttggactgcattaattgctggatatgttagacaaggctcagggaatcgagcgcttgacttgtttagaaaaatgattgctttgggggttaaaccagagcaatttacttttagtagctgtctatgtgcctctgcgagcattgcttctcttagacatgggaaggaaattcatggctatatgatccgtaccaatgttagaccgaacgcgattgtcatcagttctttgatagatatgtactccaaatcaggtagtttagaagctagcgagcgggtgttcagaatttgcgatgacaagcacgactgcgttttttggaacacgatgatttctgcattggcacagcacgggcttggacacaaggccttgcgaatgcttgatgacatgatcaaattcagggtccagccaaaccggacgactctggttgtgattcttaatgcctgcagccattcaggtctggtagaggaaggattgaggtggtttgagtcaatgactgttcagcacgggattgttcccgaccaagagcattacgcatgtctgatagatctcctaggtcgcgccggttgtttcaaagaactgatgaggaagattgaggaaatgccttttgaacccgacaagcatatctggaacgcaatcctaggagtatgcagaatccatggaaacgaagaactgggaaagaaagcagcggacgagctgatcaaactggaccctgagtcgtctgcaccatacatattgctgtcaagcatttacgcagatcatgggaagtgggaattagtagagaagctgagaggggttatgaagaagagaagagtgaataaagaaaaagctgtgagttggattgaaatcgagaaaaaagtcgaagctttcactgtctcagatgggtcacatgctcatgctcggaaagaagagatatacttcattctgcataatctggctgcagttattgaagaagaagcttcaagaacatga

SEQ ID NO: 88255 - protein, 572 aa, Arabidopsis thaliana
  peptide (1)..(572): Ceres Seq. ID no. 12706703
MPISNPRKRPICVAQSFLSKHATKAELSQAVSRLESLTQQGIRLPFDLLASLLQQCGDTKSLKQGKWIHRHLKITGFKRPNTLLSNHLIGMYMKCGKPIDAWMLVRARVVFDSMPERDVVSWNTMVIGYAQDGNLHEALWFYKEFRRSGIKFNEFSFAGLLTACVKSRQLQLNRQAHGQVLVAGFLSNVVLSCSIIDAYAKCGQMESAKRCFDEMTVKDIHIWTTLISGYAKLGDMEAAEKLFCEMPEKNPVSWTALIAGYVRQGSGNRALDLFRKMIALGVKPEQFTFSSCLCASASIASLRHGKEIHGYMIRTNVRPNAIVISSLIDMYSKSGSLEASERVFRICDDKHDCVFWNTMISALAQHGLGHKALRMLDDMIKFRVQPNRTTLVVILNACSHSGLVEEGLRWFESMTVQHGIVPDQEHYACLIDLLGRAGCFKELMRKIEEMPFEPDKHIWNAILGVCRIHGNEELGKKAADELIKLDPESSAPYILLSSIYADHGKWELVEKLRGVMKKRRVNKEKAVSWIEIEKKVEAFTVSDGSHAHARKEEIYFILHNLAAVIEEEASRT

SEQ ID NO: 88256 - protein, 482 aa, Arabidopsis thaliana
  peptide (1)..(482): Ceres Seq. ID no. 12706704
MYMKCGKPIDAWMLVRARVVFDSMPERDVVSWNTMVIGYAQDGNLHEALWFYKEFRRSGIKFNEFSFAGLLTACVKSRQLQLNRQAHGQVLVAGFLSNVVLSCSIIDAYAKCGQMESAKRCFDEMTVKDIHIWTTLISGYAKLGDMEAAEKLFCEMPEKNPVSWTALIAGYVRQGSGNRALDLFRKMIALGVKPEQFTFSSCLCASASIASLRHGKEIHGYMIRTNVRPNAIVISSLIDMYSKSGSLEASERVFRICDDKHDCVFWNTMISALAQHGLGHKALRMLDDMIKFRVQPNRTTLVVILNACSHSGLVEEGLRWFESMTVQHGIVPDQEHYACLIDLLGRAGCFKELMRKIEEMPFEPDKHIWNAILGVCRIHGNEELGKKAADELIKLDPESSAPYILLSSIYADHGKWELVEKLRGVMKKRRVNKEKAVSWIEIEKKVEAFTVSDGSHAHARKEEIYFILHNLAAVIEEEASRT

SEQ ID NO: 88257 - protein, 480 aa, Arabidopsis thaliana
  peptide (1)..(480): Ceres Seq. ID no. 12706705
MKCGKPIDAWMLVRARVVFDSMPERDVVSWNTMVIGYAQDGNLHEALWFYKEFRRSGIKFNEFSFAGLLTACVKSRQLQLNRQAHGQVLVAGFLSNVVLSCSIIDAYAKCGQMESAKRCFDEMTVKDIHIWTTLISGYAKLGDMEAAEKLFCEMPEKNPVSWTALIAGYVRQGSGNRALDLFRKMIALGVKPEQFTFSSCLCASASIASLRHGKEIHGYMIRTNVRPNAIVISSLIDMYSKSGSLEASERVFRICDDKHDCVFWNTMISALAQHGLGHKALRMLDDMIKFRVQPNRTTLVVILNACSHSGLVEEGLRWFESMTVQHGIVPDQEHYACLIDLLGRAGCFKELMRKIEEMPFEPDKHIWNAILGVCRIHGNEELGKKAADELIKLDPESSAPYILLSSIYADHGKWELVEKLRGVMKKRRVNKEKAVSWIEIEKKVEAFTVSDGSHAHARKEEIYFILHNLAAVIEEEASRT

SEQ ID NO: 88258 - DNA, 642 bp, Arabidopsis thaliana
  misc_feature (1)..(642): Ceres Seq. ID no. 12706909
  misc_feature (1)..(642): Ortholog of  Ceres SEQ ID NO 13638893 as cited in SEQ ID NO 55835
  misc_feature (1)..(642): Ortholog of  Ceres SEQ ID NO 13661656 as cited in SEQ ID NO 61607
  misc_feature (1)..(642): Ortholog of  Ceres SEQ ID NO 14309331 as cited in SEQ ID NO 0
atcattcacaatggcatatgcaactattctcatgatcttctcggtggtggcactaatgtccggcgagagagctcatgcagcagtggactgctcatcgttgatactaaacatggctgattgtttgtcgtttgtgactagtggtagtacagttgtcaagccggaaggaacatgttgttcagggcttaagactgtggttaggacaggaccagaatgtctatgtgaggctttcaagaacagtggttctcttggtttaactcttgatctttctaaagctgcttctcttccttctgtttgtaaagttgctgctcctccttctgctcgttgtggcctttctgtctctggagatcctcctgctactgcccctggtttatctcctacggccggagcaggagcacccgcgttgtccagtggtgcaaatgcggcaactccagtttcgtccccgaggagttccgatgcgtccttgctctctgtatcttttgcatttgtcatcttcatggcactcatttcttctttctattgagtcttaaaatttaattgcttcttgttgagttatttttgtttgctatgtagctgaagagtttggtgttactgatcatatttacctttcatgtgtcaattttaatgagaaatctccttttagtt

SEQ ID NO: 88259 - protein, 172 aa, Arabidopsis thaliana; identical to SEQ ID NO: 35649
  peptide (1)..(172): Ceres Seq. ID no. 12706910

SEQ ID NO: 88260 - protein, 169 aa, Arabidopsis thaliana; identical to SEQ ID NO: 35650
  peptide (1)..(169): Ceres Seq. ID no. 12706911

SEQ ID NO: 88261 - protein, 162 aa, Arabidopsis thaliana; identical to SEQ ID NO: 35651
  peptide (1)..(162): Ceres Seq. ID no. 12706912

SEQ ID NO: 88262 - DNA, 1164 bp, Arabidopsis thaliana
  misc_feature (1)..(1164): Ceres Seq. ID no. 12706963
  misc_feature (1)..(1164): Ortholog of  Ceres SEQ ID NO 13658153 as cited in SEQ ID NO 66326
atgggtagattagattgtaatcatccttttgttgatatactaaagcttctaatactaagggactctttggtggacgctcttaaaatgaaaggaggaacaggagaccatagttatgctactaattcacattatcagagaagtgttttctatgagatacaacctttggtcatagagaacgtaagagaaatgctactgaaaaatgggtttcctggttgcatcaaagtggcagacttgggttgttctactggacaaaacacggtgttggccatgtccgcaatcgcctacacgatcatggagtcataccaacaaatgagtaaaaacccaccagaaatcgattgttatttgaacgaccttccagagaacgatttcaataccaccttcaagttgtttcattctttccaagagaagctgaaaccggaggttaaaggaaagtggtttgtctcgggagtcccgggttctttttactcaaggctattcccaagaaagtctctccattttgttcattcagcttttagtatccattggctttctagaattccagatggccttgagagcaacactaaaagcattcatattaaatatccatacccttcaaatgtctacaagagttatttaaatcagttcaagatagatttttcgttgttcttaaaaatgcgttcagaagaagtagtgcataatggacatatggttctaacgttcgtgggaagaaaggtttccgacactttatccaaagattgtttccaagtttggtcgttgttatccgattgcctcctcgatctagcctccgaggggtttgtgaacgattcaatggtaaaatcatttaacatgccattctacaatccaaacgaagaagaggtaagagaatttatcttaaaggaaggttccttcgagatcaccaagatcgagaaattcgaccatgttgtcccatacaaaattgaccgtgaggaagaagatgaggagcaatcacttcagttggaagctggtataaagcatgcaagctgggcaagatgcatcaccgaaccattgctcgttgctcatttcggagatgcaattatagaaccggtgttcaacaagtatgcacactatatggccaagtatctaagtgtctcaaaccatcgccgtaatatgacactcgtcatcgtagtttcgttgactaggaaataa

SEQ ID NO: 88263 - protein, 387 aa, Arabidopsis thaliana
  peptide (1)..(387): Ceres Seq. ID no. 12706964
MGRLDCNHPFVDILKLLILRDSLVDALKMKGGTGDHSYATNSHYQRSVFYEIQPLVIENVREMLLKNGFPGCIKVADLGCSTGQNTVLAMSAIAYTIMESYQQMSKNPPEIDCYLNDLPENDFNTTFKLFHSFQEKLKPEVKGKWFVSGVPGSFYSRLFPRKSLHFVHSAFSIHWLSRIPDGLESNTKSIHIKYPYPSNVYKSYLNQFKIDFSLFLKMRSEEVVHNGHMVLTFVGRKVSDTLSKDCFQVWSLLSDCLLDLASEGFVNDSMVKSFNMPFYNPNEEEVREFILKEGSFEITKIEKFDHVVPYKIDREEEDEEQSLQLEAGIKHASWARCITEPLLVAHFGDAIIEPVFNKYAHYMAKYLSVSNHRRNMTLVIVVSLTRK

SEQ ID NO: 88264 - protein, 359 aa, Arabidopsis thaliana
  peptide (1)..(359): Ceres Seq. ID no. 12706965
MKGGTGDHSYATNSHYQRSVFYEIQPLVIENVREMLLKNGFPGCIKVADLGCSTGQNTVLAMSAIAYTIMESYQQMSKNPPEIDCYLNDLPENDFNTTFKLFHSFQEKLKPEVKGKWFVSGVPGSFYSRLFPRKSLHFVHSAFSIHWLSRIPDGLESNTKSIHIKYPYPSNVYKSYLNQFKIDFSLFLKMRSEEVVHNGHMVLTFVGRKVSDTLSKDCFQVWSLLSDCLLDLASEGFVNDSMVKSFNMPFYNPNEEEVREFILKEGSFEITKIEKFDHVVPYKIDREEEDEEQSLQLEAGIKHASWARCITEPLLVAHFGDAIIEPVFNKYAHYMAKYLSVSNHRRNMTLVIVVSLTRK

SEQ ID NO: 88265 - protein, 325 aa, Arabidopsis thaliana
  peptide (1)..(325): Ceres Seq. ID no. 12706966
MLLKNGFPGCIKVADLGCSTGQNTVLAMSAIAYTIMESYQQMSKNPPEIDCYLNDLPENDFNTTFKLFHSFQEKLKPEVKGKWFVSGVPGSFYSRLFPRKSLHFVHSAFSIHWLSRIPDGLESNTKSIHIKYPYPSNVYKSYLNQFKIDFSLFLKMRSEEVVHNGHMVLTFVGRKVSDTLSKDCFQVWSLLSDCLLDLASEGFVNDSMVKSFNMPFYNPNEEEVREFILKEGSFEITKIEKFDHVVPYKIDREEEDEEQSLQLEAGIKHASWARCITEPLLVAHFGDAIIEPVFNKYAHYMAKYLSVSNHRRNMTLVIVVSLTRK

SEQ ID NO: 88266 - DNA, 1620 bp, Arabidopsis thaliana
  misc_feature (1)..(1620): Ceres Seq. ID no. 12707022
  misc_feature (1)..(1620): Ortholog of  Ceres SEQ ID NO 13646415 as cited in SEQ ID NO 20579
atggactcatcagagatcgaagtagtgcctctagattccaactctcaccaaagccctaccgaatcaccaaccatcaccgacgtcttctccgcctccgcttacggcgatctccaccaacttaaacatttcgtcgaacataatggctcttccgtctcacttcccgacgataatggcttctacgctcttcaatgggcggcactcaacaattccctccacgttgctcaatatatcatccagcatggtggtgatgttaattcagctgataatatacaacagacaccattgcattgggcagctgttaaaggctccattgatgttgctgaccttttacttcaacatggagctcgtattgaagctgttgatgtcaatggcttcagggcagttcatgttgcttctcaatatggacaaacagcattcgtgaatcatattattgtggactatgcagctgactataacgcactagatattgaagggaggagtccgctacactgggctgcttacaatggattcacagaaacagtccggttacttctctttcgggacgcatgctgcacgcctttgcactgggctgtgattaaggaaaacgttgaggcttgtacgctgctagttcatgctggaaccaaggaggaactgatattgaaagataacactggatccacgccacttaagcttgcttctgataaaggtcacaggcagctcgctcttttcctttcgaaggcaatgcgaactcgtaagaatagttttgtggacaagatcttctgtggaaaactgggagagactagctatgctcctatgttgttcagcttaatagtcattcttatggtcctcttcatcacatccattgtttcagcttctaatctcccaaagataactgctatggttggtctgtgggcatgtttcggtctttcatgtggtgtttacgcactgataactttctatcgtgttagcaggaaagatcccgggtacgttaaaagaaccggtgaagctaacagccaacacactgccaacacaccgactttagatcaattgaacagtcgtaaggaccctttgattgatatcaatttcaaaaacccctcatggaaaggaaactggtcccaactctgccccacttgcaagataattagaccggtgcgatctaagcactgccccacttgtaagcgctgcgttgaacagtttgaccatcactgcccctggatttccaactgtgttggtaagaagaataaacgctacttcttagtctttgtgatcatgggagctttaacatcattcgttggtggcacaactgctgttcaaagattatggagaggtatcccacaggtacaccacggagaatcatggattaaacatatagtcattgaacaccctgatgctgccgtgtttctgtttttcgacttactcattttcattgcgactatgacattgacaatctcacagtcttatatgatagctcggaatattacaaccaacgaattatggaacgcgaagagattcagttatttgcggggacctgacggaagattctacaacccttataaccacggcttgcgaagaaactgcaccgattttttggttcatggctacaccagggacgacgaggttgtcccgtcttcaattctctga

SEQ ID NO: 88267 - protein, 539 aa, Arabidopsis thaliana
  peptide (1)..(539): Ceres Seq. ID no. 12707023
MDSSEIEVVPLDSNSHQSPTESPTITDVFSASAYGDLHQLKHFVEHNGSSVSLPDDNGFYALQWAALNNSLHVAQYIIQHGGDVNSADNIQQTPLHWAAVKGSIDVADLLLQHGARIEAVDVNGFRAVHVASQYGQTAFVNHIIVDYAADYNALDIEGRSPLHWAAYNGFTETVRLLLFRDACCTPLHWAVIKENVEACTLLVHAGTKEELILKDNTGSTPLKLASDKGHRQLALFLSKAMRTRKNSFVDKIFCGKLGETSYAPMLFSLIVILMVLFITSIVSASNLPKITAMVGLWACFGLSCGVYALITFYRVSRKDPGYVKRTGEANSQHTANTPTLDQLNSRKDPLIDINFKNPSWKGNWSQLCPTCKIIRPVRSKHCPTCKRCVEQFDHHCPWISNCVGKKNKRYFLVFVIMGALTSFVGGTTAVQRLWRGIPQVHHGESWIKHIVIEHPDAAVFLFFDLLIFIATMTLTISQSYMIARNITTNELWNAKRFSYLRGPDGRFYNPYNHGLRRNCTDFLVHGYTRDDEVVPSSIL

SEQ ID NO: 88268 - protein, 299 aa, Arabidopsis thaliana
  peptide (1)..(299): Ceres Seq. ID no. 12707024
MRTRKNSFVDKIFCGKLGETSYAPMLFSLIVILMVLFITSIVSASNLPKITAMVGLWACFGLSCGVYALITFYRVSRKDPGYVKRTGEANSQHTANTPTLDQLNSRKDPLIDINFKNPSWKGNWSQLCPTCKIIRPVRSKHCPTCKRCVEQFDHHCPWISNCVGKKNKRYFLVFVIMGALTSFVGGTTAVQRLWRGIPQVHHGESWIKHIVIEHPDAAVFLFFDLLIFIATMTLTISQSYMIARNITTNELWNAKRFSYLRGPDGRFYNPYNHGLRRNCTDFLVHGYTRDDEVVPSSIL

SEQ ID NO: 88269 - protein, 275 aa, Arabidopsis thaliana
  peptide (1)..(275): Ceres Seq. ID no. 12707025
MLFSLIVILMVLFITSIVSASNLPKITAMVGLWACFGLSCGVYALITFYRVSRKDPGYVKRTGEANSQHTANTPTLDQLNSRKDPLIDINFKNPSWKGNWSQLCPTCKIIRPVRSKHCPTCKRCVEQFDHHCPWISNCVGKKNKRYFLVFVIMGALTSFVGGTTAVQRLWRGIPQVHHGESWIKHIVIEHPDAAVFLFFDLLIFIATMTLTISQSYMIARNITTNELWNAKRFSYLRGPDGRFYNPYNHGLRRNCTDFLVHGYTRDDEVVPSSIL

SEQ ID NO: 88270 - DNA, 738 bp, Arabidopsis thaliana
  misc_feature (1)..(738): Ceres Seq. ID no. 12707068
  misc_feature (1)..(738): Ortholog of  Ceres SEQ ID NO 13594416 as cited in SEQ ID NO 51058
  misc_feature (1)..(738): Ortholog of  Ceres SEQ ID NO 13596609 as cited in SEQ ID NO 63070
  misc_feature (1)..(738): Ortholog of  Ceres SEQ ID NO 14302096 as cited in SEQ ID NO 68356
  misc_feature (1)..(738): Ortholog of  Ceres SEQ ID NO 13598574 as cited in SEQ ID NO 69083
atggcgttagcgaataacttaacggcgatactcaacttactagcgttactctgttccataccaataacggcgtcaggtatatggctagcttcaaagccagacaacgagtgtgtcaatctcctccgttggcccgttgtcgtcctcggcgttctcatcctcgtcgtctccgccacaggcttcatcggcgcctacaagtacaaggaaactctactggcggtttacttgtgctgtatggcgatattgatcggacttttgctggtggttcttatatttgcattcgtcgtgacccggcccgatggatcgtatcgggttccgggtagaggttataaagagtataggcttgaagggttctcgaattggcttaaggagaacgttgtggattccaagaactggggaaggctaagggcttgtttggctgatactaattccggctgctgcaaaccaccaaccgcatgtggctacaactttgtgaacccaacactgtggctaaatccaaccaatatggctgcagacgcagactgttacttatggagcaatgaccaaagccagctttgttacaattgcaactcatgcaaagctggtttattgggaaaccttagaaaagaatggcgtaaagcaaatctcatacttatcatcacagtcgttgttctcatatgggtttatgttattgcttgtagcgcgtttaggaatgctcagactgaggatctcttccgcaaatacaaacaaggttgggtctaa

SEQ ID NO: 88271 - protein, 245 aa, Arabidopsis thaliana
  peptide (1)..(245): Ceres Seq. ID no. 12707069
MALANNLTAILNLLALLCSIPITASGIWLASKPDNECVNLLRWPVVVLGVLILVVSATGFIGAYKYKETLLAVYLCCMAILIGLLLVVLIFAFVVTRPDGSYRVPGRGYKEYRLEGFSNWLKENVVDSKNWGRLRACLADTNSGCCKPPTACGYNFVNPTLWLNPTNMAADADCYLWSNDQSQLCYNCNSCKAGLLGNLRKEWRKANLILIITVVVLIWVYVIACSAFRNAQTEDLFRKYKQGWV

SEQ ID NO: 88272 - protein, 168 aa, Arabidopsis thaliana
  peptide (1)..(168): Ceres Seq. ID no. 12707070
MAILIGLLLVVLIFAFVVTRPDGSYRVPGRGYKEYRLEGFSNWLKENVVDSKNWGRLRACLADTNSGCCKPPTACGYNFVNPTLWLNPTNMAADADCYLWSNDQSQLCYNCNSCKAGLLGNLRKEWRKANLILIITVVVLIWVYVIACSAFRNAQTEDLFRKYKQGWV

SEQ ID NO: 88273 - DNA, 687 bp, Arabidopsis thaliana
  misc_feature (1)..(687): Ceres Seq. ID no. 12707085
  misc_feature (1)..(687): Ortholog of  Ceres SEQ ID NO 12609339 as cited in SEQ ID NO 51780
atggcgaattccggcgaagagaagttgaagctctactcttactggagaagctcgtgtgctcatcgtgtccgtatcgccctcgctttgaaagggcttgattatgagtatataccagtgaatttgctcaagggtgatcaattcgattcagtttatcgttttgatcttcaagatttcaagaagatcaatccaatgggaactgtaccagctctggtggatggagatgttgtgattaatgattcttttgcgataataatgtatctggatgagaagtaccctgagccacctttgttacctcgtgacctccataaacgagctgtgaattaccaggcaatgagtattgtcttgtctggcatacagcctcatcaaaatctggctgttattaggtatatcgaggaaaagataaatgtggaggagaagactgcctgggttaataatgctatcacaaaaggatttacagctctcgagaaactgttggtgaattgcgctgggaaacatgcgactggtgatgaaatttacctggctgatctctttctagcaccacagatccacggagcaatcaacagattccagattaacatggaaccgtacccaactcttgcaaaatgttacgaatcatacaacgaactgcctgcgtttcaaaatgcactaccggaaaagcagccagatgctccttcttccaccatctga

SEQ ID NO: 88274 - protein, 228 aa, Arabidopsis thaliana
  peptide (1)..(228): Ceres Seq. ID no. 12707086
MANSGEEKLKLYSYWRSSCAHRVRIALALKGLDYEYIPVNLLKGDQFDSVYRFDLQDFKKINPMGTVPALVDGDVVINDSFAIIMYLDEKYPEPPLLPRDLHKRAVNYQAMSIVLSGIQPHQNLAVIRYIEEKINVEEKTAWVNNAITKGFTALEKLLVNCAGKHATGDEIYLADLFLAPQIHGAINRFQINMEPYPTLAKCYESYNELPAFQNALPEKQPDAPSSTI

SEQ ID NO: 88275 - protein, 165 aa, Arabidopsis thaliana; identical to SEQ ID NO: 77596
  peptide (1)..(165): Ceres Seq. ID no. 12707087

SEQ ID NO: 88276 - protein, 144 aa, Arabidopsis thaliana
  peptide (1)..(144): Ceres Seq. ID no. 12707088
MYLDEKYPEPPLLPRDLHKRAVNYQAMSIVLSGIQPHQNLAVIRYIEEKINVEEKTAWVNNAITKGFTALEKLLVNCAGKHATGDEIYLADLFLAPQIHGAINRFQINMEPYPTLAKCYESYNELPAFQNALPEKQPDAPSSTI

SEQ ID NO: 88277 - DNA, 957 bp, Arabidopsis thaliana
  misc_feature (1)..(957): Ceres Seq. ID no. 12707089
  misc_feature (1)..(957): Ortholog of  Ceres SEQ ID NO 14308120 as cited in SEQ ID NO 58423
  misc_feature (1)..(957): Ortholog of  Ceres SEQ ID NO 14307004 as cited in SEQ ID NO 59551
  misc_feature (1)..(957): Ortholog of  Ceres SEQ ID NO 13661504 as cited in SEQ ID NO 61294
  misc_feature (1)..(957): Ortholog of  Ceres SEQ ID NO 12617197 as cited in SEQ ID NO 63406
  misc_feature (1)..(957): Ortholog of  Ceres SEQ ID NO 13597804 as cited in SEQ ID NO 64182
  misc_feature (1)..(957): Ortholog of  Ceres SEQ ID NO 13598565 as cited in SEQ ID NO 65250
  misc_feature (1)..(957): Ortholog of  Ceres SEQ ID NO 13598597 as cited in SEQ ID NO 65496
  misc_feature (1)..(957): Ortholog of  Ceres SEQ ID NO 13596284 as cited in SEQ ID NO 68273
  misc_feature (1)..(957): Ortholog of  Ceres SEQ ID NO 15178902 as cited in SEQ ID NO 0
atggcgaaagagacagtgtgtgtaaccggagctaatggtttcatcggatcttggataatccgaacgttaattgagaaaggatatactaaaatccacgcttcgatttacccaggatccgacccgactcatcttctgcaactacccggatccgattctaagatcaagatctttgaagcggatctcttagactctgatgcaatctccagagctattgatggatgtgcgggagtgttccacgtggcgtcaccttgtacgttggatccaccggtagatccagagaaggagctggtcgaaccggcggttaagggaacgatcaatgtgttggaagctgctaagaggtttaatgtgagacgcgtggtgatcacgtcatctatctccgcattggttcctaaccctaattggccggaaaaagttcccgtcgatgagtcgtcgtggtccgatcttgatttttgcaagtcgaggcagaaatggtatccaatttcgaagacattagctgagaaagcagcttgggaattttcggagaagcatggaaccaacattgtgacgattcatccatcaacatgtctcggaccgcttctgcaaccgaacctaaacgcaagctgtgctgttctgctacagcttttacaaggctcgaccgagacgcaagagcatcactggctcggtgtggttcacgtgaaagatgtggctaaaggtcatgtgatgctattcgaaacacctgacgcttctggacggtttttatgcactaatgggatttatcagttcagtgagtttgctgctcttgtgtctaagctcttccctgagtttgctgttcacaagtttgataaagagactcaacctgggcttacgtcgtgtaatgatgcggctaagcgattgattgagctcgggctggtttttactgcggttgaagatgcggttaaggagacggtccagagtcttagagacaaaggcttcctctga

SEQ ID NO: 88278 - protein, 318 aa, Arabidopsis thaliana; identical to SEQ ID NO: 40384
  peptide (1)..(318): Ceres Seq. ID no. 12707090

SEQ ID NO: 88279 - DNA, 1045 bp, Arabidopsis thaliana
  misc_feature (1)..(1045): Ceres Seq. ID no. 12707216
  misc_feature (1)..(1045): Ortholog of  Ceres SEQ ID NO 13596116 as cited in SEQ ID NO 62213
acataaaacaaaaggtacagtatataccataaatctccgagattcttttgatgtatctgtccatttcattattacacaaactaggaaactgatatctctctattcacattcctctgattctatttctctttatatatattcacccattaaccatctcaatcttataaccctcaaaatcacaatcttctcttacaaaaaactttgaaagatgaagattcttctagcatcattgtgtttgatcagtcttctcgtaatcttgccttctgtcttctctgcttcttcttcctctgaagattttgatttcttctacttcgtccaacaatggccaggatcatactgtgacacacagaagaagtgttgttatccaaattcaggcaaaccagctgctgattttggcattcatggtctttggcctaactacaaagatggaacttatccatctaactgtgatgcctctaaaccattcgatagctcaacgatatcagatcttctcacttcaatgaagaagagctggccaacactggcttgcccaagcggttcaggtgaagcgttttgggagcacgaatgggagaagcatggtacttgctctgaatcggttatcgatcaacatgaatatttccaaaccgctcttaaccttaaacagaaaaccaatctccttggagctctaaccaaagccgggattaatccggatggaaaatcttactctttggagagcataagagattcgataaaagagtcaattggtttcactccttgggttgagtgtaacagagatggttctggtaatagccaattgtaccaagtctatctttgtgttgaccggtctggttccggtttaatcgaatgtccggttttcccacatgggaaatgtggagctgagatcgaattcccttctttttagtttccaatttctaaattcagtctcttgaaccggcatcgatcttttgttcatggagattggtttggtcaaaaagaagatttaatgtaataaaaatttatgggatattggataatgatatagttcaatttcaataatattctacgt

SEQ ID NO: 88280 - protein, 230 aa, Arabidopsis thaliana; identical to SEQ ID NO: 36323
  peptide (1)..(230): Ceres Seq. ID no. 12707217

SEQ ID NO: 88281 - protein, 133 aa, Arabidopsis thaliana; identical to SEQ ID NO: 36324
  peptide (1)..(133): Ceres Seq. ID no. 12707218

SEQ ID NO: 88282 - DNA, 802 bp, Arabidopsis thaliana
  misc_feature (1)..(802): Ceres Seq. ID no. 12707271
  misc_feature (1)..(802): Ortholog of  Ceres SEQ ID NO 13598422 as cited in SEQ ID NO 68856
aaagaaaaattgagagtcgccacagctatcactctgctctgtcactttgtcttttactcagagaatcagagacagagagagaaagagagagagagagagcgaggggaagggaaatggagaaggcattaacgaaagtgacgagctttaaagtgggaagttcatggatctctaagaaagctaaagaagagctctcaaacatcaccaatgacctcactacattctccagtacggttgaagagaaagcaaaatggattttcaacaagcttaaaggaaaaccactgaaaagcttaccagacctcctcaaagaatacaacttaccaccaggactcttcccacaaaacataatctgctacgaattcgatgagacgaagaataaactcaccgtcttcttctcttcaccatgtgaagtcacattcaaagatggatcagcgataagatatgcaacgcgtgtgaaagggattttgcttagagggaagctgatgggtgtggaaggaatgaagacaaaagtgttggtgtgggttaaagtcacaacaatctcagtcgagagctccaagtctgacaagctctggttcactgctggtgtcaagaaatctcgatctaaggatgtttatgacacacctcatgatgctatcaaagtcattggagagttctaaggatttttttcacaattggttattatcatatttgattcatgaatttatttggggttatttgcattttgggaagaggtatacttaaaggaaatgtgtttatataactctcattttcctcctttatatgcaagaaatcacaaatctttatc

SEQ ID NO: 88283 - protein, 216 aa, Arabidopsis thaliana
  peptide (1)..(216): Ceres Seq. ID no. 12707272
RKIESRHSYHSALSLCLLLRESETERERERERARGREMEKALTKVTSFKVGSSWISKKAKEELSNITNDLTTFSSTVEEKAKWIFNKLKGKPLKSLPDLLKEYNLPPGLFPQNIICYEFDETKNKLTVFFSSPCEVTFKDGSAIRYATRVKGILLRGKLMGVEGMKTKVLVWVKVTTISVESSKSDKLWFTAGVKKSRSKDVYDTPHDAIKVIGEF

SEQ ID NO: 88284 - protein, 179 aa, Arabidopsis thaliana
  peptide (1)..(179): Ceres Seq. ID no. 12707273
MEKALTKVTSFKVGSSWISKKAKEELSNITNDLTTFSSTVEEKAKWIFNKLKGKPLKSLPDLLKEYNLPPGLFPQNIICYEFDETKNKLTVFFSSPCEVTFKDGSAIRYATRVKGILLRGKLMGVEGMKTKVLVWVKVTTISVESSKSDKLWFTAGVKKSRSKDVYDTPHDAIKVIGEF

SEQ ID NO: 88285 - DNA, 1284 bp, Arabidopsis thaliana
  misc_feature (1)..(1284): Ceres Seq. ID no. 12707274
  misc_feature (1)..(1284): Ortholog of  Ceres SEQ ID NO 14308061 as cited in SEQ ID NO 55155
  misc_feature (1)..(1284): Ortholog of  Ceres SEQ ID NO 13654238 as cited in SEQ ID NO 67874
atgcaactatttgtgaaaaagtcaacaaaaaggagaaacataggtgcgtgtgtctccataatcggtggtgctaaacgacacggaagctccgatttagctccgtcgtcaaagcaccgccgtacacggagccatctacgcgtcggatccaccgatgatgaatccatcatcaacatcacatttagcgggaagcttagcagtttaagcgggaacctcggaaaccatggaggaagcacgagaatgaaaggtctcttcaagaacaaatcacgtcttcctggtgaaatcgtacgtcagactcgagatctcatcgctttagcggaatccgaagaagaagaaaccgatgcgagaaactcgaaaaggttagggatttgtgcggagttgtgtcgaaacattagagatttgaaatcgattctttatggtaatggtgaagctgagcctgttcctgaagcttgtcttttgttaactcaagagtttttccgagcagacacgcttcgtcctttgatcaaatctataccaaaacttgacctagaagcaagaaaagacgcgacacagattgtcgcgaatcttcagaagcaacaagtcgaatttcgactcgttgcttctgaatatcttgaatcgaacttagatgttatcgattcgttagtcgaaggtatcgatcacgaccatgagctggcgttgcattacacgggaatgcttaaagaatgtgtgcggcatcaggttgttgcaaagtacatactcgaatcgaagaatttggagaagtttttcgattatgttcagcttccgtatttcgatgtagctaccgatgctagcaagatcttcagagagcttttgacgaggcataaatcgactgtagcggagtatcttgcgaagaactacgaatggtttttcgcagagtataacaccaagttgttggagaaaggaagctattttacgaagagacaagcgtcgaaattgcttggagatgtgttgatggatcgttcgaattcaggtgtgatggtaaagtatgtgagcagtttggataatttgagaatcatgatgaatcttttaagagaaccaaccaagaacattcagttagaagcatttcatatctttaaactctttgtggcaaacgagaacaaacctgaggatatcgtggcgattctcgtggcgaatcggaccaagattcttcgtttgtttgctgatttgaaacctgagaaagaagatgtaggttttgaaactgataaagcattggttatgaatgagattgctacactttctcttctcgatatcaaaaccgcagatcgataa

SEQ ID NO: 88286 - protein, 427 aa, Arabidopsis thaliana
  peptide (1)..(427): Ceres Seq. ID no. 12707275
MQLFVKKSTKRRNIGACVSIIGGAKRHGSSDLAPSSKHRRTRSHLRVGSTDDESIINITFSGKLSSLSGNLGNHGGSTRMKGLFKNKSRLPGEIVRQTRDLIALAESEEEETDARNSKRLGICAELCRNIRDLKSILYGNGEAEPVPEACLLLTQEFFRADTLRPLIKSIPKLDLEARKDATQIVANLQKQQVEFRLVASEYLESNLDVIDSLVEGIDHDHELALHYTGMLKECVRHQVVAKYILESKNLEKFFDYVQLPYFDVATDASKIFRELLTRHKSTVAEYLAKNYEWFFAEYNTKLLEKGSYFTKRQASKLLGDVLMDRSNSGVMVKYVSSLDNLRIMMNLLREPTKNIQLEAFHIFKLFVANENKPEDIVAILVANRTKILRLFADLKPEKEDVGFETDKALVMNEIATLSLLDIKTADR

SEQ ID NO: 88287 - protein, 348 aa, Arabidopsis thaliana; identical to SEQ ID NO: 72087
  peptide (1)..(348): Ceres Seq. ID no. 12707276

SEQ ID NO: 88288 - DNA, 1062 bp, Arabidopsis thaliana
  misc_feature (1)..(1062): Ceres Seq. ID no. 12707401
  misc_feature (1)..(1062): Ortholog of  Ceres SEQ ID NO 12636774 as cited in SEQ ID NO 372
  misc_feature (1)..(1062): Ortholog of  Ceres SEQ ID NO 13596470 as cited in SEQ ID NO 62158
  misc_feature (1)..(1062): Ortholog of  Ceres SEQ ID NO 12615466 as cited in SEQ ID NO 62761
  misc_feature (1)..(1062): Ortholog of  Ceres SEQ ID NO 12615907 as cited in SEQ ID NO 62860
  misc_feature (1)..(1062): Ortholog of  Ceres SEQ ID NO 13597295 as cited in SEQ ID NO 63743
  misc_feature (1)..(1062): Ortholog of  Ceres SEQ ID NO 12617090 as cited in SEQ ID NO 64005
  misc_feature (1)..(1062): Ortholog of  Ceres SEQ ID NO 13597439 as cited in SEQ ID NO 64081
  misc_feature (1)..(1062): Ortholog of  Ceres SEQ ID NO 13597233 as cited in SEQ ID NO 64370
  misc_feature (1)..(1062): Ortholog of  Ceres SEQ ID NO 13599438 as cited in SEQ ID NO 0
  misc_feature (1)..(1062): Ortholog of  Ceres SEQ ID NO 13600370 as cited in SEQ ID NO 0
atggagaaaggtgaggattcaagcacattcaaaatggggaattctgcacaagagaggagtttaccgtatgtacctgactgttacgtcgtcccgccttctagcaaaccatgtgactcaaattccggaatcgtacccactatcgatgtttctcggctgaaagggggagatgatgaacgtcgaggggagctaagtttggcatgtcaacatcttggtttttttcaaatagtgaaccatggaatcaaccagaacatactagatgacgccttggaggttgcgaatagcttcttcgagctgccggcgaaggagaagaaacagtttatgtcaaacgatgtctacgcaccggttcggtacagtacgagtctcaaggacggtttggacacgatccaattctggaggatttttctaaagcactatgcacatcctcttcatcgttggattcatctttggccagagaatccacccggatacagggaaaaaatgggaaagttctgcgaggaagtgaggaaactatcgatagagttaatgggagcaataacggaaagcctaggtctagggagagactacctgtcgtctcggatggacgaaaacggcatgcaagtcatgacagttaactgctatccaccctgtccggaccctgagacggcgctaggcctgccgccgcattcagactatagttgcatcaccctccttctacagaacttggacggtctcaagatcttcgatccaatggctcacggtggatctggccgttgggttggtgtcccacaagtcacaggtgtacttaaggtccatattggtgaccatgtggaagttctaagcaatggattatacaagagcatcgttcataaagtcactttgaatgaagagaagacgagaatctctctcgcgagcttgcatagcttgggtatggacgataagatgagtgtaccgcgcgaattggttaacgatgaaaatccggttcggtataaagagagcagctttaacgattttcttgattttcttgtcaaaaatgacatttctcaaggggataggtttattgacactctcagaatcaaggactga

SEQ ID NO: 88289 - protein, 353 aa, Arabidopsis thaliana
  peptide (1)..(353): Ceres Seq. ID no. 12707402
MEKGEDSSTFKMGNSAQERSLPYVPDCYVVPPSSKPCDSNSGIVPTIDVSRLKGGDDERRGELSLACQHLGFFQIVNHGINQNILDDALEVANSFFELPAKEKKQFMSNDVYAPVRYSTSLKDGLDTIQFWRIFLKHYAHPLHRWIHLWPENPPGYREKMGKFCEEVRKLSIELMGAITESLGLGRDYLSSRMDENGMQVMTVNCYPPCPDPETALGLPPHSDYSCITLLLQNLDGLKIFDPMAHGGSGRWVGVPQVTGVLKVHIGDHVEVLSNGLYKSIVHKVTLNEEKTRISLASLHSLGMDDKMSVPRELVNDENPVRYKESSFNDFLDFLVKNDISQGDRFIDTLRIKD

SEQ ID NO: 88290 - protein, 342 aa, Arabidopsis thaliana
  peptide (1)..(342): Ceres Seq. ID no. 12707403
MGNSAQERSLPYVPDCYVVPPSSKPCDSNSGIVPTIDVSRLKGGDDERRGELSLACQHLGFFQIVNHGINQNILDDALEVANSFFELPAKEKKQFMSNDVYAPVRYSTSLKDGLDTIQFWRIFLKHYAHPLHRWIHLWPENPPGYREKMGKFCEEVRKLSIELMGAITESLGLGRDYLSSRMDENGMQVMTVNCYPPCPDPETALGLPPHSDYSCITLLLQNLDGLKIFDPMAHGGSGRWVGVPQVTGVLKVHIGDHVEVLSNGLYKSIVHKVTLNEEKTRISLASLHSLGMDDKMSVPRELVNDENPVRYKESSFNDFLDFLVKNDISQGDRFIDTLRIKD

SEQ ID NO: 88291 - protein, 247 aa, Arabidopsis thaliana; identical to SEQ ID NO: 70754
  peptide (1)..(247): Ceres Seq. ID no. 12707404

SEQ ID NO: 88292 - DNA, 1590 bp, Arabidopsis thaliana
  misc_feature (1)..(1590): Ceres Seq. ID no. 12707479
  misc_feature (1)..(1590): Ortholog of  Ceres SEQ ID NO 14310920 as cited in SEQ ID NO 54622
atggagcttcctcaacctcgtcccttcaaaacccaagggagaaaaccaacacatgattttttatcgctctgcagtcattcaaccgtccacccagatccaaagccaacaccaccaccttcttctcaaggtagtcacttgaaaacccatgattttcttcaaccgttagaatgtgttggtgctaaagaagacgtaagtaggattaactctaccactacagcgtccgagaagccaccgccccctgctccacctccaccgttgcagcacgtgcttcccggtggtatagggacttatacgattagccccattccttacttccatcatcatcatcagagaattcctaagccggagttgtcaccaccaatgatgttcaatgctaatgagagaaacgttttggatgagaattctaactctaattgcagctcgtacgccgctgcatcaagcgggttcactctgtgggatgaatctgcttctgggaagaagggacagacaaggaaggagaatagtgttggggagagagtaaacatgagagctgatgttgcagcaactgtgggacaatggccagtggcggagagacggtcccagtctttgacaaacaaccatatgagcggtttcagttctctctcttcctctcaagggtctgtgcttaagagccagagcttcatggacatgataaggtcagcaaaaggaagttcacaggaagatgatttagatgatgaagaagattttatcatgaagaaagaaagctcctcgactagccagagccatagagtggatttgagggtaaaagcagatgtgagaggctctcctaacgatcaaaagctgaacacacctaggtctaaacattctgctacagagcaacggagaaggagcaagatcaatgatagatttcagatgttgagacaactaatacctaacagcgaccaaaagcgggataaggcctccttcttactagaggttatcgagtatattcaattcttacaagagaaagcagacaagtatgtgacctcttaccaaggatggaatcacgaacctgcgaagctattgaattggcagagtaacaacaaccaacagctagtacctgaaggagttgcttttgctccaaaattggaagaagagaaaaacaacattccggtttcggtccttgcaactgcacaaggtgttgttattgatcatccaacaaccgcgacgacctctccatttccattgtcgattcaaagcaacagttttttctctcctgtgattgcgggtaatcccgtaccccagttccacgcaagagtcgcatcatcagaggctgtagagccaagtccgagttcccggagtcaaaaagaagaagaagatgaggaagttcttgagggtaacatcagaatttcaagtgtttactcacaaggattagtgaaaacactgagagaagcattggagaattcaggagtggacttaacgaaagcaagcatctccgttgaaatcgagctcgctaaacaatcctcgtcttcttccttcaaggatcatgaagttcgtgaaccggtttctcgaaccagaaacgacaatgtcaagcaaactcggaaaccaaaacggctcaagacgggacagtag

SEQ ID NO: 88293 - protein, 529 aa, Arabidopsis thaliana
  peptide (1)..(529): Ceres Seq. ID no. 12707480
MELPQPRPFKTQGRKPTHDFLSLCSHSTVHPDPKPTPPPSSQGSHLKTHDFLQPLECVGAKEDVSRINSTTTASEKPPPPAPPPPLQHVLPGGIGTYTISPIPYFHHHHQRIPKPELSPPMMFNANERNVLDENSNSNCSSYAAASSGFTLWDESASGKKGQTRKENSVGERVNMRADVAATVGQWPVAERRSQSLTNNHMSGFSSLSSSQGSVLKSQSFMDMIRSAKGSSQEDDLDDEEDFIMKKESSSTSQSHRVDLRVKADVRGSPNDQKLNTPRSKHSATEQRRRSKINDRFQMLRQLIPNSDQKRDKASFLLEVIEYIQFLQEKADKYVTSYQGWNHEPAKLLNWQSNNNQQLVPEGVAFAPKLEEEKNNIPVSVLATAQGVVIDHPTTATTSPFPLSIQSNSFFSPVIAGNPVPQFHARVASSEAVEPSPSSRSQKEEEDEEVLEGNIRISSVYSQGLVKTLREALENSGVDLTKASISVEIELAKQSSSSSFKDHEVREPVSRTRNDNVKQTRKPKRLKTGQ

SEQ ID NO: 88294 - protein, 409 aa, Arabidopsis thaliana; identical to SEQ ID NO: 84581
  peptide (1)..(409): Ceres Seq. ID no. 12707481

SEQ ID NO: 88295 - protein, 408 aa, Arabidopsis thaliana; identical to SEQ ID NO: 84582
  peptide (1)..(408): Ceres Seq. ID no. 12707482

SEQ ID NO: 88296 - DNA, 1545 bp, Arabidopsis thaliana
  misc_feature (1)..(1545): Ceres Seq. ID no. 12707489
  misc_feature (1)..(1545): Ortholog of  Ceres SEQ ID NO 12586556 as cited in SEQ ID NO 64667
  misc_feature (1)..(1545): Ortholog of  Ceres SEQ ID NO 13660894 as cited in SEQ ID NO 67475
atgtcggagctgtacaaaatacacaccctcctgatcacacttggtctctccgaggaagagccttttgtttctcaaactctgtctttctctgctttgtcttcatcaggcgacgttgactacgcttacaaattcttgtcaaaactatctgatcctccgaattacggatggaatttcgtaatacgaggtttctccaatagcagaaaccccgagaaatcgatcagcgtctatatccagatgttgaggttcgggttattacctgatcatatgacttatccgtttcttatgaagtcgagttctcgtctctcgaacagaaaacttggtgggtctttgcattgctccgtggttaaatctgggcttgagtgggatttgttcatatgtaatactcttattcatatgtatggttcgttccgagaccaagcttctgcgcgcaagttgttcgatgaaatgcctcataagaacttggttacttggaactctattttagatgcgtatgccaagagcggggatgttgtttcagcaagactggtgtttgatgaaatgagtgagagagatgttgtgacttggagttctatgatcgatggctatgtaaaaagaggtgaatataacaaagcgttggaaattttcgatcagatgatgagaatgggttcatcaaaggcaaatgaagtcactatggttagcgttatatgcgcttgtgctcacttgggtgcgctaaatcgaggaaagactgtacatcgctatatactcgatgtgcatttgccgttaacagttatattgcagacatctcttattgatatgtatgcgaaatgcggatcgataggagacgcttggagcgtgttttatagagcatctgttaaggaaacagatgccttgatgtggaatgctatcattggagggcttgcgagtcacgggttcattagagagtcgctccaactgtttcacaaaatgcgagaatcaaagattgacccggacgagataacattcttgtgcttgcttgctgcttgttcccatggcggattagtgaaagaagcgtggcatttcttcaagagtctcaaggaaagtggtgcggaaccaaagagcgagcattatgcttgtatggttgatgtgctttccagagctggtctagttaaagacgcacatgattttatatctgaaatgccgataaaaccgacgggttcaatgttgggtgctttgcttaacgggtgtataaatcacggaaacttggagcttgcggaaacagttggaaagaagcttatagagttgcaaccacataatgatggacgatatgtcgggctagcaaacgtttatgcgatcaacaagcagtttagggcagctcggtctatgagagaagcaatggagaagaaaggagtgaagaaaattgcagggcacagtatacttgatttggatggaacacgacatagattcatcgctcatgacaaaacacattttcactccgacaagatctatgcagtgttacagctgactggagcttggatgaatctcgatgttgactatgatgatcaagacaatcattgtttttgttcttga

SEQ ID NO: 88297 - protein, 514 aa, Arabidopsis thaliana
  peptide (1)..(514): Ceres Seq. ID no. 12707490
MSELYKIHTLLITLGLSEEEPFVSQTLSFSALSSSGDVDYAYKFLSKLSDPPNYGWNFVIRGFSNSRNPEKSISVYIQMLRFGLLPDHMTYPFLMKSSSRLSNRKLGGSLHCSVVKSGLEWDLFICNTLIHMYGSFRDQASARKLFDEMPHKNLVTWNSILDAYAKSGDVVSARLVFDEMSERDVVTWSSMIDGYVKRGEYNKALEIFDQMMRMGSSKANEVTMVSVICACAHLGALNRGKTVHRYILDVHLPLTVILQTSLIDMYAKCGSIGDAWSVFYRASVKETDALMWNAIIGGLASHGFIRESLQLFHKMRESKIDPDEITFLCLLAACSHGGLVKEAWHFFKSLKESGAEPKSEHYACMVDVLSRAGLVKDAHDFISEMPIKPTGSMLGALLNGCINHGNLELAETVGKKLIELQPHNDGRYVGLANVYAINKQFRAARSMREAMEKKGVKKIAGHSILDLDGTRHRFIAHDKTHFHSDKIYAVLQLTGAWMNLDVDYDDQDNHCFCS

SEQ ID NO: 88298 - protein, 436 aa, Arabidopsis thaliana
  peptide (1)..(436): Ceres Seq. ID no. 12707491
MLRFGLLPDHMTYPFLMKSSSRLSNRKLGGSLHCSVVKSGLEWDLFICNTLIHMYGSFRDQASARKLFDEMPHKNLVTWNSILDAYAKSGDVVSARLVFDEMSERDVVTWSSMIDGYVKRGEYNKALEIFDQMMRMGSSKANEVTMVSVICACAHLGALNRGKTVHRYILDVHLPLTVILQTSLIDMYAKCGSIGDAWSVFYRASVKETDALMWNAIIGGLASHGFIRESLQLFHKMRESKIDPDEITFLCLLAACSHGGLVKEAWHFFKSLKESGAEPKSEHYACMVDVLSRAGLVKDAHDFISEMPIKPTGSMLGALLNGCINHGNLELAETVGKKLIELQPHNDGRYVGLANVYAINKQFRAARSMREAMEKKGVKKIAGHSILDLDGTRHRFIAHDKTHFHSDKIYAVLQLTGAWMNLDVDYDDQDNHCFCS

SEQ ID NO: 88299 - protein, 426 aa, Arabidopsis thaliana
  peptide (1)..(426): Ceres Seq. ID no. 12707492
MTYPFLMKSSSRLSNRKLGGSLHCSVVKSGLEWDLFICNTLIHMYGSFRDQASARKLFDEMPHKNLVTWNSILDAYAKSGDVVSARLVFDEMSERDVVTWSSMIDGYVKRGEYNKALEIFDQMMRMGSSKANEVTMVSVICACAHLGALNRGKTVHRYILDVHLPLTVILQTSLIDMYAKCGSIGDAWSVFYRASVKETDALMWNAIIGGLASHGFIRESLQLFHKMRESKIDPDEITFLCLLAACSHGGLVKEAWHFFKSLKESGAEPKSEHYACMVDVLSRAGLVKDAHDFISEMPIKPTGSMLGALLNGCINHGNLELAETVGKKLIELQPHNDGRYVGLANVYAINKQFRAARSMREAMEKKGVKKIAGHSILDLDGTRHRFIAHDKTHFHSDKIYAVLQLTGAWMNLDVDYDDQDNHCFCS

SEQ ID NO: 88300 - DNA, 2412 bp, Arabidopsis thaliana
  misc_feature (1)..(2412): Ceres Seq. ID no. 12707514
  misc_feature (1)..(2412): Ortholog of  Ceres SEQ ID NO 14315338 as cited in SEQ ID NO 60283
atgaacaccaagcgcgcctacaagctccgtatccttttctctctgatttcatcttttagggaatttgtggcacattctgctgctgttaattgtcttaagattgggaggaagtcctccagggttctcgttacaggcggagaagatcacaaggttaatctatgggctattggtaagcccaacgccatcctgagcttgtatgggcactctagcgggattgattcagtaacatttgatgcttcggaaggcttagtagcagcaggagctgctagtggtacaattaaactttgggatctggaggaagcaaaggttgtcagaactctcactggtcacaggtcaaactgcgtatccgtgaattttcacccttttggtgagttttttgcttctggttctctagacacaaatctcaagatatgggatataagaaagaagggctgcatccatacttacaagggtcacactagaggggtcaacgtactcagattcactccagatggtcgttggattgtatctggaggagaagataatgttgtcaaggtgtgggatttgactgctggaaaacttttgcatgagtttaagagtcatgaagggaaaattcagagtctagattttcatccccatgaatttctgctggcaacaggttcagctgataagactgtaaaattctgggaccttgaaacattcgagcttattggttctggtggaactgagactactggggtccgttgcctaacctttaatccagatggaaagagtgtgctttgtggattgcaagaaagtcttaaaattttctcatgggagccaataagatgtcatgatggagtggatgttggatggtcaaacttgtcggatatgaatgttcacgagggaaagcttctcggttgctcatacaatcaaaattgtgtaggcgtttgggttgtagacctctcgcgcactgagcctatgagtggaggcgccactcagtcaaattctcatccagagaaaacatcaggctcaggcagagatcaagcaggtctgaacgataacagctcaaaggttattctcggaaagttgcctggttcccagaaagtggatcctttattgaaggaaacaaagtctcttggaaaattatcagtttctcaaaactcggatccgttgccaaaagatacaaagtctactggaaggtcatcagtatctcaaagttcagatcctttggtaaaggaaccaaagcctctcggaaggttttcagctactcacagctcagacacagtaaaagagtcaagaaccctgtcatttgtccctaatgctgcagcctcaaagagaaattttggaaaagctaacccaaaggcgaatcctccagtagtcaataaagaggattattttccagtaatcgtccccagaacggagccaataattgagcaggcatctgaatccagagcagaacttgacattatcggaagaactatgccatattcgctgcagtcaaaggccgctgattctcgaaggctgtcgagcagcagaaatgagccagatctaccaaccagttcgcttcttgaaaggtctcagtctcaacctatagaaccaatcactttacaagatgggaatacatatcctagtgacgaaggtggctcctgggatacagctgagagaacaaataaagagagcaaatgcagggtatttggaaggtttaattcaagatcactggtgagatcacctccgagaaatcacgacgaaaactctgacttgattagctataatgcaaatagagattcaagtcctactgaaagccgaaaaggaggaagactgcattccctcgttctaaatagggaaagaagaggaagattttctaactttgagggtcctgtttcgagttcttctggtggaaatatgactgcaccaaacagtcgcccttccaatatgctcaagcagagaggaaatcatgtgccagttgatcaaggaatcacttcagctagcgaagaagatatagttgcagacataatggggcaacacgatcaatttgtcagctctatgcactctcgtttggctaagttacaggtcgtccgtagatattgggaaagaaatgatattaaaaactcgataagttcaatagagaagatggctgataatgctgtaattgcggatgtactacttatagtaaacgagagacctgagattttgacactggatacctgtacctctcttctcccccttttgacagctcttctagggagcaacatggatagtcatttgagtgtctgccttgatttgctgcttaagctggtaagaatgtatgggtcacaaatttactcgtcgctttccgctccctcatctgttggtgtagatattgaggctgagcaaaggttggtccgagcttcaatctcaccattcattgtcgttttcgattgcaatttactctctttggcaagtcaaatatga

SEQ ID NO: 88301 - protein, 803 aa, Arabidopsis thaliana
  peptide (1)..(803): Ceres Seq. ID no. 12707515
MNTKRAYKLRILFSLISSFREFVAHSAAVNCLKIGRKSSRVLVTGGEDHKVNLWAIGKPNAILSLYGHSSGIDSVTFDASEGLVAAGAASGTIKLWDLEEAKVVRTLTGHRSNCVSVNFHPFGEFFASGSLDTNLKIWDIRKKGCIHTYKGHTRGVNVLRFTPDGRWIVSGGEDNVVKVWDLTAGKLLHEFKSHEGKIQSLDFHPHEFLLATGSADKTVKFWDLETFELIGSGGTETTGVRCLTFNPDGKSVLCGLQESLKIFSWEPIRCHDGVDVGWSNLSDMNVHEGKLLGCSYNQNCVGVWVVDLSRTEPMSGGATQSNSHPEKTSGSGRDQAGLNDNSSKVILGKLPGSQKVDPLLKETKSLGKLSVSQNSDPLPKDTKSTGRSSVSQSSDPLVKEPKPLGRFSATHSSDTVKESRTLSFVPNAAASKRNFGKANPKANPPVVNKEDYFPVIVPRTEPIIEQASESRAELDIIGRTMPYSLQSKAADSRRLSSSRNEPDLPTSSLLERSQSQPIEPITLQDGNTYPSDEGGSWDTAERTNKESKCRVFGRFNSRSLVRSPPRNHDENSDLISYNANRDSSPTESRKGGRLHSLVLNRERRGRFSNFEGPVSSSSGGNMTAPNSRPSNMLKQRGNHVPVDQGITSASEEDIVADIMGQHDQFVSSMHSRLAKLQVVRRYWERNDIKNSISSIEKMADNAVIADVLLIVNERPEILTLDTCTSLLPLLTALLGSNMDSHLSVCLDLLLKLVRMYGSQIYSSLSAPSSVGVDIEAEQRLVRASISPFIVVFDCNLLSLASQI

SEQ ID NO: 88302 - protein, 520 aa, Arabidopsis thaliana
  peptide (1)..(520): Ceres Seq. ID no. 12707516
MNVHEGKLLGCSYNQNCVGVWVVDLSRTEPMSGGATQSNSHPEKTSGSGRDQAGLNDNSSKVILGKLPGSQKVDPLLKETKSLGKLSVSQNSDPLPKDTKSTGRSSVSQSSDPLVKEPKPLGRFSATHSSDTVKESRTLSFVPNAAASKRNFGKANPKANPPVVNKEDYFPVIVPRTEPIIEQASESRAELDIIGRTMPYSLQSKAADSRRLSSSRNEPDLPTSSLLERSQSQPIEPITLQDGNTYPSDEGGSWDTAERTNKESKCRVFGRFNSRSLVRSPPRNHDENSDLISYNANRDSSPTESRKGGRLHSLVLNRERRGRFSNFEGPVSSSSGGNMTAPNSRPSNMLKQRGNHVPVDQGITSASEEDIVADIMGQHDQFVSSMHSRLAKLQVVRRYWERNDIKNSISSIEKMADNAVIADVLLIVNERPEILTLDTCTSLLPLLTALLGSNMDSHLSVCLDLLLKLVRMYGSQIYSSLSAPSSVGVDIEAEQRLVRASISPFIVVFDCNLLSLASQI

SEQ ID NO: 88303 - protein, 490 aa, Arabidopsis thaliana
  peptide (1)..(490): Ceres Seq. ID no. 12707517
MSGGATQSNSHPEKTSGSGRDQAGLNDNSSKVILGKLPGSQKVDPLLKETKSLGKLSVSQNSDPLPKDTKSTGRSSVSQSSDPLVKEPKPLGRFSATHSSDTVKESRTLSFVPNAAASKRNFGKANPKANPPVVNKEDYFPVIVPRTEPIIEQASESRAELDIIGRTMPYSLQSKAADSRRLSSSRNEPDLPTSSLLERSQSQPIEPITLQDGNTYPSDEGGSWDTAERTNKESKCRVFGRFNSRSLVRSPPRNHDENSDLISYNANRDSSPTESRKGGRLHSLVLNRERRGRFSNFEGPVSSSSGGNMTAPNSRPSNMLKQRGNHVPVDQGITSASEEDIVADIMGQHDQFVSSMHSRLAKLQVVRRYWERNDIKNSISSIEKMADNAVIADVLLIVNERPEILTLDTCTSLLPLLTALLGSNMDSHLSVCLDLLLKLVRMYGSQIYSSLSAPSSVGVDIEAEQRLVRASISPFIVVFDCNLLSLASQI

SEQ ID NO: 88304 - DNA, 1291 bp, Arabidopsis thaliana
  misc_feature (1)..(1291): Ceres Seq. ID no. 12707518
  misc_feature (1)..(1291): Ortholog of  Ceres SEQ ID NO 15224513 as cited in SEQ ID NO 63921
atggcggaggtggaggagattgcgcacgaggagcagaatatcgagaagagggagaagaagaaaggtaaacacgagaagccgaagccatgggatgatgacccaaacatcgaccgttggacaatcgagaagtttgatccggcatggaaccccactggtatgactgaaaccagcacgttctcaacactctttcctcaatacagagagaagtatcttcaggagtgttggcctagagttgaatctgctcttaaggagtacggtgtcgcctgcaagctcaacttggttgaaggttctatgactgtttcgacgacgaggaagacaagagatccatacatcattgtcaaagctagggatttgattaagcttctttccagaagtgtccctgctcctcaggcaattaagattctcgaagatgaggtgcaatgtgatatcatcaagatcggtaacttggttagaaataaggaaagatttgttaaaagaaggcagcggcttgtgggtcctaattcttctaccttgaaggcgctggaaatattaaccaactgttacattctagttcagggaagtactgtagccgctatgggtccatttaaaggtctcaaacagctcagaaggattgtggaagactgcgtacagaatataatgcatcctgtataccatataaagactctcatgatgaaaaaagaactggagaaggatccagctcttgcaaatgaaagctgggataggtttcttcccacattcaggaagaaaaatgttaagcaaaagaaacccaaaagcaaggagaagaagccatacacacctttcccacctcctcaaccacctagcaagattgatatgcagttggagtctggagaatacttcatgagtgataaaaagaagtcagagaaaaaatggcaggagaagcaagagaaacagtcagagaagagcacagagaacaaaagaaagagagatgcctcattcctcccacctgaggagcctatgaacaacaatagcaacgcaaacaaatcagaggatggaaagaatgatataaccgagttaacaaattccttgaagagcaagacgaaggagttgaaaaagcagaaaaagacacacgagagagtgaatgcggaggagtatattgctggtccatcttcttctgctgataaatcttccaagaagtccaaaaagattagagattaattctaaatcctgtttttttttaaaaaaaaaaaagagagaaaagattgaaacttatctatgctcaaaactgtaaaaacaagttaaatctttatttcagccgtcaagttacttcatt

SEQ ID NO: 88305 - protein, 391 aa, Arabidopsis thaliana; identical to SEQ ID NO: 26556
  peptide (1)..(391): Ceres Seq. ID no. 12707519

SEQ ID NO: 88306 - protein, 339 aa, Arabidopsis thaliana; identical to SEQ ID NO: 26557
  peptide (1)..(339): Ceres Seq. ID no. 12707520

SEQ ID NO: 88307 - protein, 294 aa, Arabidopsis thaliana; identical to SEQ ID NO: 26558
  peptide (1)..(294): Ceres Seq. ID no. 12707521

SEQ ID NO: 88308 - DNA, 1068 bp, Arabidopsis thaliana
  misc_feature (1)..(1068): Ceres Seq. ID no. 12707526
  misc_feature (1)..(1068): Ortholog of  Ceres SEQ ID NO 12364737 as cited in SEQ ID NO 51089
  misc_feature (1)..(1068): Ortholog of  Ceres SEQ ID NO 13595567 as cited in SEQ ID NO 56760
  misc_feature (1)..(1068): Ortholog of  Ceres SEQ ID NO 13655302 as cited in SEQ ID NO 63307
  misc_feature (1)..(1068): Ortholog of  Ceres SEQ ID NO 12625474 as cited in SEQ ID NO 64169
  misc_feature (1)..(1068): Ortholog of  Ceres SEQ ID NO 13597502 as cited in SEQ ID NO 64681
atgcatgatagtgaaatattcaagtttaaagacatgatgatgatgtcttgcacagttcaaacattagtacttgttccatggtttctagtagtatttgtactcgccggtggagaagactcatccgagacgacggcaatgtttccggcgatgtttgtgttcggagactctttggtggataacggaaacaataaccacttgaactcactggctaggtccaactatctcccttacggcatcgatttcgctggaaatcaaccaaccggtcgcttctctaacggcaaaactatcgtcgatttcattggagagttgctagggctgccggagataccggcgtttatggacacggttgacggaggagtggatattctccatggtgtgaactatgcctcagctgccggaggaatcttagaggaaaccggtcgccatctggaatatatggcaaagtcattggtggtggtgtcattgggtaacaatgactacattaacaattatctgaaaccaaggctattcctctcaagctctatttacgaccctacttctttcgccgacctccttctctccaacttcaccactcatctccttgaattgtatggaaaggggtttaggaaatttgtaatagccggtgtgggtccattgggttgcataccagaccaactagccgcccaagcggctctgccaggtgaatgtgtcgaggctgtaaacgagatggctgaacttttcaacaaccgtcttgtatcgctggtggatcgtctcaattccgataacaaaaccgctagtgaagccatctttgtttacggtaatacctatggagccgccgtggatattctcaccaacccatttaattacggattcgaagtgacggatagagggtgttgtggagtagggagaaatagaggagaaataacgtgtctgccattagcggtaccatgcgctttcagagaccgacatgtgttctgggatgcatttcatccaacacaagcttttaatctcataattgctctcagagcctttaatggttccaaatccgattgttaccccattaatctttctcaactttctcgtctctaa

SEQ ID NO: 88309 - protein, 355 aa, Arabidopsis thaliana
  peptide (1)..(355): Ceres Seq. ID no. 12707527
MHDSEIFKFKDMMMMSCTVQTLVLVPWFLVVFVLAGGEDSSETTAMFPAMFVFGDSLVDNGNNNHLNSLARSNYLPYGIDFAGNQPTGRFSNGKTIVDFIGELLGLPEIPAFMDTVDGGVDILHGVNYASAAGGILEETGRHLEYMAKSLVVVSLGNNDYINNYLKPRLFLSSSIYDPTSFADLLLSNFTTHLLELYGKGFRKFVIAGVGPLGCIPDQLAAQAALPGECVEAVNEMAELFNNRLVSLVDRLNSDNKTASEAIFVYGNTYGAAVDILTNPFNYGFEVTDRGCCGVGRNRGEITCLPLAVPCAFRDRHVFWDAFHPTQAFNLIIALRAFNGSKSDCYPINLSQLSRL

SEQ ID NO: 88310 - protein, 344 aa, Arabidopsis thaliana
  peptide (1)..(344): Ceres Seq. ID no. 12707528
MMMMSCTVQTLVLVPWFLVVFVLAGGEDSSETTAMFPAMFVFGDSLVDNGNNNHLNSLARSNYLPYGIDFAGNQPTGRFSNGKTIVDFIGELLGLPEIPAFMDTVDGGVDILHGVNYASAAGGILEETGRHLEYMAKSLVVVSLGNNDYINNYLKPRLFLSSSIYDPTSFADLLLSNFTTHLLELYGKGFRKFVIAGVGPLGCIPDQLAAQAALPGECVEAVNEMAELFNNRLVSLVDRLNSDNKTASEAIFVYGNTYGAAVDILTNPFNYGFEVTDRGCCGVGRNRGEITCLPLAVPCAFRDRHVFWDAFHPTQAFNLIIALRAFNGSKSDCYPINLSQLSRL

SEQ ID NO: 88311 - protein, 343 aa, Arabidopsis thaliana
  peptide (1)..(343): Ceres Seq. ID no. 12707529
MMMSCTVQTLVLVPWFLVVFVLAGGEDSSETTAMFPAMFVFGDSLVDNGNNNHLNSLARSNYLPYGIDFAGNQPTGRFSNGKTIVDFIGELLGLPEIPAFMDTVDGGVDILHGVNYASAAGGILEETGRHLEYMAKSLVVVSLGNNDYINNYLKPRLFLSSSIYDPTSFADLLLSNFTTHLLELYGKGFRKFVIAGVGPLGCIPDQLAAQAALPGECVEAVNEMAELFNNRLVSLVDRLNSDNKTASEAIFVYGNTYGAAVDILTNPFNYGFEVTDRGCCGVGRNRGEITCLPLAVPCAFRDRHVFWDAFHPTQAFNLIIALRAFNGSKSDCYPINLSQLSRL

SEQ ID NO: 88312 - DNA, 2499 bp, Arabidopsis thaliana
  misc_feature (1)..(2499): Ceres Seq. ID no. 12707549
  misc_feature (1)..(2499): Ortholog of  Ceres SEQ ID NO 13599820 as cited in SEQ ID NO 0
atgggaggaggagagaagaggaaatctagtttcaaaaacctagctaatgcaaagaagaggagaacaggacctcacttacctagctcaatactcaagaccattgcgaatgagaaacgtcctttgaactctgacgaaggagacgatgagattgattctgcttacggtgatttttacgagtacgaagaaggtgtgcctgaagaggaatctaggaaaaacaaccgctacgaacgcgtcgttaactacgaattcgagcttgcagaggattgcgaggatgaaaacgtggagtcagaagatgatgatgatgatgatgatgatgatgatgatgataggcactcacgaatgttgaaaaatgtcactgaattgccaatttcagcctttcaaggagagagtaagaacaaacgtgtagtctttactgaaccatatccagagtctgaattcaatcctacccgtgatgttctggagggtaaatccctcaccacaattgatgactttatggagcctcttcaaggattacatggaaatagccaactaagcaatatgatctcccggatgcgaaaagatacgcagtctcttgttcatgctcctctgccaaagccagaacaagaaagactggaacgggatgtagcgaatgaactggtttacaaggggtttgatatttgggtgcctctggtaaaaaggaacagagaggcaccaactatttactttaaccaagatgtcaatgttggatactctaccgttggtgctatagcatcacaatttcatcccaggactgaatttgagatgaaaatggcttctctactcgatgatcatgagattttggaggctcacaaagaagatggagctaggcttcttgaattcaacgaggtatctatggaagatcacatcaagagacgtaaccatgttgctaagatgcggagcatgctcttccgagttgacctgaaacataaacgaatcaagcagattaagtctaaaacatatcatcgccttaaaaacaaagacctgaatcaatcgggtgttggagcattcatggagccagcaatggctaaagaagaggctaagaagcaggaggcgaggcgagtaaaggaacgtatgactttaaagcacaaaaacacaggacaatgggccaaacgcatgctaagccgtggactgaataggaaatacgatgtgactcaggcagctctatctaaacaacttcaaattcatgctactttgtccagaaagatgaactccacaaaagatgaaagtagtagtgatgaggaagatttgaatgatggttcagatcaggatacttctaaactgatagcggaagcaaaggagaagatactgaaaactgtggacgatgatgaagtccccatttctcgtcttatgtcattacctttcatggctcgtgctgtgaaaaagaaaaacgaggaagctaaagaagaaggtaaacgtgatattgaggagttggagaaatttggtggagcagaaacctctaaaaagtccactaatgttgttggtagaagagtatttggtgcagaagctccaaaagagtctgaaaaggaatcagacaacctttttgataacagtgatagtagtgacaatgatatggaagataatgagttagaggctgtaaaagataatgcttcacctgctagaaacactgaaaccattatggaagccgagaagttggatgatattgctggaaacccagcatctaagacaacatttgatgtcgccttatatgcatcaggctcctggaagaagatgacaggctgcaaaaacgcagaatccaaaaaagcttcaaagacgcatgtgcccatttcgcagtcccaagataaaaaggaatcgagtgattcagaaagtgatgattcagaaagtgatgattcagagagtgaagcagagcaaatggttgatgggattttgacatgcggttcaaaggaaacgtatgaaattccttgtcaagcagagcttgtaagccgtgcttttgctggtgatgacgttgaaggtgactttgagaaggataagcaagaggtactaaatcaggaagttcctgaacccgagaaaccggttcaagttgctggttggggacattggaccaataaccaaaacaagagaggtttaccatcaaggattgttagagaacacgaagaagccaagaaaacgagagagcaagctctcagaaaaaggaaagacgcttctttcaaacatgttatcatatcagaaaaagttgataaaaaggctgagaaacttcagacaaagagtctaccttacccttacacatcaaaggaagttttcgaacaaagtatgcgtatgcctataggacctgagtttaatcccacaactattgttggagttctaaaccgacctgaggttgtgaagaaagctggagtgatcattaaacctgtcaagtttgaggaagtaaatccgaatgacgaacaccctcgtagccatcagaaacaaaaacccaagaaaaaaggtgctcttcaaatccttgttcatcaccatttcttccactaa

SEQ ID NO: 88313 - protein, 832 aa, Arabidopsis thaliana
  peptide (1)..(832): Ceres Seq. ID no. 12707550
MGGGEKRKSSFKNLANAKKRRTGPHLPSSILKTIANEKRPLNSDEGDDEIDSAYGDFYEYEEGVPEEESRKNNRYERVVNYEFELAEDCEDENVESEDDDDDDDDDDDDRHSRMLKNVTELPISAFQGESKNKRVVFTEPYPESEFNPTRDVLEGKSLTTIDDFMEPLQGLHGNSQLSNMISRMRKDTQSLVHAPLPKPEQERLERDVANELVYKGFDIWVPLVKRNREAPTIYFNQDVNVGYSTVGAIASQFHPRTEFEMKMASLLDDHEILEAHKEDGARLLEFNEVSMEDHIKRRNHVAKMRSMLFRVDLKHKRIKQIKSKTYHRLKNKDLNQSGVGAFMEPAMAKEEAKKQEARRVKERMTLKHKNTGQWAKRMLSRGLNRKYDVTQAALSKQLQIHATLSRKMNSTKDESSSDEEDLNDGSDQDTSKLIAEAKEKILKTVDDDEVPISRLMSLPFMARAVKKKNEEAKEEGKRDIEELEKFGGAETSKKSTNVVGRRVFGAEAPKESEKESDNLFDNSDSSDNDMEDNELEAVKDNASPARNTETIMEAEKLDDIAGNPASKTTFDVALYASGSWKKMTGCKNAESKKASKTHVPISQSQDKKESSDSESDDSESDDSESEAEQMVDGILTCGSKETYEIPCQAELVSRAFAGDDVEGDFEKDKQEVLNQEVPEPEKPVQVAGWGHWTNNQNKRGLPSRIVREHEEAKKTREQALRKRKDASFKHVIISEKVDKKAEKLQTKSLPYPYTSKEVFEQSMRMPIGPEFNPTTIVGVLNRPEVVKKAGVIIKPVKFEEVNPNDEHPRSHQKQKPKKKGALQILVHHHFFH

SEQ ID NO: 88314 - protein, 719 aa, Arabidopsis thaliana
  peptide (1)..(719): Ceres Seq. ID no. 12707551
MLKNVTELPISAFQGESKNKRVVFTEPYPESEFNPTRDVLEGKSLTTIDDFMEPLQGLHGNSQLSNMISRMRKDTQSLVHAPLPKPEQERLERDVANELVYKGFDIWVPLVKRNREAPTIYFNQDVNVGYSTVGAIASQFHPRTEFEMKMASLLDDHEILEAHKEDGARLLEFNEVSMEDHIKRRNHVAKMRSMLFRVDLKHKRIKQIKSKTYHRLKNKDLNQSGVGAFMEPAMAKEEAKKQEARRVKERMTLKHKNTGQWAKRMLSRGLNRKYDVTQAALSKQLQIHATLSRKMNSTKDESSSDEEDLNDGSDQDTSKLIAEAKEKILKTVDDDEVPISRLMSLPFMARAVKKKNEEAKEEGKRDIEELEKFGGAETSKKSTNVVGRRVFGAEAPKESEKESDNLFDNSDSSDNDMEDNELEAVKDNASPARNTETIMEAEKLDDIAGNPASKTTFDVALYASGSWKKMTGCKNAESKKASKTHVPISQSQDKKESSDSESDDSESDDSESEAEQMVDGILTCGSKETYEIPCQAELVSRAFAGDDVEGDFEKDKQEVLNQEVPEPEKPVQVAGWGHWTNNQNKRGLPSRIVREHEEAKKTREQALRKRKDASFKHVIISEKVDKKAEKLQTKSLPYPYTSKEVFEQSMRMPIGPEFNPTTIVGVLNRPEVVKKAGVIIKPVKFEEVNPNDEHPRSHQKQKPKKKGALQILVHHHFFH

SEQ ID NO: 88315 - protein, 668 aa, Arabidopsis thaliana
  peptide (1)..(668): Ceres Seq. ID no. 12707552
MEPLQGLHGNSQLSNMISRMRKDTQSLVHAPLPKPEQERLERDVANELVYKGFDIWVPLVKRNREAPTIYFNQDVNVGYSTVGAIASQFHPRTEFEMKMASLLDDHEILEAHKEDGARLLEFNEVSMEDHIKRRNHVAKMRSMLFRVDLKHKRIKQIKSKTYHRLKNKDLNQSGVGAFMEPAMAKEEAKKQEARRVKERMTLKHKNTGQWAKRMLSRGLNRKYDVTQAALSKQLQIHATLSRKMNSTKDESSSDEEDLNDGSDQDTSKLIAEAKEKILKTVDDDEVPISRLMSLPFMARAVKKKNEEAKEEGKRDIEELEKFGGAETSKKSTNVVGRRVFGAEAPKESEKESDNLFDNSDSSDNDMEDNELEAVKDNASPARNTETIMEAEKLDDIAGNPASKTTFDVALYASGSWKKMTGCKNAESKKASKTHVPISQSQDKKESSDSESDDSESDDSESEAEQMVDGILTCGSKETYEIPCQAELVSRAFAGDDVEGDFEKDKQEVLNQEVPEPEKPVQVAGWGHWTNNQNKRGLPSRIVREHEEAKKTREQALRKRKDASFKHVIISEKVDKKAEKLQTKSLPYPYTSKEVFEQSMRMPIGPEFNPTTIVGVLNRPEVVKKAGVIIKPVKFEEVNPNDEHPRSHQKQKPKKKGALQILVHHHFFH

SEQ ID NO: 88316 - DNA, 1965 bp, Arabidopsis thaliana
  misc_feature (1)..(1965): Ceres Seq. ID no. 12707561
  misc_feature (1)..(1965): Ortholog of  Ceres SEQ ID NO 15176685 as cited in SEQ ID NO 58334
atggggagtttttgctccaagagccttggaatcaattttggcagcgagtattctggttctagtgtggctgatgatggtcgagaacctgattttggccactcacaaccaaatgggcaaaccagtttgattgttcctggtatgaggcagcttatggttaaagacgtcaaggaacaaaatcaattaaaagatgttttctctttccgcgaaagggaagctgaagataatttctatgatggaattccgacgtatactatggctccatcacagaaaattcggtctgcaaaatcaactcaaaccgctgtttcaaaggttacagaggcaagtaagcttttaggcaaagcggggttaggtagagcaaaagatgttttggatacccttggaagtagcatgacagatcttagtagcggtggatttacttctggagttgcaactaaaggcaatgaacttgggatcttagcttttgaagtagcaaacacaattgtcaaaagctcaaatctcattgaatccctttctaagaggaacatcgagcatttaaaaggaactatcctttattctgagggtgttcaaaacctagtctcgaatgatttcgatgaactactcagacttgttgcagctgataagaggcaggagctgcaagttttctcgggggaagtggttcggtttggaaaccgatccaaagattttcagtggcataatttacagcgctatttcgataggatcagcaaagaattaacccctcaaaggcagttaaaggaagacgcggtgttggttgttgaccaactgatggttctagtgcagtatactgctgaactataccaagaactccaagtattgtatcgattggagaaagactatgagcaaaagcgtcgagaagaagagaactcagctaatagcagtaagggtgatggccttgcaatcttaaaaacggaacttaaagcccagagaaaggtagtgaaaagcttaaagaaaaagtcgttgtggtccagaggttttgaagaggtgatggagaaactagtagacattgtacatttcttgttgctagagattcataatatcttcggtggtgccgatgatcaaccatcgaagaaaggagctgcagaatatgataaaagattgggacctgctggtcttgctttacattatgcaaatataattgtgcagattgacacacttgtcgctcgtgcaagctctataacttcaaatgcaagggattctctttaccaaagcttaccacctggtataaaattggctcttcgttccaagattaaatctttcaatgtcgataaggagctttcggttacacaaattaaggatgagatggagaggacactgcattggcttgtccctgttgcaggcaatacaacaaaagcgcatcatggttttggctgggttggagagtgggcaaatacagggactgatttcactagtaagcctagtggtggagatatactacgtattgaaacactctatcacgctagtaaagaaaagacagagatctacattcttggacagataatttggttacaacatttggttacaaaagctaagagcgacgctcgaggaggtcctagactttcttctatcaagtctccattggatactacgaaccagcaattgatatctgaaccactcagtgtcccaatagtaacagatgaggagcaaaagatgttacaagaggcaagcaagagaaagagaactccatgtgttagcaagagtcaggattttgattctgagtactcgcgggcaagaaagtgtgaccctttgagcaaaagcagtgagtattttcgtggagtgagaagaagcaaatcagctgcagtaaagcggtattcttcgggttttccgcttcttgactttgctattgacaaggaaaaagtgttggatgtgatcgatcgggttgatgtgccaagagattataaagcattgttaaaagaaggcatgggatgttatactgcttgcgatgggtaa

SEQ ID NO: 88317 - protein, 654 aa, Arabidopsis thaliana
  peptide (1)..(654): Ceres Seq. ID no. 12707562
MGSFCSKSLGINFGSEYSGSSVADDGREPDFGHSQPNGQTSLIVPGMRQLMVKDVKEQNQLKDVFSFREREAEDNFYDGIPTYTMAPSQKIRSAKSTQTAVSKVTEASKLLGKAGLGRAKDVLDTLGSSMTDLSSGGFTSGVATKGNELGILAFEVANTIVKSSNLIESLSKRNIEHLKGTILYSEGVQNLVSNDFDELLRLVAADKRQELQVFSGEVVRFGNRSKDFQWHNLQRYFDRISKELTPQRQLKEDAVLVVDQLMVLVQYTAELYQELQVLYRLEKDYEQKRREEENSANSSKGDGLAILKTELKAQRKVVKSLKKKSLWSRGFEEVMEKLVDIVHFLLLEIHNIFGGADDQPSKKGAAEYDKRLGPAGLALHYANIIVQIDTLVARASSITSNARDSLYQSLPPGIKLALRSKIKSFNVDKELSVTQIKDEMERTLHWLVPVAGNTTKAHHGFGWVGEWANTGTDFTSKPSGGDILRIETLYHASKEKTEIYILGQIIWLQHLVTKAKSDARGGPRLSSIKSPLDTTNQQLISEPLSVPIVTDEEQKMLQEASKRKRTPCVSKSQDFDSEYSRARKCDPLSKSSEYFRGVRRSKSAAVKRYSSGFPLLDFAIDKEKVLDVIDRVDVPRDYKALLKEGMGCYTACDG

SEQ ID NO: 88318 - protein, 608 aa, Arabidopsis thaliana
  peptide (1)..(608): Ceres Seq. ID no. 12707563
MRQLMVKDVKEQNQLKDVFSFREREAEDNFYDGIPTYTMAPSQKIRSAKSTQTAVSKVTEASKLLGKAGLGRAKDVLDTLGSSMTDLSSGGFTSGVATKGNELGILAFEVANTIVKSSNLIESLSKRNIEHLKGTILYSEGVQNLVSNDFDELLRLVAADKRQELQVFSGEVVRFGNRSKDFQWHNLQRYFDRISKELTPQRQLKEDAVLVVDQLMVLVQYTAELYQELQVLYRLEKDYEQKRREEENSANSSKGDGLAILKTELKAQRKVVKSLKKKSLWSRGFEEVMEKLVDIVHFLLLEIHNIFGGADDQPSKKGAAEYDKRLGPAGLALHYANIIVQIDTLVARASSITSNARDSLYQSLPPGIKLALRSKIKSFNVDKELSVTQIKDEMERTLHWLVPVAGNTTKAHHGFGWVGEWANTGTDFTSKPSGGDILRIETLYHASKEKTEIYILGQIIWLQHLVTKAKSDARGGPRLSSIKSPLDTTNQQLISEPLSVPIVTDEEQKMLQEASKRKRTPCVSKSQDFDSEYSRARKCDPLSKSSEYFRGVRRSKSAAVKRYSSGFPLLDFAIDKEKVLDVIDRVDVPRDYKALLKEGMGCYTACDG

SEQ ID NO: 88319 - protein, 604 aa, Arabidopsis thaliana
  peptide (1)..(604): Ceres Seq. ID no. 12707564
MVKDVKEQNQLKDVFSFREREAEDNFYDGIPTYTMAPSQKIRSAKSTQTAVSKVTEASKLLGKAGLGRAKDVLDTLGSSMTDLSSGGFTSGVATKGNELGILAFEVANTIVKSSNLIESLSKRNIEHLKGTILYSEGVQNLVSNDFDELLRLVAADKRQELQVFSGEVVRFGNRSKDFQWHNLQRYFDRISKELTPQRQLKEDAVLVVDQLMVLVQYTAELYQELQVLYRLEKDYEQKRREEENSANSSKGDGLAILKTELKAQRKVVKSLKKKSLWSRGFEEVMEKLVDIVHFLLLEIHNIFGGADDQPSKKGAAEYDKRLGPAGLALHYANIIVQIDTLVARASSITSNARDSLYQSLPPGIKLALRSKIKSFNVDKELSVTQIKDEMERTLHWLVPVAGNTTKAHHGFGWVGEWANTGTDFTSKPSGGDILRIETLYHASKEKTEIYILGQIIWLQHLVTKAKSDARGGPRLSSIKSPLDTTNQQLISEPLSVPIVTDEEQKMLQEASKRKRTPCVSKSQDFDSEYSRARKCDPLSKSSEYFRGVRRSKSAAVKRYSSGFPLLDFAIDKEKVLDVIDRVDVPRDYKALLKEGMGCYTACDG

SEQ ID NO: 88320 - DNA, 1334 bp, Arabidopsis thaliana
  misc_feature (1)..(1334): Ceres Seq. ID no. 12707565
  misc_feature (1)..(1334): Ortholog of  Ceres SEQ ID NO 12636774 as cited in SEQ ID NO 372
  misc_feature (1)..(1334): Ortholog of  Ceres SEQ ID NO 13582350 as cited in SEQ ID NO 56734
  misc_feature (1)..(1334): Ortholog of  Ceres SEQ ID NO 12476493 as cited in SEQ ID NO 58163
  misc_feature (1)..(1334): Ortholog of  Ceres SEQ ID NO 12578315 as cited in SEQ ID NO 62451
  misc_feature (1)..(1334): Ortholog of  Ceres SEQ ID NO 12615466 as cited in SEQ ID NO 62761
  misc_feature (1)..(1334): Ortholog of  Ceres SEQ ID NO 13597295 as cited in SEQ ID NO 63743
  misc_feature (1)..(1334): Ortholog of  Ceres SEQ ID NO 12617090 as cited in SEQ ID NO 64005
  misc_feature (1)..(1334): Ortholog of  Ceres SEQ ID NO 15226458 as cited in SEQ ID NO 64042
  misc_feature (1)..(1334): Ortholog of  Ceres SEQ ID NO 13597439 as cited in SEQ ID NO 64081
  misc_feature (1)..(1334): Ortholog of  Ceres SEQ ID NO 13597233 as cited in SEQ ID NO 64370
  misc_feature (1)..(1334): Ortholog of  Ceres SEQ ID NO 13598327 as cited in SEQ ID NO 68040
  misc_feature (1)..(1334): Ortholog of  Ceres SEQ ID NO 13599438 as cited in SEQ ID NO 0
aaattacatatccgccattgtttccggcaacgcaaactaccaaaaaaaataatggaggtcgaaagagtccaagacatttcatcttcttctctactaacagaagcaatcccgttggagttcatcagatcagagaaagaacaaccagcgatcacaacattccgaggtccaacgccggcgattcccgtcgtcgatctaagcgatcccgacgaagaaagcgtgaggcgcgcggtggtgaaagcgagtgaagaatgggggctattccaagtggttaaccacgggattccgacggagctgatacgacgtttacaagacgtcggaagaaaattcttcgagcttccttcgtcggagaaagaatccgtcgctaaaccggaagattcgaaagacattgaaggatacggaacaaagcttcagaaagatccagaaggtaaaaaagcttgggtcgatcatctcttccatcgaatctggccaccgtcatgcgtcaattacagattctggcctaagaatccacctgaatacagggaggtgaatgaagagtatgcagtgcatgtgaagaagctatcggagacgttattagggattctctcggatggattagggttaaagcgtgatgcgttgaaagaaggtctcggcggagagatggcggagtatatgatgaagattaactattatccgccgtgtcctcggccggatttagctttaggtgtaccggctcatacagatctcagtggaatcactcttcttgttcctaacgaagttcctggacttcaagttttcaaagatgatcactggttcgatgcagagtatattccctccgccgtcattgttcacatcggcgatcagattctgaggttgagtaatgggaggtataaaaatgtgttgcataggacgacggtggataaagagaagacgaggatgtcgtggccggttttcttggagcctccccgtgaaaagattgttggacctttaccggaactaaccggagatgataatcctccaaagtttaaaccgtttgctttcaaggattacagttaccgcaagctcaataaacttcctctggattgagaaaaatcaatacgagaagaataatttgtggttgtggaataggaagtggttcgttattgagttgttgttttcccgcggttgtgtctcttgcttattgttattttatgtttaaaataaagattaaaacatctacctacattgtgtgtgatgttgacatgtttttattgtgttgcgatgcctttgcaagttatgtcggaccatttttaggcattggaaagagtaggtttgtattttgtaaatttttaacctgtcacggaaaaaaatcggtgatc

SEQ ID NO: 88321 - protein, 353 aa, Arabidopsis thaliana; identical to SEQ ID NO: 35579
  peptide (1)..(353): Ceres Seq. ID no. 12707566

SEQ ID NO: 88322 - protein, 336 aa, Arabidopsis thaliana; identical to SEQ ID NO: 35580
  peptide (1)..(336): Ceres Seq. ID no. 12707567

SEQ ID NO: 88323 - DNA, 1359 bp, Arabidopsis thaliana
  misc_feature (1)..(1359): Ceres Seq. ID no. 12707680
  misc_feature (1)..(1359): Ortholog of  Ceres SEQ ID NO 14310235 as cited in SEQ ID NO 20678
atgccgcaagttaagatcattgctaaaaatttcatggacatggtggcgtcacttccagccatcaagcttgacaaactctacaacaatgtctttatctgcgaagccattctcaggtctttgccgcctcttgccaagaagtatgtattgcagatgttgtacattgatgttcctgtacctgctacgatgatggaggagtgggtgctcgcagatggcacctctaaacatagagttgctattgatcgactgattcaattaaggattttttcagaaattagtgataggaaaaggggaaccagctacagcctaaatcctacatttcagaacaatcttcagaaacatattatttccggtggagttttgcctagagagcctatgaactccgacaatgccattaaacttccaagcctacaagaactcgaaacctatgcacttaagcaatgggagtgtttcttgctacaacttataaattcgggtcaaggtgaaaaactaactggcatcagttcatccatgatgaaaatttttcagcgaggtttattgagtcagagagacaaagatggcccgagattaactgagagtggctttcagtttttgctgatggatacaaatgcccagctttggtacattattcgagaatacatattgaatgccgaggagcgagatgtagatccagcagacttgatttcgtttttgttggagcttagttttcatgttactggtcaggcatataacttaaataccttgacagaggttcaaaacaataccctcaaggaccttgcagacttgggattagtcaagcttcaacagggaaggaaagacagttggtttattcctactaaactggctacaaatttatcagtcagtctggcagattcatcagcgcgaaaagagggatttgtcgtgatggaaacaaacttcagaatgtatgcgtactccacatctaagttacagtgtgaaattttacgactatttgcgaggatagagtaccaacttccaaaccttattgcttgtgccattacaaaggaaagtttgtacaatgcatttgacaatggcatcacatcagatcagattataactttcctccagcagaattctcatccacgatgtgctgatcgagtcccatctattccagaaaatgtcactgatcagattcggctttgggagacagatctgcagagaattgagatgacccaggctcacttctatgatgaatttccttcaaaagatgtgtttgaggcagcttgtgactttgctcgggaatggagaggccttctttgggaagactctaagagaatgcgacttgttgtgaaatccgaagttcacaatcagatgcgtgagtttcttcatacccaaagcaggtaa

SEQ ID NO: 88324 - protein, 452 aa, Arabidopsis thaliana
  peptide (1)..(452): Ceres Seq. ID no. 12707681
MPQVKIIAKNFMDMVASLPAIKLDKLYNNVFICEAILRSLPPLAKKYVLQMLYIDVPVPATMMEEWVLADGTSKHRVAIDRLIQLRIFSEISDRKRGTSYSLNPTFQNNLQKHIISGGVLPREPMNSDNAIKLPSLQELETYALKQWECFLLQLINSGQGEKLTGISSSMMKIFQRGLLSQRDKDGPRLTESGFQFLLMDTNAQLWYIIREYILNAEERDVDPADLISFLLELSFHVTGQAYNLNTLTEVQNNTLKDLADLGLVKLQQGRKDSWFIPTKLATNLSVSLADSSARKEGFVVMETNFRMYAYSTSKLQCEILRLFARIEYQLPNLIACAITKESLYNAFDNGITSDQIITFLQQNSHPRCADRVPSIPENVTDQIRLWETDLQRIEMTQAHFYDEFPSKDVFEAACDFAREWRGLLWEDSKRMRLVVKSEVHNQMREFLHTQSR

SEQ ID NO: 88325 - protein, 441 aa, Arabidopsis thaliana
  peptide (1)..(441): Ceres Seq. ID no. 12707682
MDMVASLPAIKLDKLYNNVFICEAILRSLPPLAKKYVLQMLYIDVPVPATMMEEWVLADGTSKHRVAIDRLIQLRIFSEISDRKRGTSYSLNPTFQNNLQKHIISGGVLPREPMNSDNAIKLPSLQELETYALKQWECFLLQLINSGQGEKLTGISSSMMKIFQRGLLSQRDKDGPRLTESGFQFLLMDTNAQLWYIIREYILNAEERDVDPADLISFLLELSFHVTGQAYNLNTLTEVQNNTLKDLADLGLVKLQQGRKDSWFIPTKLATNLSVSLADSSARKEGFVVMETNFRMYAYSTSKLQCEILRLFARIEYQLPNLIACAITKESLYNAFDNGITSDQIITFLQQNSHPRCADRVPSIPENVTDQIRLWETDLQRIEMTQAHFYDEFPSKDVFEAACDFAREWRGLLWEDSKRMRLVVKSEVHNQMREFLHTQSR

SEQ ID NO: 88326 - protein, 439 aa, Arabidopsis thaliana
  peptide (1)..(439): Ceres Seq. ID no. 12707683
MVASLPAIKLDKLYNNVFICEAILRSLPPLAKKYVLQMLYIDVPVPATMMEEWVLADGTSKHRVAIDRLIQLRIFSEISDRKRGTSYSLNPTFQNNLQKHIISGGVLPREPMNSDNAIKLPSLQELETYALKQWECFLLQLINSGQGEKLTGISSSMMKIFQRGLLSQRDKDGPRLTESGFQFLLMDTNAQLWYIIREYILNAEERDVDPADLISFLLELSFHVTGQAYNLNTLTEVQNNTLKDLADLGLVKLQQGRKDSWFIPTKLATNLSVSLADSSARKEGFVVMETNFRMYAYSTSKLQCEILRLFARIEYQLPNLIACAITKESLYNAFDNGITSDQIITFLQQNSHPRCADRVPSIPENVTDQIRLWETDLQRIEMTQAHFYDEFPSKDVFEAACDFAREWRGLLWEDSKRMRLVVKSEVHNQMREFLHTQSR

SEQ ID NO: 88327 - DNA, 753 bp, Arabidopsis thaliana
  misc_feature (1)..(753): Ceres Seq. ID no. 12707684
  misc_feature (1)..(753): Ortholog of  Ceres SEQ ID NO 13598319 as cited in SEQ ID NO 68758
  misc_feature (1)..(753): Ortholog of  Ceres SEQ ID NO 15226238 as cited in SEQ ID NO 68840
  misc_feature (1)..(753): Ortholog of  Ceres SEQ ID NO 12635175 as cited in SEQ ID NO 0
atgaagcattctcacgttttgcttcttctatttgttcaagtcattgtccttttgcctctcctttgtctatccgacgattttgttaactctagagctacttattatggcagccccgattgcaaagcaaatcctcggggacattgtgggtatggagaatttggaagagatatcaataacggtgaagtgagtggtgtttcatggcgactatggaacaatggaactggctgtggtgcttgttaccaggtgaggtgcaagataccaccacactgcagtgaggaaggagtatacgtagtggctacggactccggagaaggagatggcacggacttcatcttaagccctaaggcgtacggacgtatggcgcgacccggcacagaaaatcagctctactccttcggtgtagtcaacgttgagtaccaaaggatcccttgccgatacgcagggtataatctggtgtataagatccatgagaaaagctacaatcctcattatcttgccatccttgtcttgtacgttggtggtgttaatgacatcctcgccgttgaagtctggcaggaggattgcaaagagtggagacgtatgagaagagtgtttggagcggttcatgatttgcagaatccacctagaggcactctcacattgaggttcttagtctacggaagcgcaggaatcaattggatccaatcgccaaacgctattcccgctgattggactgccggagccacctacgactccaacattctacttacttaa

SEQ ID NO: 88328 - protein, 250 aa, Arabidopsis thaliana
  peptide (1)..(250): Ceres Seq. ID no. 12707685
MKHSHVLLLLFVQVIVLLPLLCLSDDFVNSRATYYGSPDCKANPRGHCGYGEFGRDINNGEVSGVSWRLWNNGTGCGACYQVRCKIPPHCSEEGVYVVATDSGEGDGTDFILSPKAYGRMARPGTENQLYSFGVVNVEYQRIPCRYAGYNLVYKIHEKSYNPHYLAILVLYVGGVNDILAVEVWQEDCKEWRRMRRVFGAVHDLQNPPRGTLTLRFLVYGSAGINWIQSPNAIPADWTAGATYDSNILLT

SEQ ID NO: 88329 - protein, 131 aa, Arabidopsis thaliana
  peptide (1)..(131): Ceres Seq. ID no. 12707686
MARPGTENQLYSFGVVNVEYQRIPCRYAGYNLVYKIHEKSYNPHYLAILVLYVGGVNDILAVEVWQEDCKEWRRMRRVFGAVHDLQNPPRGTLTLRFLVYGSAGINWIQSPNAIPADWTAGATYDSNILLT

SEQ ID NO: 88330 - DNA, 1236 bp, Arabidopsis thaliana
  misc_feature (1)..(1236): Ceres Seq. ID no. 12707687
  misc_feature (1)..(1236): Ortholog of  Ceres SEQ ID NO 14303542 as cited in SEQ ID NO 63539
  misc_feature (1)..(1236): Ortholog of  Ceres SEQ ID NO 13597333 as cited in SEQ ID NO 63974
  misc_feature (1)..(1236): Ortholog of  Ceres SEQ ID NO 12407937 as cited in SEQ ID NO 0
agatcgttatcgtttcggggtcacagggactttcactctttctctctctctgcaacaaagaagaaatggaggtagcagcagcgactgcgacgagcttcacaacgcttcgagctcgtacgtcagcgattatcccgtcttctacacgtaatctgagatctaaaccgagattttcttcatcttcatctctcagagcttctctttcgaatggctttctttcgccgtataccggaggaagcatctctagtgacttatgcggcgctaagcttcgtgcggaatcgcttaatccgttaaatttttccagttccaagcctaaacgcggagttgtcactatggttatacctttctcaaagggaagtgcacacgaacaacctcctcctgatttggcatcatatttgttcaagaaccgaattgtatatttgggaatgtctctcgtaccttcagttactgagttgatacttgcggagtttctttaccttcagtatgaagacgaggaaaagcctatttacctttacataaactcgactgggacaaccaagaatggtgaaaagttgggctatgatactgaggcttttgcaatctatgatgtcatggggtatgtcaaaccaccaatctttactctttgcgtcgggaatgcttggggtgaagctgctttgcttctgactgctggtgcaaaaggaaatcgatctgcgttgccctcatcaactattatgataaagcagcccattgctcgatttcaaggccaagcaactgatgttgaaattgcaaggaaagaaatcaagcacataaagacagaaatggtcaagctgtattcaaagcatattggtaaatccccggagcagattgaagctgacatgaaacgcccgaaatattttagtcccactgaggctgttgaatatgggatcattgataaggtggtttacaatgaaaggggcagccaagacagaggagttgtgtctgaccttaaaaaggcacaactcatttgaatgtcagaactgtcttccgaaatcccatgattaacaggttggagatcttaccgctgatcaaatggggaatcagtgaaccattcaccggcacagaactgaggtaaagtctggaaaacatgttaaaaaaggttactagtaatgctgcaattgtagggttatttgaacagaaacaaacccatatgtgtaggcttgtgaatgcctagaaacaggattggtgtatcttcaatatatgtttctaagatgaatcaatttc

SEQ ID NO: 88331 - protein, 326 aa, Arabidopsis thaliana
  peptide (1)..(326): Ceres Seq. ID no. 12707688
IVIVSGSQGLSLFLSLCNKEEMEVAAATATSFTTLRARTSAIIPSSTRNLRSKPRFSSSSSLRASLSNGFLSPYTGGSISSDLCGAKLRAESLNPLNFSSSKPKRGVVTMVIPFSKGSAHEQPPPDLASYLFKNRIVYLGMSLVPSVTELILAEFLYLQYEDEEKPIYLYINSTGTTKNGEKLGYDTEAFAIYDVMGYVKPPIFTLCVGNAWGEAALLLTAGAKGNRSALPSSTIMIKQPIARFQGQATDVEIARKEIKHIKTEMVKLYSKHIGKSPEQIEADMKRPKYFSPTEAVEYGIIDKVVYNERGSQDRGVVSDLKKAQLI

SEQ ID NO: 88332 - protein, 305 aa, Arabidopsis thaliana
  peptide (1)..(305): Ceres Seq. ID no. 12707689
MEVAAATATSFTTLRARTSAIIPSSTRNLRSKPRFSSSSSLRASLSNGFLSPYTGGSISSDLCGAKLRAESLNPLNFSSSKPKRGVVTMVIPFSKGSAHEQPPPDLASYLFKNRIVYLGMSLVPSVTELILAEFLYLQYEDEEKPIYLYINSTGTTKNGEKLGYDTEAFAIYDVMGYVKPPIFTLCVGNAWGEAALLLTAGAKGNRSALPSSTIMIKQPIARFQGQATDVEIARKEIKHIKTEMVKLYSKHIGKSPEQIEADMKRPKYFSPTEAVEYGIIDKVVYNERGSQDRGVVSDLKKAQLI

SEQ ID NO: 88333 - protein, 217 aa, Arabidopsis thaliana
  peptide (1)..(217): Ceres Seq. ID no. 12707690
MVIPFSKGSAHEQPPPDLASYLFKNRIVYLGMSLVPSVTELILAEFLYLQYEDEEKPIYLYINSTGTTKNGEKLGYDTEAFAIYDVMGYVKPPIFTLCVGNAWGEAALLLTAGAKGNRSALPSSTIMIKQPIARFQGQATDVEIARKEIKHIKTEMVKLYSKHIGKSPEQIEADMKRPKYFSPTEAVEYGIIDKVVYNERGSQDRGVVSDLKKAQLI

SEQ ID NO: 88334 - DNA, 1506 bp, Arabidopsis thaliana
  misc_feature (1)..(1506): Ceres Seq. ID no. 12707699
  misc_feature (1)..(1506): Ortholog of  Ceres SEQ ID NO 14314220 as cited in SEQ ID NO 57321
atgcatctgaagaattctactgtagcagaacggcggtacatcggaaaagaaaccgccggttatttaacttcttcctccgatttggatccgaaacctaagattaaacatcatcgtcctcttcaggtacctgagattttgactccagacattggtgctggtgctggattcagtgtgtataataatcaagttcaagctcagagtcgtcatcatctgacggttgaaatcccagattcatcgtctcacaatcttacatctaagagacctgtggtggttcaatcttctaatccgttcaacgttgacgatttccgaagacaacaacgcgcaagcttgggtccgatttcatcttattgtccgtcgtatcttttatcgtggttttcttcttctcttccatcgatccatcgagtccgtttgatatgtttccatcttcgtttcttacttcttctctctgttcctcctctctacatcttcttcttgttgattagtttcagattcttccttctctttgtcttctcgattatcgctttttctttcgtcctttcgatctctctcaaattcgctcttcctcacttaccatcgattcgtttgattatcgctcggttactttctctcaagcttacccctaccagatcatcctcttcatctcaggagaacactaaacatgttatttggtcaattgggtctaagcctgtgactgagaagaagaccagctctggctcatgggttcagaagtacagctctggtgatgtatacgagggagagtttcatagggggaagtgttcaggaagtggagtttattactattctatgaagggtaaatacgaaggggattggattgatgggaagtatgatggatatggagttgaaacttgggctaaagggagtaggtaccgaggtcaatacaggcaagggatgagacatggaactggtatctacagattttatacaggggatgtatatgctggtgagtggtctaatggacagagccatggctgtggtgtgtatacctctgaggatggtagtcgttttgttggagagtttaaatggggtgtcaaacatggccttggtcattatcatttcagaaatggtgatacatatgctggggagtattttgcagacaggatgcatggttttggagtgtatcaatttggaaacgggcatcggtatgaaggagcctggcatgaggggagaaggcaaggacttggtatgtacacgttcaggaatggtgagacacaggcaggccattgggaagacggagttcttaactgtcctaccgagcagaccactcgccctgattcatcgttttccatcagtcattccaaggttgtcgacactgtccagcaagcaaggaaagcagccaagaaagcacgcgaagttgtgaaagttgaagagagagtgaacagagcagtgatggtcgcaaaccgagcagcaaatgctgctagagttgctgctacaaaggctgtccaaacccaaacatttcattgtagtagtggtgacgatcccttgtga

SEQ ID NO: 88335 - protein, 501 aa, Arabidopsis thaliana
  peptide (1)..(501): Ceres Seq. ID no. 12707700
MHLKNSTVAERRYIGKETAGYLTSSSDLDPKPKIKHHRPLQVPEILTPDIGAGAGFSVYNNQVQAQSRHHLTVEIPDSSSHNLTSKRPVVVQSSNPFNVDDFRRQQRASLGPISSYCPSYLLSWFSSSLPSIHRVRLICFHLRFLLLLSVPPLYIFFLLISFRFFLLFVFSIIAFSFVLSISLKFALPHLPSIRLIIARLLSLKLTPTRSSSSSQENTKHVIWSIGSKPVTEKKTSSGSWVQKYSSGDVYEGEFHRGKCSGSGVYYYSMKGKYEGDWIDGKYDGYGVETWAKGSRYRGQYRQGMRHGTGIYRFYTGDVYAGEWSNGQSHGCGVYTSEDGSRFVGEFKWGVKHGLGHYHFRNGDTYAGEYFADRMHGFGVYQFGNGHRYEGAWHEGRRQGLGMYTFRNGETQAGHWEDGVLNCPTEQTTRPDSSFSISHSKVVDTVQQARKAAKKAREVVKVEERVNRAVMVANRAANAARVAATKAVQTQTFHCSSGDDPL

SEQ ID NO: 88336 - DNA, 960 bp, Arabidopsis thaliana
  misc_feature (1)..(960): Ceres Seq. ID no. 12707701
  misc_feature (1)..(960): Ortholog of  Ceres SEQ ID NO 14311287 as cited in SEQ ID NO 53177
atggttgggaaactgtgggcaaaaagaaacctgcaaggcaatcacataaggaaggagcaatggcaagattacaaacgcccagcaagtgaacaacactactcagacgaagttgaaacttatggaaacctagaaccctcacaactagagctctcaggtctctcagaagcttgcaacaaactgtgggagctcgatttaaaccgccttgattatcaaatcgactgcggagatgggaaaagggtccatgagagagctgatatggctgaaggactactgttctcttgggtgagcgaggaagtctctagaaaaccgactttcgccagattctgttcattgcttgacaactacaaccccaacgaaggttacaaagaagtggtcacagaagaagagaggcaagagcaagcggctttcattgaagaaattagcagaacctctgtgatcaagtaccttcacaggtaccttgtgctcaaggacgtcgctcctggaagctacttagagttcaagagaatgttgacaagtctctggttcgatctgtatggccgcggaggtacatctggctcatcttctgcgtttgagcatgtctttttttacttggaggaagccaaaggaactgtagattatcaaggctatatatttccccgacgtcgcggtgaaattcctgattcagagactcagctgctaacaatccaattcgagtggaacggtgttctaaaatcagtctcaagtactctagttggagtaagtccagagttcgagttggctctatacaccatgtgtttcttcatgggcacagaagataaccacattcagttgggtccatacaatgtcaatgtcaaatgttaccgacttggcaacaaccgtatcgcgctcagctttccccattgcagaatcttgaaacctctcttgatggctctggtcacaaaatatctgccccttgcgcagtactgtattgaattattgtga

SEQ ID NO: 88337 - protein, 319 aa, Arabidopsis thaliana
  peptide (1)..(319): Ceres Seq. ID no. 12707702
MVGKLWAKRNLQGNHIRKEQWQDYKRPASEQHYSDEVETYGNLEPSQLELSGLSEACNKLWELDLNRLDYQIDCGDGKRVHERADMAEGLLFSWVSEEVSRKPTFARFCSLLDNYNPNEGYKEVVTEEERQEQAAFIEEISRTSVIKYLHRYLVLKDVAPGSYLEFKRMLTSLWFDLYGRGGTSGSSSAFEHVFFYLEEAKGTVDYQGYIFPRRRGEIPDSETQLLTIQFEWNGVLKSVSSTLVGVSPEFELALYTMCFFMGTEDNHIQLGPYNVNVKCYRLGNNRIALSFPHCRILKPLLMALVTKYLPLAQYCIELL

SEQ ID NO: 88338 - protein, 234 aa, Arabidopsis thaliana
  peptide (1)..(234): Ceres Seq. ID no. 12707703
MAEGLLFSWVSEEVSRKPTFARFCSLLDNYNPNEGYKEVVTEEERQEQAAFIEEISRTSVIKYLHRYLVLKDVAPGSYLEFKRMLTSLWFDLYGRGGTSGSSSAFEHVFFYLEEAKGTVDYQGYIFPRRRGEIPDSETQLLTIQFEWNGVLKSVSSTLVGVSPEFELALYTMCFFMGTEDNHIQLGPYNVNVKCYRLGNNRIALSFPHCRILKPLLMALVTKYLPLAQYCIELL

SEQ ID NO: 88339 - DNA, 1842 bp, Arabidopsis thaliana
  misc_feature (1)..(1842): Ceres Seq. ID no. 12707770
  misc_feature (1)..(1842): Ortholog of  Ceres SEQ ID NO 14311579 as cited in SEQ ID NO 51717
atggagaagtattcccggcggtctattctcctttccacggtggtcgccgccgtgttattctctttaattccggtttcaatctctattcccttcatactctttcacggaattggagataaatgttctggtggagttagtaacttcacgcaactcctaaccaacctctctggctctcctggctattgcttagaaataggaaatggagaaaaggactcatggttcatgccactaagaaagcaaacaagtgtagcgtgtgagaaagtgaaagcgatgaaagtgttaagtcaaggttacaacattgttgcagagtctcaaggaaacttagttgctagaggactaatcgagttctgcgataatgctcctcctgttataaactatatctctttaggaggtcctcatgctggcattgccaaaatccctaagtgtaattctggcccaatatgtgcgataggtgaagctttgttgaagttagaggtctatactgacttcgttcaagatcatattgctcctagtggttatatcaagattcctggtgaaatttcaaagtatttggagcactccaagtatctaccaaagcttaacaatgagagacctgacgaaagaaactctactttcaaagaccgattcactaacttacacaatttagttcttgtcatgttcgagagcgatacaatgttaatccctaaagaaactgcatggtttggttattatgaagatgaaggattcgatacccttttgtcagctcaacagacaaagttgtacagagaagattggattggtctgaaagcattggatgctgccggaaaagtgaagtttgaaagtgtgttaggggaccacctcagtatatcggatgaggaggttgtggaatttgttgtgccttacttaatgcaaaacttttcaatctcggttccattcattctgtttcatgggattagagatcaatgctccaatggtggagtgagcagcttcgtacagctccttagcaacctctctagctcccatggatcttgcttagaaataggaaatggagagcaagattcggtgactatgccgcttacgcaacaagcgagtgtagcgtgtgagaaagttaaacagatgaaggatttgagtcaaggctacaacattgttgcacagtctcaaggaaacttggtagctagaggtctaatcgagttttgtgacaatgctcctccggtcttcaactatatatctttaggaggtcctcatgctggcatatccgacattcccaagtgtaattctacactttgcgagttgctgaaaacagcggtctacaccgacttcgtacaagatcatattgctccaagtggttatatcaagattcctacagatataaaagattacctggaacactccaagtatctgccaaagatcaacaacgagagacctaacgaaaggaacaccacttttaaagaccggttcactagcttgcacaacttggtccttgtcatgtttgagggtgatgcagtagtgattcctaaagaaagttcttggttcggatattacccggatggagcttccacacctcttttgtctcctcaacagacaaagctctatactgaggattggattggtctgaaaacattggatgctgccagaaaagttaagtttgtcagtgtccctggcgagcacctaagaatagcgcaagacgacgttgtaaaacacgtcgtgccttacctcaagaaccagcctgcgtctatgaacaaagctatacagataagagtggataggtctgaaagctggatgctgccggagaagtcaagtttacgagtatctcgggtgagttgtgaaacacgttgtctctacataatgcaagttggtccatga

SEQ ID NO: 88340 - protein, 613 aa, Arabidopsis thaliana
  peptide (1)..(613): Ceres Seq. ID no. 12707771
MEKYSRRSILLSTVVAAVLFSLIPVSISIPFILFHGIGDKCSGGVSNFTQLLTNLSGSPGYCLEIGNGEKDSWFMPLRKQTSVACEKVKAMKVLSQGYNIVAESQGNLVARGLIEFCDNAPPVINYISLGGPHAGIAKIPKCNSGPICAIGEALLKLEVYTDFVQDHIAPSGYIKIPGEISKYLEHSKYLPKLNNERPDERNSTFKDRFTNLHNLVLVMFESDTMLIPKETAWFGYYEDEGFDTLLSAQQTKLYREDWIGLKALDAAGKVKFESVLGDHLSISDEEVVEFVVPYLMQNFSISVPFILFHGIRDQCSNGGVSSFVQLLSNLSSSHGSCLEIGNGEQDSVTMPLTQQASVACEKVKQMKDLSQGYNIVAQSQGNLVARGLIEFCDNAPPVFNYISLGGPHAGISDIPKCNSTLCELLKTAVYTDFVQDHIAPSGYIKIPTDIKDYLEHSKYLPKINNERPNERNTTFKDRFTSLHNLVLVMFEGDAVVIPKESSWFGYYPDGASTPLLSPQQTKLYTEDWIGLKTLDAARKVKFVSVPGEHLRIAQDDVVKHVVPYLKNQPASMNKAIQIRVDRSESWMLPEKSSLRVSRVSCETRCLYIMQVGP

SEQ ID NO: 88341 - protein, 539 aa, Arabidopsis thaliana
  peptide (1)..(539): Ceres Seq. ID no. 12707772
MPLRKQTSVACEKVKAMKVLSQGYNIVAESQGNLVARGLIEFCDNAPPVINYISLGGPHAGIAKIPKCNSGPICAIGEALLKLEVYTDFVQDHIAPSGYIKIPGEISKYLEHSKYLPKLNNERPDERNSTFKDRFTNLHNLVLVMFESDTMLIPKETAWFGYYEDEGFDTLLSAQQTKLYREDWIGLKALDAAGKVKFESVLGDHLSISDEEVVEFVVPYLMQNFSISVPFILFHGIRDQCSNGGVSSFVQLLSNLSSSHGSCLEIGNGEQDSVTMPLTQQASVACEKVKQMKDLSQGYNIVAQSQGNLVARGLIEFCDNAPPVFNYISLGGPHAGISDIPKCNSTLCELLKTAVYTDFVQDHIAPSGYIKIPTDIKDYLEHSKYLPKINNERPNERNTTFKDRFTSLHNLVLVMFEGDAVVIPKESSWFGYYPDGASTPLLSPQQTKLYTEDWIGLKTLDAARKVKFVSVPGEHLRIAQDDVVKHVVPYLKNQPASMNKAIQIRVDRSESWMLPEKSSLRVSRVSCETRCLYIMQVGP

SEQ ID NO: 88342 - protein, 523 aa, Arabidopsis thaliana
  peptide (1)..(523): Ceres Seq. ID no. 12707773
MKVLSQGYNIVAESQGNLVARGLIEFCDNAPPVINYISLGGPHAGIAKIPKCNSGPICAIGEALLKLEVYTDFVQDHIAPSGYIKIPGEISKYLEHSKYLPKLNNERPDERNSTFKDRFTNLHNLVLVMFESDTMLIPKETAWFGYYEDEGFDTLLSAQQTKLYREDWIGLKALDAAGKVKFESVLGDHLSISDEEVVEFVVPYLMQNFSISVPFILFHGIRDQCSNGGVSSFVQLLSNLSSSHGSCLEIGNGEQDSVTMPLTQQASVACEKVKQMKDLSQGYNIVAQSQGNLVARGLIEFCDNAPPVFNYISLGGPHAGISDIPKCNSTLCELLKTAVYTDFVQDHIAPSGYIKIPTDIKDYLEHSKYLPKINNERPNERNTTFKDRFTSLHNLVLVMFEGDAVVIPKESSWFGYYPDGASTPLLSPQQTKLYTEDWIGLKTLDAARKVKFVSVPGEHLRIAQDDVVKHVVPYLKNQPASMNKAIQIRVDRSESWMLPEKSSLRVSRVSCETRCLYIMQVGP

SEQ ID NO: 88343 - DNA, 807 bp, Arabidopsis thaliana
  misc_feature (1)..(807): Ceres Seq. ID no. 12707778
  misc_feature (1)..(807): Ortholog of  Ceres SEQ ID NO 14302764 as cited in SEQ ID NO 67753
  misc_feature (1)..(807): Ortholog of  Ceres SEQ ID NO 14302291 as cited in SEQ ID NO 68180
atgtcgatgacggcggattctcaatctgattatgcttttcttgagtccatacgacgacacttactaggaggaatcggagccgatactcatgagtcgacagcgagttcggttactcaatcttgtgtaaccggtcagagcattaaaccggtgtacggacgaaaccctagctttagcaaactgtatccttgcttcaccgagagctggggagatttgccgttgaaagaaaacgattctgaggatatgttagtttacggtatcctcaacgacgcctttcacggcggttgggagccgtcttcttcgtcttccgacgaagatcgtagctctttcccgagtgttaagatcgagactccggagagtttcgcggcggtggattctgttccggtcaagaaggagaagacgagtcctgtttcggcggcggtgacggcggcgaagggaaagcattatagaggagtgagacaaaggccgtgggggaaatttgcggcggagattagagacccggcgaagaacggagctagggtttggttaggaacgtttgagacggcggaggacgcggcgttggcttacgacagagctgctttcaggatgcgtggttcccgcgctttgttgaattttccgttgagagttaattcaggagaacccgacccggttcgaatcaagtccaagagatcttctttttcttcttctaacgagaacggagctccgaagaagaggagaacggtggccgccggtggtggaatggataagggattgacggtgaagtgcgaggttgttgaagtggcacgtggcgatcgtttattggttttataa

SEQ ID NO: 88344 - protein, 268 aa, Arabidopsis thaliana
  peptide (1)..(268): Ceres Seq. ID no. 12707779
MSMTADSQSDYAFLESIRRHLLGGIGADTHESTASSVTQSCVTGQSIKPVYGRNPSFSKLYPCFTESWGDLPLKENDSEDMLVYGILNDAFHGGWEPSSSSSDEDRSSFPSVKIETPESFAAVDSVPVKKEKTSPVSAAVTAAKGKHYRGVRQRPWGKFAAEIRDPAKNGARVWLGTFETAEDAALAYDRAAFRMRGSRALLNFPLRVNSGEPDPVRIKSKRSSFSSSNENGAPKKRRTVAAGGGMDKGLTVKCEVVEVARGDRLLVL

SEQ ID NO: 88345 - protein, 266 aa, Arabidopsis thaliana
  peptide (1)..(266): Ceres Seq. ID no. 12707780
MTADSQSDYAFLESIRRHLLGGIGADTHESTASSVTQSCVTGQSIKPVYGRNPSFSKLYPCFTESWGDLPLKENDSEDMLVYGILNDAFHGGWEPSSSSSDEDRSSFPSVKIETPESFAAVDSVPVKKEKTSPVSAAVTAAKGKHYRGVRQRPWGKFAAEIRDPAKNGARVWLGTFETAEDAALAYDRAAFRMRGSRALLNFPLRVNSGEPDPVRIKSKRSSFSSSNENGAPKKRRTVAAGGGMDKGLTVKCEVVEVARGDRLLVL

SEQ ID NO: 88346 - protein, 188 aa, Arabidopsis thaliana; identical to SEQ ID NO: 27258
  peptide (1)..(188): Ceres Seq. ID no. 12707781

SEQ ID NO: 88347 - DNA, 822 bp, Arabidopsis thaliana
  misc_feature (1)..(822): Ceres Seq. ID no. 12707819
  misc_feature (1)..(822): Ortholog of  Ceres SEQ ID NO 14306062 as cited in SEQ ID NO 57524
acaccaaacctctctctctatctctgtccaaataagaacaaaaaaagacaagattcagaaaaaaatggaggtttcgatgagaaagccttatttcatagaagaagaagacgatggttttgtttctttatctgagatggaagctggagtttcaagtccttcttgttacaactatcctcagagttattattataaccatcatcatcatcagtactctgtttcatctcccagatctggaaaatttcatgattttagattcgacaatagctattacggttatggacagcctcatttcttggactcttgcttcctctgcaagaaacgtcttggtgataacagagacatcttcatgtacagaggagacacaccgttctgtagtgaagagtgtagagaagaacagatagaaagagacgaagcaaaagagaagaaacagagtctgtctacatctgtgaaagctatgagaagaaatgaaaagcgaagctcttcttcttctccaactagatctcgtaactatgctttccgcactggaactgttgctgctgcctaatttaaagttataaaggaaaaaaagggagatagagaatccattaacgctcatattgctgtaaaagctagttaatggatttatgggttttttcttcatctaaagatctttctttagtttgaatttgaatactaaaccaaaaaaaaaatggttagggaaaaagaaaaaaaaaaaagcgaagaaacctctcttttttaaagggtttgtcctttctttgttttattttcatgtttattagttttgtttttcttgaagaaaaatatatatatgcaattttgggt

SEQ ID NO: 88348 - protein, 180 aa, Arabidopsis thaliana; identical to SEQ ID NO: 27583
  peptide (1)..(180): Ceres Seq. ID no. 12707820

SEQ ID NO: 88349 - protein, 159 aa, Arabidopsis thaliana; identical to SEQ ID NO: 27584
  peptide (1)..(159): Ceres Seq. ID no. 12707821

SEQ ID NO: 88350 - protein, 155 aa, Arabidopsis thaliana; identical to SEQ ID NO: 27585
  peptide (1)..(155): Ceres Seq. ID no. 12707822

SEQ ID NO: 88351 - DNA, 789 bp, Arabidopsis thaliana
  misc_feature (1)..(789): Ceres Seq. ID no. 12707834
  misc_feature (1)..(789): Ortholog of  Ceres SEQ ID NO 15174883 as cited in SEQ ID NO 53894
atggaaacgccaccagaattatctgaacacggaatagttttgattgttgaagaatcaggttgtcttcaagccaaagtttatcttcaacgcgagctattcacgaaatacgagtatggagctcaaggtaggccgagattcggaatcagcttagggcttcttgttgattgcttgaacacattttcatcacctggacattctaatactatagaaatcaagtatccaggacctgatatggagcttcttctcaaatctgttgataccttaaactcttgcatctactctgagataagaactagaattcccgaaactgttacttgggactacaactttgagcaggcgggaatcgcgccacttacttttacagtaaagtcagcggcgttgaaggaagcaatagatgatcttgaatggcctggttcaagtgtacagatcagtcttcaaaaggaacccccttgtgtaatctttagaggagaaggacatggagacttgcagatagacttcatgtattatgccaacacagatcttctccttgcctttcattgtgataccgaagtctcttacgggtacaaatacaagtttttgaaagcaacaacggcaaacataccgggaaacgtagtgagagaaaacaggggaagcaaactaacaataggaagaggaggaatgttgaaagttcagcacttggtttcagtttctaaagctttagctccacaagtggaatccgcagggtatcagccaccgagtcggattgcttatatagagttctttgtgaagcctgaagagcctgctgattaa

SEQ ID NO: 88352 - protein, 262 aa, Arabidopsis thaliana
  peptide (1)..(262): Ceres Seq. ID no. 12707835
METPPELSEHGIVLIVEESGCLQAKVYLQRELFTKYEYGAQGRPRFGISLGLLVDCLNTFSSPGHSNTIEIKYPGPDMELLLKSVDTLNSCIYSEIRTRIPETVTWDYNFEQAGIAPLTFTVKSAALKEAIDDLEWPGSSVQISLQKEPPCVIFRGEGHGDLQIDFMYYANTDLLLAFHCDTEVSYGYKYKFLKATTANIPGNVVRENRGSKLTIGRGGMLKVQHLVSVSKALAPQVESAGYQPPSRIAYIEFFVKPEEPAD

SEQ ID NO: 88353 - protein, 185 aa, Arabidopsis thaliana; identical to SEQ ID NO: 83088
  peptide (1)..(185): Ceres Seq. ID no. 12707836

SEQ ID NO: 88354 - DNA, 1155 bp, Arabidopsis thaliana
  misc_feature (1)..(1155): Ceres Seq. ID no. 12707906
  misc_feature (1)..(1155): Ortholog of  Ceres SEQ ID NO 13582332 as cited in SEQ ID NO 59890
  misc_feature (1)..(1155): Ortholog of  Ceres SEQ ID NO 13598278 as cited in SEQ ID NO 68456
atggaaataactcaagtaatctatgtcaatggtcaggaggaaatgaataccaccatggaaatcgaatcttcgtccgtacctcaatcgaagaactataagaaatggcttcgtatttccatttacgtgttctttgtccttgcttgccaagcactttctacaattttgggcagagtttactatgaaaatggtgggaagagtacatggatgggaacacttgtccaactaatcggcttccctgttctgtttctcttccgcttcttttcccaaaccaaaaatcccaaaccaacagaagcagatttcagaaagttctcttccttcaccattcttggatcagtttacatcgttactggactattagtgtctgctaactcttatatgtcctctgttggtttactatacttaccagtttctactttctccctcatcttggcctcacaattggccttcactgccttcttctcatattttctaaactcgcagaagttcacacctttcattgtgaattctctgtttctccttactatttcctctgccctcctcgtggtcaacactgattcggaaaacacagcaaaagtgtctagagtaaaatatgtgatagggataatatgtaccattggtgcttctgctgggattggattgctgctatccctggtacaactgatcctcaggaaggttttaaagaagcaaacattctcaacggtcactgacttggtcgcttaccaatctctagttgcaagctgtgtggttctcataggacttttcgcaagcggggagtggaaaactttaacaagtgagatggaaaactacaaactggggaaagtgccatacgttatgactttggcctcgatagctatttcctggcaagtctacaccattggcgtcgtgggactgatctttgagtcatcttctgtgttctccaattccataactgctgtgggattgcctatagttccagttgtagcagtgattgttttccatgataaaatgaacgcgtcaaagatcttctccatcattttagctatctggggattcatttcatttgtctatcagcactacctcgacgaaaagaagttgaagactagccacacaagtcctgtaggagatcctcatctactacctgctgaggaaggtcacacaaacatacatagtgtatga

SEQ ID NO: 88355 - protein, 384 aa, Arabidopsis thaliana
  peptide (1)..(384): Ceres Seq. ID no. 12707907
MEITQVIYVNGQEEMNTTMEIESSSVPQSKNYKKWLRISIYVFFVLACQALSTILGRVYYENGGKSTWMGTLVQLIGFPVLFLFRFFSQTKNPKPTEADFRKFSSFTILGSVYIVTGLLVSANSYMSSVGLLYLPVSTFSLILASQLAFTAFFSYFLNSQKFTPFIVNSLFLLTISSALLVVNTDSENTAKVSRVKYVIGIICTIGASAGIGLLLSLVQLILRKVLKKQTFSTVTDLVAYQSLVASCVVLIGLFASGEWKTLTSEMENYKLGKVPYVMTLASIAISWQVYTIGVVGLIFESSSVFSNSITAVGLPIVPVVAVIVFHDKMNASKIFSIILAIWGFISFVYQHYLDEKKLKTSHTSPVGDPHLLPAEEGHTNIHSV

SEQ ID NO: 88356 - protein, 370 aa, Arabidopsis thaliana
  peptide (1)..(370): Ceres Seq. ID no. 12707908
MNTTMEIESSSVPQSKNYKKWLRISIYVFFVLACQALSTILGRVYYENGGKSTWMGTLVQLIGFPVLFLFRFFSQTKNPKPTEADFRKFSSFTILGSVYIVTGLLVSANSYMSSVGLLYLPVSTFSLILASQLAFTAFFSYFLNSQKFTPFIVNSLFLLTISSALLVVNTDSENTAKVSRVKYVIGIICTIGASAGIGLLLSLVQLILRKVLKKQTFSTVTDLVAYQSLVASCVVLIGLFASGEWKTLTSEMENYKLGKVPYVMTLASIAISWQVYTIGVVGLIFESSSVFSNSITAVGLPIVPVVAVIVFHDKMNASKIFSIILAIWGFISFVYQHYLDEKKLKTSHTSPVGDPHLLPAEEGHTNIHSV

SEQ ID NO: 88357 - protein, 366 aa, Arabidopsis thaliana
  peptide (1)..(366): Ceres Seq. ID no. 12707909
MEIESSSVPQSKNYKKWLRISIYVFFVLACQALSTILGRVYYENGGKSTWMGTLVQLIGFPVLFLFRFFSQTKNPKPTEADFRKFSSFTILGSVYIVTGLLVSANSYMSSVGLLYLPVSTFSLILASQLAFTAFFSYFLNSQKFTPFIVNSLFLLTISSALLVVNTDSENTAKVSRVKYVIGIICTIGASAGIGLLLSLVQLILRKVLKKQTFSTVTDLVAYQSLVASCVVLIGLFASGEWKTLTSEMENYKLGKVPYVMTLASIAISWQVYTIGVVGLIFESSSVFSNSITAVGLPIVPVVAVIVFHDKMNASKIFSIILAIWGFISFVYQHYLDEKKLKTSHTSPVGDPHLLPAEEGHTNIHSV

SEQ ID NO: 88358 - DNA, 1938 bp, Arabidopsis thaliana
  misc_feature (1)..(1938): Ceres Seq. ID no. 12707910
  misc_feature (1)..(1938): Ortholog of  Ceres SEQ ID NO 15176941 as cited in SEQ ID NO 55559
  misc_feature (1)..(1938): Ortholog of  Ceres SEQ ID NO 13595658 as cited in SEQ ID NO 59888
  misc_feature (1)..(1938): Ortholog of  Ceres SEQ ID NO 13662324 as cited in SEQ ID NO 62162
atgacgaagaggtcgccattaattctcctccttgcttcacacttgttcgtatcaggagtgttttccaatagtatcataaccatagaaaacaaatgcaacaacacaatttggccagtcatcttctcatggcggtcacaagtttccaccaccggcttcactctcaagaccggagaggaacgtgccataaacgcaccatcttcatggtacggtcttatctcagctaggactctttgctccaatgactcaacaggaaacttctcatgcgccacgggagactgtgaatccggcgagatcgagtgtcccggcacctacaaatggtctcctgtaacttacgtcatatttagaatcgatgacggacaaatcaacagctatatcatcagcctcgagttcggttacaaccttccactaacggttgttccgtcaaacccggcatgtatcagctcaggttgtatggttgacttgaacaagacatgtccaaatgatcttaaggaattctccaggagaggtttagtcgcctgcaaaagtgcgtgtcgacaatccgcatccgatgagaattgttgcactaattacttcaagtataagcaaacttgtaagccgacaccgtacgtacagaacttcgaccgtgcttgcccatccgcttatagctaccccttcagcggtaataacagtaccttcacatgcacaaattcaactgattacgtgatcacgttttgtccctcctccattcccaacaccacaagcagctcgatggctcaactaccacaaccaaaacgaggctcagcagctttaattgtgttgatcagtattgttgtgattgcgctagtagtgagagcgaggcatgcgaaaagaaagagtgaattgaacgacgagaacattgaagcggttgtgatgttgaaacgttatagctttgaaaaagtcaagaagatgacaaactcgtttgatcatgttattgggaaaggaggatttggaactgtctataaaggaaaactacccgatgccagcggccgagatattgctctgaagatcttgaaagagtcaaaagggaatggagaagagttcatcaatgaactagttagcatgagtagagcttctcatgttaacatcgtttctctttttggattttgctatgaagggagccagagagctattatctacgagttcatgccgaatggatcccttgacaagtttatatccgagaatatgtcaacaaagatagagtggaaaacattatacaacatcgcggtaggtgttgctcgtgggctcgagtacttgcacaatagttgtgtatccaagattgtgcatttcgatataaagccacagaatatactcatagacgaagacttatgcccgaagatttcggatttcggtcttgctaagctatgcaaaaagaaagaaagtatcatatcaatgttagacgcgagagggacagtagggtacattgctcctgaaatgttttccaagaactatggaggagtttcgcataagtcagatgtgtatagttatggaatggtggttcttgagatgattggggcaacgaaaagagaagaagttgaaacttctgcgaccgataaaagttcaatgtactttcctgattgggtctatgaggatcttgagaggaaagaaaccatgagactattagaagatcatataatcgaagaagaagaagaagagaagatagtgaagagaatgacattagtgggtttgtggtgtatacaaaccaatccatctgatcgtccaccaatgagaaaagttgttgaaatgttagagggcagtcgtctagaagctctacaggttccacctaagcctctcttgaatttacacgtagtaacggattgggaaacttctgaagatagtcaacagacttctagactctcgacacaaagcttgttagagagaaaaactcgttcgaattaccaatatactgtggaagcggtttaa

SEQ ID NO: 88359 - protein, 645 aa, Arabidopsis thaliana
  peptide (1)..(645): Ceres Seq. ID no. 12707911
MTKRSPLILLLASHLFVSGVFSNSIITIENKCNNTIWPVIFSWRSQVSTTGFTLKTGEERAINAPSSWYGLISARTLCSNDSTGNFSCATGDCESGEIECPGTYKWSPVTYVIFRIDDGQINSYIISLEFGYNLPLTVVPSNPACISSGCMVDLNKTCPNDLKEFSRRGLVACKSACRQSASDENCCTNYFKYKQTCKPTPYVQNFDRACPSAYSYPFSGNNSTFTCTNSTDYVITFCPSSIPNTTSSSMAQLPQPKRGSAALIVLISIVVIALVVRARHAKRKSELNDENIEAVVMLKRYSFEKVKKMTNSFDHVIGKGGFGTVYKGKLPDASGRDIALKILKESKGNGEEFINELVSMSRASHVNIVSLFGFCYEGSQRAIIYEFMPNGSLDKFISENMSTKIEWKTLYNIAVGVARGLEYLHNSCVSKIVHFDIKPQNILIDEDLCPKISDFGLAKLCKKKESIISMLDARGTVGYIAPEMFSKNYGGVSHKSDVYSYGMVVLEMIGATKREEVETSATDKSSMYFPDWVYEDLERKETMRLLEDHIIEEEEEEKIVKRMTLVGLWCIQTNPSDRPPMRKVVEMLEGSRLEALQVPPKPLLNLHVVTDWETSEDSQQTSRLSTQSLLERKTRSNYQYTVEAV

SEQ ID NO: 88360 - protein, 495 aa, Arabidopsis thaliana
  peptide (1)..(495): Ceres Seq. ID no. 12707912
MVDLNKTCPNDLKEFSRRGLVACKSACRQSASDENCCTNYFKYKQTCKPTPYVQNFDRACPSAYSYPFSGNNSTFTCTNSTDYVITFCPSSIPNTTSSSMAQLPQPKRGSAALIVLISIVVIALVVRARHAKRKSELNDENIEAVVMLKRYSFEKVKKMTNSFDHVIGKGGFGTVYKGKLPDASGRDIALKILKESKGNGEEFINELVSMSRASHVNIVSLFGFCYEGSQRAIIYEFMPNGSLDKFISENMSTKIEWKTLYNIAVGVARGLEYLHNSCVSKIVHFDIKPQNILIDEDLCPKISDFGLAKLCKKKESIISMLDARGTVGYIAPEMFSKNYGGVSHKSDVYSYGMVVLEMIGATKREEVETSATDKSSMYFPDWVYEDLERKETMRLLEDHIIEEEEEEKIVKRMTLVGLWCIQTNPSDRPPMRKVVEMLEGSRLEALQVPPKPLLNLHVVTDWETSEDSQQTSRLSTQSLLERKTRSNYQYTVEAV

SEQ ID NO: 88361 - protein, 396 aa, Arabidopsis thaliana
  peptide (1)..(396): Ceres Seq. ID no. 12707913
MAQLPQPKRGSAALIVLISIVVIALVVRARHAKRKSELNDENIEAVVMLKRYSFEKVKKMTNSFDHVIGKGGFGTVYKGKLPDASGRDIALKILKESKGNGEEFINELVSMSRASHVNIVSLFGFCYEGSQRAIIYEFMPNGSLDKFISENMSTKIEWKTLYNIAVGVARGLEYLHNSCVSKIVHFDIKPQNILIDEDLCPKISDFGLAKLCKKKESIISMLDARGTVGYIAPEMFSKNYGGVSHKSDVYSYGMVVLEMIGATKREEVETSATDKSSMYFPDWVYEDLERKETMRLLEDHIIEEEEEEKIVKRMTLVGLWCIQTNPSDRPPMRKVVEMLEGSRLEALQVPPKPLLNLHVVTDWETSEDSQQTSRLSTQSLLERKTRSNYQYTVEAV

SEQ ID NO: 88362 - DNA, 774 bp, Arabidopsis thaliana
  misc_feature (1)..(774): Ceres Seq. ID no. 12707914
  misc_feature (1)..(774): Ortholog of  Ceres SEQ ID NO 15179873 as cited in SEQ ID NO 66846
atggtaggcgaagaggagacgaagaagagagtagtcactgaatcgctaggatggttaacggaatcttcgattatgccaaagaagcatcgcgccatcgaaggtgttggtccttcctcaatcatggagcttaaagctcagctctataagtctcaggaggaagctaaacagacaaaggattttacgggatccgatgctcaataccatcgcgccaaagaaaggattgccgccaaagattctttcgccgcgaaaaactccggcgtcgaaagtcgcaatttaaaggacaagcttgagcacaaagctgtaaaagatggagcagttagttatgccgcattggagaaaaaggctcagttgtatgataaacttgctagaggagagctttctgatgaagaaggtgaagagaagtactgtgttgacttctttaggaaaggaattcaacatgaagatccaaaaccatcaagcacttacaacagttccatttcagcaccacctgaagatttcaagcaagatggtgaagatgatggttcgctttttagcaccaaatttgctggacttggacatgcaattgggacagctgatgtaggtcaacacgtgcgcatggtcagggaggttcatgaggaagtcaatcaagcgagagaaaaggcaaccgagttaaagcaaaggagacaagagcaagcaacaaatcgtcgggagaaactcaaacaagcttatcttcggaagcagctcgagaaactaaaggctcaacaacaacaacaagaagatgaacaaaaaacttga

SEQ ID NO: 88363 - protein, 257 aa, Arabidopsis thaliana; identical to SEQ ID NO: 42493
  peptide (1)..(257): Ceres Seq. ID no. 12707915

SEQ ID NO: 88364 - protein, 233 aa, Arabidopsis thaliana; identical to SEQ ID NO: 42494
  peptide (1)..(233): Ceres Seq. ID no. 12707916

SEQ ID NO: 88365 - protein, 217 aa, Arabidopsis thaliana; identical to SEQ ID NO: 42495
  peptide (1)..(217): Ceres Seq. ID no. 12707917

SEQ ID NO: 88366 - DNA, 1482 bp, Arabidopsis thaliana
  misc_feature (1)..(1482): Ceres Seq. ID no. 12707924
  misc_feature (1)..(1482): Ortholog of  Ceres SEQ ID NO 14302943 as cited in SEQ ID NO 20446
atgcaaagtcttagtcaacttggaccttcagagattttccttgtcgccagaagagaaaaacccagtacgagagcacagctttggtttacgggaagactctcttttagacaagaaacaaatgggattcgtttaaagaatagagtagagtttagtccaagacctgtacctccaaatctgatcgcagcagagaaagaagaagctaaagctgttttaactctattcttcaagaagcaaggtcttagcaacagtctctcttctcggttaatcaacaaatccgatctattcattgaccatttagtgtccaggctccattctgttcataaagctcgatacctcgtaggaagagagcttactacacttgagattcgagattctctcattccttacctcgaacaacttcatgaagaacatggtgatcttctcgctgagcttgttgtgagcttccctgatccaccagctgaacctagacttgttgcttcatctccagtttctgtcctaccacctcgtggtgacacagattctgctgcagacactcgtaaactcagagcggtgtctcgagtcagcgaacttgacacagaaggtgcattacgtcctcagaccctttaccttcttgacctcggtttaaacctcgagcagatcaaaacgatcactcgaaagttcgctgcctttccttattacagcctcgatggaaaaataaaacctgttgtggaattccttctagacctcggaattcctaaatcagatatccccacaatcctctgcaaacgcccacagatatgcggaatcagcctaaccgataacctgaaaccgacaatggcctttcttgagacacttggcattgacaagaaccaatgggcaaagatcatttcccgtttcccagccatcctcacttacagccgccagaaacttacttcaactgtcgagttcttatcacaaactggtctcacagaagaacagatagggagaatcctaacccgatgtccaaacatcatgagttacagtgtagaagacaagctccgtccaactatggagtactttagatcgctaaatgtcgatgttgcggttctcctacatcgatgtccccaaacgtttggattaagcatagaatcgaatttgaagccagtaacagagttcttcctcgaaaagggttttggtttagatgaaattggaatcatgatctctagatatggagctttgtacacattcagcttgaaagagaatgtcatgccgaaatgggattactttcagacaatggactatccaaaatccgagctttgtgaagttccctcagttttttgggtacatttacaagagaggatcaagccgagatatgagctggttcagagaagtggagtgagactgctgttgaaccaggttttatcgctgtcgggaattgagttcgagaaagttgttaagaagaagatgatgaaacttgtgtctaataacgtaattgctgaacaaagtagtggtggtttgttgtga

SEQ ID NO: 88367 - protein, 493 aa, Arabidopsis thaliana
  peptide (1)..(493): Ceres Seq. ID no. 12707925
MQSLSQLGPSEIFLVARREKPSTRAQLWFTGRLSFRQETNGIRLKNRVEFSPRPVPPNLIAAEKEEAKAVLTLFFKKQGLSNSLSSRLINKSDLFIDHLVSRLHSVHKARYLVGRELTTLEIRDSLIPYLEQLHEEHGDLLAELVVSFPDPPAEPRLVASSPVSVLPPRGDTDSAADTRKLRAVSRVSELDTEGALRPQTLYLLDLGLNLEQIKTITRKFAAFPYYSLDGKIKPVVEFLLDLGIPKSDIPTILCKRPQICGISLTDNLKPTMAFLETLGIDKNQWAKIISRFPAILTYSRQKLTSTVEFLSQTGLTEEQIGRILTRCPNIMSYSVEDKLRPTMEYFRSLNVDVAVLLHRCPQTFGLSIESNLKPVTEFFLEKGFGLDEIGIMISRYGALYTFSLKENVMPKWDYFQTMDYPKSELCEVPSVFWVHLQERIKPRYELVQRSGVRLLLNQVLSLSGIEFEKVVKKKMMKLVSNNVIAEQSSGGLL

SEQ ID NO: 88368 - DNA, 1149 bp, Arabidopsis thaliana
  misc_feature (1)..(1149): Ceres Seq. ID no. 12708316
  misc_feature (1)..(1149): Ortholog of  Ceres SEQ ID NO 12582601 as cited in SEQ ID NO 51064
  misc_feature (1)..(1149): Ortholog of  Ceres SEQ ID NO 13581092 as cited in SEQ ID NO 54771
  misc_feature (1)..(1149): Ortholog of  Ceres SEQ ID NO 13594298 as cited in SEQ ID NO 57803
  misc_feature (1)..(1149): Ortholog of  Ceres SEQ ID NO 13503476 as cited in SEQ ID NO 61978
  misc_feature (1)..(1149): Ortholog of  Ceres SEQ ID NO 12578438 as cited in SEQ ID NO 62201
  misc_feature (1)..(1149): Ortholog of  Ceres SEQ ID NO 12617675 as cited in SEQ ID NO 64656
accatcatcatcatcatcatcatcatcatttctctctatctctttctaaaacacaaccatgactgtttcttcatctccatgggctctcatggctctctttctaatggtttcttcaacaatggtaatggctattcctccacgcaaggccattgatgtaccatttggtcgtaactacgtcccaacttgggcttttgaccaccagaaacagttcaatggcggttccgaacttcagcttatcctcgacaaatacactggcacaggatttcaatcaaaggggtcatatttgtttggacattttagtatgcacataaagcttccagctggtgacacagccggagttgtcacagctttctatctatcatctaccaacaatgagcatgacgagatagactttgagttccttggaaacagaacaggacaaccagctatattacagacaaatgtattcacaggaggaaagggaaacagagaacaacgaatctatctctggtttgatccttctaaggcttatcacacttactcaatcctttggaacatgtaccagatcgtattctttgttgacaacataccaatccgaacgttcaagaatgctaaggatctaggagtacgtttcccattcaaccaaccaatgaagctttactcaagcctttggaacgcggatgattgggccacgagaggcggtttagagaagaccaattgggccaatgcacctttcgttgcatcttacaaaggattccacatagatggttgccaagcttctgtggaagccaagtactgtgccacacaaggccgcatgtggtgggatcagaaagagttccgtgaccttgacgctgaacaatggcgtcgtctcaaatgggttcgtatgaagtggaccatctacaactactgtaccgaccggactaggttcccggttatgccagctgaatgtaaaagggacagagacgcataagttactactcttgagggttttaatgaatttatgctatcattattatttgaattatgcttgttcaagagattgatatatgtattgtttgttggcccatgatgtttatgctatatttgggcctaaaattacatgttataattcatatatgtattgattagctatgtattttcatatgttatgatctacttacaagttttatt

SEQ ID NO: 88369 - protein, 296 aa, Arabidopsis thaliana; identical to SEQ ID NO: 29752
  peptide (1)..(296): Ceres Seq. ID no. 12708317

SEQ ID NO: 88370 - protein, 286 aa, Arabidopsis thaliana; identical to SEQ ID NO: 29753
  peptide (1)..(286): Ceres Seq. ID no. 12708318

SEQ ID NO: 88371 - protein, 281 aa, Arabidopsis thaliana; identical to SEQ ID NO: 29754
  peptide (1)..(281): Ceres Seq. ID no. 12708319

SEQ ID NO: 88372 - DNA, 1227 bp, Arabidopsis thaliana
  misc_feature (1)..(1227): Ceres Seq. ID no. 12708435
  misc_feature (1)..(1227): Ortholog of  Ceres SEQ ID NO 12612314 as cited in SEQ ID NO 51420
atggcttccatagcagcaccacagtcggaccatatctcaatgttatctaagtttttcgctatctacacatctttttctgcaatcatgatcattgtccgtaacatcatcaacgagattgtgcctcagaaaatccgagattacatcactgtgaaatttgtagacttgttctcttcttactttcatcgaatttcttttgtgattgatcatactttccgtgcggccaaagtttacttaaaaacgcgtcttgccggactctccacaggagaaatcctcgtgggttcgagtgatctcaagaatccaacggctgagccaaatctcggaatccctcccaacacaaagatcgttgatgagtttgaagggattcatcttgagtggactctacactctcttgagactaaaagttatccttacgagaaaaagtactttcatctcacttgtaagaaggagtttcgtgagaagatattgaaagattatgagacatcgcaaagatctcccatcttcgagcaccacacgaccttcgagaccttagccattgagccgaaaagacttctcaagagcgtgggacgcgcttggaaacgtggatatcttctttacggtccaccaggtactggaaagtcctctatggtggctgctatagctaatcacatgaactgcaatatctatgatctccagattcagagcgttaaagatgatgctgagttgcggagggttctcaccgccaccaataacagatcaattcttctcattgaagacattgattgtggtactgattcgtctcgtagacgccagaccaaaaatgaagaagatgataagatatctttgtctggtctattgaactttgtagacggtctttggtcgagctgtggagaagaaagaatcataattttcacaaccaattacaaggagaagctcgacccggcattgctgaggcccggaagaatggatgttcacattctcatggactattgcactccatttgtcttgaagaagcttgtggctatgtacctcaaaattgatgaccatgtcctgtttgatcccattgagaagcttgtccttgaggtgagtgtaactcctgctgaagtcgcgcagcagctcatggtgagtaagaacactgatattgcgctcaaaggtctcatcgaattcatcgaaaaaaagaagatagaaaaggaagaagttaccaaagttgaggaagagggtgagattgaagatgctgagactaacgaataa

SEQ ID NO: 88373 - protein, 408 aa, Arabidopsis thaliana
  peptide (1)..(408): Ceres Seq. ID no. 12708436
MASIAAPQSDHISMLSKFFAIYTSFSAIMIIVRNIINEIVPQKIRDYITVKFVDLFSSYFHRISFVIDHTFRAAKVYLKTRLAGLSTGEILVGSSDLKNPTAEPNLGIPPNTKIVDEFEGIHLEWTLHSLETKSYPYEKKYFHLTCKKEFREKILKDYETSQRSPIFEHHTTFETLAIEPKRLLKSVGRAWKRGYLLYGPPGTGKSSMVAAIANHMNCNIYDLQIQSVKDDAELRRVLTATNNRSILLIEDIDCGTDSSRRRQTKNEEDDKISLSGLLNFVDGLWSSCGEERIIIFTTNYKEKLDPALLRPGRMDVHILMDYCTPFVLKKLVAMYLKIDDHVLFDPIEKLVLEVSVTPAEVAQQLMVSKNTDIALKGLIEFIEKKKIEKEEVTKVEEEGEIEDAETNE

SEQ ID NO: 88374 - protein, 395 aa, Arabidopsis thaliana
  peptide (1)..(395): Ceres Seq. ID no. 12708437
MLSKFFAIYTSFSAIMIIVRNIINEIVPQKIRDYITVKFVDLFSSYFHRISFVIDHTFRAAKVYLKTRLAGLSTGEILVGSSDLKNPTAEPNLGIPPNTKIVDEFEGIHLEWTLHSLETKSYPYEKKYFHLTCKKEFREKILKDYETSQRSPIFEHHTTFETLAIEPKRLLKSVGRAWKRGYLLYGPPGTGKSSMVAAIANHMNCNIYDLQIQSVKDDAELRRVLTATNNRSILLIEDIDCGTDSSRRRQTKNEEDDKISLSGLLNFVDGLWSSCGEERIIIFTTNYKEKLDPALLRPGRMDVHILMDYCTPFVLKKLVAMYLKIDDHVLFDPIEKLVLEVSVTPAEVAQQLMVSKNTDIALKGLIEFIEKKKIEKEEVTKVEEEGEIEDAETNE

SEQ ID NO: 88375 - protein, 380 aa, Arabidopsis thaliana
  peptide (1)..(380): Ceres Seq. ID no. 12708438
MIIVRNIINEIVPQKIRDYITVKFVDLFSSYFHRISFVIDHTFRAAKVYLKTRLAGLSTGEILVGSSDLKNPTAEPNLGIPPNTKIVDEFEGIHLEWTLHSLETKSYPYEKKYFHLTCKKEFREKILKDYETSQRSPIFEHHTTFETLAIEPKRLLKSVGRAWKRGYLLYGPPGTGKSSMVAAIANHMNCNIYDLQIQSVKDDAELRRVLTATNNRSILLIEDIDCGTDSSRRRQTKNEEDDKISLSGLLNFVDGLWSSCGEERIIIFTTNYKEKLDPALLRPGRMDVHILMDYCTPFVLKKLVAMYLKIDDHVLFDPIEKLVLEVSVTPAEVAQQLMVSKNTDIALKGLIEFIEKKKIEKEEVTKVEEEGEIEDAETNE

SEQ ID NO: 88376 - DNA, 1647 bp, Arabidopsis thaliana
  misc_feature (1)..(1647): Ceres Seq. ID no. 12708521
  misc_feature (1)..(1647): Ortholog of  Ceres SEQ ID NO 14315317 as cited in SEQ ID NO 58242
  misc_feature (1)..(1647): Ortholog of  Ceres SEQ ID NO 13655375 as cited in SEQ ID NO 63347
  misc_feature (1)..(1647): Ortholog of  Ceres SEQ ID NO 12626166 as cited in SEQ ID NO 64505
  misc_feature (1)..(1647): Ortholog of  Ceres SEQ ID NO 14301599 as cited in SEQ ID NO 65699
aaaaaagaatttataacaactccaaggaaagcatcaatggtgggagaagaagcttgcttgtgataatatattcagctacgtcgagtgaagaaccagtgaagcataagtagcagagacagagagagatacgtgagtgtgtgtctgtgtttttcgctttttggctttcttcgctgattccacgaacggcgtgaatcgacttttctccagatctcatctctttcagtgtttgattctgtcaaaatctgcaagcgaatcgagatttctcagatctcgttttcgcttgcacgagattcagatctgatagtgtcggtgttcaattttctcaaatccaaatggagaaaccggagagcgagaagaaatcggcggtgtctgatgtcggtgcatgggctatgaatgtaatcagctccgttggaatcatcatggctaataaacagctcatgtcttcctctggtttcggttttggctttgctacaacgttaacgggatttcactttgcattcactgctcttgttggtatggtgtcaaacgcaacgggactatcagcttctaagcatgttcctctttgggagcttctctggttctcaattgttgctaatatctctatcgctgctatgaactttagtcttatgctcaactctgttggcttctatcagatttcgaaattgagcatgattccggtggtatgcgtgttggaatggattctacatagcaagcattattgtaaagaagtgaaagcttctgtaatggttgtggttatcggtgttgggatttgtactgtgactgatgtcaaagttaatgccaaaggtttcatttgtgcatgcactgccgttttctccacttctctgcagcagatttctataggctctctgcagaagaagtactcagtaggatcctttgaattgctgagcaaaactgcaccaatccaagccatttcacttctcatctgtggcccctttgttgactatttgttgagcggcaaattcatatctacttaccagatgacttatggtgccatcttctgcattcttctctcctgtgcattagccgttttctgtaacataagccaatatctctgcatcggaagattctcagcgacatctttccaagttctaggccacatgaaaacagtatgcgtcctcacattaggatggcttctctttgattccgagatgacattcaagaacatcgccgggatggccatagccattgttggaatggtgatctatagttgggctgttgatatagagaaacagaggaacgcaaagtcaacgccacacggcaaacacagtatgaccgaagatgagattaagctactcaaagaaggagttgagcatatcgacttgaaagacgttgaactcggtgacactaaaccataagtgggtgcttataacccatttgaaattactcgtcgctactgattcgaattctttatacaaatatttcctttgtgtgccatttactttgttctttccacttcctatatatgtcttagaacattttgggcttttcagaaagcccataaatccttctttgcttgagaagaaggcccgtccttgaatagtaagtgtcctatatagtaaagtaaacagaaatgtcaactgaagcatgtgattttattcatttgattatatatgtctatgaactacc

SEQ ID NO: 88377 - protein, 347 aa, Arabidopsis thaliana; identical to SEQ ID NO: 42696
  peptide (1)..(347): Ceres Seq. ID no. 12708522

SEQ ID NO: 88378 - protein, 328 aa, Arabidopsis thaliana; identical to SEQ ID NO: 42697
  peptide (1)..(328): Ceres Seq. ID no. 12708523

SEQ ID NO: 88379 - protein, 318 aa, Arabidopsis thaliana; identical to SEQ ID NO: 42698
  peptide (1)..(318): Ceres Seq. ID no. 12708524

SEQ ID NO: 88380 - DNA, 2346 bp, Arabidopsis thaliana
  misc_feature (1)..(2346): Ceres Seq. ID no. 12708600
  misc_feature (1)..(2346): Ortholog of  Ceres SEQ ID NO 13656177 as cited in SEQ ID NO 64997
atgccgcttattctctctggcgtcgatgttgtcgctatggctcgaaccggttctggaaaaaccgcagcttttctcatccctatgcttgagaagctcaaacaacacgttcctcaaggaggtgttagagcactcatcttgtctcctactcgtgacttagctgagcagactctgaagttcaccaaggaacttggcaaatttacagatcttcgtgtatccttactggttggtggagatagtatggaagaccagtttgaagagttaacaaagggacctgatgtgattattgctactcctgggagacttatgcatcttttatctgaggttgatgatatgacgctaaggacggttgagtatgtagtttttgatgaggcagatagtctgtttggtatggggtttgctgaacagttacatcagattctaactcagttaagtgagaataggcagactttgctatttagtgccactttaccaagtgcccttgctgaatttgcaaaggctggtttgcgtgagcctcagcttgttcgtttagatgttgagaataagataagtcccgatttgaagctttcgtttttgactgtacgaccggaagagaagtattctgcattgctgtacttggttagggagcatataagttcagatcaacagaccttgatatttgtttcgacaaagcatcatgtggaatttgtcaactcattgtttaagttggagaatattgagccatctgtatgttatggtgatatggatcaagatgcacgtaagattcatgtatcaaggttcagagcgaggaagactatgttgttgattgtgacagatattgctgctaggggtattgacataccattgcttgataatgttataaactgggatttccctccgagaccgaagatttttgttcatcgtgtgggaagagctgccagggctggtcgtacaggctgtgcatattcctttgttacacctgaggatatgccatatatgttggatcttcatctgttcctctcaaaaccggtcaggccagcgcccactgaggatgaggtcttgaagaacatggaagaagtaatgaccaaaactagtcaagcaattgatagtggagtcaccgtctatggtcgtttcccacagaaaaccattgatcttatctttaatagaaccagagaaatgattgattcatctgcagaattagattcccttgaacgaacatccaccaaagcttttcgcttgtattcaaaaacaaaaccctcaccgtcaaaagaatccattaggagagcaaaggatttaccacgagaaggcttgcatcccatcttcagaagcattattgaaactggggaattagaggcaatgtcgtttttccagaaaattaaaaatttcagacccaagcaaacgatacttgaagcagaaggtgaagttgccaaatccaaacatgtgaagggtcccgctggccaatgggttgatgtgatgaagaagaaaagagctattcatgaggagatcatcaatacaagacatcagcagaatcaaaagacttccaataatcatttggagatggaagctgaacctacaacttcttttgttgatggcacagtagagggaagcaaagtaagcggtaagaaaagaaaggcacaagaaaccttcaaggacgatgaattctttatcagctccataccagtaaatcatcattcagaggcagggctatctctgaggggtaacgaaggatttggatcgaataggttggacgctgctgttctagatctagttgcagatgatgggcaagggataaagcagcaacaatcaaattatcactgggacaagaaaggtaagaagtacatcaagttgaacaatggagatcgagtaacagccagtggaaagataaagacagagagtggagctaaagcgactgcaaagaagacagggatatacaagagatggcaagagaggtctcacaagaaagtatcccgagacagcggtgatgcagacgaaaccacacgaatgtcaggtagaggaggccgagatgggaagagacggcaaggatcagtgcctaacgcacatgttcgttcagagatcaaagatctggaccaggtgcgtaaggagagacagcaaaaggcaaacaaagtttcttatctgcagagcaagagaggcggaagaggtggaagaggtggggccaggggaggccgtggtggtggggccaggggaggccgtggtggcagcagggattttggtggtggaggaagggattttggcagtagcagcgatagaggtggaagaagtggcggtagggattttggtggtcgtcgtggtggtgctagcactagtagcagaggtggtaagagaggaggaggaagaggaggtggaggttaa

SEQ ID NO: 88381 - protein, 781 aa, Arabidopsis thaliana
  peptide (1)..(781): Ceres Seq. ID no. 12708601
MPLILSGVDVVAMARTGSGKTAAFLIPMLEKLKQHVPQGGVRALILSPTRDLAEQTLKFTKELGKFTDLRVSLLVGGDSMEDQFEELTKGPDVIIATPGRLMHLLSEVDDMTLRTVEYVVFDEADSLFGMGFAEQLHQILTQLSENRQTLLFSATLPSALAEFAKAGLREPQLVRLDVENKISPDLKLSFLTVRPEEKYSALLYLVREHISSDQQTLIFVSTKHHVEFVNSLFKLENIEPSVCYGDMDQDARKIHVSRFRARKTMLLIVTDIAARGIDIPLLDNVINWDFPPRPKIFVHRVGRAARAGRTGCAYSFVTPEDMPYMLDLHLFLSKPVRPAPTEDEVLKNMEEVMTKTSQAIDSGVTVYGRFPQKTIDLIFNRTREMIDSSAELDSLERTSTKAFRLYSKTKPSPSKESIRRAKDLPREGLHPIFRSIIETGELEAMSFFQKIKNFRPKQTILEAEGEVAKSKHVKGPAGQWVDVMKKKRAIHEEIINTRHQQNQKTSNNHLEMEAEPTTSFVDGTVEGSKVSGKKRKAQETFKDDEFFISSIPVNHHSEAGLSLRGNEGFGSNRLDAAVLDLVADDGQGIKQQQSNYHWDKKGKKYIKLNNGDRVTASGKIKTESGAKATAKKTGIYKRWQERSHKKVSRDSGDADETTRMSGRGGRDGKRRQGSVPNAHVRSEIKDLDQVRKERQQKANKVSYLQSKRGGRGGRGGARGGRGGGARGGRGGSRDFGGGGRDFGSSSDRGGRSGGRDFGGRRGGASTSSRGGKRGGGRGGGG

SEQ ID NO: 88382 - protein, 769 aa, Arabidopsis thaliana
  peptide (1)..(769): Ceres Seq. ID no. 12708602
MARTGSGKTAAFLIPMLEKLKQHVPQGGVRALILSPTRDLAEQTLKFTKELGKFTDLRVSLLVGGDSMEDQFEELTKGPDVIIATPGRLMHLLSEVDDMTLRTVEYVVFDEADSLFGMGFAEQLHQILTQLSENRQTLLFSATLPSALAEFAKAGLREPQLVRLDVENKISPDLKLSFLTVRPEEKYSALLYLVREHISSDQQTLIFVSTKHHVEFVNSLFKLENIEPSVCYGDMDQDARKIHVSRFRARKTMLLIVTDIAARGIDIPLLDNVINWDFPPRPKIFVHRVGRAARAGRTGCAYSFVTPEDMPYMLDLHLFLSKPVRPAPTEDEVLKNMEEVMTKTSQAIDSGVTVYGRFPQKTIDLIFNRTREMIDSSAELDSLERTSTKAFRLYSKTKPSPSKESIRRAKDLPREGLHPIFRSIIETGELEAMSFFQKIKNFRPKQTILEAEGEVAKSKHVKGPAGQWVDVMKKKRAIHEEIINTRHQQNQKTSNNHLEMEAEPTTSFVDGTVEGSKVSGKKRKAQETFKDDEFFISSIPVNHHSEAGLSLRGNEGFGSNRLDAAVLDLVADDGQGIKQQQSNYHWDKKGKKYIKLNNGDRVTASGKIKTESGAKATAKKTGIYKRWQERSHKKVSRDSGDADETTRMSGRGGRDGKRRQGSVPNAHVRSEIKDLDQVRKERQQKANKVSYLQSKRGGRGGRGGARGGRGGGARGGRGGSRDFGGGGRDFGSSSDRGGRSGGRDFGGRRGGASTSSRGGKRGGGRGGGG

SEQ ID NO: 88383 - protein, 754 aa, Arabidopsis thaliana
  peptide (1)..(754): Ceres Seq. ID no. 12708603
MLEKLKQHVPQGGVRALILSPTRDLAEQTLKFTKELGKFTDLRVSLLVGGDSMEDQFEELTKGPDVIIATPGRLMHLLSEVDDMTLRTVEYVVFDEADSLFGMGFAEQLHQILTQLSENRQTLLFSATLPSALAEFAKAGLREPQLVRLDVENKISPDLKLSFLTVRPEEKYSALLYLVREHISSDQQTLIFVSTKHHVEFVNSLFKLENIEPSVCYGDMDQDARKIHVSRFRARKTMLLIVTDIAARGIDIPLLDNVINWDFPPRPKIFVHRVGRAARAGRTGCAYSFVTPEDMPYMLDLHLFLSKPVRPAPTEDEVLKNMEEVMTKTSQAIDSGVTVYGRFPQKTIDLIFNRTREMIDSSAELDSLERTSTKAFRLYSKTKPSPSKESIRRAKDLPREGLHPIFRSIIETGELEAMSFFQKIKNFRPKQTILEAEGEVAKSKHVKGPAGQWVDVMKKKRAIHEEIINTRHQQNQKTSNNHLEMEAEPTTSFVDGTVEGSKVSGKKRKAQETFKDDEFFISSIPVNHHSEAGLSLRGNEGFGSNRLDAAVLDLVADDGQGIKQQQSNYHWDKKGKKYIKLNNGDRVTASGKIKTESGAKATAKKTGIYKRWQERSHKKVSRDSGDADETTRMSGRGGRDGKRRQGSVPNAHVRSEIKDLDQVRKERQQKANKVSYLQSKRGGRGGRGGARGGRGGGARGGRGGSRDFGGGGRDFGSSSDRGGRSGGRDFGGRRGGASTSSRGGKRGGGRGGGG

SEQ ID NO: 88384 - DNA, 1140 bp, Arabidopsis thaliana
  misc_feature (1)..(1140): Ceres Seq. ID no. 12708635
  misc_feature (1)..(1140): Ortholog of  Ceres SEQ ID NO 12586556 as cited in SEQ ID NO 64667
  misc_feature (1)..(1140): Ortholog of  Ceres SEQ ID NO 13660894 as cited in SEQ ID NO 67475
atgcgatcttacattcgccatgagtctcctctcgatgcaattcaagtatatctcggtatggtgagatcgactgttttacccgatcgatattctcttccgattgtaatcaaagcagccgttcaaattcatgattttacgttgggaaaggagcttcattccgtcgccgttaggttagggttcgtcggagatgagttctgcgagagtgggttcattacattgtattgtaaagcaggggaatttgagaacgcacgtaaggtgttcgatgaaaatcctgagagaaagctggggtcttggaacgccattatcggagggttgaatcacgctggtcgagctaacgaggcggtggaaatgtttgtggatatgaaaaggagtggacttgagcctgatgatttcactatggttagtgtgactgcttcttgtggaggattaggtgacttgagcttggcttttcagttgcataaatgcgttctacaagctaagaccgaagagaagtctgatatcatgatgctgaattcgctcattgatatgtatggaaaatgtgggcgtatggatttagcgagtcacatattcgaggaaatgcgacagagaaacgttgtctcttggagttctatgatcgtgggttacgcagctaacgggaatacattagaggctttagaatgctttcgtcagatgagagaattcggtgtcagaccaaacaagatcacgttcgttggagttctcagtgcttgcgtccatggaggtcttgtggaggaaggaaaaacatattttgcgatgatgaagtcagagttcgagctagaaccgggattatcgcattacggatgcatagttgatctattgagccgtgacgggcagcttaaggaggcaaagaaagttgttgaggagatgccgatgaagcctaacgtgatggtttggggttgtttgatgggagggtgtgagaagtttggggatgttgagatggctgagtgggtggctccatacatggttgagcttgagccgtggaacgatggtgtttatgttgtcttggctaatgtgtatgcactcagagggatgtggaaagatgttgagagagttaggaagttgatgaagacgaagaaggttgctaagattcctgcctatagctatgcttcaacgacattttga

SEQ ID NO: 88385 - protein, 379 aa, Arabidopsis thaliana; identical to SEQ ID NO: 73041
  peptide (1)..(379): Ceres Seq. ID no. 12708636

SEQ ID NO: 88386 - protein, 360 aa, Arabidopsis thaliana; identical to SEQ ID NO: 73042
  peptide (1)..(360): Ceres Seq. ID no. 12708637

SEQ ID NO: 88387 - protein, 263 aa, Arabidopsis thaliana
  peptide (1)..(263): Ceres Seq. ID no. 12708638
MFVDMKRSGLEPDDFTMVSVTASCGGLGDLSLAFQLHKCVLQAKTEEKSDIMMLNSLIDMYGKCGRMDLASHIFEEMRQRNVVSWSSMIVGYAANGNTLEALECFRQMREFGVRPNKITFVGVLSACVHGGLVEEGKTYFAMMKSEFELEPGLSHYGCIVDLLSRDGQLKEAKKVVEEMPMKPNVMVWGCLMGGCEKFGDVEMAEWVAPYMVELEPWNDGVYVVLANVYALRGMWKDVERVRKLMKTKKVAKIPAYSYASTTF

SEQ ID NO: 88388 - DNA, 2262 bp, Arabidopsis thaliana
  misc_feature (1)..(2262): Ceres Seq. ID no. 12708641
  misc_feature (1)..(2262): Ortholog of  Ceres SEQ ID NO 13657138 as cited in SEQ ID NO 65923
  misc_feature (1)..(2262): Ortholog of  Ceres SEQ ID NO 13584744 as cited in SEQ ID NO 69137
atgatagaaaccggcggagataaacagagctccgtcgaggaaggatgtggtggccgtacgattcttgtcggcgtgaagcttgacgctccgagcagagagttactcacttgggctctggttaaagtcgctgagcctggtgatactgtgatcgctcttcatatccttggaaatgagattgtggatcgcgcagggaactcttcgcttctctctctggttagaactttcgactctgttcttgacgtttatgaaggtttctgcaatttgaaacaggtggatctgaagctgaagctatgtcgtggttcctctgctcgaaagattttagttagggaagcgaaatcgttttctgcaacgaaagttttagttgggatttcaaaaagtcaccacgcgattcgttcatcagcttctgtagctaagtacatagcgaagaaactatcaaaggattgttgggttattgctgtaaacaatggtaaaatcttgttccaaaaggaaggttctccatcatctaccattaatcaatctcaaggaaaggaagatgttcggaggattactttgttgaatgtgcttcagagatctgttacattgaataagactactaaagtagttagccattctgaggaagattctaactctaaggaggaggaggaggatcaagcctgtggccagaatctacggcaagtcttagcggctgctcgtttggagaattgctcggtttgtggttttgattctttgtctccgaacgatacaactactcctggaaagttgtctggagcttcagattttgataggagtgaagatgatgatgagtgcaacaaagcaatggagattgtgcctgtgaatggttcagaagattcaggcggttctgtaactatgttggttaggaaattgcctgaacctagaccaggttggcctttgcttcgtcgtgctgtttctacattaggacaatctgttactcctcataagataccggtagttcaatgggctttgaagcttcctcctagggatactaagcaacttggttatgattcttctgaagataatttgtcaaccttaaacgcacttgttccatttggtatcaactctatcaccaacaagtctattcctgacaatagtccaagaaaattgccagaggaattagagggactttatgagaggttctcttcaacttgccggtttttcaagtacaaggaactcgtttcagtgacatcgaatttctccgctgataattttattgggaaaggaggcagcagccgggtttttagaggttgtttgtccaatggaagagtggttgctgtgaagattctcaagcaaaccgaagatgtcttgaatgacttcgtggctgagattgagatcatcacaacattacaccataagaatattatctccctcttaggattttgctttgaagaccataaccttttacttgtatacaattatctctcaagaggaagccttgaagagaaccttcatggaaacaagaaagatccgcttgcattttgttggagcgagaggtataaagtggctgtgggagtagcagaggcattggactatctgcataatactgcttcgcaacccgtcatccacagagatgttaagtcatcaaacatactattatctgatgattttgagccacagctttctgattttggacttgcaaggtgggcgtctatatctacgacacacataatctgctctgatgtcgcgggaacttttggatacttggctccagagtacttcatgtatggtaaggtgaatgataagatagatgtgtatgcattcggcgttgttctcctcgagttactttcgggaagaaaaccgattagcagcggatgtccaaagggacaagagagtctagtcatgtgggccaaaccaattctagatgatggaaagtattctcagttattagacccgagtttgcgggataacaacaacaataatgatgaccaaatgcagaggatggcgttagctgctactctttgtattcgacgtagtcctcaagctagaccgaaaatgagcatcgtattaaagctacttaaaggtgatgaagacacgcttgagtgggcaatgcagcaagtgaatagttcatcagaggagtcagagatgctcaaagatgagcaatgccaaagatctaacttgcaatcacaccttaacttagcacttcttgatgttgaagatgactcaatctccatgggaagcattgagcaaggtgtctctgttgaggattatctaaaaggtaggacaagccgttcttcgagcttcgactaa

SEQ ID NO: 88389 - protein, 753 aa, Arabidopsis thaliana
  peptide (1)..(753): Ceres Seq. ID no. 12708642
MIETGGDKQSSVEEGCGGRTILVGVKLDAPSRELLTWALVKVAEPGDTVIALHILGNEIVDRAGNSSLLSLVRTFDSVLDVYEGFCNLKQVDLKLKLCRGSSARKILVREAKSFSATKVLVGISKSHHAIRSSASVAKYIAKKLSKDCWVIAVNNGKILFQKEGSPSSTINQSQGKEDVRRITLLNVLQRSVTLNKTTKVVSHSEEDSNSKEEEEDQACGQNLRQVLAAARLENCSVCGFDSLSPNDTTTPGKLSGASDFDRSEDDDECNKAMEIVPVNGSEDSGGSVTMLVRKLPEPRPGWPLLRRAVSTLGQSVTPHKIPVVQWALKLPPRDTKQLGYDSSEDNLSTLNALVPFGINSITNKSIPDNSPRKLPEELEGLYERFSSTCRFFKYKELVSVTSNFSADNFIGKGGSSRVFRGCLSNGRVVAVKILKQTEDVLNDFVAEIEIITTLHHKNIISLLGFCFEDHNLLLVYNYLSRGSLEENLHGNKKDPLAFCWSERYKVAVGVAEALDYLHNTASQPVIHRDVKSSNILLSDDFEPQLSDFGLARWASISTTHIICSDVAGTFGYLAPEYFMYGKVNDKIDVYAFGVVLLELLSGRKPISSGCPKGQESLVMWAKPILDDGKYSQLLDPSLRDNNNNNDDQMQRMALAATLCIRRSPQARPKMSIVLKLLKGDEDTLEWAMQQVNSSSEESEMLKDEQCQRSNLQSHLNLALLDVEDDSISMGSIEQGVSVEDYLKGRTSRSSSFD

SEQ ID NO: 88390 - protein, 481 aa, Arabidopsis thaliana
  peptide (1)..(481): Ceres Seq. ID no. 12708643
MEIVPVNGSEDSGGSVTMLVRKLPEPRPGWPLLRRAVSTLGQSVTPHKIPVVQWALKLPPRDTKQLGYDSSEDNLSTLNALVPFGINSITNKSIPDNSPRKLPEELEGLYERFSSTCRFFKYKELVSVTSNFSADNFIGKGGSSRVFRGCLSNGRVVAVKILKQTEDVLNDFVAEIEIITTLHHKNIISLLGFCFEDHNLLLVYNYLSRGSLEENLHGNKKDPLAFCWSERYKVAVGVAEALDYLHNTASQPVIHRDVKSSNILLSDDFEPQLSDFGLARWASISTTHIICSDVAGTFGYLAPEYFMYGKVNDKIDVYAFGVVLLELLSGRKPISSGCPKGQESLVMWAKPILDDGKYSQLLDPSLRDNNNNNDDQMQRMALAATLCIRRSPQARPKMSIVLKLLKGDEDTLEWAMQQVNSSSEESEMLKDEQCQRSNLQSHLNLALLDVEDDSISMGSIEQGVSVEDYLKGRTSRSSSFD

SEQ ID NO: 88391 - protein, 464 aa, Arabidopsis thaliana
  peptide (1)..(464): Ceres Seq. ID no. 12708644
MLVRKLPEPRPGWPLLRRAVSTLGQSVTPHKIPVVQWALKLPPRDTKQLGYDSSEDNLSTLNALVPFGINSITNKSIPDNSPRKLPEELEGLYERFSSTCRFFKYKELVSVTSNFSADNFIGKGGSSRVFRGCLSNGRVVAVKILKQTEDVLNDFVAEIEIITTLHHKNIISLLGFCFEDHNLLLVYNYLSRGSLEENLHGNKKDPLAFCWSERYKVAVGVAEALDYLHNTASQPVIHRDVKSSNILLSDDFEPQLSDFGLARWASISTTHIICSDVAGTFGYLAPEYFMYGKVNDKIDVYAFGVVLLELLSGRKPISSGCPKGQESLVMWAKPILDDGKYSQLLDPSLRDNNNNNDDQMQRMALAATLCIRRSPQARPKMSIVLKLLKGDEDTLEWAMQQVNSSSEESEMLKDEQCQRSNLQSHLNLALLDVEDDSISMGSIEQGVSVEDYLKGRTSRSSSFD

SEQ ID NO: 88392 - DNA, 2157 bp, Arabidopsis thaliana
  misc_feature (1)..(2157): Ceres Seq. ID no. 12708652
  misc_feature (1)..(2157): Ortholog of  Ceres SEQ ID NO 14315774 as cited in SEQ ID NO 20630
atggaggacgaaccaaagctcccaaccgatgacggtccaactttcaacgaatcgtgtaaaatctcgtctgagatattgaccgccggtgatcggaaattacttaaagttgaactcctcaaagaggagaccacgctcgtatcgtggaagaagcttatggatgaggctagcaaagaaaacggcggcttgttcgtttcggctcccgaacggcttcttaatgccaaccctaacctcgagtttcgccttgcaccgggggcacaaacagagaatgaaatggtgaatcaacctcatcctaatcgtcttaactctgttatagccaagattgagagactttatatgggtaaagacggtagtgatggggaagagttagacggtgctcctgacgatgatgactatgacactgaagattcatttatcgatgatgctgaattggatgagtattttgaagttgataattcgccaattaaacatgatggattttttgtcaatagaggaaagttagaacgaattgaaccttcagctacatcgaaccagcagcaaccaaagaaaaggcgaaggaaggagtcagcaaaaccttgtggcgatgttgttgatgtatccagaaaacgagccaagatggctaagacggctgggggaaagacagttgattatttgaatgtgaaagtccaggatcaatctgcttctcctgggccctcttcgaagaaaatttccaatgattcaaagacggtgcaagattcgttttcccctttgaaagcgcaaaatggcaatgattccttagttttggaaaatgtgaagcatactgataaagcgaatcaccagccaatgaatgccacgagtccgaagtcaaaggcagctggatcttctggcccccttcatccgaagtgcagcagcaaaagtgttcatgaacaatctaattcccctccaggaaaatctcggccaaatgtttcggcaaaatcagcagtagttcgtcagcaagttaacaatggcatgcctgacctggacattgcaacggaaagcaaaacatctattcaaatatctaaaaaaagcggttcaaatggccggcctaaatactcgacacttgagaaagccatcaggaatttggagaagttggtcgctgaatcaaggcctcctgctgccactgagaatcaagatgccgatatctcttcccaagcagtgaagaggggattgccaggagatgtaaaattgcatcttgctaaagttgctagaatcgcgaagagtagcaattttcttttcttgaagtatgcgagccaaggtgaaatatcaggagagttaatcaatcgtctcatgggcattgtcggtcatctaatacagattagatcacttaaggtgaaagctcttccattccagaaagagctaacaagatctgtatttgttagtgaaggagttcaagctcttacggaaacaaatcaagaagctggaacatcagacgattttcaggatgttggatctcttggaaagtcacctgtgaagaagtttgtcatggatgtggcgctggaggaaaaattgtgtgatctatatgacgtgtttgttgagggaatggatgaacattcaggttcacaaatcagaaagctttattcagatctagctcaactgtggcccaatagtttagttgacaatcatgagatcaggcgtgccatttgccgggaaaaggaaaggcggagagcattggaaggaaacattgggaaggagatggatcaaacgaagataacaaagaagaaacagacacaattggtccctaaatctgagggtattacttatcccgacaagacttcaggtgttgaagttaaagcaagtgttgtcctaactgcaaccaccacgtccttagtggactgtcaacctgcagcagactcgtcctttgaaaggtcaaagcagcaacatgagaaattaaagcgaacttcgagcttaagcaatcctgcagcagaaggaaagaaagtcagaagaaagacagaaccagctctagaagaaactcacctgcccgcagagaaacccctcgttctggccctgaagcggcagacacatctaaaatccaagacacataaacaggtacaggtacatccacagtccaaggcacataaacaggcacaggtacatccaaaggccaagacacagactcctccagacctgaacctgccaagttag

SEQ ID NO: 88393 - protein, 718 aa, Arabidopsis thaliana
  peptide (1)..(718): Ceres Seq. ID no. 12708653
MEDEPKLPTDDGPTFNESCKISSEILTAGDRKLLKVELLKEETTLVSWKKLMDEASKENGGLFVSAPERLLNANPNLEFRLAPGAQTENEMVNQPHPNRLNSVIAKIERLYMGKDGSDGEELDGAPDDDDYDTEDSFIDDAELDEYFEVDNSPIKHDGFFVNRGKLERIEPSATSNQQQPKKRRRKESAKPCGDVVDVSRKRAKMAKTAGGKTVDYLNVKVQDQSASPGPSSKKISNDSKTVQDSFSPLKAQNGNDSLVLENVKHTDKANHQPMNATSPKSKAAGSSGPLHPKCSSKSVHEQSNSPPGKSRPNVSAKSAVVRQQVNNGMPDLDIATESKTSIQISKKSGSNGRPKYSTLEKAIRNLEKLVAESRPPAATENQDADISSQAVKRGLPGDVKLHLAKVARIAKSSNFLFLKYASQGEISGELINRLMGIVGHLIQIRSLKVKALPFQKELTRSVFVSEGVQALTETNQEAGTSDDFQDVGSLGKSPVKKFVMDVALEEKLCDLYDVFVEGMDEHSGSQIRKLYSDLAQLWPNSLVDNHEIRRAICREKERRRALEGNIGKEMDQTKITKKKQTQLVPKSEGITYPDKTSGVEVKASVVLTATTTSLVDCQPAADSSFERSKQQHEKLKRTSSLSNPAAEGKKVRRKTEPALEETHLPAEKPLVLALKRQTHLKSKTHKQVQVHPQSKAHKQAQVHPKAKTQTPPDLNLPS

SEQ ID NO: 88394 - protein, 667 aa, Arabidopsis thaliana
  peptide (1)..(667): Ceres Seq. ID no. 12708654
MDEASKENGGLFVSAPERLLNANPNLEFRLAPGAQTENEMVNQPHPNRLNSVIAKIERLYMGKDGSDGEELDGAPDDDDYDTEDSFIDDAELDEYFEVDNSPIKHDGFFVNRGKLERIEPSATSNQQQPKKRRRKESAKPCGDVVDVSRKRAKMAKTAGGKTVDYLNVKVQDQSASPGPSSKKISNDSKTVQDSFSPLKAQNGNDSLVLENVKHTDKANHQPMNATSPKSKAAGSSGPLHPKCSSKSVHEQSNSPPGKSRPNVSAKSAVVRQQVNNGMPDLDIATESKTSIQISKKSGSNGRPKYSTLEKAIRNLEKLVAESRPPAATENQDADISSQAVKRGLPGDVKLHLAKVARIAKSSNFLFLKYASQGEISGELINRLMGIVGHLIQIRSLKVKALPFQKELTRSVFVSEGVQALTETNQEAGTSDDFQDVGSLGKSPVKKFVMDVALEEKLCDLYDVFVEGMDEHSGSQIRKLYSDLAQLWPNSLVDNHEIRRAICREKERRRALEGNIGKEMDQTKITKKKQTQLVPKSEGITYPDKTSGVEVKASVVLTATTTSLVDCQPAADSSFERSKQQHEKLKRTSSLSNPAAEGKKVRRKTEPALEETHLPAEKPLVLALKRQTHLKSKTHKQVQVHPQSKAHKQAQVHPKAKTQTPPDLNLPS

SEQ ID NO: 88395 - protein, 628 aa, Arabidopsis thaliana
  peptide (1)..(628): Ceres Seq. ID no. 12708655
MVNQPHPNRLNSVIAKIERLYMGKDGSDGEELDGAPDDDDYDTEDSFIDDAELDEYFEVDNSPIKHDGFFVNRGKLERIEPSATSNQQQPKKRRRKESAKPCGDVVDVSRKRAKMAKTAGGKTVDYLNVKVQDQSASPGPSSKKISNDSKTVQDSFSPLKAQNGNDSLVLENVKHTDKANHQPMNATSPKSKAAGSSGPLHPKCSSKSVHEQSNSPPGKSRPNVSAKSAVVRQQVNNGMPDLDIATESKTSIQISKKSGSNGRPKYSTLEKAIRNLEKLVAESRPPAATENQDADISSQAVKRGLPGDVKLHLAKVARIAKSSNFLFLKYASQGEISGELINRLMGIVGHLIQIRSLKVKALPFQKELTRSVFVSEGVQALTETNQEAGTSDDFQDVGSLGKSPVKKFVMDVALEEKLCDLYDVFVEGMDEHSGSQIRKLYSDLAQLWPNSLVDNHEIRRAICREKERRRALEGNIGKEMDQTKITKKKQTQLVPKSEGITYPDKTSGVEVKASVVLTATTTSLVDCQPAADSSFERSKQQHEKLKRTSSLSNPAAEGKKVRRKTEPALEETHLPAEKPLVLALKRQTHLKSKTHKQVQVHPQSKAHKQAQVHPKAKTQTPPDLNLPS

SEQ ID NO: 88396 - DNA, 1237 bp, Arabidopsis thaliana
  misc_feature (1)..(1237): Ceres Seq. ID no. 12708664
  misc_feature (1)..(1237): Ortholog of  Ceres SEQ ID NO 12562215 as cited in SEQ ID NO 20489
  misc_feature (1)..(1237): Ortholog of  Ceres SEQ ID NO 13595548 as cited in SEQ ID NO 51024
  misc_feature (1)..(1237): Ortholog of  Ceres SEQ ID NO 13582350 as cited in SEQ ID NO 56734
  misc_feature (1)..(1237): Ortholog of  Ceres SEQ ID NO 12476493 as cited in SEQ ID NO 58163
  misc_feature (1)..(1237): Ortholog of  Ceres SEQ ID NO 13597295 as cited in SEQ ID NO 63743
  misc_feature (1)..(1237): Ortholog of  Ceres SEQ ID NO 12617090 as cited in SEQ ID NO 64005
  misc_feature (1)..(1237): Ortholog of  Ceres SEQ ID NO 13597439 as cited in SEQ ID NO 64081
  misc_feature (1)..(1237): Ortholog of  Ceres SEQ ID NO 13597233 as cited in SEQ ID NO 64370
  misc_feature (1)..(1237): Ortholog of  Ceres SEQ ID NO 13623850 as cited in SEQ ID NO 0
  misc_feature (1)..(1237): Ortholog of  Ceres SEQ ID NO 14309162 as cited in SEQ ID NO 0
aactaaatcagaagattactactaaacagagtcttttttgacttgccaaaaacacatctgtctctctctctctctttgcggatctgaaatggcgattcctgttatcgatttctccaaactcaatggtgaagaaagagagaagacactgtctgaaatcgctagagcttgcgaagagtggggattttttcagctggtgaaccatggtattccattggagcttctaaataaggtgaagaagctgagctcagattgctacaaaacagagagagaagaagcattcaagacttctaatcccgtgaagttgctcaacgaattggttcaaaagaactctggcgagaagctagaaaacgtggactgggaagatgtcttcactctcttggaccataaccaaaacgaatggccatccaacattaaagagactatgggagaatacagagaagaagtgaggaagctagcgagcaagatgatggaagtgatggatgagaatttgggtttgcctaaaggttacataaagaaagctttcaatgaaggaatggaagatggagaagagacagctttctttgggactaaagtcagccattaccctccttgtcctcatcctgagctagtcaatggccttcgagctcatactgatgcaggaggtgtcgttttgcttttccaagacgatgaatatgatggccttcaggtcttgaaagacggcgagtggatcgatgttcagcctctacctaatgccattgttatcaacactggtgatcagattgaagttcttagcaacggaaggtacaagagtgcgtggcacagggtgttggcgagggaggaaggaaacagaaggtctatagcttccttctacaatccgtcgtacaaggcggcgatagggccagccgcggtggcggaagaggaaggaagtgagaagaagtatccaaagtttgtgtttggagattacatggatgtttatgcaaaccagaagttcatgcctaaagagcctcgttttctagctgtaaagtctctctaaatgtactattttatttatttttacagtactatcactgttttatctacacccattatgtattttctcttaagctataaatgccaaattatatagttaaaaatttggcatctgctctccaggctttatatttttttgtttttttttgttttgccatgtgatgtatgaatctttcttgtgtgacctatgttcttagtttttgaatataaatgtgtgtgcctttttctt

SEQ ID NO: 88397 - protein, 307 aa, Arabidopsis thaliana
  peptide (1)..(307): Ceres Seq. ID no. 12708665
MAIPVIDFSKLNGEEREKTLSEIARACEEWGFFQLVNHGIPLELLNKVKKLSSDCYKTEREEAFKTSNPVKLLNELVQKNSGEKLENVDWEDVFTLLDHNQNEWPSNIKETMGEYREEVRKLASKMMEVMDENLGLPKGYIKKAFNEGMEDGEETAFFGTKVSHYPPCPHPELVNGLRAHTDAGGVVLLFQDDEYDGLQVLKDGEWIDVQPLPNAIVINTGDQIEVLSNGRYKSAWHRVLAREEGNRRSIASFYNPSYKAAIGPAAVAEEEGSEKKYPKFVFGDYMDVYANQKFMPKEPRFLAVKSL

SEQ ID NO: 88398 - protein, 196 aa, Arabidopsis thaliana
  peptide (1)..(196): Ceres Seq. ID no. 12708666
MGEYREEVRKLASKMMEVMDENLGLPKGYIKKAFNEGMEDGEETAFFGTKVSHYPPCPHPELVNGLRAHTDAGGVVLLFQDDEYDGLQVLKDGEWIDVQPLPNAIVINTGDQIEVLSNGRYKSAWHRVLAREEGNRRSIASFYNPSYKAAIGPAAVAEEEGSEKKYPKFVFGDYMDVYANQKFMPKEPRFLAVKSL

SEQ ID NO: 88399 - protein, 182 aa, Arabidopsis thaliana
  peptide (1)..(182): Ceres Seq. ID no. 12708667
MMEVMDENLGLPKGYIKKAFNEGMEDGEETAFFGTKVSHYPPCPHPELVNGLRAHTDAGGVVLLFQDDEYDGLQVLKDGEWIDVQPLPNAIVINTGDQIEVLSNGRYKSAWHRVLAREEGNRRSIASFYNPSYKAAIGPAAVAEEEGSEKKYPKFVFGDYMDVYANQKFMPKEPRFLAVKSL

SEQ ID NO: 88400 - DNA, 1092 bp, Arabidopsis thaliana
  misc_feature (1)..(1092): Ceres Seq. ID no. 12708743
  misc_feature (1)..(1092): Ortholog of  Ceres SEQ ID NO 12611726 as cited in SEQ ID NO 56740
  misc_feature (1)..(1092): Ortholog of  Ceres SEQ ID NO 13658911 as cited in SEQ ID NO 66294
  misc_feature (1)..(1092): Ortholog of  Ceres SEQ ID NO 13660693 as cited in SEQ ID NO 67411
atgtccggcaaaggtctatctccggcgccgttcaacgcgcagccgatgattgtccaagatgctgacccgttacgttttcgggtcggcgaacaggatcctaaaacccgtgaattcgctgcctttatcggcgaccaccggtatttcgcggcagcagcagcagcagccgccgcagctaatccacatcctcatctcgagttccgtcagaatttctactcggagaaacccattatcggaaaccctaacgacagtggtggatccgacggcgaggatgacgttgacgtggaagaagaagacgaggatgatgacttagacggaaacgaaggtgacatcggcatgaacaaagacgctggtgaagattctgtatctgcaggagctgtgatagtggttggacaagacaacgcagcttactattcccagcattttaagacagtggaagcgagttttgtttctaggaatgaggaatcatcaatcgctgcggataatgggtgtgatttcagtggcagaagagacctttcttcttcttcgagcaattcgatcgagtcattgagaaccattttgtctgatcctacaacaggctctttgatggctgatgctatgattttaccttgcggacacacttttggagctggagggatagaacaagttaaacagatgaaagcttgttgcacatgttcacaaccagtctcagaagactcgataaccccaaatctcactttacgagttgcggtacaagcattctgccgagaagagaattcacagtcaaaccatccatctaagagaaaacgagaaggatttgatcaagagagacgcgcatttggtgtcacgaatcattcaggtcgttcaagaaacaaaagtaaccatttcccatttgctgtggcagatcgagttataataaagggaaataagaggacaccacctcgttttgttggccgggaagctgttgtgactactcaatgcttaaatggctggtatgtggtgaaaacactggacaacgcagagagtgtgaagcttcagtatcgttcattggctaaagctccagaagatccatcagctaaagcaacaccaaacaagatggtctctaactggctctaa

SEQ ID NO: 88401 - protein, 363 aa, Arabidopsis thaliana
  peptide (1)..(363): Ceres Seq. ID no. 12708744
MSGKGLSPAPFNAQPMIVQDADPLRFRVGEQDPKTREFAAFIGDHRYFAAAAAAAAAANPHPHLEFRQNFYSEKPIIGNPNDSGGSDGEDDVDVEEEDEDDDLDGNEGDIGMNKDAGEDSVSAGAVIVVGQDNAAYYSQHFKTVEASFVSRNEESSIAADNGCDFSGRRDLSSSSSNSIESLRTILSDPTTGSLMADAMILPCGHTFGAGGIEQVKQMKACCTCSQPVSEDSITPNLTLRVAVQAFCREENSQSNHPSKRKREGFDQERRAFGVTNHSGRSRNKSNHFPFAVADRVIIKGNKRTPPRFVGREAVVTTQCLNGWYVVKTLDNAESVKLQYRSLAKAPEDPSAKATPNKMVSNWL

SEQ ID NO: 88402 - protein, 348 aa, Arabidopsis thaliana
  peptide (1)..(348): Ceres Seq. ID no. 12708745
MIVQDADPLRFRVGEQDPKTREFAAFIGDHRYFAAAAAAAAAANPHPHLEFRQNFYSEKPIIGNPNDSGGSDGEDDVDVEEEDEDDDLDGNEGDIGMNKDAGEDSVSAGAVIVVGQDNAAYYSQHFKTVEASFVSRNEESSIAADNGCDFSGRRDLSSSSSNSIESLRTILSDPTTGSLMADAMILPCGHTFGAGGIEQVKQMKACCTCSQPVSEDSITPNLTLRVAVQAFCREENSQSNHPSKRKREGFDQERRAFGVTNHSGRSRNKSNHFPFAVADRVIIKGNKRTPPRFVGREAVVTTQCLNGWYVVKTLDNAESVKLQYRSLAKAPEDPSAKATPNKMVSNWL

SEQ ID NO: 88403 - protein, 252 aa, Arabidopsis thaliana
  peptide (1)..(252): Ceres Seq. ID no. 12708746
MNKDAGEDSVSAGAVIVVGQDNAAYYSQHFKTVEASFVSRNEESSIAADNGCDFSGRRDLSSSSSNSIESLRTILSDPTTGSLMADAMILPCGHTFGAGGIEQVKQMKACCTCSQPVSEDSITPNLTLRVAVQAFCREENSQSNHPSKRKREGFDQERRAFGVTNHSGRSRNKSNHFPFAVADRVIIKGNKRTPPRFVGREAVVTTQCLNGWYVVKTLDNAESVKLQYRSLAKAPEDPSAKATPNKMVSNWL

SEQ ID NO: 88404 - DNA, 5322 bp, Arabidopsis thaliana
  misc_feature (1)..(5322): Ceres Seq. ID no. 12708788
  misc_feature (1)..(5322): Ortholog of  Ceres SEQ ID NO 13580958 as cited in SEQ ID NO 53269
  misc_feature (1)..(5322): Ortholog of  Ceres SEQ ID NO 13623196 as cited in SEQ ID NO 0
atgcctccaggggttcgccaacttaccgtcctcggaaagtttaaacctttcggtctaatcgccgaagctactgatggtaaatcaccggatgattcctatcagtatttcctcttcgatcctgagctcactggcgagcgagatgatgctgatggcaatgatgccaacttctcgcggcagagagagcacgagctcttcatccgagacaactgcataatctggacaagcggttcgcgggtcctcaagcgttttaccttgtcttctgccgtcattaaggcatgctggagcaaccttggtcgagggacagaagcttttctttgtgtattacaaattgcttgcttaacaatctacaacacatcaggcgaagttgtatctgttccactaatgcgtactgtcaaatcaatatggcctctaccatgtggtctacttcttgagcaagctggtgaagtgaatccaccctcacatgttccattttctcctgttagccccatccttggttctcgtgagatgctgcgccaaagaaaagaagttgggaatagttcaccacaaaacttccattccccagtcgcgcatgaccttattagcaaaagagatatgccatgcatgtcttcccatctgattctaagagatccactagaggaacctgggccaacctacgttgaagagagggggaagttgaccataatgaaggactacgatgagaggacaatttggacaagtgaccgtctacctcttatgacgtcgtataacaaaggcaagatgcaacattctgtgtgggcggccgaatttatagagtcaaaccttgaagcttctgcgtcatgttcaagcggcattgttcctgatgctgttctctcgaagcgggtttcttttcgtagaatatggcaagcgaaaggtgctaagaaagctgcatctaaggtctttttggcaactgataattcagtcccagtaatttgctttctgattctagaacaaaagaagctgttatcggtgggacttcaaactgttgaaatcaataacgaaattctgttcgatgttaagcctgatataagctggagtgtgtctgcgattgctgctgcacctgttgttgtgacacgttctcaagtgaaaataggactgcttccacatttggatatcattgttttatctccagaaaatgacctctttctctattcaggaaaacaatgtctctgtagatatgtattaccttcttggttgggagaaagtattggttccggggatggagagtctgcaaaaacagattcaggtttcaggaacctgaagatcacaggattgtctgatgctgttttaggatctatcaatctctcagttaaccattcacagatctttcggtgtgccttaactggtaaaccttcatcgtcacttgcaaatgattgcatagcagccatagctgagggactacgatccgatctgtacagtttgtttctctctcttctttggggagatggtcattctgacctgcaaggttccagtattcattttgaatgggaagcattatgcaacatttttctggagatctgtcaaaagcctactgttgtgcatcgaaagcaacccaaaacagcatcagagtcctcctgggagtttcttctcatcagcaaatttcataagacctactctaggtttcacaatggtattacttcaataaatcgtttagatctggaaggcattgtcccatttgattccaagatttgtagtgaagaaacactgggcagctcatgtgaactaatggtccagagtttagattgtctccatgcagtttatgagagcttgaagatggataatctacggaaacaggatttgcatcacttggctgttttgttgtgcaatattgccaagtttctggatgagaagtgttacttagattactacatacgtgattttcctcgtctgtcaacaactattggggcgtgcacaaccctttcttctagcagaaaacctccaaatttatttagatggcttgagaattgtttaagacgtggatgtttatcaacaaactttgatgacctcccagatttgatccgtagagatgggtgctccatagtaagctgggcaaggaaagttgtttccttctacagtgtgttatttggtgataagccagaaggacggacactttcatcaggtgtcccctgtaatatcgcgccaggatcatactcctgtaacgaggaactcactatcttagctatggcaggagagagatttgggcttcaccaactggatttgctaccttctggtgtttctctcccgctaagacatgcactggatagctgtcgggaatctcctccagctgactggccagcaattgcttatgtgcttcttggtcgagaagatatggccctatccgtcttcagaaattttagttcatctaaggaatttgagatgcagtcaaatacgagtttgatatcgatgtccataccttacatgctacatttgcatccagtaattgttccatcctctgagtcgattggcttagaaaacactaagattgaggatacaaattctgtggatggttctgtgatagatggaatggagcatatcttcaactcctacacacagctacggtatggccgggatctaagattgaatgaggttagacgtcttttgtgctctgcaagacctgtggtagttcaaacggctgctaaccctactatatcagatcaggagcagcaacaggaccatctttggcgcatagcacagaggactgctgttctacccctcgggcgtggagcattcacattatcaacgatacatactcttttaactgaggcgtttactgtaccaaagcttgttttagctggtcgactgccttctcaacaaaatgccattgttaatctagatccaaacataaggaatatccaagaattaaagacctggccagagtttcataacgctgttgctgctgggttacgactggctccgcttcagggaaaggtctccagaacgtggattagatacaataaacctggagagccaaatgctgttcatgctggacttctgtttggcctgggattacagggatatttgcatgtgttaaaccttagtgacatataccaatatttcactcaggaccatgagagcactacggtaggtttgatgcttggtctggccgcttcatacaggggaacaatgcaacctgatattgcaaaggctctctttttccatgttcctgctcgataccaagcttcatatactgagtttgagataccaacacttctacagtctgcagctttagtctccgttggcatgctatttgaaggatcagcacaccagcagacaatgcaattacttttgggtgaaattggccgtagaagtgcaggggacaatgtccttgaaagggagggttatgctgtatctgcaggattctcacttggtcttgtagctttgggccgtggaggtgatgcgctcggttccatggactccttggtcaatcgcttactcctgtatttaggagcaaaagaggaaagatctatccttgtaccatcccttgaagatcaccgaagtgctgcacagataacagacggaagcacttctaatgttgatataactgcacctggagcgataatagctctcacattaatgtatcttaagacagaatcagaggtcatcttctcaaagctctctattcctcaaacacattacgatttggagtgcgttaggcctgatttcattatgctccgtgtcattgctcggaacttgataatgtggagcaggatctgtcctacttgtgattggattcagtctcaagttcctgaagtagtcaaaaatggtatcagccaactccgagatgacatggataatatgtatgaggtggatgttgaagcccttgttcaggcatacgtcaatatagtggccggggcctgcatttcacttgggctgagatttgctggtacgagggatggaaatgctcgtgacttacttaactcctacgctctctatcttttgaatgagatcaagcctctttctgccacacctggaaatgcatttcccaggggaatatcaaaatttgttgatcggggaacacttgaaatgtgtctttatcttatcattatttctctgtcagtggtcatggcgggatctggagacttgcaagtttttcggttgttgagatttctccgcagccgaaactctgccgatggacatgctaactatggcacacaaatggcagtgagcttagccacaggattcttgtttcttggaggcggtatgcgaacattttcaacgaataatggctcactggcaatgttgctcattactctctatccacggttgccttctggaccaaatgacaaccgttgtcacctccaggcattcaggcatttatatgtccttgcaacagaggctcgctggctgcagaccattgatgttgattctggtctgcctgtctatgcccctctagaagtcacagtaaaagagacaaaactttattcagaaacaaaattttgcgagataacaccgtgcattctgccagagcgtgctattctaaagagaatttgtgtatgtggtccccgatactggccccaacaaattgagctagtccccgaagttgggtgtcagtcactgctttcgcgagcaatgcataaggtttttggtttaaggactctgggagaatctaatttgattgctaatagtcatagagaactggattctgatagtgttgatcacttggtcagcactttctcatcagatccaagcctaatagcgtttgcacagttgtgctgtgacaaatcttggaataacagatctgattctgaattcaaggagttctgtctgcaagtgttgtttgactgtataagcaaggatagaccagctcttttgcaggtttatttatctttgtacacaaccattggttcgatggctgatctgcttgtcaaaagcgatagtaacatgtgtgattcactttccatctcaagcctcaaggttgctcttgcctacaatgaggcagtatcaactggaagattggcctcctcaggtggctttgtacagtcaatcttcttagcatcgctgagaaagcgatgtgaagaggttttgaattgctcaacggagctgaagattaatttgaggaattatttgacctcagaagcatggccttatgataagaactcaaagttgcagaaagatataattattctctcatggtatctaaaatggttcaacgtaccatctccatcgatcatcaaagcagcagtggaaaagatcaaatccaagtccaaaaactcaacttcggcaatacctttgttgcgattgttgttaccaaatacgcatattagtgtgattggtgaaattgatagggtctttttcccctcgaattaa

SEQ ID NO: 88405 - protein, 1773 aa, Arabidopsis thaliana
  peptide (1)..(1773): Ceres Seq. ID no. 12708789
MPPGVRQLTVLGKFKPFGLIAEATDGKSPDDSYQYFLFDPELTGERDDADGNDANFSRQREHELFIRDNCIIWTSGSRVLKRFTLSSAVIKACWSNLGRGTEAFLCVLQIACLTIYNTSGEVVSVPLMRTVKSIWPLPCGLLLEQAGEVNPPSHVPFSPVSPILGSREMLRQRKEVGNSSPQNFHSPVAHDLISKRDMPCMSSHLILRDPLEEPGPTYVEERGKLTIMKDYDERTIWTSDRLPLMTSYNKGKMQHSVWAAEFIESNLEASASCSSGIVPDAVLSKRVSFRRIWQAKGAKKAASKVFLATDNSVPVICFLILEQKKLLSVGLQTVEINNEILFDVKPDISWSVSAIAAAPVVVTRSQVKIGLLPHLDIIVLSPENDLFLYSGKQCLCRYVLPSWLGESIGSGDGESAKTDSGFRNLKITGLSDAVLGSINLSVNHSQIFRCALTGKPSSSLANDCIAAIAEGLRSDLYSLFLSLLWGDGHSDLQGSSIHFEWEALCNIFLEICQKPTVVHRKQPKTASESSWEFLLISKFHKTYSRFHNGITSINRLDLEGIVPFDSKICSEETLGSSCELMVQSLDCLHAVYESLKMDNLRKQDLHHLAVLLCNIAKFLDEKCYLDYYIRDFPRLSTTIGACTTLSSSRKPPNLFRWLENCLRRGCLSTNFDDLPDLIRRDGCSIVSWARKVVSFYSVLFGDKPEGRTLSSGVPCNIAPGSYSCNEELTILAMAGERFGLHQLDLLPSGVSLPLRHALDSCRESPPADWPAIAYVLLGREDMALSVFRNFSSSKEFEMQSNTSLISMSIPYMLHLHPVIVPSSESIGLENTKIEDTNSVDGSVIDGMEHIFNSYTQLRYGRDLRLNEVRRLLCSARPVVVQTAANPTISDQEQQQDHLWRIAQRTAVLPLGRGAFTLSTIHTLLTEAFTVPKLVLAGRLPSQQNAIVNLDPNIRNIQELKTWPEFHNAVAAGLRLAPLQGKVSRTWIRYNKPGEPNAVHAGLLFGLGLQGYLHVLNLSDIYQYFTQDHESTTVGLMLGLAASYRGTMQPDIAKALFFHVPARYQASYTEFEIPTLLQSAALVSVGMLFEGSAHQQTMQLLLGEIGRRSAGDNVLEREGYAVSAGFSLGLVALGRGGDALGSMDSLVNRLLLYLGAKEERSILVPSLEDHRSAAQITDGSTSNVDITAPGAIIALTLMYLKTESEVIFSKLSIPQTHYDLECVRPDFIMLRVIARNLIMWSRICPTCDWIQSQVPEVVKNGISQLRDDMDNMYEVDVEALVQAYVNIVAGACISLGLRFAGTRDGNARDLLNSYALYLLNEIKPLSATPGNAFPRGISKFVDRGTLEMCLYLIIISLSVVMAGSGDLQVFRLLRFLRSRNSADGHANYGTQMAVSLATGFLFLGGGMRTFSTNNGSLAMLLITLYPRLPSGPNDNRCHLQAFRHLYVLATEARWLQTIDVDSGLPVYAPLEVTVKETKLYSETKFCEITPCILPERAILKRICVCGPRYWPQQIELVPEVGCQSLLSRAMHKVFGLRTLGESNLIANSHRELDSDSVDHLVSTFSSDPSLIAFAQLCCDKSWNNRSDSEFKEFCLQVLFDCISKDRPALLQVYLSLYTTIGSMADLLVKSDSNMCDSLSISSLKVALAYNEAVSTGRLASSGGFVQSIFLASLRKRCEEVLNCSTELKINLRNYLTSEAWPYDKNSKLQKDIIILSWYLKWFNVPSPSIIKAAVEKIKSKSKNSTSAIPLLRLLLPNTHISVIGEIDRVFFPSN

SEQ ID NO: 88406 - protein, 1646 aa, Arabidopsis thaliana
  peptide (1)..(1646): Ceres Seq. ID no. 12708790
MRTVKSIWPLPCGLLLEQAGEVNPPSHVPFSPVSPILGSREMLRQRKEVGNSSPQNFHSPVAHDLISKRDMPCMSSHLILRDPLEEPGPTYVEERGKLTIMKDYDERTIWTSDRLPLMTSYNKGKMQHSVWAAEFIESNLEASASCSSGIVPDAVLSKRVSFRRIWQAKGAKKAASKVFLATDNSVPVICFLILEQKKLLSVGLQTVEINNEILFDVKPDISWSVSAIAAAPVVVTRSQVKIGLLPHLDIIVLSPENDLFLYSGKQCLCRYVLPSWLGESIGSGDGESAKTDSGFRNLKITGLSDAVLGSINLSVNHSQIFRCALTGKPSSSLANDCIAAIAEGLRSDLYSLFLSLLWGDGHSDLQGSSIHFEWEALCNIFLEICQKPTVVHRKQPKTASESSWEFLLISKFHKTYSRFHNGITSINRLDLEGIVPFDSKICSEETLGSSCELMVQSLDCLHAVYESLKMDNLRKQDLHHLAVLLCNIAKFLDEKCYLDYYIRDFPRLSTTIGACTTLSSSRKPPNLFRWLENCLRRGCLSTNFDDLPDLIRRDGCSIVSWARKVVSFYSVLFGDKPEGRTLSSGVPCNIAPGSYSCNEELTILAMAGERFGLHQLDLLPSGVSLPLRHALDSCRESPPADWPAIAYVLLGREDMALSVFRNFSSSKEFEMQSNTSLISMSIPYMLHLHPVIVPSSESIGLENTKIEDTNSVDGSVIDGMEHIFNSYTQLRYGRDLRLNEVRRLLCSARPVVVQTAANPTISDQEQQQDHLWRIAQRTAVLPLGRGAFTLSTIHTLLTEAFTVPKLVLAGRLPSQQNAIVNLDPNIRNIQELKTWPEFHNAVAAGLRLAPLQGKVSRTWIRYNKPGEPNAVHAGLLFGLGLQGYLHVLNLSDIYQYFTQDHESTTVGLMLGLAASYRGTMQPDIAKALFFHVPARYQASYTEFEIPTLLQSAALVSVGMLFEGSAHQQTMQLLLGEIGRRSAGDNVLEREGYAVSAGFSLGLVALGRGGDALGSMDSLVNRLLLYLGAKEERSILVPSLEDHRSAAQITDGSTSNVDITAPGAIIALTLMYLKTESEVIFSKLSIPQTHYDLECVRPDFIMLRVIARNLIMWSRICPTCDWIQSQVPEVVKNGISQLRDDMDNMYEVDVEALVQAYVNIVAGACISLGLRFAGTRDGNARDLLNSYALYLLNEIKPLSATPGNAFPRGISKFVDRGTLEMCLYLIIISLSVVMAGSGDLQVFRLLRFLRSRNSADGHANYGTQMAVSLATGFLFLGGGMRTFSTNNGSLAMLLITLYPRLPSGPNDNRCHLQAFRHLYVLATEARWLQTIDVDSGLPVYAPLEVTVKETKLYSETKFCEITPCILPERAILKRICVCGPRYWPQQIELVPEVGCQSLLSRAMHKVFGLRTLGESNLIANSHRELDSDSVDHLVSTFSSDPSLIAFAQLCCDKSWNNRSDSEFKEFCLQVLFDCISKDRPALLQVYLSLYTTIGSMADLLVKSDSNMCDSLSISSLKVALAYNEAVSTGRLASSGGFVQSIFLASLRKRCEEVLNCSTELKINLRNYLTSEAWPYDKNSKLQKDIIILSWYLKWFNVPSPSIIKAAVEKIKSKSKNSTSAIPLLRLLLPNTHISVIGEIDRVFFPSN

SEQ ID NO: 88407 - protein, 1605 aa, Arabidopsis thaliana
  peptide (1)..(1605): Ceres Seq. ID no. 12708791
MLRQRKEVGNSSPQNFHSPVAHDLISKRDMPCMSSHLILRDPLEEPGPTYVEERGKLTIMKDYDERTIWTSDRLPLMTSYNKGKMQHSVWAAEFIESNLEASASCSSGIVPDAVLSKRVSFRRIWQAKGAKKAASKVFLATDNSVPVICFLILEQKKLLSVGLQTVEINNEILFDVKPDISWSVSAIAAAPVVVTRSQVKIGLLPHLDIIVLSPENDLFLYSGKQCLCRYVLPSWLGESIGSGDGESAKTDSGFRNLKITGLSDAVLGSINLSVNHSQIFRCALTGKPSSSLANDCIAAIAEGLRSDLYSLFLSLLWGDGHSDLQGSSIHFEWEALCNIFLEICQKPTVVHRKQPKTASESSWEFLLISKFHKTYSRFHNGITSINRLDLEGIVPFDSKICSEETLGSSCELMVQSLDCLHAVYESLKMDNLRKQDLHHLAVLLCNIAKFLDEKCYLDYYIRDFPRLSTTIGACTTLSSSRKPPNLFRWLENCLRRGCLSTNFDDLPDLIRRDGCSIVSWARKVVSFYSVLFGDKPEGRTLSSGVPCNIAPGSYSCNEELTILAMAGERFGLHQLDLLPSGVSLPLRHALDSCRESPPADWPAIAYVLLGREDMALSVFRNFSSSKEFEMQSNTSLISMSIPYMLHLHPVIVPSSESIGLENTKIEDTNSVDGSVIDGMEHIFNSYTQLRYGRDLRLNEVRRLLCSARPVVVQTAANPTISDQEQQQDHLWRIAQRTAVLPLGRGAFTLSTIHTLLTEAFTVPKLVLAGRLPSQQNAIVNLDPNIRNIQELKTWPEFHNAVAAGLRLAPLQGKVSRTWIRYNKPGEPNAVHAGLLFGLGLQGYLHVLNLSDIYQYFTQDHESTTVGLMLGLAASYRGTMQPDIAKALFFHVPARYQASYTEFEIPTLLQSAALVSVGMLFEGSAHQQTMQLLLGEIGRRSAGDNVLEREGYAVSAGFSLGLVALGRGGDALGSMDSLVNRLLLYLGAKEERSILVPSLEDHRSAAQITDGSTSNVDITAPGAIIALTLMYLKTESEVIFSKLSIPQTHYDLECVRPDFIMLRVIARNLIMWSRICPTCDWIQSQVPEVVKNGISQLRDDMDNMYEVDVEALVQAYVNIVAGACISLGLRFAGTRDGNARDLLNSYALYLLNEIKPLSATPGNAFPRGISKFVDRGTLEMCLYLIIISLSVVMAGSGDLQVFRLLRFLRSRNSADGHANYGTQMAVSLATGFLFLGGGMRTFSTNNGSLAMLLITLYPRLPSGPNDNRCHLQAFRHLYVLATEARWLQTIDVDSGLPVYAPLEVTVKETKLYSETKFCEITPCILPERAILKRICVCGPRYWPQQIELVPEVGCQSLLSRAMHKVFGLRTLGESNLIANSHRELDSDSVDHLVSTFSSDPSLIAFAQLCCDKSWNNRSDSEFKEFCLQVLFDCISKDRPALLQVYLSLYTTIGSMADLLVKSDSNMCDSLSISSLKVALAYNEAVSTGRLASSGGFVQSIFLASLRKRCEEVLNCSTELKINLRNYLTSEAWPYDKNSKLQKDIIILSWYLKWFNVPSPSIIKAAVEKIKSKSKNSTSAIPLLRLLLPNTHISVIGEIDRVFFPSN

SEQ ID NO: 88408 - DNA, 3261 bp, Arabidopsis thaliana
  misc_feature (1)..(3261): Ceres Seq. ID no. 12708796
  misc_feature (1)..(3261): Ortholog of  Ceres SEQ ID NO 13656160 as cited in SEQ ID NO 64905
atgttcgtcagaaaatttctgcagaaatcctccggcggtcagaatcctcctcctcctatagctcctccgcctcggggatgtttgatggcagaagatttggatcctcatattatcacccactctgggataccttcgacggcgtctcttcttgcctttgaccctattcaatgcctcttggctgtgggaacactagatggaaggataaaagtgattggtggcgataacatcgaggcaattcttgcatctcctaagcagttacctttcaaaaacttagagttcatgcagaaccaaggctttctggttagcatctcaaatgaaaacgagattcaggcaaccagcatcaagcttaaagtgggagtcaaacattactgcgtttgcaatccttcatggcactggttacatcttccttattatgttccaactgatgctttatctgaagcagcggggctttcatctcctattgattatccggttgttggacttctttcccagccttgttcaaagggaactagattgttgattgcattttcaaatggattactttttctttgggatgcatcagaagatcatgtcgtgttagttcgggggaacaaagatctacctgtggagggtaaaacagttgctgattctcttgaagcttcacatgatgagctttccaatcttgaactcgatggaaaagagataagttctttgtgttgggcatcaactgatggttcagttcttgctgttggctatgtggatggggatatattattttgggacttttctgatgggcaaaaggggaagccatctaatcacgttgttaagttacagttgtcttcggctgagaaaagacttcctgtcattgttatgcattggtgtttggatgtatcccgcaagagtagtggtggaaaactcttcatctatggtggtgatatcattggatctgacgaagtacttacgatgttaggtcttgattggtcttctggtatgggaggtctgaaatgtgttggccgtgctgacctgacccttagtggttcatttgctgatatggtcttgtctccaattgccagttcaaggcagagtggggtgtttttatttctgttgacaaatccaggacaactgcaagcatatgacgatacctctctggcttctctgatgtctcagaaagagaataagatttctgtttctccactgccatatccaatggttgtaccaacgatggatccacatatgacagtagcaacgttttctgcattaaatgtgaatgataaaacgtcattagctctttctgagatagtcttagctgcaaaagctcgaacccctcgtaccccatccggagaaagtgcacaatggcctctgacaggtggtgttccaagccacgttgatgactacaagcttgaaagactttacatggcaggatatcaagatgggtctatgcgaatatgggatgcaacctatccatgtctgtcccttatttatattttggagccaaaggcaagtgttattgacataactggagtagatgcatctgtaacggcattttgcttctgctctaagacttcttgtttggctgttggtaacgaatgtggtatggttcgcctatacaagttggtcggccatacaagtggaggaactttggaagttgttaccaacactgagaagaaagctcaccatttgcatcaagaagatggtcctcaatggttggctgcgttttccttcctgagttccccagtgtgcaccctgcaatttgtacagtctacaagaaggcttgccgtgggatttaaatgtggcaaggttgcagtgcttgacattggtgtgccgtcagtattatttgttacaaatagcttatctgactcaggttctccgatcaagtcactctatgtgaaatcctcttcagctccaacaggctcaaaaagtgatccaactgatcacaactccataaattctgaagatgatttactcttgtgtgcaatgaccaaagatggacagaccattcttttggatggcaatactgggaaaatacttgcctcttgcctgagacctctaaagaacccaactgcgatttgtatgcacattatagagaactgctatgaaaactatgaaacgcccagtgaaaaaccagctgaaaatccatctgggaaggataaacatgagaacaaatctcatataatcaaagctagtgagagtcattcaccagacggtgaacagaatgctgtcacagaaacaaaacttattgatcagatatttgcgaattcattatttctcatgtgttctgaggatgcactgcgcttgtatactgtaaagtctctatctcagggaagtcttgagagcattatggaggtaaatcttccaaggccgtgttgctggatgggaatcctaaaaaaagatggaagggaatgtgcagtactcctgttttaccgaacagggcatattgaaataagatctttcccgaatcttgaagttgtgggagagagctctttgctgtcacttcttaggtggaacttcaagcctaacatggagaagacagtatgttcagatgatttcggccatgtcgtcctggtaaatggttgtgaagttgccatcctttcgtttttggcccacgcaaacggcttcaggctcccagagtctttacctttgcttcatgacaaagtccttgcagcagctgctgacgctacctttagccatatctctgttcataagaaaaatcatgatggcgctcccaaattcctaagtaacattatcaaaggcttcagatcaagcactgaacagaagatggaccaagtacaagatttctcccacctggggaacatcttttctaatccaccatacttaaaaccttctgataccggtggcgacgacgaaaagattgttgagctaaacatagatgacatcgagatagatgaacctgtgatcatcttgccgttgacagagaaagacaaaaaagaaaagaaagataagagaacggataaggaaaagctgttcgacggtgcatccagcgatgcacaacccaaaacaagaacagtggatgaaattaagtccaaatacagaaaagctggggaaacctcagcaatagcttcacaagcgaaggacaaacttcatgagcggggagaaaaactcgaggtcatatattacgctgcagagatttcatcttcatttatgtttccaagctatagaatcagccaacgcacagctgagcttcaagacaatgctgagaactttgcatccatggcacatgaacttgctaagcaaatggagaagcgaaaatggtggaacatatga

SEQ ID NO: 88409 - protein, 1086 aa, Arabidopsis thaliana
  peptide (1)..(1086): Ceres Seq. ID no. 12708797
MFVRKFLQKSSGGQNPPPPIAPPPRGCLMAEDLDPHIITHSGIPSTASLLAFDPIQCLLAVGTLDGRIKVIGGDNIEAILASPKQLPFKNLEFMQNQGFLVSISNENEIQATSIKLKVGVKHYCVCNPSWHWLHLPYYVPTDALSEAAGLSSPIDYPVVGLLSQPCSKGTRLLIAFSNGLLFLWDASEDHVVLVRGNKDLPVEGKTVADSLEASHDELSNLELDGKEISSLCWASTDGSVLAVGYVDGDILFWDFSDGQKGKPSNHVVKLQLSSAEKRLPVIVMHWCLDVSRKSSGGKLFIYGGDIIGSDEVLTMLGLDWSSGMGGLKCVGRADLTLSGSFADMVLSPIASSRQSGVFLFLLTNPGQLQAYDDTSLASLMSQKENKISVSPLPYPMVVPTMDPHMTVATFSALNVNDKTSLALSEIVLAAKARTPRTPSGESAQWPLTGGVPSHVDDYKLERLYMAGYQDGSMRIWDATYPCLSLIYILEPKASVIDITGVDASVTAFCFCSKTSCLAVGNECGMVRLYKLVGHTSGGTLEVVTNTEKKAHHLHQEDGPQWLAAFSFLSSPVCTLQFVQSTRRLAVGFKCGKVAVLDIGVPSVLFVTNSLSDSGSPIKSLYVKSSSAPTGSKSDPTDHNSINSEDDLLLCAMTKDGQTILLDGNTGKILASCLRPLKNPTAICMHIIENCYENYETPSEKPAENPSGKDKHENKSHIIKASESHSPDGEQNAVTETKLIDQIFANSLFLMCSEDALRLYTVKSLSQGSLESIMEVNLPRPCCWMGILKKDGRECAVLLFYRTGHIEIRSFPNLEVVGESSLLSLLRWNFKPNMEKTVCSDDFGHVVLVNGCEVAILSFLAHANGFRLPESLPLLHDKVLAAAADATFSHISVHKKNHDGAPKFLSNIIKGFRSSTEQKMDQVQDFSHLGNIFSNPPYLKPSDTGGDDEKIVELNIDDIEIDEPVIILPLTEKDKKEKKDKRTDKEKLFDGASSDAQPKTRTVDEIKSKYRKAGETSAIASQAKDKLHERGEKLEVIYYAAEISSSFMFPSYRISQRTAELQDNAENFASMAHELAKQMEKRKWWNI

SEQ ID NO: 88410 - protein, 1058 aa, Arabidopsis thaliana
  peptide (1)..(1058): Ceres Seq. ID no. 12708798
MAEDLDPHIITHSGIPSTASLLAFDPIQCLLAVGTLDGRIKVIGGDNIEAILASPKQLPFKNLEFMQNQGFLVSISNENEIQATSIKLKVGVKHYCVCNPSWHWLHLPYYVPTDALSEAAGLSSPIDYPVVGLLSQPCSKGTRLLIAFSNGLLFLWDASEDHVVLVRGNKDLPVEGKTVADSLEASHDELSNLELDGKEISSLCWASTDGSVLAVGYVDGDILFWDFSDGQKGKPSNHVVKLQLSSAEKRLPVIVMHWCLDVSRKSSGGKLFIYGGDIIGSDEVLTMLGLDWSSGMGGLKCVGRADLTLSGSFADMVLSPIASSRQSGVFLFLLTNPGQLQAYDDTSLASLMSQKENKISVSPLPYPMVVPTMDPHMTVATFSALNVNDKTSLALSEIVLAAKARTPRTPSGESAQWPLTGGVPSHVDDYKLERLYMAGYQDGSMRIWDATYPCLSLIYILEPKASVIDITGVDASVTAFCFCSKTSCLAVGNECGMVRLYKLVGHTSGGTLEVVTNTEKKAHHLHQEDGPQWLAAFSFLSSPVCTLQFVQSTRRLAVGFKCGKVAVLDIGVPSVLFVTNSLSDSGSPIKSLYVKSSSAPTGSKSDPTDHNSINSEDDLLLCAMTKDGQTILLDGNTGKILASCLRPLKNPTAICMHIIENCYENYETPSEKPAENPSGKDKHENKSHIIKASESHSPDGEQNAVTETKLIDQIFANSLFLMCSEDALRLYTVKSLSQGSLESIMEVNLPRPCCWMGILKKDGRECAVLLFYRTGHIEIRSFPNLEVVGESSLLSLLRWNFKPNMEKTVCSDDFGHVVLVNGCEVAILSFLAHANGFRLPESLPLLHDKVLAAAADATFSHISVHKKNHDGAPKFLSNIIKGFRSSTEQKMDQVQDFSHLGNIFSNPPYLKPSDTGGDDEKIVELNIDDIEIDEPVIILPLTEKDKKEKKDKRTDKEKLFDGASSDAQPKTRTVDEIKSKYRKAGETSAIASQAKDKLHERGEKLEVIYYAAEISSSFMFPSYRISQRTAELQDNAENFASMAHELAKQMEKRKWWNI

SEQ ID NO: 88411 - protein, 993 aa, Arabidopsis thaliana
  peptide (1)..(993): Ceres Seq. ID no. 12708799
MQNQGFLVSISNENEIQATSIKLKVGVKHYCVCNPSWHWLHLPYYVPTDALSEAAGLSSPIDYPVVGLLSQPCSKGTRLLIAFSNGLLFLWDASEDHVVLVRGNKDLPVEGKTVADSLEASHDELSNLELDGKEISSLCWASTDGSVLAVGYVDGDILFWDFSDGQKGKPSNHVVKLQLSSAEKRLPVIVMHWCLDVSRKSSGGKLFIYGGDIIGSDEVLTMLGLDWSSGMGGLKCVGRADLTLSGSFADMVLSPIASSRQSGVFLFLLTNPGQLQAYDDTSLASLMSQKENKISVSPLPYPMVVPTMDPHMTVATFSALNVNDKTSLALSEIVLAAKARTPRTPSGESAQWPLTGGVPSHVDDYKLERLYMAGYQDGSMRIWDATYPCLSLIYILEPKASVIDITGVDASVTAFCFCSKTSCLAVGNECGMVRLYKLVGHTSGGTLEVVTNTEKKAHHLHQEDGPQWLAAFSFLSSPVCTLQFVQSTRRLAVGFKCGKVAVLDIGVPSVLFVTNSLSDSGSPIKSLYVKSSSAPTGSKSDPTDHNSINSEDDLLLCAMTKDGQTILLDGNTGKILASCLRPLKNPTAICMHIIENCYENYETPSEKPAENPSGKDKHENKSHIIKASESHSPDGEQNAVTETKLIDQIFANSLFLMCSEDALRLYTVKSLSQGSLESIMEVNLPRPCCWMGILKKDGRECAVLLFYRTGHIEIRSFPNLEVVGESSLLSLLRWNFKPNMEKTVCSDDFGHVVLVNGCEVAILSFLAHANGFRLPESLPLLHDKVLAAAADATFSHISVHKKNHDGAPKFLSNIIKGFRSSTEQKMDQVQDFSHLGNIFSNPPYLKPSDTGGDDEKIVELNIDDIEIDEPVIILPLTEKDKKEKKDKRTDKEKLFDGASSDAQPKTRTVDEIKSKYRKAGETSAIASQAKDKLHERGEKLEVIYYAAEISSSFMFPSYRISQRTAELQDNAENFASMAHELAKQMEKRKWWNI

SEQ ID NO: 88412 - DNA, 1305 bp, Arabidopsis thaliana
  misc_feature (1)..(1305): Ceres Seq. ID no. 12708839
  misc_feature (1)..(1305): Ortholog of  Ceres SEQ ID NO 13594345 as cited in SEQ ID NO 58043
  misc_feature (1)..(1305): Ortholog of  Ceres SEQ ID NO 13597574 as cited in SEQ ID NO 64677
  misc_feature (1)..(1305): Ortholog of  Ceres SEQ ID NO 13662880 as cited in SEQ ID NO 65422
  misc_feature (1)..(1305): Ortholog of  Ceres SEQ ID NO 14302071 as cited in SEQ ID NO 66585
  misc_feature (1)..(1305): Ortholog of  Ceres SEQ ID NO 14316013 as cited in SEQ ID NO 67181
  misc_feature (1)..(1305): Ortholog of  Ceres SEQ ID NO 12779098 as cited in SEQ ID NO 67698
  misc_feature (1)..(1305): Ortholog of  Ceres SEQ ID NO 13596180 as cited in SEQ ID NO 67941
  misc_feature (1)..(1305): Ortholog of  Ceres SEQ ID NO 13591190 as cited in SEQ ID NO 68044
atggagaagagtaatggcctgcgagtgattctgtttccacttccattacaaggctgcatcaaccctatgattcagctcgccaagatcctccactcaagaggtttttcaatcactgtgatccacacttgcttcaacgcgccaaaagcttcaagccatccactcttcaccttcatacagatccaagatggcttgtctgaaacagagacaagaactcgcgacgtcaaacttctcataacacttctcaaccaaaattgcgagtctccggttcgtgaatgtttgcgtaaactgttgcaatctgccaaggaagagaaacagaggattagctgtttgatcaatgattctggttggatcttcactcaacacttagccaagagtttgaatctcatgagattggcctttaatacctataagatctccttctttcgaaattcagaacaagatgatccagttgagaagtttccaccgcttagaaagaaagatcttttacggattcttgaagcagattcggtgcagggagactcgtactcggatatgattttggaaaagacaaaggcgtcttcaggtcttatattcatgtcctgtgaagagttggaccaagactcactgagtcaatcacgtgaagattttaaggttccgatatttgcgataggaccttctcatagccattttcctgcttcttctagtagcttgttcacaccggacgagacttgcatcccatggttagacagacaagaagacaaatccgtaatatacgtgagtattgggagcctcgtgaccatcaacgaaacagagctaatggagattgcttggggtctaagtaacagcgaccaaccatttttatgggtcgtccgggttggttcagtcaatggcacggaatggattgaagcaatcccggaatatttcatcaaaaggcttaatgagaagggaaagatagtgaaatgggctccacaacaagaggttctaaagcatcgagctattggaggtttcttgacacataatggttggaactcgacggttgagagtgtttgtgaaggcgtccctatgatctgtttgccttttcgttgggaccaattgttaaatgcaagatttgttagtgatgtatggatggttgggatacatctcgagggtcggattgagagggatgagatcgagagagcgataaggagattattgttggaaactgaaggagaagccatccgagagaggatacaacttcttaaggaaaaagtaggaagatcagttaaacaaaacggttcggcatatcaatctctacaaaatttgattaattatatatcatctttctag

SEQ ID NO: 88413 - protein, 434 aa, Arabidopsis thaliana
  peptide (1)..(434): Ceres Seq. ID no. 12708840
MEKSNGLRVILFPLPLQGCINPMIQLAKILHSRGFSITVIHTCFNAPKASSHPLFTFIQIQDGLSETETRTRDVKLLITLLNQNCESPVRECLRKLLQSAKEEKQRISCLINDSGWIFTQHLAKSLNLMRLAFNTYKISFFRNSEQDDPVEKFPPLRKKDLLRILEADSVQGDSYSDMILEKTKASSGLIFMSCEELDQDSLSQSREDFKVPIFAIGPSHSHFPASSSSLFTPDETCIPWLDRQEDKSVIYVSIGSLVTINETELMEIAWGLSNSDQPFLWVVRVGSVNGTEWIEAIPEYFIKRLNEKGKIVKWAPQQEVLKHRAIGGFLTHNGWNSTVESVCEGVPMICLPFRWDQLLNARFVSDVWMVGIHLEGRIERDEIERAIRRLLLETEGEAIRERIQLLKEKVGRSVKQNGSAYQSLQNLINYISSF

SEQ ID NO: 88414 - protein, 412 aa, Arabidopsis thaliana
  peptide (1)..(412): Ceres Seq. ID no. 12708841
MIQLAKILHSRGFSITVIHTCFNAPKASSHPLFTFIQIQDGLSETETRTRDVKLLITLLNQNCESPVRECLRKLLQSAKEEKQRISCLINDSGWIFTQHLAKSLNLMRLAFNTYKISFFRNSEQDDPVEKFPPLRKKDLLRILEADSVQGDSYSDMILEKTKASSGLIFMSCEELDQDSLSQSREDFKVPIFAIGPSHSHFPASSSSLFTPDETCIPWLDRQEDKSVIYVSIGSLVTINETELMEIAWGLSNSDQPFLWVVRVGSVNGTEWIEAIPEYFIKRLNEKGKIVKWAPQQEVLKHRAIGGFLTHNGWNSTVESVCEGVPMICLPFRWDQLLNARFVSDVWMVGIHLEGRIERDEIERAIRRLLLETEGEAIRERIQLLKEKVGRSVKQNGSAYQSLQNLINYISSF

SEQ ID NO: 88415 - protein, 306 aa, Arabidopsis thaliana
  peptide (1)..(306): Ceres Seq. ID no. 12708842
MRLAFNTYKISFFRNSEQDDPVEKFPPLRKKDLLRILEADSVQGDSYSDMILEKTKASSGLIFMSCEELDQDSLSQSREDFKVPIFAIGPSHSHFPASSSSLFTPDETCIPWLDRQEDKSVIYVSIGSLVTINETELMEIAWGLSNSDQPFLWVVRVGSVNGTEWIEAIPEYFIKRLNEKGKIVKWAPQQEVLKHRAIGGFLTHNGWNSTVESVCEGVPMICLPFRWDQLLNARFVSDVWMVGIHLEGRIERDEIERAIRRLLLETEGEAIRERIQLLKEKVGRSVKQNGSAYQSLQNLINYISSF

SEQ ID NO: 88416 - DNA, 654 bp, Arabidopsis thaliana
  misc_feature (1)..(654): Ceres Seq. ID no. 12708847
  misc_feature (1)..(654): Ortholog of  Ceres SEQ ID NO 13594498 as cited in SEQ ID NO 51322
  misc_feature (1)..(654): Ortholog of  Ceres SEQ ID NO 15179033 as cited in SEQ ID NO 0
atgacgacgagtattcacatcacagctctcgacggaatcgtcaacgtgaactcactcttcacactcgccgtattcatcggattagcttggaaccctaccgatccagacaacagcctcgtaaccgaccctaattgcgtccccacagctcgtatggctgagaatctcgtcgccttccatgtgtactctttcgcatcattcctattctcaagtctcatcgctctaggtctcaaacaagcaatgaggctcaacatagcttcttcgtttcacatctctactcgaatcgatcctgtggtttactatgtgaacaagacggctcttagatttgggatggttacatccggtttgggatcggtttgtggatgtgggtttctcatgttggctttgattaatgttgttcagatcaagcttgggactttgggctgtggttggtcatacttatgcagctgttgtgccgcttgtgattctggttccttctgcacttttcatctatgtttctcttatgttatatgcttttactcgttagagacatggtttttgattccatggttgatgcaattagggttatgtttgtatgatgatgatatgatggaaatgagaatgattctatgtttgatatggttctttgtaaatctcttggtttggcttctgatttaa

SEQ ID NO: 88417 - protein, 217 aa, Arabidopsis thaliana
  peptide (1)..(217): Ceres Seq. ID no. 12708848
MTTSIHITALDGIVNVNSLFTLAVFIGLAWNPTDPDNSLVTDPNCVPTARMAENLVAFHVYSFASFLFSSLIALGLKQAMRLNIASSFHISTRIDPVVYYVNKTALRFGMVTSGLGSVCGCGFLMLALINVVQIKLGTLGCGWSYLCSCCAACDSGSFCTFHLCFSYVICFYSLETWFLIPWLMQLGLCLYDDDMMEMRMILCLIWFFVNLLVWLLI

SEQ ID NO: 88418 - protein, 167 aa, Arabidopsis thaliana
  peptide (1)..(167): Ceres Seq. ID no. 12708849
MAENLVAFHVYSFASFLFSSLIALGLKQAMRLNIASSFHISTRIDPVVYYVNKTALRFGMVTSGLGSVCGCGFLMLALINVVQIKLGTLGCGWSYLCSCCAACDSGSFCTFHLCFSYVICFYSLETWFLIPWLMQLGLCLYDDDMMEMRMILCLIWFFVNLLVWLLI

SEQ ID NO: 88419 - protein, 138 aa, Arabidopsis thaliana
  peptide (1)..(138): Ceres Seq. ID no. 12708850
MRLNIASSFHISTRIDPVVYYVNKTALRFGMVTSGLGSVCGCGFLMLALINVVQIKLGTLGCGWSYLCSCCAACDSGSFCTFHLCFSYVICFYSLETWFLIPWLMQLGLCLYDDDMMEMRMILCLIWFFVNLLVWLLI

SEQ ID NO: 88420 - DNA, 2307 bp, Arabidopsis thaliana
  misc_feature (1)..(2307): Ceres Seq. ID no. 12708856
  misc_feature (1)..(2307): Ortholog of  Ceres SEQ ID NO 14310784 as cited in SEQ ID NO 58503
ccggggaaataaagaaacttgactgctaattgctaaaggtaatgcttctgagaattggaagctaatgaagctcttcctcaatagcaatctgctcagaaactctattttcttcaagatctccgcctttgttttgatctccgttgcttgtttcttcctcggtaagcattggtctgaggatggcttccgccgtctcatcttcttctccgccgagccttcccgatctcccattgtcgcactctcacctgatttcggaaaaacctataacatctctggtttgatctatgagagtcacccgattttgcctccgtctttgtcaccaccgccgccgccagattctgttgagttgaaggtgtttggaatcgttaatgagaacggaacaatgtctgatgagtttcagattggtgattacgacgttgagtcggcggagacgttggggaatcagacggaattcgagagtagcgacgacgatgatattaaatccaccacagctagagttagtgtgaggaaatttgagatttgttcggagaatatgactgagtacattccttgtttggataatgtagaagccatcaaaaggcttaattcaacggcgcgtggtgagcgattcgaacggaattgtcctaacgatggaatgggattgaattgcaccgttccgattcctcaaggataccgtagtccgattccgtggccgagaagccgtgatgaggtgtggttcaacaatgttccacatactaaacttgttgaagacaaaggtggtcaaaattggatttataaagagaatgacaaatttaagtttcctggtggtggtactcagtttatacacggagctgatcagtacttggatcagatctctcagatgattcctgatattagctttggtaaccatacacgagttgttcttgacattggatgtggtgtggcaagttttggtgcctacttaatgtcacgaaatgtcttgactatgtctatagctccaaaagatgttcacgagaaccagatacagtttgctcttgagcgtggtgttcctgcaatggtggcagcattcacaacacggagattgttgtatccaagccaagcttttgatttggtacattgttcaagatgtagaatcaactggactcgtgatgatgggatcctgctccttgaagttaataggatgcttcgtgccggaggatattttgtttgggcagcacaacctgtatataagcatgaaaaggccttggaagaacagtgggaagagatgctaaacctgaccactaggctgtgctgggttcttgtaaagaaggaaggatatatagctatctggcagaagcctgtaaataacacttgttacctaagtcgtggtgctggagtcagtcctcctttgtgcaattctgaagatgacccagataatgtttggtacgtggatctgaaggcatgcatcactagaattgaagaaaatggatatggagcaaatcttgctccttggccagctcgtttactgaccccaccggataggctgcagacaatacaaattgattcatacatagcccgaaaagagctatttgtagccgaatcaaagtactggaaagaaataatatcaaactatgtaaatgccctacactggaagcagataggactcagaaatgtcttggacatgagagctggatttggcggatttgcagctgcattagctgagctaaaggttgactgctgggttcttaacgtcatcccagtgagtggtcccaacacattgcctgttatatatgaccgtggactgcttggagttatgcacgattggtgtgaaccttttgatacttacccaagaacctacgatttgctgcatgctgcgggtctgttttccattgaaagaaaaagatgcaacatgacaacaatgatgctagagatggaccggattttaagacctggaggacgtgtatacatacgggacacaatcaatgtaacgagtgagcttcaagagattggaaacgcaatgaggtggcacacgagcttacgtgaaactgctgaaggacctcactcaagttacagggttctcttatgtgagaagcggtttgaatcgtctgagaagcgtcgtaccaagaagaggaggaagactaaaggaaaaagagcttgacattttcatagaatacaagtgctgggctagaattttctggggatctttggatcaatggacaatggttagtttagttgggaggctttttggaattttagaaaaattagggacctgaaacagtgaaactgtttgtgaggttttggcgtttaaccctctttaaagttgattgaaaccggattaaactcacttagccc

SEQ ID NO: 88421 - protein, 682 aa, Arabidopsis thaliana
  peptide (1)..(682): Ceres Seq. ID no. 12708857
MKLFLNSNLLRNSIFFKISAFVLISVACFFLGKHWSEDGFRRLIFFSAEPSRSPIVALSPDFGKTYNISGLIYESHPILPPSLSPPPPPDSVELKVFGIVNENGTMSDEFQIGDYDVESAETLGNQTEFESSDDDDIKSTTARVSVRKFEICSENMTEYIPCLDNVEAIKRLNSTARGERFERNCPNDGMGLNCTVPIPQGYRSPIPWPRSRDEVWFNNVPHTKLVEDKGGQNWIYKENDKFKFPGGGTQFIHGADQYLDQISQMIPDISFGNHTRVVLDIGCGVASFGAYLMSRNVLTMSIAPKDVHENQIQFALERGVPAMVAAFTTRRLLYPSQAFDLVHCSRCRINWTRDDGILLLEVNRMLRAGGYFVWAAQPVYKHEKALEEQWEEMLNLTTRLCWVLVKKEGYIAIWQKPVNNTCYLSRGAGVSPPLCNSEDDPDNVWYVDLKACITRIEENGYGANLAPWPARLLTPPDRLQTIQIDSYIARKELFVAESKYWKEIISNYVNALHWKQIGLRNVLDMRAGFGGFAAALAELKVDCWVLNVIPVSGPNTLPVIYDRGLLGVMHDWCEPFDTYPRTYDLLHAAGLFSIERKRCNMTTMMLEMDRILRPGGRVYIRDTINVTSELQEIGNAMRWHTSLRETAEGPHSSYRVLLCEKRFESSEKRRTKKRRKTKGKRA

SEQ ID NO: 88422 - protein, 577 aa, Arabidopsis thaliana
  peptide (1)..(577): Ceres Seq. ID no. 12708858
MSDEFQIGDYDVESAETLGNQTEFESSDDDDIKSTTARVSVRKFEICSENMTEYIPCLDNVEAIKRLNSTARGERFERNCPNDGMGLNCTVPIPQGYRSPIPWPRSRDEVWFNNVPHTKLVEDKGGQNWIYKENDKFKFPGGGTQFIHGADQYLDQISQMIPDISFGNHTRVVLDIGCGVASFGAYLMSRNVLTMSIAPKDVHENQIQFALERGVPAMVAAFTTRRLLYPSQAFDLVHCSRCRINWTRDDGILLLEVNRMLRAGGYFVWAAQPVYKHEKALEEQWEEMLNLTTRLCWVLVKKEGYIAIWQKPVNNTCYLSRGAGVSPPLCNSEDDPDNVWYVDLKACITRIEENGYGANLAPWPARLLTPPDRLQTIQIDSYIARKELFVAESKYWKEIISNYVNALHWKQIGLRNVLDMRAGFGGFAAALAELKVDCWVLNVIPVSGPNTLPVIYDRGLLGVMHDWCEPFDTYPRTYDLLHAAGLFSIERKRCNMTTMMLEMDRILRPGGRVYIRDTINVTSELQEIGNAMRWHTSLRETAEGPHSSYRVLLCEKRFESSEKRRTKKRRKTKGKRA

SEQ ID NO: 88423 - protein, 527 aa, Arabidopsis thaliana
  peptide (1)..(527): Ceres Seq. ID no. 12708859
MTEYIPCLDNVEAIKRLNSTARGERFERNCPNDGMGLNCTVPIPQGYRSPIPWPRSRDEVWFNNVPHTKLVEDKGGQNWIYKENDKFKFPGGGTQFIHGADQYLDQISQMIPDISFGNHTRVVLDIGCGVASFGAYLMSRNVLTMSIAPKDVHENQIQFALERGVPAMVAAFTTRRLLYPSQAFDLVHCSRCRINWTRDDGILLLEVNRMLRAGGYFVWAAQPVYKHEKALEEQWEEMLNLTTRLCWVLVKKEGYIAIWQKPVNNTCYLSRGAGVSPPLCNSEDDPDNVWYVDLKACITRIEENGYGANLAPWPARLLTPPDRLQTIQIDSYIARKELFVAESKYWKEIISNYVNALHWKQIGLRNVLDMRAGFGGFAAALAELKVDCWVLNVIPVSGPNTLPVIYDRGLLGVMHDWCEPFDTYPRTYDLLHAAGLFSIERKRCNMTTMMLEMDRILRPGGRVYIRDTINVTSELQEIGNAMRWHTSLRETAEGPHSSYRVLLCEKRFESSEKRRTKKRRKTKGKRA

SEQ ID NO: 88424 - DNA, 777 bp, Arabidopsis thaliana
  misc_feature (1)..(777): Ceres Seq. ID no. 12708860
  misc_feature (1)..(777): Ortholog of  Ceres SEQ ID NO 14304224 as cited in SEQ ID NO 56350
  misc_feature (1)..(777): Ortholog of  Ceres SEQ ID NO 13597679 as cited in SEQ ID NO 65073
atggtctctcgccgggaaaacagctctggtaaccggcgggactcgtggaatcgggagagcagttgtagaggaactagcaaaatttggtgcaaaattcatacttgttcaaggaaccaggaagagctaaatgcatgcttgaatgattggaaagcgaatggtttagtcgtgtctggttcggtttgtgatgcttcggttagggatcagagggagaagttgattcaggaagcttcttctgccttcagtggcaagctcaacatccttataaacaatgttggaactaatgtcaggaaaccaacagttgaatactcaagcgaggaatatgccaaaatcatgtcgaccaacttagaatccgctttccatttatctcaaattgctcatcctcttctaaaagcatctggtgtcggaagcattgtgttcatctcctctgtagctggcctggtgcatcttagcagtggatctatctatggtgcaactaaaggagcacttaatcagcttacaagaaatctagcttgcgagtgggcaagcgacaacatcagaaccaattgcgtggcgccatggtacatcaagacctcacttgtggaaacgctacttgagaagaaagaatttgtggaggctgtagtttcaaggaccccacttgggcgcgttggagaaccagaggaagtctcatcgttggttgcctttctctgccttcccgcatcatcttatattaccggacaggtcatatccgtcgatggaggattcactgtcaacggttttagctatgctatgaagccttaa

SEQ ID NO: 88425 - protein, 258 aa, Arabidopsis thaliana
  peptide (1)..(258): Ceres Seq. ID no. 12708861
MVSRRENSSGNRRDSWNRESSCRGTSKIWCKIHTCSRNQEELNACLNDWKANGLVVSGSVCDASVRDQREKLIQEASSAFSGKLNILINNVGTNVRKPTVEYSSEEYAKIMSTNLESAFHLSQIAHPLLKASGVGSIVFISSVAGLVHLSSGSIYGATKGALNQLTRNLACEWASDNIRTNCVAPWYIKTSLVETLLEKKEFVEAVVSRTPLGRVGEPEEVSSLVAFLCLPASSYITGQVISVDGGFTVNGFSYAMKP

SEQ ID NO: 88426 - protein, 148 aa, Arabidopsis thaliana; identical to SEQ ID NO: 39956
  peptide (1)..(148): Ceres Seq. ID no. 12708862

SEQ ID NO: 88427 - DNA, 767 bp, Arabidopsis thaliana
  misc_feature (1)..(767): Ceres Seq. ID no. 12708893
  misc_feature (1)..(767): Ortholog of  Ceres SEQ ID NO 13594647 as cited in SEQ ID NO 52208
  misc_feature (1)..(767): Ortholog of  Ceres SEQ ID NO 13637658 as cited in SEQ ID NO 53077
  misc_feature (1)..(767): Ortholog of  Ceres SEQ ID NO 13664275 as cited in SEQ ID NO 61120
  misc_feature (1)..(767): Ortholog of  Ceres SEQ ID NO 15174168 as cited in SEQ ID NO 61888
  misc_feature (1)..(767): Ortholog of  Ceres SEQ ID NO 12635311 as cited in SEQ ID NO 0
  misc_feature (1)..(767): Ortholog of  Ceres SEQ ID NO 13599510 as cited in SEQ ID NO 0
  misc_feature (1)..(767): Ortholog of  Ceres SEQ ID NO 13599622 as cited in SEQ ID NO 0
  misc_feature (1)..(767): Ortholog of  Ceres SEQ ID NO 13600020 as cited in SEQ ID NO 0
aaaccaactccatctcacttctcaagtcttataatttattcatttctctcttcttcatcgatcttcggcttttagaaaacctaatcagaaatggcaacggcgtcgtttaacatgcagtcagtgttcgctgctccttccggtgtattgactacacgcaacatcagaaacacaaaccaactcttcttcaagaggattgctccggtaggagtcagatgcatggctcagggcgatcctatcaaggaagatccttctgtgccctcgacctcgacttcggccactccaccacaaatgccacagtctcctcctccaccagttagcaagcctaaggtgagtacgaagtttggagatttgctagcgtttagcggtccagcacccgagaggatcaacgggagactagcaatggttggattcgtggcggccatcgccatggagttatcaaagggagaaaacgtgtttgctcagatctctgacggtggtgtcgggtggtttctaggaacaacagcgttgttgacgttggcatcgatggttccgttgttcaagggaataagggcagaggcaaagtcaaaagggttcatgacttcagacgccgagctatggaacggtcggtttgcgatgctcggtctcgttgcgttggccttcaccgagtacgtcactggtgggactctagtctaaagctaaagctttttgtttgctagtttaaggacaaatttggagaatgattatgtaacgcatagattgatttaatactatgagttttaaacagtgtg

SEQ ID NO: 88428 - protein, 193 aa, Arabidopsis thaliana
  peptide (1)..(193): Ceres Seq. ID no. 12708894
MATASFNMQSVFAAPSGVLTTRNIRNTNQLFFKRIAPVGVRCMAQGDPIKEDPSVPSTSTSATPPQMPQSPPPPVSKPKVSTKFGDLLAFSGPAPERINGRLAMVGFVAAIAMELSKGENVFAQISDGGVGWFLGTTALLTLASMVPLFKGIRAEAKSKGFMTSDAELWNGRFAMLGLVALAFTEYVTGGTLV

SEQ ID NO: 88429 - protein, 186 aa, Arabidopsis thaliana; identical to SEQ ID NO: 76280
  peptide (1)..(186): Ceres Seq. ID no. 12708895

SEQ ID NO: 88430 - protein, 151 aa, Arabidopsis thaliana; identical to SEQ ID NO: 76281
  peptide (1)..(151): Ceres Seq. ID no. 12708896

SEQ ID NO: 88431 - DNA, 708 bp, Arabidopsis thaliana
  misc_feature (1)..(708): Ceres Seq. ID no. 12708910
  misc_feature (1)..(708): Ortholog of  Ceres SEQ ID NO 14304124 as cited in SEQ ID NO 56378
  misc_feature (1)..(708): Ortholog of  Ceres SEQ ID NO 12585331 as cited in SEQ ID NO 62912
  misc_feature (1)..(708): Ortholog of  Ceres SEQ ID NO 13654964 as cited in SEQ ID NO 63176
atggcgaaatctgacattgaaactggtggtggtaacgagctgtatccgggaatgaaagagagctcggagcttcgttgggctttcataagaaaactttacagcattttgtctcttcagttgcttgtcaccgtcggagtctccgccgttgtttacttcgtccgtccgatccccgagttcatcaccgagactcaccgtggccttgccgtctttttcgtcatcctcctccttcctctcctcctgttgtggcctctgttggcttttgagaagaagcatccgataaactgcattgtcctgtccatcttcactctctccatttccttctctgtggggatttgctgctctctctcccaagggaggattgttctggaggctgcaattctcacagctgtgatggtctttggtctaacgatctacaccttctgggcagtgaagagaggacatgatttctccttccttggaccattcctctttggtgctctcctcattatccttgtcttcacccttttgcagatattccaccctctggggaagctatcatcgatgatattcagcggaatagcttcaatagtgttctgcggatacatcatcttcgacaccaatcagctgatcaagaaactcaactacgacgaatatatcactgcagcgattcgtctatacctcgacgttatgaatctcttcctcagtctcctcggcattataagcaactga

SEQ ID NO: 88432 - protein, 235 aa, Arabidopsis thaliana
  peptide (1)..(235): Ceres Seq. ID no. 12708911
MAKSDIETGGGNELYPGMKESSELRWAFIRKLYSILSLQLLVTVGVSAVVYFVRPIPEFITETHRGLAVFFVILLLPLLLLWPLLAFEKKHPINCIVLSIFTLSISFSVGICCSLSQGRIVLEAAILTAVMVFGLTIYTFWAVKRGHDFSFLGPFLFGALLIILVFTLLQIFHPLGKLSSMIFSGIASIVFCGYIIFDTNQLIKKLNYDEYITAAIRLYLDVMNLFLSLLGIISN

SEQ ID NO: 88433 - protein, 218 aa, Arabidopsis thaliana
  peptide (1)..(218): Ceres Seq. ID no. 12708912
MKESSELRWAFIRKLYSILSLQLLVTVGVSAVVYFVRPIPEFITETHRGLAVFFVILLLPLLLLWPLLAFEKKHPINCIVLSIFTLSISFSVGICCSLSQGRIVLEAAILTAVMVFGLTIYTFWAVKRGHDFSFLGPFLFGALLIILVFTLLQIFHPLGKLSSMIFSGIASIVFCGYIIFDTNQLIKKLNYDEYITAAIRLYLDVMNLFLSLLGIISN

SEQ ID NO: 88434 - DNA, 1464 bp, Arabidopsis thaliana
  misc_feature (1)..(1464): Ceres Seq. ID no. 12708925
  misc_feature (1)..(1464): Ortholog of  Ceres SEQ ID NO 13646680 as cited in SEQ ID NO 20737
atggatacccctcagaagagtattactcagatcggaactccaatttccaaatccagattcgagagagcatcaaactctgaagcacgttttagaaatggtgtggagaagcaaacaatgcagcacgattcaaacaaggaaccggagtccgcgaatgcgattccttatgaggctgtttcactcttgcaccgtggtataagaagacgttgtcttgactttgagatgcccgggaataagcaaacatcaagtgagaataacaccgcggcttgtgaatcctcttcgagatgtgttgtaccgagtattggtcttcatctaaatgccattttaatgtcttcaaaggactgtaaaaccaatgttactcaagattactcatgttctgcgaatatacaagtgggtttacaaaggtccatctctacactgcaagattctttggaccaaacagaaaatgaaatccgggaagatgcagatcaagatgttcctgttgaaccagctttgcaagagttaaatttgagcagccctaagaagaagagggttaagttggattctggagaaggcgagtcgtgtaagcgatgcaactgcaaaaagtccaagtgtttgaaactttactgtgaatgctttgctgctggagtctattgcatagagccatgttcatgtatagactgcttcaataaacctatccatgaagacgttgtcctggcgactcgcaaacagattgaatctcggaatccacttgcatttgctcctaaagtcattaggaactctgactcagttcaagaaaccggggatgatgcaagcaaaactccagcttctgcgcgccataaacgtggctgcaactgcaagaaatcaaactgtctgaagaaatactgtgaatgctatcagggtggtgtgggctgttccataaactgtagatgtgaaggatgtaagaacgcattcggccggaaagatgggtcttccattgacatggaagccgaacaagaagaggaaaatgaaacatctgagaaaagcagaacagccaaaagccaacaaaacactgaggttttaatgagaaaggacatgagttctgctctacctacgacaccaacgccgatttacagaccagaactggttcaactacctttctcatcatctaagaacaggatgcctcctccacagtctcttcttggaggtggatcttcctcagggatatttaacagtcaatatctaagaaaaccagacattagtttgtctcaatccagaatcgagaagtcattcgagacagtcgcagttgatggagctgaacaaatgcctgagattctcatccattcccctatacctaacatcaagagtgtctctcccaacggaaagagggtctctcctcctcatatggaatcatctagctcaggctcaatcttagggagaagaaatggcgggcggaaactgatattgcagtcgattccatcgtttccttctctcactccccaacactga

SEQ ID NO: 88435 - protein, 487 aa, Arabidopsis thaliana
  peptide (1)..(487): Ceres Seq. ID no. 12708926
MDTPQKSITQIGTPISKSRFERASNSEARFRNGVEKQTMQHDSNKEPESANAIPYEAVSLLHRGIRRRCLDFEMPGNKQTSSENNTAACESSSRCVVPSIGLHLNAILMSSKDCKTNVTQDYSCSANIQVGLQRSISTLQDSLDQTENEIREDADQDVPVEPALQELNLSSPKKKRVKLDSGEGESCKRCNCKKSKCLKLYCECFAAGVYCIEPCSCIDCFNKPIHEDVVLATRKQIESRNPLAFAPKVIRNSDSVQETGDDASKTPASARHKRGCNCKKSNCLKKYCECYQGGVGCSINCRCEGCKNAFGRKDGSSIDMEAEQEEENETSEKSRTAKSQQNTEVLMRKDMSSALPTTPTPIYRPELVQLPFSSSKNRMPPPQSLLGGGSSSGIFNSQYLRKPDISLSQSRIEKSFETVAVDGAEQMPEILIHSPIPNIKSVSPNGKRVSPPHMESSSSGSILGRRNGGRKLILQSIPSFPSLTPQH

SEQ ID NO: 88436 - protein, 449 aa, Arabidopsis thaliana
  peptide (1)..(449): Ceres Seq. ID no. 12708927
MQHDSNKEPESANAIPYEAVSLLHRGIRRRCLDFEMPGNKQTSSENNTAACESSSRCVVPSIGLHLNAILMSSKDCKTNVTQDYSCSANIQVGLQRSISTLQDSLDQTENEIREDADQDVPVEPALQELNLSSPKKKRVKLDSGEGESCKRCNCKKSKCLKLYCECFAAGVYCIEPCSCIDCFNKPIHEDVVLATRKQIESRNPLAFAPKVIRNSDSVQETGDDASKTPASARHKRGCNCKKSNCLKKYCECYQGGVGCSINCRCEGCKNAFGRKDGSSIDMEAEQEEENETSEKSRTAKSQQNTEVLMRKDMSSALPTTPTPIYRPELVQLPFSSSKNRMPPPQSLLGGGSSSGIFNSQYLRKPDISLSQSRIEKSFETVAVDGAEQMPEILIHSPIPNIKSVSPNGKRVSPPHMESSSSGSILGRRNGGRKLILQSIPSFPSLTPQH

SEQ ID NO: 88437 - protein, 414 aa, Arabidopsis thaliana
  peptide (1)..(414): Ceres Seq. ID no. 12708928
MPGNKQTSSENNTAACESSSRCVVPSIGLHLNAILMSSKDCKTNVTQDYSCSANIQVGLQRSISTLQDSLDQTENEIREDADQDVPVEPALQELNLSSPKKKRVKLDSGEGESCKRCNCKKSKCLKLYCECFAAGVYCIEPCSCIDCFNKPIHEDVVLATRKQIESRNPLAFAPKVIRNSDSVQETGDDASKTPASARHKRGCNCKKSNCLKKYCECYQGGVGCSINCRCEGCKNAFGRKDGSSIDMEAEQEEENETSEKSRTAKSQQNTEVLMRKDMSSALPTTPTPIYRPELVQLPFSSSKNRMPPPQSLLGGGSSSGIFNSQYLRKPDISLSQSRIEKSFETVAVDGAEQMPEILIHSPIPNIKSVSPNGKRVSPPHMESSSSGSILGRRNGGRKLILQSIPSFPSLTPQH

SEQ ID NO: 88438 - DNA, 1585 bp, Arabidopsis thaliana
  misc_feature (1)..(1585): Ceres Seq. ID no. 12709017
  misc_feature (1)..(1585): Ortholog of  Ceres SEQ ID NO 13597574 as cited in SEQ ID NO 64677
  misc_feature (1)..(1585): Ortholog of  Ceres SEQ ID NO 13597843 as cited in SEQ ID NO 64850
  misc_feature (1)..(1585): Ortholog of  Ceres SEQ ID NO 13597678 as cited in SEQ ID NO 65375
  misc_feature (1)..(1585): Ortholog of  Ceres SEQ ID NO 13596180 as cited in SEQ ID NO 67941
  misc_feature (1)..(1585): Ortholog of  Ceres SEQ ID NO 13591190 as cited in SEQ ID NO 68044
  misc_feature (1)..(1585): Ortholog of  Ceres SEQ ID NO 13595961 as cited in SEQ ID NO 68223
atgaagattgagcttgtgttcatacctttgccggggattggtcatctcaggccaaccgtgaagctagcgaagcaactcataggcagcgaaaaccgtctttcgatcaccataatcatcatcccttcaagatttgacgccggtgatgcatccgcctgtatcgcatctctcaccacgttgtctcaagatgatcgcctccattacgaatccatatccgtcgcaaaacaaccaccaacctccgacccggatcctgttccggctcaagtgtacatagagaaacaaaagacgaaagtgagagatgcagtcgcggcgagaatcgtcgatccaacaagaaagctcgcgggattcgtggtggacatgttctgttcctcgatgatcgatgtagctaacgagtttggagttccgtgttatatggtatacacatcgaacgctacgtttttaggaaccatgcttcacgttcaacaaatgtacgatcaaaagaagtatgacgtcagcgagttagaaaactcggtcaccgagttggagtttccgtctctgactcgtccttatccagtgaagtgtcttcctcatatcctcacttcaaaggagtggttacctctctctctagctcaagctaggtgtttccggaagatgaagggtattttggtaaatacagttgctgagcttgaacctcacgctttgaaaatgttcaatattaatggtgacgatcttcctcaagtttatcctgttggaccagtgttgcatctcgaaaacggcaatgacgatgatgagaagcaatcggaaattttgcggtggctcgacgagcaaccgtctaaatctgttgtgtttctctgctttgggagcttgggaggtttcactgaagaacaaacaagagaaaccgctgtggccctagatagaagcggtcagcggtttctttggtgtcttcgtcacgcatcgccaaatataaaaacagatcgtcccagagattacacgaatcttgaggaggttttaccggaggggttcttggaacggactttggatagagggaaagtgattggatgggcaccacaagtggcggtactagagaagccggcgataggagggtttgtcactcactgcggttggaactctattttagagagcttgtggttcggtgttccaatggtgacgtggccgctatacgcggaacagaaggttaacgcgtttgagatggttgaggagctgggtttggcggtggagatacggaagtacttaaaaggagatttgttcgccggagagatggagacggttaccgcggaggatatagagagagccattaggcgtgtgatggagcaagacagtgacgttaggaacaacgtgaaagagatggcggagaagtgccacttcgcgttaatggacggtggatcttcgaaggcggctttggaaaagtttattcaagacgtgatagagaatatggattaaattggatagagagaatagcatgttgactatgactctatgagatacgatgactcagatccaaatgttactttgtatattatgtacgatatgtcaaaagaaaaatgtttgtttttcatttggtataagactttttgttcaaagtttaaat

SEQ ID NO: 88439 - protein, 478 aa, Arabidopsis thaliana
  peptide (1)..(478): Ceres Seq. ID no. 12709018
MKIELVFIPLPGIGHLRPTVKLAKQLIGSENRLSITIIIIPSRFDAGDASACIASLTTLSQDDRLHYESISVAKQPPTSDPDPVPAQVYIEKQKTKVRDAVAARIVDPTRKLAGFVVDMFCSSMIDVANEFGVPCYMVYTSNATFLGTMLHVQQMYDQKKYDVSELENSVTELEFPSLTRPYPVKCLPHILTSKEWLPLSLAQARCFRKMKGILVNTVAELEPHALKMFNINGDDLPQVYPVGPVLHLENGNDDDEKQSEILRWLDEQPSKSVVFLCFGSLGGFTEEQTRETAVALDRSGQRFLWCLRHASPNIKTDRPRDYTNLEEVLPEGFLERTLDRGKVIGWAPQVAVLEKPAIGGFVTHCGWNSILESLWFGVPMVTWPLYAEQKVNAFEMVEELGLAVEIRKYLKGDLFAGEMETVTAEDIERAIRRVMEQDSDVRNNVKEMAEKCHFALMDGGSSKAALEKFIQDVIENMD

SEQ ID NO: 88440 - protein, 360 aa, Arabidopsis thaliana
  peptide (1)..(360): Ceres Seq. ID no. 12709019
MFCSSMIDVANEFGVPCYMVYTSNATFLGTMLHVQQMYDQKKYDVSELENSVTELEFPSLTRPYPVKCLPHILTSKEWLPLSLAQARCFRKMKGILVNTVAELEPHALKMFNINGDDLPQVYPVGPVLHLENGNDDDEKQSEILRWLDEQPSKSVVFLCFGSLGGFTEEQTRETAVALDRSGQRFLWCLRHASPNIKTDRPRDYTNLEEVLPEGFLERTLDRGKVIGWAPQVAVLEKPAIGGFVTHCGWNSILESLWFGVPMVTWPLYAEQKVNAFEMVEELGLAVEIRKYLKGDLFAGEMETVTAEDIERAIRRVMEQDSDVRNNVKEMAEKCHFALMDGGSSKAALEKFIQDVIENMD

SEQ ID NO: 88441 - protein, 355 aa, Arabidopsis thaliana
  peptide (1)..(355): Ceres Seq. ID no. 12709020
MIDVANEFGVPCYMVYTSNATFLGTMLHVQQMYDQKKYDVSELENSVTELEFPSLTRPYPVKCLPHILTSKEWLPLSLAQARCFRKMKGILVNTVAELEPHALKMFNINGDDLPQVYPVGPVLHLENGNDDDEKQSEILRWLDEQPSKSVVFLCFGSLGGFTEEQTRETAVALDRSGQRFLWCLRHASPNIKTDRPRDYTNLEEVLPEGFLERTLDRGKVIGWAPQVAVLEKPAIGGFVTHCGWNSILESLWFGVPMVTWPLYAEQKVNAFEMVEELGLAVEIRKYLKGDLFAGEMETVTAEDIERAIRRVMEQDSDVRNNVKEMAEKCHFALMDGGSSKAALEKFIQDVIENMD

SEQ ID NO: 88442 - DNA, 1494 bp, Arabidopsis thaliana
  misc_feature (1)..(1494): Ceres Seq. ID no. 12709025
  misc_feature (1)..(1494): Ortholog of  Ceres SEQ ID NO 13597546 as cited in SEQ ID NO 65017
  misc_feature (1)..(1494): Ortholog of  Ceres SEQ ID NO 13654353 as cited in SEQ ID NO 68318
atggtagaatttcatgagttattgactgtgatggtttcactctttttagtgaagatatttcattgggtctatcagtggagaaatccaaaaactaatggaaaactacctccagggtctatgggctttccgttcattggagagacttttgagttctttaagcctcatgacgctcttcaattttcaacattcatcaaagacagagtccttaggttttttgctgatttctctagcattcatttgtcattttttcggacaagcttatttggagacaaagctataatctcaatggatatggaattgaatctcgagatggcgaaggcaaattccgtccctggtgtcacgaagagcgtaatacgactatttggggagaacaacttgtttttgcagagcaaggagtcccataaacatgttcggaacttgacgttccagttgttgggtccacaaggtttaaaatcaaggatgattgaagacgtggatctcttggctcgcacgtacatggaggaaggagctaggaacggctaccttgacgtaaaggaaacatcaagcaagattttaattggatgccttgcgaagaaagttatgggcgagatggaaccagaggcggcgaaagaactcgccctctgctggagatattttcagagtggctggtttagattctttctcaaccttcctgggacaggtgtctataaaatgatgaaggtgctttttgtgcaatacactgaggctgatatttcgtggcaggcaagaaagaggatgatgaagttactaaggaagacagtgttgacgaagagagcatcaggagaggagttaggggagttcttcaacatcatatttggagaaatggaaggagaaggagaaacgatgagcgtagagaatgcggtcgagtacatatataccttctttttggttgctaatgaaacaacaccaaggattcttgcggctacagtaaagtttataagcgaccaccctaaagtcaagcaagagttacaaagagaacatgaagaaattgttcggggtaaggcagagaaggaaggcggcctaacatgggaagactacaaatcaatgcatttcactcagatggttatcaatgagtcgcttagaatcataagcacagcaccaacagttcttagagtacttgaacatgatttccaagttggtgattatacaattccagctggttggacctttatgggatatcctcatatccatttcaattcagaaaaatacgaagacccttacgcatttaatccatggcgctgggagggaaaggatttgggcgcgatcgtctccaagactttcattcccttcggtgcaggtcgtagactttgtgtaggggctgagtttgctaagatgcagatggccgtttttatccatcatttgtttagatacaggtggtctatgaagtcagggacaacaataattcgaagctttatgcttatgtttccaggtgggtgtgatgttcaaatttcagaagacactgaagtcgataagtga

SEQ ID NO: 88443 - protein, 497 aa, Arabidopsis thaliana
  peptide (1)..(497): Ceres Seq. ID no. 12709026
MVEFHELLTVMVSLFLVKIFHWVYQWRNPKTNGKLPPGSMGFPFIGETFEFFKPHDALQFSTFIKDRVLRFFADFSSIHLSFFRTSLFGDKAIISMDMELNLEMAKANSVPGVTKSVIRLFGENNLFLQSKESHKHVRNLTFQLLGPQGLKSRMIEDVDLLARTYMEEGARNGYLDVKETSSKILIGCLAKKVMGEMEPEAAKELALCWRYFQSGWFRFFLNLPGTGVYKMMKVLFVQYTEADISWQARKRMMKLLRKTVLTKRASGEELGEFFNIIFGEMEGEGETMSVENAVEYIYTFFLVANETTPRILAATVKFISDHPKVKQELQREHEEIVRGKAEKEGGLTWEDYKSMHFTQMVINESLRIISTAPTVLRVLEHDFQVGDYTIPAGWTFMGYPHIHFNSEKYEDPYAFNPWRWEGKDLGAIVSKTFIPFGAGRRLCVGAEFAKMQMAVFIHHLFRYRWSMKSGTTIIRSFMLMFPGGCDVQISEDTEVDK

SEQ ID NO: 88444 - protein, 487 aa, Arabidopsis thaliana; identical to SEQ ID NO: 72130
  peptide (1)..(487): Ceres Seq. ID no. 12709027

SEQ ID NO: 88445 - protein, 458 aa, Arabidopsis thaliana; identical to SEQ ID NO: 72131
  peptide (1)..(458): Ceres Seq. ID no. 12709028

SEQ ID NO: 88446 - DNA, 1110 bp, Arabidopsis thaliana
  misc_feature (1)..(1110): Ceres Seq. ID no. 12709040
  misc_feature (1)..(1110): Ortholog of  Ceres SEQ ID NO 13597546 as cited in SEQ ID NO 65017
atggtagaggtttatgagttctgggccgtgatagtttcactcatagtggtaaagctgtgtcactggatctaccagtggaaaaatccaaaaggaaatggaaaacttcctccaggatctatgggttatccaatcatcggagagactttcgagttcatgaagcttcatgatgctattcagttaccaacattcgttaaggagaaattactcagacatggaccagtttttaggacaagcttatttggaggcaaagttatcatttcgactgatattggattgaacatggagatcgcaaagacaaatcatattcccggtatgccgaagagcttagagcggttatttggggcaaccaacttgtttgtgaataaggatactcataaacatgcccgcagcttgacaaaccagtttttaggttcgcaagctttaaaattaaggatgattcaagacatcgatttcttggctcgcacacacatgaaggaaggagctaggaaaggctgccttgacgtcaaggaaactgcaagcaagatcgttattgaatgtctttcgaagaaagtaatgggagagatggaaccagaggcagcaaaggaactcacactctgttggacatttttcccaagggattggtttcgattcgcttggaatttcccggggactggtgtctatcgcatagtgaaggcaagaaatcgtatgatgaaggttataaaggagacagtagttaaaaaaagagcatcaggaaagaaattgggggagtttttcgagaccatctttggagatacggaaagtgtaactatgagcatagagattgcgactgagtacatatttactctgtttgtgcttgctaacgaaacaacaccaggggtccttgcggcaacaataaagctcataagtgataaccctaaagtcatgcaggagttacggagagaacatgaaggaatcgtccaagataagattaagaaggatgagacagctgacctaacttgggaagactacaaatcaatgacttttacccagatgatacgtaacttcctaaatataataatgacgacttacctaccgtttacttcctcgcaaatgaataagaaagaaaaatgcacgtttaatacttacttatag

SEQ ID NO: 88447 - protein, 369 aa, Arabidopsis thaliana
  peptide (1)..(369): Ceres Seq. ID no. 12709041
MVEVYEFWAVIVSLIVVKLCHWIYQWKNPKGNGKLPPGSMGYPIIGETFEFMKLHDAIQLPTFVKEKLLRHGPVFRTSLFGGKVIISTDIGLNMEIAKTNHIPGMPKSLERLFGATNLFVNKDTHKHARSLTNQFLGSQALKLRMIQDIDFLARTHMKEGARKGCLDVKETASKIVIECLSKKVMGEMEPEAAKELTLCWTFFPRDWFRFAWNFPGTGVYRIVKARNRMMKVIKETVVKKRASGKKLGEFFETIFGDTESVTMSIEIATEYIFTLFVLANETTPGVLAATIKLISDNPKVMQELRREHEGIVQDKIKKDETADLTWEDYKSMTFTQMIRNFLNIIMTTYLPFTSSQMNKKEKCTFNTYL

SEQ ID NO: 88448 - protein, 330 aa, Arabidopsis thaliana
  peptide (1)..(330): Ceres Seq. ID no. 12709042
MGYPIIGETFEFMKLHDAIQLPTFVKEKLLRHGPVFRTSLFGGKVIISTDIGLNMEIAKTNHIPGMPKSLERLFGATNLFVNKDTHKHARSLTNQFLGSQALKLRMIQDIDFLARTHMKEGARKGCLDVKETASKIVIECLSKKVMGEMEPEAAKELTLCWTFFPRDWFRFAWNFPGTGVYRIVKARNRMMKVIKETVVKKRASGKKLGEFFETIFGDTESVTMSIEIATEYIFTLFVLANETTPGVLAATIKLISDNPKVMQELRREHEGIVQDKIKKDETADLTWEDYKSMTFTQMIRNFLNIIMTTYLPFTSSQMNKKEKCTFNTYL

SEQ ID NO: 88449 - protein, 318 aa, Arabidopsis thaliana
  peptide (1)..(318): Ceres Seq. ID no. 12709043
MKLHDAIQLPTFVKEKLLRHGPVFRTSLFGGKVIISTDIGLNMEIAKTNHIPGMPKSLERLFGATNLFVNKDTHKHARSLTNQFLGSQALKLRMIQDIDFLARTHMKEGARKGCLDVKETASKIVIECLSKKVMGEMEPEAAKELTLCWTFFPRDWFRFAWNFPGTGVYRIVKARNRMMKVIKETVVKKRASGKKLGEFFETIFGDTESVTMSIEIATEYIFTLFVLANETTPGVLAATIKLISDNPKVMQELRREHEGIVQDKIKKDETADLTWEDYKSMTFTQMIRNFLNIIMTTYLPFTSSQMNKKEKCTFNTYL

SEQ ID NO: 88450 - DNA, 1533 bp, Arabidopsis thaliana
  misc_feature (1)..(1533): Ceres Seq. ID no. 12709069
  misc_feature (1)..(1533): Ortholog of  Ceres SEQ ID NO 13594345 as cited in SEQ ID NO 58043
  misc_feature (1)..(1533): Ortholog of  Ceres SEQ ID NO 12614112 as cited in SEQ ID NO 60891
  misc_feature (1)..(1533): Ortholog of  Ceres SEQ ID NO 13597574 as cited in SEQ ID NO 64677
  misc_feature (1)..(1533): Ortholog of  Ceres SEQ ID NO 13662880 as cited in SEQ ID NO 65422
  misc_feature (1)..(1533): Ortholog of  Ceres SEQ ID NO 12779098 as cited in SEQ ID NO 67698
  misc_feature (1)..(1533): Ortholog of  Ceres SEQ ID NO 13591190 as cited in SEQ ID NO 68044
  misc_feature (1)..(1533): Ortholog of  Ceres SEQ ID NO 13596089 as cited in SEQ ID NO 68373
atggagatggaatcgtcgttacctcatgtgatgctcgtatcattcccagggcaaggtcacataagccctcttcttcgtctcggaaagatcattgcctctaaaggcttaatcgtcacctttgtaaccacagaggaaccattgggcaagaagatgcgtcaagccaacaatattcaagacggtgtgctcaaaccggtcgggctaggttttctccggttcgagttcttcgaggatggatttgtctacaaagaagactttgatttgttacaaaaatcacttgaagtttccggaaaacgagagatcaagaatcttgtcaagaaatatgagaagcaaccagtgagatgtctcataaataatgcctttgttccatgggtttgtgacatagccgaggagcttcaaatcccatcagctgttctttgggtccagtcttgtgcttgcctcgccgcttattactattaccaccaccagttagttaagtttccgaccgaaaccgagccggaaataaccgttgacgtccctttcaagccattaacattgaagcatgacgagatccctagctttcttcacccttcctctccgctgtcctctataggaggtaccattttagagcagatcaagcgacttcacaagcctttctctgttctcatcgaaacttttcaagaacttgaaaaagataccattgaccacatgtcccagctctgccctcaagtcaacttcaaccccatcggtccgctttttactatggctaaaaccataaggtctgacatcaagggagacatctccaagccagatagtgactgcatagagtggcttgactcgagagaaccatcctccgttgtttacatctcttttgggactttggctttcttgaagcaaaaccagatcgacgagattgctcacggcattctcaactccgggttgtcctgcttatgggttttgcggcctcccttagaaggcttagccatagaaccgcatgtcttgcctctagagcttgaagagaaagggaagattgtggaatggtgtcaacaagagaaagttttggctcatcctgcggttgcttgcttcttaagtcactgtggatggaactcaaccatggaggctttaacttcaggagttcccgttatttgtttcccgcagtggggagatcaggtgacaaatgcggtgtacatgattgatgttttcaagacaggattgagactcagccgtggagcttccgatgagaggattgttccaagggaggaggttgctgagcgactgcttgaggccaccgttggagagaaggcggtggagctgagagaaaacgctcggaggtggaaggaggaggcggagtctgccgtggcttacggtggaacatcggaaaggaattttcaagagtttgttgacaagttggttgatgtcaagacaatgacaaacattaataatgtcgtgtaagtcgtaaatatcatattgatacttgttattaccggattacgatttttaattgtttaatatgtactaaattgtatgcatcgatataaagtgaacaattttatgttg

SEQ ID NO: 88451 - protein, 475 aa, Arabidopsis thaliana
  peptide (1)..(475): Ceres Seq. ID no. 12709070
MEMESSLPHVMLVSFPGQGHISPLLRLGKIIASKGLIVTFVTTEEPLGKKMRQANNIQDGVLKPVGLGFLRFEFFEDGFVYKEDFDLLQKSLEVSGKREIKNLVKKYEKQPVRCLINNAFVPWVCDIAEELQIPSAVLWVQSCACLAAYYYYHHQLVKFPTETEPEITVDVPFKPLTLKHDEIPSFLHPSSPLSSIGGTILEQIKRLHKPFSVLIETFQELEKDTIDHMSQLCPQVNFNPIGPLFTMAKTIRSDIKGDISKPDSDCIEWLDSREPSSVVYISFGTLAFLKQNQIDEIAHGILNSGLSCLWVLRPPLEGLAIEPHVLPLELEEKGKIVEWCQQEKVLAHPAVACFLSHCGWNSTMEALTSGVPVICFPQWGDQVTNAVYMIDVFKTGLRLSRGASDERIVPREEVAERLLEATVGEKAVELRENARRWKEEAESAVAYGGTSERNFQEFVDKLVDVKTMTNINNVV

SEQ ID NO: 88452 - protein, 473 aa, Arabidopsis thaliana
  peptide (1)..(473): Ceres Seq. ID no. 12709071
MESSLPHVMLVSFPGQGHISPLLRLGKIIASKGLIVTFVTTEEPLGKKMRQANNIQDGVLKPVGLGFLRFEFFEDGFVYKEDFDLLQKSLEVSGKREIKNLVKKYEKQPVRCLINNAFVPWVCDIAEELQIPSAVLWVQSCACLAAYYYYHHQLVKFPTETEPEITVDVPFKPLTLKHDEIPSFLHPSSPLSSIGGTILEQIKRLHKPFSVLIETFQELEKDTIDHMSQLCPQVNFNPIGPLFTMAKTIRSDIKGDISKPDSDCIEWLDSREPSSVVYISFGTLAFLKQNQIDEIAHGILNSGLSCLWVLRPPLEGLAIEPHVLPLELEEKGKIVEWCQQEKVLAHPAVACFLSHCGWNSTMEALTSGVPVICFPQWGDQVTNAVYMIDVFKTGLRLSRGASDERIVPREEVAERLLEATVGEKAVELRENARRWKEEAESAVAYGGTSERNFQEFVDKLVDVKTMTNINNVV

SEQ ID NO: 88453 - protein, 465 aa, Arabidopsis thaliana
  peptide (1)..(465): Ceres Seq. ID no. 12709072
MLVSFPGQGHISPLLRLGKIIASKGLIVTFVTTEEPLGKKMRQANNIQDGVLKPVGLGFLRFEFFEDGFVYKEDFDLLQKSLEVSGKREIKNLVKKYEKQPVRCLINNAFVPWVCDIAEELQIPSAVLWVQSCACLAAYYYYHHQLVKFPTETEPEITVDVPFKPLTLKHDEIPSFLHPSSPLSSIGGTILEQIKRLHKPFSVLIETFQELEKDTIDHMSQLCPQVNFNPIGPLFTMAKTIRSDIKGDISKPDSDCIEWLDSREPSSVVYISFGTLAFLKQNQIDEIAHGILNSGLSCLWVLRPPLEGLAIEPHVLPLELEEKGKIVEWCQQEKVLAHPAVACFLSHCGWNSTMEALTSGVPVICFPQWGDQVTNAVYMIDVFKTGLRLSRGASDERIVPREEVAERLLEATVGEKAVELRENARRWKEEAESAVAYGGTSERNFQEFVDKLVDVKTMTNINNVV

SEQ ID NO: 88454 - DNA, 2346 bp, Arabidopsis thaliana
  misc_feature (1)..(2346): Ceres Seq. ID no. 12709110
  misc_feature (1)..(2346): Ortholog of  Ceres SEQ ID NO 15180400 as cited in SEQ ID NO 0
atgggagaggattatgagcttgaagaaggagagatgaattgttcctctgatgaagctgttgttgatcttgacgttgatctctcttacattgacaagaaggtacagaatgtacttggccacttgcaaaaaggtttcggagaggaagcccgggaccggtttggtccggagatctttgactatggatcatttttgcccacttacaaacgtttgccggctgtaccatcatgtcaaaggagttctctagggaatcatgctgtacaaagaatttccaacagtttacccgggaagaatgtggttcagaagtttcagtcaccccctgctacatcttgtaaactagtaagaaatcaggatcctcagaactatcaaacttcaggatctcttttggctcaagctccaggaaaagttcccataaataaaggaaatgcaagaacaccagccaatgatttgcctcataataagccgatcagagttcggatcaaaatgggttctgaaatcttgtcccaaagtgtcgcgatggtttgcaaggatcttggtctcgatggttctccaaattcaccaccccgaatcagccaggatgatagtagcagaatgctaccgcatacatctctagggaagacaagtgaatctccttcccgcattcttcaggaaatgactgccatttctgttccagaggatctactgatgtcgcctcttcctgatagtctgctcctagtgaaggataagaagaagcaatatactttattagacaatcaacctatgattaagacaggaaagaaatcttctattcagatacagaacaagttctcggatgttttatgttgtgagaaaactccaattggaaggagaaggaaagaggtagactgttttcatgccaccacttggaatgagacgaagaagcataaagttttatccactggtcagctagccagggataactcagcttgtggtttaggtggggcaagtcttactactgatgggtttacaacaaaaagtaacttgcaggaaggttgtagaaaagatggtgaaagtgatcccagagtcgcaaataaaataaagtttgttgggttgcatgctgtgaaagagaaaaaaacatgtccgacaaagttgcaacagaaccgtagcaaatatcgtattggtgataaagttttatcaaagatgcctttgaaggatgccgcatatataggtcacaatagcatggacactgggtttgattttgcggttgcaccttcttccaccagtgttgacctagattattgggcccaatgtgagagttgtgagaaatggcggctactgccctatgacctgaatactgagaagctgcctgataagtggttgtgtagcatgcaaacctggctgataagattgaccagaaagcaaagaggagagcagcaggctgattgctttcaagaacacctgaatggtgatgcctcatgtagatatttctctggtggaagtgggcagatttctgggatagaaacatcaaactcgtcgaaggttttaggatcacataaaagtggacgaatgtatgtggaagaagtaaaagcatcccctgtggaatcagtttcctcttcccctgcaaggtcttcatgccccacgaatgatatacttcaagaggctgaaaagctgagaaagcttgctgactgtttcaagagctctggatttgaatatgaatacaaggagatcaactttaaagcggctctgaggtttctccttggagcttcagttttagaaatgtgcagtacagataatgtggaagtggggaagatgagccatattgaggcttaccatactgctgcaaaactttcagaaagttgtgcccatcaatatgaaacaagccaagaaatggctgcagctactttggcttataaatgcacagaagtggcttgcatgagattagtgtatggcagaagtctaggtctgagtggagaatggaatgaattgcaaaaaatggtacagatgactcctcaaggtgaatcaccgtcatcatctgcatctgatgtcgatagtttcaatcatcaaggggtgattaagaagtctgctaaaaccagaagaggtctttcccatgttgccggaaaccttctccctgttgctagaagccaactaaattttgttccgctattggactttacagggagcatgaatctggcaatggaggcctcagcaaaatcccaaaatgcttttaaagccgtcactgacacctcagaagaaagaaagcatggagactgtatctctgctatcaaaaaagttgtcgattttagtttccatgatgttgaagcgcttataaagatgattgaggttgccatggatgctctaagttcatcaagattcggtggcccaaagtgttga

SEQ ID NO: 88455 - protein, 781 aa, Arabidopsis thaliana
  peptide (1)..(781): Ceres Seq. ID no. 12709111
MGEDYELEEGEMNCSSDEAVVDLDVDLSYIDKKVQNVLGHLQKGFGEEARDRFGPEIFDYGSFLPTYKRLPAVPSCQRSSLGNHAVQRISNSLPGKNVVQKFQSPPATSCKLVRNQDPQNYQTSGSLLAQAPGKVPINKGNARTPANDLPHNKPIRVRIKMGSEILSQSVAMVCKDLGLDGSPNSPPRISQDDSSRMLPHTSLGKTSESPSRILQEMTAISVPEDLLMSPLPDSLLLVKDKKKQYTLLDNQPMIKTGKKSSIQIQNKFSDVLCCEKTPIGRRRKEVDCFHATTWNETKKHKVLSTGQLARDNSACGLGGASLTTDGFTTKSNLQEGCRKDGESDPRVANKIKFVGLHAVKEKKTCPTKLQQNRSKYRIGDKVLSKMPLKDAAYIGHNSMDTGFDFAVAPSSTSVDLDYWAQCESCEKWRLLPYDLNTEKLPDKWLCSMQTWLIRLTRKQRGEQQADCFQEHLNGDASCRYFSGGSGQISGIETSNSSKVLGSHKSGRMYVEEVKASPVESVSSSPARSSCPTNDILQEAEKLRKLADCFKSSGFEYEYKEINFKAALRFLLGASVLEMCSTDNVEVGKMSHIEAYHTAAKLSESCAHQYETSQEMAAATLAYKCTEVACMRLVYGRSLGLSGEWNELQKMVQMTPQGESPSSSASDVDSFNHQGVIKKSAKTRRGLSHVAGNLLPVARSQLNFVPLLDFTGSMNLAMEASAKSQNAFKAVTDTSEERKHGDCISAIKKVVDFSFHDVEALIKMIEVAMDALSSSRFGGPKC

SEQ ID NO: 88456 - protein, 770 aa, Arabidopsis thaliana
  peptide (1)..(770): Ceres Seq. ID no. 12709112
MNCSSDEAVVDLDVDLSYIDKKVQNVLGHLQKGFGEEARDRFGPEIFDYGSFLPTYKRLPAVPSCQRSSLGNHAVQRISNSLPGKNVVQKFQSPPATSCKLVRNQDPQNYQTSGSLLAQAPGKVPINKGNARTPANDLPHNKPIRVRIKMGSEILSQSVAMVCKDLGLDGSPNSPPRISQDDSSRMLPHTSLGKTSESPSRILQEMTAISVPEDLLMSPLPDSLLLVKDKKKQYTLLDNQPMIKTGKKSSIQIQNKFSDVLCCEKTPIGRRRKEVDCFHATTWNETKKHKVLSTGQLARDNSACGLGGASLTTDGFTTKSNLQEGCRKDGESDPRVANKIKFVGLHAVKEKKTCPTKLQQNRSKYRIGDKVLSKMPLKDAAYIGHNSMDTGFDFAVAPSSTSVDLDYWAQCESCEKWRLLPYDLNTEKLPDKWLCSMQTWLIRLTRKQRGEQQADCFQEHLNGDASCRYFSGGSGQISGIETSNSSKVLGSHKSGRMYVEEVKASPVESVSSSPARSSCPTNDILQEAEKLRKLADCFKSSGFEYEYKEINFKAALRFLLGASVLEMCSTDNVEVGKMSHIEAYHTAAKLSESCAHQYETSQEMAAATLAYKCTEVACMRLVYGRSLGLSGEWNELQKMVQMTPQGESPSSSASDVDSFNHQGVIKKSAKTRRGLSHVAGNLLPVARSQLNFVPLLDFTGSMNLAMEASAKSQNAFKAVTDTSEERKHGDCISAIKKVVDFSFHDVEALIKMIEVAMDALSSSRFGGPKC

SEQ ID NO: 88457 - protein, 621 aa, Arabidopsis thaliana
  peptide (1)..(621): Ceres Seq. ID no. 12709113
MGSEILSQSVAMVCKDLGLDGSPNSPPRISQDDSSRMLPHTSLGKTSESPSRILQEMTAISVPEDLLMSPLPDSLLLVKDKKKQYTLLDNQPMIKTGKKSSIQIQNKFSDVLCCEKTPIGRRRKEVDCFHATTWNETKKHKVLSTGQLARDNSACGLGGASLTTDGFTTKSNLQEGCRKDGESDPRVANKIKFVGLHAVKEKKTCPTKLQQNRSKYRIGDKVLSKMPLKDAAYIGHNSMDTGFDFAVAPSSTSVDLDYWAQCESCEKWRLLPYDLNTEKLPDKWLCSMQTWLIRLTRKQRGEQQADCFQEHLNGDASCRYFSGGSGQISGIETSNSSKVLGSHKSGRMYVEEVKASPVESVSSSPARSSCPTNDILQEAEKLRKLADCFKSSGFEYEYKEINFKAALRFLLGASVLEMCSTDNVEVGKMSHIEAYHTAAKLSESCAHQYETSQEMAAATLAYKCTEVACMRLVYGRSLGLSGEWNELQKMVQMTPQGESPSSSASDVDSFNHQGVIKKSAKTRRGLSHVAGNLLPVARSQLNFVPLLDFTGSMNLAMEASAKSQNAFKAVTDTSEERKHGDCISAIKKVVDFSFHDVEALIKMIEVAMDALSSSRFGGPKC

SEQ ID NO: 88458 - DNA, 540 bp, Arabidopsis thaliana
  misc_feature (1)..(540): Ceres Seq. ID no. 12709123
  misc_feature (1)..(540): Ortholog of  Ceres SEQ ID NO 12618205 as cited in SEQ ID NO 65153
atgatcctcgccgagtataccgaattcacaggcaatttcccgtctattgctgctcagtgtctccagaagcttccgtcctccagcaacagcaagttcacttacaactgcgatcaccataccttcaatttccttgtcgaagatgcctacgcatattgtgttgtggcgaaagattctcttagcaagcaaatctcgatcgcatttctggagcgtgtgaaagctgatttcaagaagagatatggaggtggaaaagcaagtacagctatcgccaaaagtctcaacaaggagttcgggccggtgatgaaggaacacatgaattatattgttgaccatgcagaggagattgaaaaactaataaaagtcaaggctcaggtttcagaagttaaaagtataatgttggagaatattgacaaggcaatcgacagaggggaaaatctaacagttcttactgacaagaccgagaatctacgctctcaggcgcgggaatacaagaaaaccaagggacacaggtggaggaggaaatttgtggttaccagaacatga

SEQ ID NO: 88459 - protein, 179 aa, Arabidopsis thaliana; identical to SEQ ID NO: 71301
  peptide (1)..(179): Ceres Seq. ID no. 12709124

SEQ ID NO: 88460 - DNA, 675 bp, Arabidopsis thaliana
  misc_feature (1)..(675): Ceres Seq. ID no. 12709166
  misc_feature (1)..(675): Ortholog of  Ceres SEQ ID NO 13586635 as cited in SEQ ID NO 14217
  misc_feature (1)..(675): Ortholog of  Ceres SEQ ID NO 12616285 as cited in SEQ ID NO 63483
atggtggcactatcttcgttaggttaccggactatagcgccggaccttcgtggttacggagacaccgacgcgccggagagtgtggacgcgtacacaagtctccacgtggttggagatctgattggattgatcgacgccgtggttggagatcgggaaaaggtgttcgtagtgggacatgattggggcgctattatcgcttggcatctctgtctttttcgaccggatagggttaaagctttggttaacatgagtgtggtgtttgatccttggaatcctaaacggaaaccaacctcgacgtttaaagctttctatggagatgactactacatctgcagattccaggaatatggggaaatagagtcggaatttgctaagtatgagaagaatggcttcactggaccagtaaactactaccgaaatatggaccgaacatgggagctgatggggtcactatcaaacgctaaagtgaaagttccggttaagttcataatcggcgaccaagatctgacatatcacattcccggtagcaagaagtacatccacgatggccggtttaagagccatgtcccgttgttggacgaagttgtggtaattaaaggcgtcggtcattttatccacgaggaaaggcctgacgagataagtaaacacattcacgactattttcttactttttag

SEQ ID NO: 88461 - protein, 224 aa, Arabidopsis thaliana
  peptide (1)..(224): Ceres Seq. ID no. 12709167
MVALSSLGYRTIAPDLRGYGDTDAPESVDAYTSLHVVGDLIGLIDAVVGDREKVFVVGHDWGAIIAWHLCLFRPDRVKALVNMSVVFDPWNPKRKPTSTFKAFYGDDYYICRFQEYGEIESEFAKYEKNGFTGPVNYYRNMDRTWELMGSLSNAKVKVPVKFIIGDQDLTYHIPGSKKYIHDGRFKSHVPLLDEVVVIKGVGHFIHEERPDEISKHIHDYFLTF

SEQ ID NO: 88462 - protein, 142 aa, Arabidopsis thaliana
  peptide (1)..(142): Ceres Seq. ID no. 12709168
MSVVFDPWNPKRKPTSTFKAFYGDDYYICRFQEYGEIESEFAKYEKNGFTGPVNYYRNMDRTWELMGSLSNAKVKVPVKFIIGDQDLTYHIPGSKKYIHDGRFKSHVPLLDEVVVIKGVGHFIHEERPDEISKHIHDYFLTF

SEQ ID NO: 88463 - DNA, 3576 bp, Arabidopsis thaliana
  misc_feature (1)..(3576): Ceres Seq. ID no. 12709336
  misc_feature (1)..(3576): Ortholog of  Ceres SEQ ID NO 14308232 as cited in SEQ ID NO 58659
atggcggaatcgtctggtaccacgctaatggatctgatctcggcggatccaaccccggttcctgcacaatctacttcttcgtccgcatcttccacggcgtctcagccgacttctgcttccgcatcgtcttcttcccatctgcaccatccaatgtcgacgaagacgactctaggagagaagaaatcgaagagagccactttgatgcagatccaaaacgacactatatctgttgctaaagctgcactgaatcctgttaaggccaatatcatgccacaaaggcagagacagaaaaagaagccggtttcctattcgcaacttgcaaggagcattcatgaattagctgccactttggatcagaaaagttctcagaaacaactagtgaatcacgtgttccctaagcttgctgtgtacaactcagttgatccttctctggccccatctcttcttatgcttaatcagcaatgtgaagacaggaatgtgctacgatatgtttattattacctagctagaattttgtccgatacgggcatgactccagggggtggtatccccactcctaactgggatgctctagcagatattgatgctggtggaggagtcacaagagctgatgttgttcctcggatagtgaatcaacttacaaacgaagctacaaattctgaatttgaatttcatgctcgacgactgcaagctttgaaagctctgacatattcaccatcaggcaattctgagcttttgtcaaaattgtatgagattgtatttggcattcttgaaaaggttggtgatgttccgcataaacgaaagaaaggtgtatttgggacaaaagggggtgataaagagtcgattatgcgaagtaacttgcaatacgctgctatgagtgcactgagaagactccctcttgatccaggaaatccactttttctgcaccgtgcagctcagggtgttttctttgctgatcctgttgcggtgaggcattcactggaaattctatctgagttagccacaagagacccctatacagtagcaatgacattagaaaagcttgcgtctccaacaggggctttgcaagatatcctgcatatgaatgatgttcttgctagagtttctctggctaggttgtgccactcaatatctagagctcgggcattagatgagaggcctgatattaggtctcagttcaactcaattctctatcagctactcctagatccaagcgaaagggtatgctatgaggcgattttgtgcattctgggaaaacacgataacactgagaggcatgagatggatgagcgtgctgctgggtggtatcgcttgacgagagagatcctgaagctgccagaagcaccatccttgtcctccaaggataaatctaataaaaccaagcgtccacagccccttattaagcttgtaatgaggaggttagagagctcatttcgcagtttctcaagaccagtacttcatgcagcagcaagggttgtgcaagagatgggaaagagtagagcagcagcgtttgctatgggattacaggacattgatgaatccgttcatgtaaatgcattttctgatgctctagatgatgctgagaccaatgaaagttctcatccagaaggaattcggagaacatcatccatatctgcagggcctggtcgcagtgatacaattgcaagtttgctagctgcattaatggaggtggttcggacaacagtagcatgcgagtgcgtgtatgtccgggcaatggttatcaaagcattgatatggatgcaaagtccagatgaatcattggatgagttaaaatcaatcattgcctcggagctttcagatcctggttggcctgcagctctagtcaatgatgttttgcttactttgcatgcccgctttaaggcaactccagatatggctgttattcttctcgaaattgccagaatatttgccaccaaagttccagggaaaattgacgctgatgtcttacagctgctatggaagacatgtcttgttggagctggtcctgacgggaaacacacagctctggaagcagtcacgatagtactcgatctaccacctccacaaccggggtccatggctggactgacatcaattgatagggtctctgcatcagatcctaagtcagctctggcgctgcagaaattggtgcaagcagcagtatggttccttggagaaaatgcaaactacgccgcatcagaatatgcatgggaatctgcaactccaccaggcacagcacttatgatgttggatgcagataaaatggttgctgctgctagttctcgcaatcctactctagctggtgcattaactcgcctccagaggtgtgcatttagtggaagctgggaggtcagaattgttgcaattcaagctcttactacaatagccattagatctggtgaacctttcaggctgcagatatacgagtttttgtacaccttagcagagggtggtgtacagtctcaactttctgaaatgcacctgagtaatggggaagaccaaggagctagtggtacaggtcttggagttttaataacaccgatgttaaaagttcttgatgaaatgtatgttggacaagacgaattaatcaaggatatacgccatcacgataatgcaaacaaagaatggaaggacgaggagctgaaaaaactctacgaaaaccatgagaggctgctggattttgtttcaatgttttgctttattcctagagccaagtatttaccactgggcccgataagcgcgaagctcattgacacataccgtacaaagcacaatatcactgcatctactgggtccaccgatccagctgttgttgctactgggatctcggacttaatctatgagtccactcagcctgcccccgctgcctcaaactccagtggtctggatgatgatttggtgaatgcttgggctgcaaaccttggtgatgatggtcttcttggaaacaatgccccagcaatgagtaggaaatggaactcagacctatataatacttgtcaggtcaatgaattcattgctggagtcggaacagatgcaccggatgttgaggaggagaatgtcttctctagaccttcggttgggtatgatgacatgtgggctaaaactcttttagaaacttcagaattggaggaagaagatgcgagatcaggttcatcgtctccagattctgctggatcagtggaaagctcaatatcctctcactttggtggaatgaactacccatcattgttcagttcaaagccttcctcacaagcaacgattagagaagagcctcctccgccttattcgtattctgagccacaaagtcgtgaatcgtttgagaaccctgtagcagggtctggttctcgaagttatgaatcagatgatgaagaacctaggaaatctactggtacaagatttggaacagcgctctatgacttcacagcaggaggagatgatgagctaaacttgacggcagaagaggaattggagatagagtatgaagttgatggctggttttacgtaaagaagaagcggcctggaagagatgggaagatggcgggacttgttcctgttctatacgtcaatcaatcttga

SEQ ID NO: 88464 - protein, 1191 aa, Arabidopsis thaliana
  peptide (1)..(1191): Ceres Seq. ID no. 12709337
MAESSGTTLMDLISADPTPVPAQSTSSSASSTASQPTSASASSSSHLHHPMSTKTTLGEKKSKRATLMQIQNDTISVAKAALNPVKANIMPQRQRQKKKPVSYSQLARSIHELAATLDQKSSQKQLVNHVFPKLAVYNSVDPSLAPSLLMLNQQCEDRNVLRYVYYYLARILSDTGMTPGGGIPTPNWDALADIDAGGGVTRADVVPRIVNQLTNEATNSEFEFHARRLQALKALTYSPSGNSELLSKLYEIVFGILEKVGDVPHKRKKGVFGTKGGDKESIMRSNLQYAAMSALRRLPLDPGNPLFLHRAAQGVFFADPVAVRHSLEILSELATRDPYTVAMTLEKLASPTGALQDILHMNDVLARVSLARLCHSISRARALDERPDIRSQFNSILYQLLLDPSERVCYEAILCILGKHDNTERHEMDERAAGWYRLTREILKLPEAPSLSSKDKSNKTKRPQPLIKLVMRRLESSFRSFSRPVLHAAARVVQEMGKSRAAAFAMGLQDIDESVHVNAFSDALDDAETNESSHPEGIRRTSSISAGPGRSDTIASLLAALMEVVRTTVACECVYVRAMVIKALIWMQSPDESLDELKSIIASELSDPGWPAALVNDVLLTLHARFKATPDMAVILLEIARIFATKVPGKIDADVLQLLWKTCLVGAGPDGKHTALEAVTIVLDLPPPQPGSMAGLTSIDRVSASDPKSALALQKLVQAAVWFLGENANYAASEYAWESATPPGTALMMLDADKMVAAASSRNPTLAGALTRLQRCAFSGSWEVRIVAIQALTTIAIRSGEPFRLQIYEFLYTLAEGGVQSQLSEMHLSNGEDQGASGTGLGVLITPMLKVLDEMYVGQDELIKDIRHHDNANKEWKDEELKKLYENHERLLDFVSMFCFIPRAKYLPLGPISAKLIDTYRTKHNITASTGSTDPAVVATGISDLIYESTQPAPAASNSSGLDDDLVNAWAANLGDDGLLGNNAPAMSRKWNSDLYNTCQVNEFIAGVGTDAPDVEEENVFSRPSVGYDDMWAKTLLETSELEEEDARSGSSSPDSAGSVESSISSHFGGMNYPSLFSSKPSSQATIREEPPPPYSYSEPQSRESFENPVAGSGSRSYESDDEEPRKSTGTRFGTALYDFTAGGDDELNLTAEEELEIEYEVDGWFYVKKKRPGRDGKMAGLVPVLYVNQS

SEQ ID NO: 88465 - protein, 1182 aa, Arabidopsis thaliana
  peptide (1)..(1182): Ceres Seq. ID no. 12709338
MDLISADPTPVPAQSTSSSASSTASQPTSASASSSSHLHHPMSTKTTLGEKKSKRATLMQIQNDTISVAKAALNPVKANIMPQRQRQKKKPVSYSQLARSIHELAATLDQKSSQKQLVNHVFPKLAVYNSVDPSLAPSLLMLNQQCEDRNVLRYVYYYLARILSDTGMTPGGGIPTPNWDALADIDAGGGVTRADVVPRIVNQLTNEATNSEFEFHARRLQALKALTYSPSGNSELLSKLYEIVFGILEKVGDVPHKRKKGVFGTKGGDKESIMRSNLQYAAMSALRRLPLDPGNPLFLHRAAQGVFFADPVAVRHSLEILSELATRDPYTVAMTLEKLASPTGALQDILHMNDVLARVSLARLCHSISRARALDERPDIRSQFNSILYQLLLDPSERVCYEAILCILGKHDNTERHEMDERAAGWYRLTREILKLPEAPSLSSKDKSNKTKRPQPLIKLVMRRLESSFRSFSRPVLHAAARVVQEMGKSRAAAFAMGLQDIDESVHVNAFSDALDDAETNESSHPEGIRRTSSISAGPGRSDTIASLLAALMEVVRTTVACECVYVRAMVIKALIWMQSPDESLDELKSIIASELSDPGWPAALVNDVLLTLHARFKATPDMAVILLEIARIFATKVPGKIDADVLQLLWKTCLVGAGPDGKHTALEAVTIVLDLPPPQPGSMAGLTSIDRVSASDPKSALALQKLVQAAVWFLGENANYAASEYAWESATPPGTALMMLDADKMVAAASSRNPTLAGALTRLQRCAFSGSWEVRIVAIQALTTIAIRSGEPFRLQIYEFLYTLAEGGVQSQLSEMHLSNGEDQGASGTGLGVLITPMLKVLDEMYVGQDELIKDIRHHDNANKEWKDEELKKLYENHERLLDFVSMFCFIPRAKYLPLGPISAKLIDTYRTKHNITASTGSTDPAVVATGISDLIYESTQPAPAASNSSGLDDDLVNAWAANLGDDGLLGNNAPAMSRKWNSDLYNTCQVNEFIAGVGTDAPDVEEENVFSRPSVGYDDMWAKTLLETSELEEEDARSGSSSPDSAGSVESSISSHFGGMNYPSLFSSKPSSQATIREEPPPPYSYSEPQSRESFENPVAGSGSRSYESDDEEPRKSTGTRFGTALYDFTAGGDDELNLTAEEELEIEYEVDGWFYVKKKRPGRDGKMAGLVPVLYVNQS

SEQ ID NO: 88466 - protein, 1141 aa, Arabidopsis thaliana
  peptide (1)..(1141): Ceres Seq. ID no. 12709339
MSTKTTLGEKKSKRATLMQIQNDTISVAKAALNPVKANIMPQRQRQKKKPVSYSQLARSIHELAATLDQKSSQKQLVNHVFPKLAVYNSVDPSLAPSLLMLNQQCEDRNVLRYVYYYLARILSDTGMTPGGGIPTPNWDALADIDAGGGVTRADVVPRIVNQLTNEATNSEFEFHARRLQALKALTYSPSGNSELLSKLYEIVFGILEKVGDVPHKRKKGVFGTKGGDKESIMRSNLQYAAMSALRRLPLDPGNPLFLHRAAQGVFFADPVAVRHSLEILSELATRDPYTVAMTLEKLASPTGALQDILHMNDVLARVSLARLCHSISRARALDERPDIRSQFNSILYQLLLDPSERVCYEAILCILGKHDNTERHEMDERAAGWYRLTREILKLPEAPSLSSKDKSNKTKRPQPLIKLVMRRLESSFRSFSRPVLHAAARVVQEMGKSRAAAFAMGLQDIDESVHVNAFSDALDDAETNESSHPEGIRRTSSISAGPGRSDTIASLLAALMEVVRTTVACECVYVRAMVIKALIWMQSPDESLDELKSIIASELSDPGWPAALVNDVLLTLHARFKATPDMAVILLEIARIFATKVPGKIDADVLQLLWKTCLVGAGPDGKHTALEAVTIVLDLPPPQPGSMAGLTSIDRVSASDPKSALALQKLVQAAVWFLGENANYAASEYAWESATPPGTALMMLDADKMVAAASSRNPTLAGALTRLQRCAFSGSWEVRIVAIQALTTIAIRSGEPFRLQIYEFLYTLAEGGVQSQLSEMHLSNGEDQGASGTGLGVLITPMLKVLDEMYVGQDELIKDIRHHDNANKEWKDEELKKLYENHERLLDFVSMFCFIPRAKYLPLGPISAKLIDTYRTKHNITASTGSTDPAVVATGISDLIYESTQPAPAASNSSGLDDDLVNAWAANLGDDGLLGNNAPAMSRKWNSDLYNTCQVNEFIAGVGTDAPDVEEENVFSRPSVGYDDMWAKTLLETSELEEEDARSGSSSPDSAGSVESSISSHFGGMNYPSLFSSKPSSQATIREEPPPPYSYSEPQSRESFENPVAGSGSRSYESDDEEPRKSTGTRFGTALYDFTAGGDDELNLTAEEELEIEYEVDGWFYVKKKRPGRDGKMAGLVPVLYVNQS

SEQ ID NO: 88467 - DNA, 3185 bp, Arabidopsis thaliana
  misc_feature (1)..(3185): Ceres Seq. ID no. 12709411
  misc_feature (1)..(3185): Ortholog of  Ceres SEQ ID NO 13646569 as cited in SEQ ID NO 20745
atggctgctgatatctcatgggatgaaataaagaaggagaatgttgatcttgagaaaattccggtggacgaagtgttccaacagctgaaatgttcccgggaaggtttgtcttcagaggaaggaagaaacagactacaaatatttggggcaaacaaactagaagagaaggtagagaacaaatttctaaagttcttagggtttatgtggaaccctctttcatgggtgatggaagctgccgcaatcatggccattgtgttggcaaatggcggtgggaggccaccggattggcaagactttgttggaatcacatgtttgctcatcattaactcgacaatcagtttcatcgaggagaacaatgccggtaatgcagctgcagctctcatggccaatcttgcaccaaaaacaaaggtattaagggatgggagatggggagagcaagaagctgcgattctagttccaggtgacttaatcagcatcaagttaggtgacattgttcccgcggatgctcgtctcctagaaggtgatcctctgaagatcgaccaatctgctcttaccggtgaatctctcccagctactaaacaccagggagacgaggttttttctggctccacttgtaaacaaggtgagatcgaggctgttgtcattgcaaccggagtgcataccttctttggcaaggcagctcatcttgttgatagtactaacaatgttggccatttccaaaaggtcttaaccgccattggtaacttctgtatctgttcaatcggaataggaatgttgattgagataattataatgtatccgatccaacatcgaaagtatagagatggaatcgacaatcttcttgtccttctcattggaggaatcccaatcgctatgcccactgtgttgtctgtcacaatggctattggatcacataggttgtctcaacaaggtgccatcacaaaacgaatgaccgccatcgaagaaatggctggtatggatgttctttgcagcgataaaactggaactctaactctcaacaaacttacagttgacaagaacttgattgaggtattctccaaagacgtagacaaggactatgtgatactactttcagctagggcttcaagagtagagaaccaagatgcgattgatacttccattgttaacatgttgggtgacccaaaagaggcaagagctggaataactgaagtgcatttcttgccattcaatccagtagaaaagcgaaccgcgatcacttacatcgataccaatggagagtggcatagatgtagcaaaggtgctcctgagcagataattgaactctgtgatctcaaaggagaaacaaagagaagagcacatgagataattgacaagtttgctgagcgtggtctacgttcactcggggttgcacgtcagagagttcctgagaaggacaaagaaagcgccggaacaccgtgggagtttgttggtcttttgccactctttgaccctccaagacatgacagtgcagagaccattagaagagctcttgatcttggtgtgaatgttaaaatgatcactggagatcaattggctattggtaaagagacaggtcgtaggcttggaatgggaacaaacatgtatccttcctcttctttacttgaaaacaaagatgacaccaccggaggagttcctgtcgatgagctcattgagaaggccgatggattcgctggagtctttcctgagcacaagtatgagattgtaaggaaactccaagaaaggaaacatattgttggtatgaccggagatggtgtcaacgatgccccagcgctgaaaaaggcagatattggtatagcagtcgatgatgcaactgatgcagcaagaagtgcctcagatatagtcttgacagagccaggtcttagtgtcattgtcagcgctgtgctcaccagtcgagctatctttcaaagaatgaagaactacacaatctacgcagtctccatcacaatccgtatagtcctcggcttcatgcttgtggctcttatttgggaatttgacttttctcccttcatggtcctcattattgcaatcctaaacgacggaaccatcatgaccatttccaaagatagagtcaagccttccccaattcctgattcatggaagcttaaagagattttcgctactggagttgttcttggaacctacatggctctcgtcactgttgtcttcttctggctagcccatgacacaaccttcttctcggataaatttggagtaaggtcgttacaaggcaaagacgaggaattaatagcagtattgtatttgcaagtcagtataattagtcaggctctcatctttgtcactcgatcaaggagctggtcctttgtcgaacgcccgggacttcttcttcttattgctttctttgttgcccaattgattgcaaccttaatagctacttatgcgcattgggaatttgcgagaatcaaaggttgtggatggggatggtgtggagtcatctggatctacagtatcgtcacatacattcctcttgatatcctcaagtttatcactcgctatacccttagtggcaaagcttggaacaacatgattgaaaataggactgcattcacgaccaagaaagactacggtaggggagaaagggaggctcaatgggctctagctcaacgtacgctccatggacttaaaccgccggagtcaatgttcgaagacacggcaacctacaccgagctctctgagatcgctgaacaggctaagaaacgtgcagaagttgctaggctaagagaagtgcacactctcaaaggccacgttgagtcggtagtgaagctcaagggtcttgacattgataatcttaaccaacactacaccgtctaagccaaactactatgacatttcaattattcgaatgggacacatgacaacgttctaagcaataaaagttggagaaaatggaatcataaagataaaaagaagaaaaagaaagttccggtttggattctccttcggttttgatttcgtttttcttggtaaaaacatgatataatcagcggaatgctgcaaaaaaaaagcaaaaaagaataagaagaagatggtaggatgaatgaatgagatggaataaaggacaagaagagacatgtcgtcatgtgatacactcgtattcattacttactattagtaatcccatattttttggttataagctttttctc

SEQ ID NO: 88468 - protein, 949 aa, Arabidopsis thaliana
  peptide (1)..(949): Ceres Seq. ID no. 12709412
MAADISWDEIKKENVDLEKIPVDEVFQQLKCSREGLSSEEGRNRLQIFGANKLEEKVENKFLKFLGFMWNPLSWVMEAAAIMAIVLANGGGRPPDWQDFVGITCLLIINSTISFIEENNAGNAAAALMANLAPKTKVLRDGRWGEQEAAILVPGDLISIKLGDIVPADARLLEGDPLKIDQSALTGESLPATKHQGDEVFSGSTCKQGEIEAVVIATGVHTFFGKAAHLVDSTNNVGHFQKVLTAIGNFCICSIGIGMLIEIIIMYPIQHRKYRDGIDNLLVLLIGGIPIAMPTVLSVTMAIGSHRLSQQGAITKRMTAIEEMAGMDVLCSDKTGTLTLNKLTVDKNLIEVFSKDVDKDYVILLSARASRVENQDAIDTSIVNMLGDPKEARAGITEVHFLPFNPVEKRTAITYIDTNGEWHRCSKGAPEQIIELCDLKGETKRRAHEIIDKFAERGLRSLGVARQRVPEKDKESAGTPWEFVGLLPLFDPPRHDSAETIRRALDLGVNVKMITGDQLAIGKETGRRLGMGTNMYPSSSLLENKDDTTGGVPVDELIEKADGFAGVFPEHKYEIVRKLQERKHIVGMTGDGVNDAPALKKADIGIAVDDATDAARSASDIVLTEPGLSVIVSAVLTSRAIFQRMKNYTIYAVSITIRIVLGFMLVALIWEFDFSPFMVLIIAILNDGTIMTISKDRVKPSPIPDSWKLKEIFATGVVLGTYMALVTVVFFWLAHDTTFFSDKFGVRSLQGKDEELIAVLYLQVSIISQALIFVTRSRSWSFVERPGLLLLIAFFVAQLIATLIATYAHWEFARIKGCGWGWCGVIWIYSIVTYIPLDILKFITRYTLSGKAWNNMIENRTAFTTKKDYGRGEREAQWALAQRTLHGLKPPESMFEDTATYTELSEIAEQAKKRAEVARLREVHTLKGHVESVVKLKGLDIDNLNQHYTV

SEQ ID NO: 88469 - protein, 882 aa, Arabidopsis thaliana
  peptide (1)..(882): Ceres Seq. ID no. 12709413
MWNPLSWVMEAAAIMAIVLANGGGRPPDWQDFVGITCLLIINSTISFIEENNAGNAAAALMANLAPKTKVLRDGRWGEQEAAILVPGDLISIKLGDIVPADARLLEGDPLKIDQSALTGESLPATKHQGDEVFSGSTCKQGEIEAVVIATGVHTFFGKAAHLVDSTNNVGHFQKVLTAIGNFCICSIGIGMLIEIIIMYPIQHRKYRDGIDNLLVLLIGGIPIAMPTVLSVTMAIGSHRLSQQGAITKRMTAIEEMAGMDVLCSDKTGTLTLNKLTVDKNLIEVFSKDVDKDYVILLSARASRVENQDAIDTSIVNMLGDPKEARAGITEVHFLPFNPVEKRTAITYIDTNGEWHRCSKGAPEQIIELCDLKGETKRRAHEIIDKFAERGLRSLGVARQRVPEKDKESAGTPWEFVGLLPLFDPPRHDSAETIRRALDLGVNVKMITGDQLAIGKETGRRLGMGTNMYPSSSLLENKDDTTGGVPVDELIEKADGFAGVFPEHKYEIVRKLQERKHIVGMTGDGVNDAPALKKADIGIAVDDATDAARSASDIVLTEPGLSVIVSAVLTSRAIFQRMKNYTIYAVSITIRIVLGFMLVALIWEFDFSPFMVLIIAILNDGTIMTISKDRVKPSPIPDSWKLKEIFATGVVLGTYMALVTVVFFWLAHDTTFFSDKFGVRSLQGKDEELIAVLYLQVSIISQALIFVTRSRSWSFVERPGLLLLIAFFVAQLIATLIATYAHWEFARIKGCGWGWCGVIWIYSIVTYIPLDILKFITRYTLSGKAWNNMIENRTAFTTKKDYGRGEREAQWALAQRTLHGLKPPESMFEDTATYTELSEIAEQAKKRAEVARLREVHTLKGHVESVVKLKGLDIDNLNQHYTV

SEQ ID NO: 88470 - protein, 874 aa, Arabidopsis thaliana
  peptide (1)..(874): Ceres Seq. ID no. 12709414
MEAAAIMAIVLANGGGRPPDWQDFVGITCLLIINSTISFIEENNAGNAAAALMANLAPKTKVLRDGRWGEQEAAILVPGDLISIKLGDIVPADARLLEGDPLKIDQSALTGESLPATKHQGDEVFSGSTCKQGEIEAVVIATGVHTFFGKAAHLVDSTNNVGHFQKVLTAIGNFCICSIGIGMLIEIIIMYPIQHRKYRDGIDNLLVLLIGGIPIAMPTVLSVTMAIGSHRLSQQGAITKRMTAIEEMAGMDVLCSDKTGTLTLNKLTVDKNLIEVFSKDVDKDYVILLSARASRVENQDAIDTSIVNMLGDPKEARAGITEVHFLPFNPVEKRTAITYIDTNGEWHRCSKGAPEQIIELCDLKGETKRRAHEIIDKFAERGLRSLGVARQRVPEKDKESAGTPWEFVGLLPLFDPPRHDSAETIRRALDLGVNVKMITGDQLAIGKETGRRLGMGTNMYPSSSLLENKDDTTGGVPVDELIEKADGFAGVFPEHKYEIVRKLQERKHIVGMTGDGVNDAPALKKADIGIAVDDATDAARSASDIVLTEPGLSVIVSAVLTSRAIFQRMKNYTIYAVSITIRIVLGFMLVALIWEFDFSPFMVLIIAILNDGTIMTISKDRVKPSPIPDSWKLKEIFATGVVLGTYMALVTVVFFWLAHDTTFFSDKFGVRSLQGKDEELIAVLYLQVSIISQALIFVTRSRSWSFVERPGLLLLIAFFVAQLIATLIATYAHWEFARIKGCGWGWCGVIWIYSIVTYIPLDILKFITRYTLSGKAWNNMIENRTAFTTKKDYGRGEREAQWALAQRTLHGLKPPESMFEDTATYTELSEIAEQAKKRAEVARLREVHTLKGHVESVVKLKGLDIDNLNQHYTV

SEQ ID NO: 88471 - DNA, 1041 bp, Arabidopsis thaliana
  misc_feature (1)..(1041): Ceres Seq. ID no. 12709624
  misc_feature (1)..(1041): Ortholog of  Ceres SEQ ID NO 13655812 as cited in SEQ ID NO 64743
atggacaatgaagatcaggagtcccttttacttcaaggggttccagataattatggaggtgttaaggtgaacttgacagaaccaatgactattgaggattttgtcccaaagctgagagcttcacttgtgtattggagcaatcaggggacgaaggggatatggttaaagcttgccgatgggcttgacaatcttattgcacctgcaaaagcagaagggtttgtgtgccaccatgccgagagggaatacaccatgcttacatcttggatcgctgatgttcctagtactcttcctgccaatgcgtctcatcgtattggagttggtgcctttgtcctaaacaagaagaccaaagaggtgcttgtggtccaggagattgatggtcatttcaaaggtacaggagtgtggaaactgcctaccggtgttgttaaagagggtgagaatatttgggaaggagcacttagggaagtggaagaagaaactggtattaagacaaaatttgtagaagtcctggctttcagggaaagccaccaagcattcttggaaataaaaacggatatatttttcctctgtgagttagaaccaaccacttttgaaatcaagaaacaagactctgagatcttagctgctaagtggatgccaattgaagaatacgtaaaccaaccctggaaccagaagaaagaactgtttaggttcatggcgaacatctgcttgaagagattgcaggagatggaatacatgggtttctccaaagtccttactacgacttcatctgggaaagagagctatctttactgcaacaccgatcacgccaacctcctcaacgcaaccctccacctctggttgaaaaacccttcttcagaacgtgtttatgtttcgttgtttcatgtccattgttcaataaaagcaccagtctcgtgtgtacaacgattggagacttctttatgtaatttaccatcatttcctcactacaacttcatatataatatatttctttggctaccaaaaagaggtatcctttttattctagtttcaataagagtgtga

SEQ ID NO: 88472 - protein, 346 aa, Arabidopsis thaliana
  peptide (1)..(346): Ceres Seq. ID no. 12709625
MDNEDQESLLLQGVPDNYGGVKVNLTEPMTIEDFVPKLRASLVYWSNQGTKGIWLKLADGLDNLIAPAKAEGFVCHHAEREYTMLTSWIADVPSTLPANASHRIGVGAFVLNKKTKEVLVVQEIDGHFKGTGVWKLPTGVVKEGENIWEGALREVEEETGIKTKFVEVLAFRESHQAFLEIKTDIFFLCELEPTTFEIKKQDSEILAAKWMPIEEYVNQPWNQKKELFRFMANICLKRLQEMEYMGFSKVLTTTSSGKESYLYCNTDHANLLNATLHLWLKNPSSERVYVSLFHVHCSIKAPVSCVQRLETSLCNLPSFPHYNFIYNIFLWLPKRGILFILVSIRV

SEQ ID NO: 88473 - protein, 318 aa, Arabidopsis thaliana
  peptide (1)..(318): Ceres Seq. ID no. 12709626
MTIEDFVPKLRASLVYWSNQGTKGIWLKLADGLDNLIAPAKAEGFVCHHAEREYTMLTSWIADVPSTLPANASHRIGVGAFVLNKKTKEVLVVQEIDGHFKGTGVWKLPTGVVKEGENIWEGALREVEEETGIKTKFVEVLAFRESHQAFLEIKTDIFFLCELEPTTFEIKKQDSEILAAKWMPIEEYVNQPWNQKKELFRFMANICLKRLQEMEYMGFSKVLTTTSSGKESYLYCNTDHANLLNATLHLWLKNPSSERVYVSLFHVHCSIKAPVSCVQRLETSLCNLPSFPHYNFIYNIFLWLPKRGILFILVSIRV

SEQ ID NO: 88474 - protein, 263 aa, Arabidopsis thaliana
  peptide (1)..(263): Ceres Seq. ID no. 12709627
MLTSWIADVPSTLPANASHRIGVGAFVLNKKTKEVLVVQEIDGHFKGTGVWKLPTGVVKEGENIWEGALREVEEETGIKTKFVEVLAFRESHQAFLEIKTDIFFLCELEPTTFEIKKQDSEILAAKWMPIEEYVNQPWNQKKELFRFMANICLKRLQEMEYMGFSKVLTTTSSGKESYLYCNTDHANLLNATLHLWLKNPSSERVYVSLFHVHCSIKAPVSCVQRLETSLCNLPSFPHYNFIYNIFLWLPKRGILFILVSIRV

SEQ ID NO: 88475 - DNA, 1221 bp, Arabidopsis thaliana
  misc_feature (1)..(1221): Ceres Seq. ID no. 12709659
  misc_feature (1)..(1221): Ortholog of  Ceres SEQ ID NO 15170447 as cited in SEQ ID NO 52849
  misc_feature (1)..(1221): Ortholog of  Ceres SEQ ID NO 13589042 as cited in SEQ ID NO 60626
  misc_feature (1)..(1221): Ortholog of  Ceres SEQ ID NO 14302887 as cited in SEQ ID NO 66146
atgtcggaggagaaagtcgtcgctgtgatcatggttggtggtccgaccaaaggaactcgatttcgcccgttatcgttcaatacaccgaaaccattgattcctttggctggtcaacctatgattcatcatcctatctctgcttgtaaaaagatatcaaatctggctcagatttttctgattggattttacgaggaacgagaatttgctttgtatgtgtcttcaatatctaacgagctgaaaattccagtgcgatacttgaaagaagataaaccccatggttcagctggtgctctttattactttcgtgatagaattatggaagagaaaccgtcacatgttttcctcctcaactgtgatgtttgctgttctttccctcttcaaggcatacttgacgcacatcgaagatatggtggtattggaactatgctagtaatcaaggtttctgcagaagcagctagccaatttggtgaattgatagctgatcctgatactaaagaactcctgcattatacagagaagcccgagactttcgtcagtgacttgataaactgtggtgtctatgtgtttacttcagatatcttcaatgcaattgaagaagtatatagccaaataagagacacatctagcaactaccaatccgctacaaggtctgttcctgcagattttgtgagattagatcaagatatattgtcacctcttgctggaaagaagcaactatacacatatgagaacaaggatttctgggaacagatcaagactccggggaaatctttgaaatgctcggctttatatctttcccaattccgcgaaacatcgcctcatattttagcttcaggagatggtactaataggaaaccaactataattggtgatgtttatattcacccatccgtaaaactgcatccaaccgcaaagatcggtccaaatgtgtcgatatcagcaaatgttcgtgttggacctggtgtaaggcttattagctgcataatcttagacgatgttgaaatcaaggagaatgctgttgttataaactcaattatcggatggaaatcttctataggtagatggtcaagagttcaagctagtggagattacaatgacaggcttgggattaccattcttggtgaggctgtaactgtggaagatgaagtagcagtcataggaagcattgttctccagaataagactcttaatgttagtgttcaagatgatatcatcttgtga

SEQ ID NO: 88476 - protein, 406 aa, Arabidopsis thaliana; identical to SEQ ID NO: 76958
  peptide (1)..(406): Ceres Seq. ID no. 12709660

SEQ ID NO: 88477 - protein, 396 aa, Arabidopsis thaliana; identical to SEQ ID NO: 76959
  peptide (1)..(396): Ceres Seq. ID no. 12709661

SEQ ID NO: 88478 - protein, 367 aa, Arabidopsis thaliana; identical to SEQ ID NO: 76960
  peptide (1)..(367): Ceres Seq. ID no. 12709662

SEQ ID NO: 88479 - DNA, 1284 bp, Arabidopsis thaliana
  misc_feature (1)..(1284): Ceres Seq. ID no. 12709704
  misc_feature (1)..(1284): Ortholog of  Ceres SEQ ID NO 14314220 as cited in SEQ ID NO 57321
atgagccaaaagaaactgacgaggactcaatcgtcgttactcagatcatctccgacgattcgatcgtcgatccaaagcctttcttcaatcactgaatgtgatgacttcaacgaaacctctcaccaccgccgtgaacaagatctcgaagccggtgagaaagaggaaaaacagaggaggagaaaaccggttaaatcattcgggtcaatgaaccgaattaaaccgggtctcgcattcacactcgcttgtctctctttcctgagtctctcatctttcttactgttcttcgttgatgagattttcacgtcggagaatctcttactaggtttgattttcgtcgctcttgctctgttcttcgcgtcgagaaacatggcggttattaaccaaaccgtaatcgcaatcaagcagattcgtgtaaggtctcgaatcaaacacaaaccgaaaccggttcaatggtacatcggagattcaaaaccggaaccgatcaaagaagaagaaacaagacttgtcgttaaagaaggagttcaattctttagcaatggagatttctacgaaggtgaattcaacagagggaagtgtaacggaagtggagtttattattattacgttaatggaagatatgaaggagattggatcaatggaaggtacgatggttatggaatcgagtgttggtctaaaggaagtaaatataaaggacagtataagcaaggacttagacatggttttggagtttactggttttacaccggagattcttactctggtgaatggtttaacggtcaaagccatggctttggagttcaaacttgtgctgatggaagctcttttgtcggagaattcaaatttggtgtcaaacatggacttggttcttaccatttcaggaatggagataagtatgcaggagagtattttggagacaagattcatggatttggtgtttaccatttcgctaatggtcactattacgaaggagcttggcatgaaggtcgtaaacaaggctatggcacgtatagatttagaaccggtgatatcaaatccggtgaatgggatgatggtaatctcgttaaccatcttcctttagactctgacccggttcgtagggcggttcagagtgcacgagaaagagcaaagaatggagtgaatcagagacggatcgatgagcaggtgatacgagctgtggctgcagctaataaagctgcgacggctgctagagttgcagctgtgaaagcagttcaaaatcaaatggatgttaaatgcataatccaaatatttaaaggtgatagctaa

SEQ ID NO: 88480 - protein, 427 aa, Arabidopsis thaliana
  peptide (1)..(427): Ceres Seq. ID no. 12709705
MSQKKLTRTQSSLLRSSPTIRSSIQSLSSITECDDFNETSHHRREQDLEAGEKEEKQRRRKPVKSFGSMNRIKPGLAFTLACLSFLSLSSFLLFFVDEIFTSENLLLGLIFVALALFFASRNMAVINQTVIAIKQIRVRSRIKHKPKPVQWYIGDSKPEPIKEEETRLVVKEGVQFFSNGDFYEGEFNRGKCNGSGVYYYYVNGRYEGDWINGRYDGYGIECWSKGSKYKGQYKQGLRHGFGVYWFYTGDSYSGEWFNGQSHGFGVQTCADGSSFVGEFKFGVKHGLGSYHFRNGDKYAGEYFGDKIHGFGVYHFANGHYYEGAWHEGRKQGYGTYRFRTGDIKSGEWDDGNLVNHLPLDSDPVRRAVQSARERAKNGVNQRRIDEQVIRAVAAANKAATAARVAAVKAVQNQMDVKCIIQIFKGDS

SEQ ID NO: 88481 - protein, 359 aa, Arabidopsis thaliana
  peptide (1)..(359): Ceres Seq. ID no. 12709706
MNRIKPGLAFTLACLSFLSLSSFLLFFVDEIFTSENLLLGLIFVALALFFASRNMAVINQTVIAIKQIRVRSRIKHKPKPVQWYIGDSKPEPIKEEETRLVVKEGVQFFSNGDFYEGEFNRGKCNGSGVYYYYVNGRYEGDWINGRYDGYGIECWSKGSKYKGQYKQGLRHGFGVYWFYTGDSYSGEWFNGQSHGFGVQTCADGSSFVGEFKFGVKHGLGSYHFRNGDKYAGEYFGDKIHGFGVYHFANGHYYEGAWHEGRKQGYGTYRFRTGDIKSGEWDDGNLVNHLPLDSDPVRRAVQSARERAKNGVNQRRIDEQVIRAVAAANKAATAARVAAVKAVQNQMDVKCIIQIFKGDS

SEQ ID NO: 88482 - protein, 305 aa, Arabidopsis thaliana
  peptide (1)..(305): Ceres Seq. ID no. 12709707
MAVINQTVIAIKQIRVRSRIKHKPKPVQWYIGDSKPEPIKEEETRLVVKEGVQFFSNGDFYEGEFNRGKCNGSGVYYYYVNGRYEGDWINGRYDGYGIECWSKGSKYKGQYKQGLRHGFGVYWFYTGDSYSGEWFNGQSHGFGVQTCADGSSFVGEFKFGVKHGLGSYHFRNGDKYAGEYFGDKIHGFGVYHFANGHYYEGAWHEGRKQGYGTYRFRTGDIKSGEWDDGNLVNHLPLDSDPVRRAVQSARERAKNGVNQRRIDEQVIRAVAAANKAATAARVAAVKAVQNQMDVKCIIQIFKGDS

SEQ ID NO: 88483 - DNA, 969 bp, Arabidopsis thaliana
  misc_feature (1)..(969): Ceres Seq. ID no. 12709712
  misc_feature (1)..(969): Ortholog of  Ceres SEQ ID NO 13595658 as cited in SEQ ID NO 59888
  misc_feature (1)..(969): Ortholog of  Ceres SEQ ID NO 13661330 as cited in SEQ ID NO 61614
  misc_feature (1)..(969): Ortholog of  Ceres SEQ ID NO 13596025 as cited in SEQ ID NO 62024
  misc_feature (1)..(969): Ortholog of  Ceres SEQ ID NO 13662324 as cited in SEQ ID NO 62162
  misc_feature (1)..(969): Ortholog of  Ceres SEQ ID NO 12625713 as cited in SEQ ID NO 64160
  misc_feature (1)..(969): Ortholog of  Ceres SEQ ID NO 14301782 as cited in SEQ ID NO 66788
atggaccgaacaattgagattgagttcgacataaatgggccatatgattcattaattaggcctaatatatcagtagatgccaattcgtttcggtttgtcaccaaggatcttgttactctttctcaccatattatcagggtttggataacgattagaactcctgtgaattactccacaggaacaaaatggtcagaatcagctcgagtattcacgatcataaactcatgtgaccaaacgatctggccggcgataactccaggagaaaacttcaacggaggaggattcgagctcaaaccgggccaatccatcgtattccacgcaccagtaggctggtcaggcagaatttggggacgaaccggttgtaaattcgactcaaccggaaccggaacatgcgaaaccggttcatgcggatcaactctaaaatgttcagcctccggaaaaccaccagcttcactagctgaattcacattagccgcattggatttctacgacgtgagcctcgtcgacggattcaatctcccgatgtcggtgactccgatgaacggaaaaggaaactgcagcgtcgccggttgcgtagctgatttgaggccacattgtccgcaggagctcgcagtgaaatcaaacgggaaagtcatatcgtgtaggagtgcttgtgatgtgtttgatagagatgagtattgttgtagaggagtttatgggaacccagttgtgtgtcaaccaacttattactcaaagatctttaaacaagcttgtcctactgcttatagttatgcttatgatgatccgaccagtattatgacttgcactgcctctgattacgtcatttctttctgttcctccaggaagaagccggtgtgcacgtaccatgacaacaagttagtatgcagcgatggttctggtgggtttaagaagatgattgggagattattgtggcttgtgttgatgttgtctcttgttgtgtttagctaa

SEQ ID NO: 88484 - protein, 322 aa, Arabidopsis thaliana
  peptide (1)..(322): Ceres Seq. ID no. 12709713
MDRTIEIEFDINGPYDSLIRPNISVDANSFRFVTKDLVTLSHHIIRVWITIRTPVNYSTGTKWSESARVFTIINSCDQTIWPAITPGENFNGGGFELKPGQSIVFHAPVGWSGRIWGRTGCKFDSTGTGTCETGSCGSTLKCSASGKPPASLAEFTLAALDFYDVSLVDGFNLPMSVTPMNGKGNCSVAGCVADLRPHCPQELAVKSNGKVISCRSACDVFDRDEYCCRGVYGNPVVCQPTYYSKIFKQACPTAYSYAYDDPTSIMTCTASDYVISFCSSRKKPVCTYHDNKLVCSDGSGGFKKMIGRLLWLVLMLSLVVFS

SEQ ID NO: 88485 - DNA, 2166 bp, Arabidopsis thaliana
  misc_feature (1)..(2166): Ceres Seq. ID no. 12709759
  misc_feature (1)..(2166): Ortholog of  Ceres SEQ ID NO 13586013 as cited in SEQ ID NO 1182
atgtcgtcaagagctcaccctgtggacggaagtccggcgacggacggtggacatgttccgatgaaaccttcacccactcggcataaagttggaatcccaccaaagcaaaacatgttcaaggatttcatgtacacattcaaagaaactttctttcatgatgatcctcttagggattttaaggatcagcctaagtctaagcagtttatgctcggtctccaatccgtcttcccggtcttcgattggggacgtaactacactttcaagaagttccgaggtgatctcatctccggtttaaccattgcaagtctctgcattcctcaggtgaaaaacctaaactcaagtacttgtatcacaagttatctgtacttgcttgtttcttatgatattggatacgctaagttggcgaatcttgatcccaaatacggtttatattcgagttttgttcctccattggtgtatgcttgtatgggaagttctagggatatagcaataggacctgtcgctgtggtttcgctgttgctaggcacattgcttcgagctgagattgatccaaacacaagtccagatgaatatctccgccttgccttcactgctacgtttttcgccggtataaccgaagcagcccttggattcttcagattaggattcttgatcgatttcctttcccacgcggctgtggttggcttcatgggcggcgcagccatcactatcgctcttcagcagcttaaaggcttcctcgggatcaagaaattcaccaagaaaactgatattatttctgttcttgaatccgttttcaaagcagctcatcacggctggaattggcagactatactcattggtgcatcattcttgaccttccttctcacgtctaagatcattgtaagacatatatctattaacaaaacatctaagtttattctttgtttagatctgtttctgacctctcttgacttgatgctgaaacaggggaagaagagcaagaaactattctgggtaccagctattgcgccattgatatcagttatcgtttccaccttctttgtctacataacccgagccgacaaacaaggagtccaaatcgtaagatctcaactccctctaactagtttcttgcgtttcaaacaatttgtcgttgtggtgaaacaccttgaccaaggaatcaacccttcctcgttccatctaatctacttcactggtgataaccttgctaagggcatccgcatcggtgtagtcgctggcatggtcgctttaacagaagctgtagcgattggaagaacctttgctgcaatgaaagactaccaaatcgacggtaacaaagagatggtagcattaggtatgatgaacgtagttggatcgatgtcttcttgctacgtagctaccggatctttctcaagatcagctgtcaatttcatggctggatgtcaaacagcggtttcaaacatcataatgtcaattgttgttctcttgacattgctcttccttactcctctcttcaagtacactccaaacgccatcctcgcagctatcatcatcaacgctgtgattcctttgatcgatatccaagctgctattttgatcttcaaggttgataagctcgatttcatcgcctgtattggagcattctttggcgtcatctttgtttctgttgagatcggacttcttattgccgtctcgatctcgtttgctaagatcctcttgcaagtaacaagacctagaactgcagttctcggaaatattccaagaacttcggtttacagaaatattcaacagtatcctgaagccactatggttccaggggttcttactattcgtgttgactccgccatttacttctccaactcaaattatgttagagaaaggatccagagatggctacatgaggaagaagaaaaggtaaaagcagcaagcctacctaggattcagtttctcatcatcgaaatgtcacctgttacggacatcgatacaagtggtattcacgcattagaagacttatacaagtctctccagaaaagagacattcagttgattctggcgaatcctggaccgttggtgataggcaagctacacttgtcgcactttgccgacatgttaggacaagacaatatctatctaacggtggctgatgccgtcgaggcttgctgtccaaaactctccaacgaggtctga

SEQ ID NO: 88486 - protein, 721 aa, Arabidopsis thaliana
  peptide (1)..(721): Ceres Seq. ID no. 12709760
MSSRAHPVDGSPATDGGHVPMKPSPTRHKVGIPPKQNMFKDFMYTFKETFFHDDPLRDFKDQPKSKQFMLGLQSVFPVFDWGRNYTFKKFRGDLISGLTIASLCIPQVKNLNSSTCITSYLYLLVSYDIGYAKLANLDPKYGLYSSFVPPLVYACMGSSRDIAIGPVAVVSLLLGTLLRAEIDPNTSPDEYLRLAFTATFFAGITEAALGFFRLGFLIDFLSHAAVVGFMGGAAITIALQQLKGFLGIKKFTKKTDIISVLESVFKAAHHGWNWQTILIGASFLTFLLTSKIIVRHISINKTSKFILCLDLFLTSLDLMLKQGKKSKKLFWVPAIAPLISVIVSTFFVYITRADKQGVQIVRSQLPLTSFLRFKQFVVVVKHLDQGINPSSFHLIYFTGDNLAKGIRIGVVAGMVALTEAVAIGRTFAAMKDYQIDGNKEMVALGMMNVVGSMSSCYVATGSFSRSAVNFMAGCQTAVSNIIMSIVVLLTLLFLTPLFKYTPNAILAAIIINAVIPLIDIQAAILIFKVDKLDFIACIGAFFGVIFVSVEIGLLIAVSISFAKILLQVTRPRTAVLGNIPRTSVYRNIQQYPEATMVPGVLTIRVDSAIYFSNSNYVRERIQRWLHEEEEKVKAASLPRIQFLIIEMSPVTDIDTSGIHALEDLYKSLQKRDIQLILANPGPLVIGKLHLSHFADMLGQDNIYLTVADAVEACCPKLSNEV

SEQ ID NO: 88487 - protein, 701 aa, Arabidopsis thaliana
  peptide (1)..(701): Ceres Seq. ID no. 12709761
MKPSPTRHKVGIPPKQNMFKDFMYTFKETFFHDDPLRDFKDQPKSKQFMLGLQSVFPVFDWGRNYTFKKFRGDLISGLTIASLCIPQVKNLNSSTCITSYLYLLVSYDIGYAKLANLDPKYGLYSSFVPPLVYACMGSSRDIAIGPVAVVSLLLGTLLRAEIDPNTSPDEYLRLAFTATFFAGITEAALGFFRLGFLIDFLSHAAVVGFMGGAAITIALQQLKGFLGIKKFTKKTDIISVLESVFKAAHHGWNWQTILIGASFLTFLLTSKIIVRHISINKTSKFILCLDLFLTSLDLMLKQGKKSKKLFWVPAIAPLISVIVSTFFVYITRADKQGVQIVRSQLPLTSFLRFKQFVVVVKHLDQGINPSSFHLIYFTGDNLAKGIRIGVVAGMVALTEAVAIGRTFAAMKDYQIDGNKEMVALGMMNVVGSMSSCYVATGSFSRSAVNFMAGCQTAVSNIIMSIVVLLTLLFLTPLFKYTPNAILAAIIINAVIPLIDIQAAILIFKVDKLDFIACIGAFFGVIFVSVEIGLLIAVSISFAKILLQVTRPRTAVLGNIPRTSVYRNIQQYPEATMVPGVLTIRVDSAIYFSNSNYVRERIQRWLHEEEEKVKAASLPRIQFLIIEMSPVTDIDTSGIHALEDLYKSLQKRDIQLILANPGPLVIGKLHLSHFADMLGQDNIYLTVADAVEACCPKLSNEV

SEQ ID NO: 88488 - protein, 684 aa, Arabidopsis thaliana
  peptide (1)..(684): Ceres Seq. ID no. 12709762
MFKDFMYTFKETFFHDDPLRDFKDQPKSKQFMLGLQSVFPVFDWGRNYTFKKFRGDLISGLTIASLCIPQVKNLNSSTCITSYLYLLVSYDIGYAKLANLDPKYGLYSSFVPPLVYACMGSSRDIAIGPVAVVSLLLGTLLRAEIDPNTSPDEYLRLAFTATFFAGITEAALGFFRLGFLIDFLSHAAVVGFMGGAAITIALQQLKGFLGIKKFTKKTDIISVLESVFKAAHHGWNWQTILIGASFLTFLLTSKIIVRHISINKTSKFILCLDLFLTSLDLMLKQGKKSKKLFWVPAIAPLISVIVSTFFVYITRADKQGVQIVRSQLPLTSFLRFKQFVVVVKHLDQGINPSSFHLIYFTGDNLAKGIRIGVVAGMVALTEAVAIGRTFAAMKDYQIDGNKEMVALGMMNVVGSMSSCYVATGSFSRSAVNFMAGCQTAVSNIIMSIVVLLTLLFLTPLFKYTPNAILAAIIINAVIPLIDIQAAILIFKVDKLDFIACIGAFFGVIFVSVEIGLLIAVSISFAKILLQVTRPRTAVLGNIPRTSVYRNIQQYPEATMVPGVLTIRVDSAIYFSNSNYVRERIQRWLHEEEEKVKAASLPRIQFLIIEMSPVTDIDTSGIHALEDLYKSLQKRDIQLILANPGPLVIGKLHLSHFADMLGQDNIYLTVADAVEACCPKLSNEV

SEQ ID NO: 88489 - DNA, 3201 bp, Arabidopsis thaliana
  misc_feature (1)..(3201): Ceres Seq. ID no. 12709802
  misc_feature (1)..(3201): Ortholog of  Ceres SEQ ID NO 12613725 as cited in SEQ ID NO 68196
atggctatcacctactcctccgccgacgagctcggaaacaccactgagggttttctggaaatccgagaaaatacctccggtggatggaaatcagcgaggctcatcatcgttgtacaaatggcggagcgattcgcttactttggtatagcgtcaaacctaataatgtacttgacgggaccgttaggtgagtcaacagctgcagcggcagcgaatgtcaatgcttggactggaacggtggcgtttctgccgcttctcgggggctttctcgctgactcgtatctcggtcgtttccgtactataatcatctcatcttctctctatatcttgggacttgggttgctgtctttttcaaccatgattccttctcatcagtccaaagattcgaatcagctgcaagagactatcttcttcttctctctttatcttgtagcaataggacaaggcggttacaacccgtgtattaaggtatttggagcggatcaattcgatggaaatgatcataaagaggcaagagacaagagttcattcttcaactggttgatgtttggaaactgtattagcatattgacgactcgtttggtctctacctacattcaagagaacctaagctggtcactagggtttggtattcctagtgtttccatgttgctttctctgtttctcttcctccttggaactacctcttaccgttttagtactgagagagtaggaaagaaaaacccttttgccagaatcagtcgtgtattcatggaggctttaaagaacagaagacaacccgatttagatattgctaacgcgaacgccaacgagactctccttctcctggctcaccagagttccaaacagttcagattcctagacagggcagctatttcttgtgaattggctgaaattgaagaagcaaaggcggttcttaggcttattcccatatggataacttctgtagtctacaccattgtacatgcacaatcccctactttttttacaaagcaaggagccacaatggacaggtcaatctcaccaggactcttagttcctgcagctacacttcaaagtttcataaacctctcagtagtcgttttcatcccaatctacgaccgcttactcgtcccattcgcaaggtccttcactcaaaactcatcaggtatcacaacgctacaaaggattggtacagggattttcctctccattcttgctatggtattagccgcattggtcgagacaaaaaggctccaagccgcccgggatgaactctccataccgatgagcgtgtggtggctgattccacagtatgttatctttggagtctcagatatgttcacaatggtgggtttacaagagttcttctacggccaagtccctagtgagcttaggagcgttggtatggctttgaacctaagcatatacggggcgggaaactacctaagcagctttatgatatcagtcattgataaaatcacgaaccagtatggtcaaaggagctggttcgataatgacttggaccaagctcatctagattacttctactggctactggcttgtctcggcttcattggtttcgccttctacttatggttcgccaagtcatatcagatcaaacaccttttaaattgtctctcctctgttctgccaattaaattgggctgggatttcacaaccaaggaaataagaatttcctcaggcgaaagaaatttcgtgagtatatcaaaagcttataagatttctcaaaatattgaactggaatctctttatgggatttccttgaacttgataacatatctgaccggaccattaggggagtcaacagctgcagctgcagccaatgtcaacgcatggagtggggtgtcgtttcttccccttctcgggggctttatcgctgactcgtttcttggacgttttcgtacaatcgtgatcgcgtattctctttatatcatgggacttgggttgctgtctttttcagccatgacttcttctaactctaaagatccaaatcaactccaagtgattctcttcttctgctctctgtatcttatagcaataggacaaggcggttacaaaccatgtattaaggtatttggagcagatcaatttgatggaaatgatataaaagatgcaaaagacaagagttcttactttaattggttgatgtttggaagttgtgttagcatattgacctttcgtttggtctctagctacatacaagaggacctaagttggtccttaggatttggtattccaagtgttttcatgctacttgctctgtttctcttccttctcggcactaagacttaccgttttagcactgcaagagaagggaagaaaaatccttttgctagaatcagtcatgttttcatggcggctttaaagaatagaacacaaccagattcatatatagctaaccccaacgagacccttctcactcatcagagttccaagcagttcagattcctcaacaaggcagcgatttcttgtagttttgctgaaattgaagaagcaaaagcggtgcttaatttggtgtttggcattgtgtttgcgcaatctcctactttctttacaaagcaaggatctacaatggatagatcaatctcatcaacactccaagtccctgcagctacactccaatgcttcataagcctagcaatcctcgtcttcatcccaatctacgaccgtttattcgtcccaatcgcacgatcaatcactcgtaaaccagcaggaattacaacccttcagagaatttccaccggcattttcctctcaattatttcaatggtaatagctgctttggtcgagatgaaaagactcaagactgctcgagatcatggattagttgattcgcctaaagccacggtcccgatgagcgtttgctggctgattccacaatacattctctttggagtctctgacgttttcactatggttggtttgcaagagtttttctacggagaagtcccgccacagcttaggagcatgggactggctctatatctaagcataatcggcataggaaacttcttgagtagcttcatggtatcagtcatcgaggaagccacaagccagtccggtcaagtgagctggttctctaataacctgaaccaggcacatcttgattacttctactggctacttgcttgtctcagctccctcgcctttatttttactgtctattttgccaagtcctatctctacaacagcccaaagtag

SEQ ID NO: 88490 - protein, 1066 aa, Arabidopsis thaliana
  peptide (1)..(1066): Ceres Seq. ID no. 12709803
MAITYSSADELGNTTEGFLEIRENTSGGWKSARLIIVVQMAERFAYFGIASNLIMYLTGPLGESTAAAAANVNAWTGTVAFLPLLGGFLADSYLGRFRTIIISSSLYILGLGLLSFSTMIPSHQSKDSNQLQETIFFFSLYLVAIGQGGYNPCIKVFGADQFDGNDHKEARDKSSFFNWLMFGNCISILTTRLVSTYIQENLSWSLGFGIPSVSMLLSLFLFLLGTTSYRFSTERVGKKNPFARISRVFMEALKNRRQPDLDIANANANETLLLLAHQSSKQFRFLDRAAISCELAEIEEAKAVLRLIPIWITSVVYTIVHAQSPTFFTKQGATMDRSISPGLLVPAATLQSFINLSVVVFIPIYDRLLVPFARSFTQNSSGITTLQRIGTGIFLSILAMVLAALVETKRLQAARDELSIPMSVWWLIPQYVIFGVSDMFTMVGLQEFFYGQVPSELRSVGMALNLSIYGAGNYLSSFMISVIDKITNQYGQRSWFDNDLDQAHLDYFYWLLACLGFIGFAFYLWFAKSYQIKHLLNCLSSVLPIKLGWDFTTKEIRISSGERNFVSISKAYKISQNIELESLYGISLNLITYLTGPLGESTAAAAANVNAWSGVSFLPLLGGFIADSFLGRFRTIVIAYSLYIMGLGLLSFSAMTSSNSKDPNQLQVILFFCSLYLIAIGQGGYKPCIKVFGADQFDGNDIKDAKDKSSYFNWLMFGSCVSILTFRLVSSYIQEDLSWSLGFGIPSVFMLLALFLFLLGTKTYRFSTAREGKKNPFARISHVFMAALKNRTQPDSYIANPNETLLTHQSSKQFRFLNKAAISCSFAEIEEAKAVLNLVFGIVFAQSPTFFTKQGSTMDRSISSTLQVPAATLQCFISLAILVFIPIYDRLFVPIARSITRKPAGITTLQRISTGIFLSIISMVIAALVEMKRLKTARDHGLVDSPKATVPMSVCWLIPQYILFGVSDVFTMVGLQEFFYGEVPPQLRSMGLALYLSIIGIGNFLSSFMVSVIEEATSQSGQVSWFSNNLNQAHLDYFYWLLACLSSLAFIFTVYFAKSYLYNSPK

SEQ ID NO: 88491 - protein, 1027 aa, Arabidopsis thaliana
  peptide (1)..(1027): Ceres Seq. ID no. 12709804
MAERFAYFGIASNLIMYLTGPLGESTAAAAANVNAWTGTVAFLPLLGGFLADSYLGRFRTIIISSSLYILGLGLLSFSTMIPSHQSKDSNQLQETIFFFSLYLVAIGQGGYNPCIKVFGADQFDGNDHKEARDKSSFFNWLMFGNCISILTTRLVSTYIQENLSWSLGFGIPSVSMLLSLFLFLLGTTSYRFSTERVGKKNPFARISRVFMEALKNRRQPDLDIANANANETLLLLAHQSSKQFRFLDRAAISCELAEIEEAKAVLRLIPIWITSVVYTIVHAQSPTFFTKQGATMDRSISPGLLVPAATLQSFINLSVVVFIPIYDRLLVPFARSFTQNSSGITTLQRIGTGIFLSILAMVLAALVETKRLQAARDELSIPMSVWWLIPQYVIFGVSDMFTMVGLQEFFYGQVPSELRSVGMALNLSIYGAGNYLSSFMISVIDKITNQYGQRSWFDNDLDQAHLDYFYWLLACLGFIGFAFYLWFAKSYQIKHLLNCLSSVLPIKLGWDFTTKEIRISSGERNFVSISKAYKISQNIELESLYGISLNLITYLTGPLGESTAAAAANVNAWSGVSFLPLLGGFIADSFLGRFRTIVIAYSLYIMGLGLLSFSAMTSSNSKDPNQLQVILFFCSLYLIAIGQGGYKPCIKVFGADQFDGNDIKDAKDKSSYFNWLMFGSCVSILTFRLVSSYIQEDLSWSLGFGIPSVFMLLALFLFLLGTKTYRFSTAREGKKNPFARISHVFMAALKNRTQPDSYIANPNETLLTHQSSKQFRFLNKAAISCSFAEIEEAKAVLNLVFGIVFAQSPTFFTKQGSTMDRSISSTLQVPAATLQCFISLAILVFIPIYDRLFVPIARSITRKPAGITTLQRISTGIFLSIISMVIAALVEMKRLKTARDHGLVDSPKATVPMSVCWLIPQYILFGVSDVFTMVGLQEFFYGEVPPQLRSMGLALYLSIIGIGNFLSSFMVSVIEEATSQSGQVSWFSNNLNQAHLDYFYWLLACLSSLAFIFTVYFAKSYLYNSPK

SEQ ID NO: 88492 - protein, 1012 aa, Arabidopsis thaliana
  peptide (1)..(1012): Ceres Seq. ID no. 12709805
MYLTGPLGESTAAAAANVNAWTGTVAFLPLLGGFLADSYLGRFRTIIISSSLYILGLGLLSFSTMIPSHQSKDSNQLQETIFFFSLYLVAIGQGGYNPCIKVFGADQFDGNDHKEARDKSSFFNWLMFGNCISILTTRLVSTYIQENLSWSLGFGIPSVSMLLSLFLFLLGTTSYRFSTERVGKKNPFARISRVFMEALKNRRQPDLDIANANANETLLLLAHQSSKQFRFLDRAAISCELAEIEEAKAVLRLIPIWITSVVYTIVHAQSPTFFTKQGATMDRSISPGLLVPAATLQSFINLSVVVFIPIYDRLLVPFARSFTQNSSGITTLQRIGTGIFLSILAMVLAALVETKRLQAARDELSIPMSVWWLIPQYVIFGVSDMFTMVGLQEFFYGQVPSELRSVGMALNLSIYGAGNYLSSFMISVIDKITNQYGQRSWFDNDLDQAHLDYFYWLLACLGFIGFAFYLWFAKSYQIKHLLNCLSSVLPIKLGWDFTTKEIRISSGERNFVSISKAYKISQNIELESLYGISLNLITYLTGPLGESTAAAAANVNAWSGVSFLPLLGGFIADSFLGRFRTIVIAYSLYIMGLGLLSFSAMTSSNSKDPNQLQVILFFCSLYLIAIGQGGYKPCIKVFGADQFDGNDIKDAKDKSSYFNWLMFGSCVSILTFRLVSSYIQEDLSWSLGFGIPSVFMLLALFLFLLGTKTYRFSTAREGKKNPFARISHVFMAALKNRTQPDSYIANPNETLLTHQSSKQFRFLNKAAISCSFAEIEEAKAVLNLVFGIVFAQSPTFFTKQGSTMDRSISSTLQVPAATLQCFISLAILVFIPIYDRLFVPIARSITRKPAGITTLQRISTGIFLSIISMVIAALVEMKRLKTARDHGLVDSPKATVPMSVCWLIPQYILFGVSDVFTMVGLQEFFYGEVPPQLRSMGLALYLSIIGIGNFLSSFMVSVIEEATSQSGQVSWFSNNLNQAHLDYFYWLLACLSSLAFIFTVYFAKSYLYNSPK

SEQ ID NO: 88493 - DNA, 3591 bp, Arabidopsis thaliana
  misc_feature (1)..(3591): Ceres Seq. ID no. 12709809
  misc_feature (1)..(3591): Ortholog of  Ceres SEQ ID NO 13600310 as cited in SEQ ID NO 5086
atggaggattgttgtgatccacttctcgcaactgatgcttctccgcgacctgaaagcttctctcgctcagctgaaaaggatatagcatcgcgctcaaggactgtggcaatggcagatctggattcaaattgcgaattgagtaacgatgttgatatggaacaatcaagcccagatttgatgaaattggaacaatctagtgatcccgtagcgttagatggaaaagttgtattagggttttcattagcatctccagatctagtaaattgtggcgcttcacctgatttacctagaggtagctatgaagattcaccagaattttctaagaaaagaagattttctactgagctttctctagagaatggaattgatggttctactactactacaagacttggccgtaaaagccaagttgtgaaattctcagcaatctgtcagacatttggctatgagttgtctcctgagtcttcttttgagttaccttctccacctggagactttcgggagagtatgactcctgttataagtatcaactctggttctataagcacggatgtgactgtggaggatgtaactttcttgaaggatgagttttttagtggaggtgaaagtattacaactgatgctgttgttggcaatgaagatgagattttgttgtatcaaacagctcgtcttggtaatttcgcttacaagtttcagtcactggatcctggggactacttcatcgatttgcattttgctgaaatcgagttcactaagggtccaccgggagtcatatccggccttgatttgttttcgcaagtaggagcaaatacacctcttgtgatagaggatctaaggatgctcgtaggtagggaaggagagttatctatacgattagaaggagtgacaggagctgcaattctatgtggcatttctattaggaaagagacaacggctacctatgttgaagaaactggaatgctagcggtgaaaggttcaactgacactgttctgtcccagcaaactcaagaaaatcttgtctgcagggcagaagaagaggctgaagggatgagaagtgactgtgagcagcagaggaaagagatggaggatatgaagagaatggttgaggaacttaaactggagaaccaacaaaagactagagaatgcgaagaagcattgaattctctcagtgagattcaaaatgaactaatgcgcaagtcgatgcatgttggttctttggggacaagtcaaagagaagagcagatggttctcttcattaagagatttgacaagaaaattgaagtggagcaaattaagctgttggaggaggcaacaacatacaaacacctagtccaagatatcaacgagttcagttctcacatccagtctagagtgaagcaggacgcagaattgcatgaaaatctcaaagtcaaatttgtagcaggagaaaaagagaggaaagaactatataacaagatactagaactaaaaggtaacatcagggtcttttgcaggtgtcgaccactaaactttgaagaaactgaagcaggagtatcaatgggaattgatgttgagtcaaccaaaaatggagaggtcatagtgatgtcaaatggttttcccaaaaaaagcttcaagttcgattctgtttttggtcctaacgcttcccaagctgatgtttttgaagatactgctccctttgctacgtcagtcattgatggatacaacgtttgcatcttcgcctatggccagactggtactgggaaaacttttaccatggagggaactcaacatgaccgtggtgtaaactatagaacactggaaaatctgtttcgaataatcaaagcacgagaacaccgctacaattatgagatctcggtcagtgtattggaagtttacaatgagcagataagagatttgttggttccagcttcacagagtgcatctgcacccaaaagatttgagataaggcaactgagtgaaggaaaccaccacgtaccaggattggttgaagcacctgtgaaaagcatagaagaggtttgggatgtgttgaaaacaggaagtaatgcaagggctgttgggaaaacgacggctaatgagcacagtagccgatctcactgcattcactgcgtgatggtaaaaggtgagaatttgttgaatggtgaatgcacaaagagcaaactatggttagttgatttagcaggaagcgaacgggttgctaagacagaagtacaaggagaacggctgaaggagactcaaaacatcaacaaatcattatctgctcttggtgatgtcatattcgctcttgccaacaaaagctctcacattcctttcagaaactcaaaactcacgcacttgcttcaggattctctaggaggagattcaaaaaccctcatgtttgtacaaatcagtcctaacgagaatgatcaaagtgagacactatgctcactgaattttgctagcagagtgagagggatagagttgggacctgcaaagaagcagctagacaatactgaactcttgaaatacaagcaaatggttgagaaatggaagcaagatatgaaaggaaaagacgaacagattaggaaaatggaggaaacgatgtatggtttagaagcaaagattaaggaacgagacactaagaacaaaaccctccaagacaaggttaaagaacttgaatcacaactactggtggagaggaagcttgctcgtcaacatgtagacaccaagattgctgaacagcagacaaaacagcagactgaagatgaaaacaacacatcaaagaggccgccactgacaaatatactgttgggatcagcttcgaaagaaatggtgaatctaacacgtccatcactcttggagagcacgaccagctatgatctagctcctttacctagtggtgtccccaagtataatgatctctctgagaaggagaacaatccagaaatggctgatcaagtgcatctacctaataaaacaggaagattctctatctgtgcaaaacgtattccatcagctccagctccaagaaggagttctcttgccccaaccacatcaacttcgagagaaatggtatatctaacccgaccaccactctcagagagcacgaccagctatgatctacctcctttacccaatggtggcctcaagtacagtgacctcattgagaaggtgaacaatcaagaaatggctgagcaagtgcaaattcccaagagaataggagcaggaagatcctccatctgcgcaaaacgtattccaccagctccaagaaggaagagttttgcgccaatgccattcattccaatcacatcaacattaacttctcctgatgaaaagagtggcgctaaccaagtgctctgcaccagtcctaagctacatagaagtaatgggaagacgttgaccagcatactgagacgaagcatacaaaagagaatgcaaatgaaaccttccccgaggcagcaaccaatgagaagaggtggcggcattaatgtagggatggagagagttaggctgtctataggaaacagaggaaggttagctcatagagttctgctaaccaatgctcgtaaggcaggtctgaaggagacaccgcagaaacaagagcgatggatctga

SEQ ID NO: 88494 - protein, 1196 aa, Arabidopsis thaliana
  peptide (1)..(1196): Ceres Seq. ID no. 12709810
MEDCCDPLLATDASPRPESFSRSAEKDIASRSRTVAMADLDSNCELSNDVDMEQSSPDLMKLEQSSDPVALDGKVVLGFSLASPDLVNCGASPDLPRGSYEDSPEFSKKRRFSTELSLENGIDGSTTTTRLGRKSQVVKFSAICQTFGYELSPESSFELPSPPGDFRESMTPVISINSGSISTDVTVEDVTFLKDEFFSGGESITTDAVVGNEDEILLYQTARLGNFAYKFQSLDPGDYFIDLHFAEIEFTKGPPGVISGLDLFSQVGANTPLVIEDLRMLVGREGELSIRLEGVTGAAILCGISIRKETTATYVEETGMLAVKGSTDTVLSQQTQENLVCRAEEEAEGMRSDCEQQRKEMEDMKRMVEELKLENQQKTRECEEALNSLSEIQNELMRKSMHVGSLGTSQREEQMVLFIKRFDKKIEVEQIKLLEEATTYKHLVQDINEFSSHIQSRVKQDAELHENLKVKFVAGEKERKELYNKILELKGNIRVFCRCRPLNFEETEAGVSMGIDVESTKNGEVIVMSNGFPKKSFKFDSVFGPNASQADVFEDTAPFATSVIDGYNVCIFAYGQTGTGKTFTMEGTQHDRGVNYRTLENLFRIIKAREHRYNYEISVSVLEVYNEQIRDLLVPASQSASAPKRFEIRQLSEGNHHVPGLVEAPVKSIEEVWDVLKTGSNARAVGKTTANEHSSRSHCIHCVMVKGENLLNGECTKSKLWLVDLAGSERVAKTEVQGERLKETQNINKSLSALGDVIFALANKSSHIPFRNSKLTHLLQDSLGGDSKTLMFVQISPNENDQSETLCSLNFASRVRGIELGPAKKQLDNTELLKYKQMVEKWKQDMKGKDEQIRKMEETMYGLEAKIKERDTKNKTLQDKVKELESQLLVERKLARQHVDTKIAEQQTKQQTEDENNTSKRPPLTNILLGSASKEMVNLTRPSLLESTTSYDLAPLPSGVPKYNDLSEKENNPEMADQVHLPNKTGRFSICAKRIPSAPAPRRSSLAPTTSTSREMVYLTRPPLSESTTSYDLPPLPNGGLKYSDLIEKVNNQEMAEQVQIPKRIGAGRSSICAKRIPPAPRRKSFAPMPFIPITSTLTSPDEKSGANQVLCTSPKLHRSNGKTLTSILRRSIQKRMQMKPSPRQQPMRRGGGINVGMERVRLSIGNRGRLAHRVLLTNARKAGLKETPQKQERWI

SEQ ID NO: 88495 - protein, 1160 aa, Arabidopsis thaliana; identical to SEQ ID NO: 71693
  peptide (1)..(1160): Ceres Seq. ID no. 12709811

SEQ ID NO: 88496 - protein, 1145 aa, Arabidopsis thaliana; identical to SEQ ID NO: 71694
  peptide (1)..(1145): Ceres Seq. ID no. 12709812

SEQ ID NO: 88497 - DNA, 1212 bp, Arabidopsis thaliana
  misc_feature (1)..(1212): Ceres Seq. ID no. 12709921
  misc_feature (1)..(1212): Ortholog of  Ceres SEQ ID NO 13659033 as cited in SEQ ID NO 66372
  misc_feature (1)..(1212): Ortholog of  Ceres SEQ ID NO 13655724 as cited in SEQ ID NO 68973
  misc_feature (1)..(1212): Ortholog of  Ceres SEQ ID NO 12625899 as cited in SEQ ID NO 69079
atgattcaatccatcttccaagttgtgcttgttagtcttctagttctaggatccgtgagatggatacttgatgaactcaagagcaaagaaagtcgaatatccaaactatatggtttcagacagaaagaggcagtgtttgtcactaaagaggatcagcttgatgagagctgcaatgtctttgaaggacaatgggtttgggacaatgtctcttatcctctttatacagagaagagctgtccttatttagtcaaacaaacaacatgtcaacgaaatggacggcctgattcttattaccagaactggagatggaaaccgagctcatgcgacttgccaaggttcaatgctctgaaactgttggacgtgttgagaaacaaaagactaatgttcataggagactcagtgcagagaagcacgttcgagtcaatggtctgtatggtgcaatcagtaattcctgagaagaagaagtccttccataggattcctcctatgaagatcttcaaagctgaggaatacaatgcatccatcgagtattactgggcacctttcatcgtggaatcgatttcagatcatgcaactaatcatacagtacacaaaaggttggttaagctcgacgccattgaaaaacatagcaagagctgggaaggggttgatgttctagtctttgagagctatgtatggtggatgcatcaacctaagatcaatgcaacgtatggagataccagtgaagtccgagagtataatgtgacgactgcttataaaatggcgttagaaacatgggccaagtggtttaagacgaagatcaattccgagaagcaaaaagttttcttcacgagtatgtctccgactcatctatggagctgggagtggaatccagggagcgatggaacctgttatgatgagttatatccaatagacaaaagatcatattggggtacaggatcaaatcaagaaatcatgaagattgttggtgatgttctaagcagagttggagaaaatgtcacgttcctgaacattacgcaactgtcggaatacaggaaagatggacatacgactgtgtatggagaacggagagggaagctcttgacaaaggaacagagagctgatccgaaaaactatggagattgcatccactggtgtttgccaggagttcctgatacatggaatgagattctctatgcatatttgcttcgcagtcaccgcaatttcttctga

SEQ ID NO: 88498 - protein, 403 aa, Arabidopsis thaliana
  peptide (1)..(403): Ceres Seq. ID no. 12709922
MIQSIFQVVLVSLLVLGSVRWILDELKSKESRISKLYGFRQKEAVFVTKEDQLDESCNVFEGQWVWDNVSYPLYTEKSCPYLVKQTTCQRNGRPDSYYQNWRWKPSSCDLPRFNALKLLDVLRNKRLMFIGDSVQRSTFESMVCMVQSVIPEKKKSFHRIPPMKIFKAEEYNASIEYYWAPFIVESISDHATNHTVHKRLVKLDAIEKHSKSWEGVDVLVFESYVWWMHQPKINATYGDTSEVREYNVTTAYKMALETWAKWFKTKINSEKQKVFFTSMSPTHLWSWEWNPGSDGTCYDELYPIDKRSYWGTGSNQEIMKIVGDVLSRVGENVTFLNITQLSEYRKDGHTTVYGERRGKLLTKEQRADPKNYGDCIHWCLPGVPDTWNEILYAYLLRSHRNFF

SEQ ID NO: 88499 - protein, 276 aa, Arabidopsis thaliana
  peptide (1)..(276): Ceres Seq. ID no. 12709923
MFIGDSVQRSTFESMVCMVQSVIPEKKKSFHRIPPMKIFKAEEYNASIEYYWAPFIVESISDHATNHTVHKRLVKLDAIEKHSKSWEGVDVLVFESYVWWMHQPKINATYGDTSEVREYNVTTAYKMALETWAKWFKTKINSEKQKVFFTSMSPTHLWSWEWNPGSDGTCYDELYPIDKRSYWGTGSNQEIMKIVGDVLSRVGENVTFLNITQLSEYRKDGHTTVYGERRGKLLTKEQRADPKNYGDCIHWCLPGVPDTWNEILYAYLLRSHRNFF

SEQ ID NO: 88500 - protein, 262 aa, Arabidopsis thaliana
  peptide (1)..(262): Ceres Seq. ID no. 12709924
MVCMVQSVIPEKKKSFHRIPPMKIFKAEEYNASIEYYWAPFIVESISDHATNHTVHKRLVKLDAIEKHSKSWEGVDVLVFESYVWWMHQPKINATYGDTSEVREYNVTTAYKMALETWAKWFKTKINSEKQKVFFTSMSPTHLWSWEWNPGSDGTCYDELYPIDKRSYWGTGSNQEIMKIVGDVLSRVGENVTFLNITQLSEYRKDGHTTVYGERRGKLLTKEQRADPKNYGDCIHWCLPGVPDTWNEILYAYLLRSHRNFF

SEQ ID NO: 88501 - DNA, 652 bp, Arabidopsis thaliana
  misc_feature (1)..(652): Ceres Seq. ID no. 12709940
  misc_feature (1)..(652): Ortholog of  Ceres SEQ ID NO 12610253 as cited in SEQ ID NO 56230
gctgctgctttgatcatcatcttcctcttatagcttccgagagatttatatcaatcaccatgtcgaggatcttcgccattcttcctctcgctgctgtttttcttctcctccttgtttcaccgattgtagccatcgatgtccattactgtgaagagaacgcagagtatgaagttaaagtgaaagaggttgatatatctcctaatcctatagcaccaggcgagccagctactttcaccatctctgccaacacaggccgtgagatttcgtttgggaagctggtgattgaagtttcatactttggatggcatgttcactctgagactcatgacctctgcactgagactagttgtcctatacaaaccggagatttcttggttgcacactctcaagttcttcctggttatactcctcctggttcatacttgctgaaaatgaagatgcttgatgcaaagaagaaggagttaacatgcatcaaattctcgttcgacattggactcagagcatctgtggctgacatttagagcagcttcacctgtattggtgattgtatagatagtttaggaaaattgttaattctttctatatcagttatgtcagaccctgaatgtgaaggtgatcttattttttggacaccaatgtgaatgtgctttct

SEQ ID NO: 88502 - protein, 172 aa, Arabidopsis thaliana
  peptide (1)..(172): Ceres Seq. ID no. 12709941
CCFDHHLPLIASERFISITMSRIFAILPLAAVFLLLLVSPIVAIDVHYCEENAEYEVKVKEVDISPNPIAPGEPATFTISANTGREISFGKLVIEVSYFGWHVHSETHDLCTETSCPIQTGDFLVAHSQVLPGYTPPGSYLLKMKMLDAKKKELTCIKFSFDIGLRASVADI

SEQ ID NO: 88503 - protein, 153 aa, Arabidopsis thaliana
  peptide (1)..(153): Ceres Seq. ID no. 12709942
MSRIFAILPLAAVFLLLLVSPIVAIDVHYCEENAEYEVKVKEVDISPNPIAPGEPATFTISANTGREISFGKLVIEVSYFGWHVHSETHDLCTETSCPIQTGDFLVAHSQVLPGYTPPGSYLLKMKMLDAKKKELTCIKFSFDIGLRASVADI

SEQ ID NO: 88504 - DNA, 1159 bp, Arabidopsis thaliana
  misc_feature (1)..(1159): Ceres Seq. ID no. 12710014
  misc_feature (1)..(1159): Ortholog of  Ceres SEQ ID NO 15178797 as cited in SEQ ID NO 1152
  misc_feature (1)..(1159): Ortholog of  Ceres SEQ ID NO 15175688 as cited in SEQ ID NO 60465
  misc_feature (1)..(1159): Ortholog of  Ceres SEQ ID NO 13495628 as cited in SEQ ID NO 60727
aaaacacaaacaccaaaaacactatggataagacaatgacactgttcttgctcttgtccactctcctcctcacgacttctttagctaaagatctctgtcataaagatgacaaaactaccctcctcaagatcaagaaatccctaaacaacccttaccacctcgcctcatgggatcccaaaaccgactgttgctcttggtactgcctcgagtgcggcgacgctactgtcaaccaccgtgtcacttccctaatcatacaagacggcgagatctccggtcagatcccccctgaagtcggtgacttaccgtatcttacatcccttatcttccgcaaactcactaacctcactggtcacatccaacccactatcgccaagctcaagaacctcacttttctcagactaagctggaccaatctcaccggtccggttcctgagtttctgagtcagctcaagaatcttgagtacattgacctttccttcaatgacctctctggttccatacctagttccctctcttcattacgtaaactcgagtatcttgaacttagtaggaacaagcttacaggtccgataccagagtcatttgggacgttttcaggaaaggtccctagtcttttcctatcacacaaccagctctctggtactataccaaagtcactaggcaatcccgacttttaccgcatcgatttatctcggaacaagcttcaaggcgatgcttcaatcttgtttggagctaaaaaaacaacatggatcgttgatatatcaagaaacatgttccagttcgatctctccaaggttaagctcgctaagacacttaataacttggacatgaatcacaatggcatcacagggagtattccggctgagtggagcaaagcttattttcagttactgaatgttagctataacagactgtgtggacgcatccccaaaggagagtatattcaaagatttgattcttattcctttttccacaacaagtgtttatgtggtgcacctcttcctagttgcaagtgaagattccagcaaaaccaagcattatctctgatataccaaataattaatcaagtctagtgacaattgtgtttttattttgaatgattaataaaagcatgaaccaatgttttagcttgatttcattgattaacggaaaaagttga

SEQ ID NO: 88505 - protein, 337 aa, Arabidopsis thaliana; identical to SEQ ID NO: 23122
  peptide (1)..(337): Ceres Seq. ID no. 12710015

SEQ ID NO: 88506 - protein, 330 aa, Arabidopsis thaliana; identical to SEQ ID NO: 23123
  peptide (1)..(330): Ceres Seq. ID no. 12710016

SEQ ID NO: 88507 - protein, 326 aa, Arabidopsis thaliana; identical to SEQ ID NO: 23124
  peptide (1)..(326): Ceres Seq. ID no. 12710017

SEQ ID NO: 88508 - DNA, 1113 bp, Arabidopsis thaliana
  misc_feature (1)..(1113): Ceres Seq. ID no. 12710075
  misc_feature (1)..(1113): Ortholog of  Ceres SEQ ID NO 13593854 as cited in SEQ ID NO 53403
  misc_feature (1)..(1113): Ortholog of  Ceres SEQ ID NO 12581680 as cited in SEQ ID NO 55019
atggttaaaccctgttggagaataggtgccggtatggagagaagtaagatcaatcccacaaaggttgatggtttgacatggtacaaagatcttggtcttcacacctttggagagttttccatggcaatgatccaagccaacagtgtgatggaggatcagtgccagatcgaatcagggccgcttacattcaacaatccgacagttcaaggcacatttgttggagtttacgatggccatggaggtccagaggcttccagattcattgcagacaacatcttccccaagttaaagaagtttgcgtccgagggtagggagatttcagagcaggtgatcagcaaagcatttgccgagacagacaaagattttctcaagacagtgacgaagcaatggcctacgaacccacagatggcatcagtggggtcatgttgcttggcaggagtgatatgcaacggattggtgtatattgcaaacacgggagattccagagctgtgttgggcagatctgagagaggtggagtgagagctgttcagttatctgtagagcacaatgccaatcttgagtctgcgaggcaagagctatggtcattgcatcctaatgaccccaccattcttgtgatgaagcaccgcttgtggcgtgtgaaaggcgttatccaggtcacaagatccataggtgatgcatacctcaaaagagcagagttcaacagagaacctttgctgcccaaattcagactaccagaacatttcactaagccaatccttagtgcggatccatcagtcaccattacgcggcttagcccacaagatgagtttataattcttgcttcagatgggctttgggagcatcttagcaaccaggaagctgttgatattgtgcataattcccctcgacaaggaatagcaaggagactacttaaagctgcattgaaggaagcagcaaagaaaagagagatgagatactcagacctaacagagatccatcctggtgtaagaaggcatttccacgacgatataaccgttattgtggtctatctcaacccccacccggtcaaaaccaattcttgggcttcacctctgtcaattagagggggatacccgatgcattcaacatcatga

SEQ ID NO: 88509 - protein, 370 aa, Arabidopsis thaliana
  peptide (1)..(370): Ceres Seq. ID no. 12710076
MVKPCWRIGAGMERSKINPTKVDGLTWYKDLGLHTFGEFSMAMIQANSVMEDQCQIESGPLTFNNPTVQGTFVGVYDGHGGPEASRFIADNIFPKLKKFASEGREISEQVISKAFAETDKDFLKTVTKQWPTNPQMASVGSCCLAGVICNGLVYIANTGDSRAVLGRSERGGVRAVQLSVEHNANLESARQELWSLHPNDPTILVMKHRLWRVKGVIQVTRSIGDAYLKRAEFNREPLLPKFRLPEHFTKPILSADPSVTITRLSPQDEFIILASDGLWEHLSNQEAVDIVHNSPRQGIARRLLKAALKEAAKKREMRYSDLTEIHPGVRRHFHDDITVIVVYLNPHPVKTNSWASPLSIRGGYPMHSTS

SEQ ID NO: 88510 - protein, 359 aa, Arabidopsis thaliana
  peptide (1)..(359): Ceres Seq. ID no. 12710077
MERSKINPTKVDGLTWYKDLGLHTFGEFSMAMIQANSVMEDQCQIESGPLTFNNPTVQGTFVGVYDGHGGPEASRFIADNIFPKLKKFASEGREISEQVISKAFAETDKDFLKTVTKQWPTNPQMASVGSCCLAGVICNGLVYIANTGDSRAVLGRSERGGVRAVQLSVEHNANLESARQELWSLHPNDPTILVMKHRLWRVKGVIQVTRSIGDAYLKRAEFNREPLLPKFRLPEHFTKPILSADPSVTITRLSPQDEFIILASDGLWEHLSNQEAVDIVHNSPRQGIARRLLKAALKEAAKKREMRYSDLTEIHPGVRRHFHDDITVIVVYLNPHPVKTNSWASPLSIRGGYPMHSTS

SEQ ID NO: 88511 - protein, 330 aa, Arabidopsis thaliana
  peptide (1)..(330): Ceres Seq. ID no. 12710078
MAMIQANSVMEDQCQIESGPLTFNNPTVQGTFVGVYDGHGGPEASRFIADNIFPKLKKFASEGREISEQVISKAFAETDKDFLKTVTKQWPTNPQMASVGSCCLAGVICNGLVYIANTGDSRAVLGRSERGGVRAVQLSVEHNANLESARQELWSLHPNDPTILVMKHRLWRVKGVIQVTRSIGDAYLKRAEFNREPLLPKFRLPEHFTKPILSADPSVTITRLSPQDEFIILASDGLWEHLSNQEAVDIVHNSPRQGIARRLLKAALKEAAKKREMRYSDLTEIHPGVRRHFHDDITVIVVYLNPHPVKTNSWASPLSIRGGYPMHSTS

SEQ ID NO: 88512 - DNA, 852 bp, Arabidopsis thaliana
  misc_feature (1)..(852): Ceres Seq. ID no. 12710123
  misc_feature (1)..(852): Ortholog of  Ceres SEQ ID NO 14312148 as cited in SEQ ID NO 57263
atgatgatttctcggagacccgtttcaagtccgggtcgggtagagaaatatccaccgccttttatggggtttttgagaagtaagagcaacggcggaagtacaagcaggagtagaagtcgaagcagaggaaggtcacgcgctagtcctcttttcgttcgccggaataaatccgcggcggcggtggctcaagaaccgtcgtctccgaaggttacttgcatgggtcaagtccgggtcaaccgatcgaagcccaaaattaaacccgaatctcgagataacccgacccgacgacgatgtgagtggctccgaaacgcgtcgttttataacaaattcgccgggaaaatcaaaacgatgacgttttggcctaaatggagactctgttcgttttcgtgtgcttgtcggaatttgaaggagaaagattctccgagaagtcaattagatcatccgacaacggaatcagtcagagaaatcaaagaagaaatcgaaggagaagaaaatttcgaaatccctaaattatttgtgtctccggctactactccgcctataaacgctctgttgttgacgagaagcagatctgcaccgtatagatcgtcgtcgttggctttcagattctgggaagaaaataaccaacgagaagttgaatcacagcaaaatgtgagatcggagaaaactgattcggaagttcccatcgagaaaatcaatggttttcacgagccggagtatgttgacagagatgaagaagaattcacgaagttaagatttgtacggcagccggtgttgacaaggagcaaatcggagccggcgaggatcggcgagaagatgatggtgttgcttcccgatgaagaagaaggttag

SEQ ID NO: 88513 - protein, 283 aa, Arabidopsis thaliana
  peptide (1)..(283): Ceres Seq. ID no. 12710124
MMISRRPVSSPGRVEKYPPPFMGFLRSKSNGGSTSRSRSRSRGRSRASPLFVRRNKSAAAVAQEPSSPKVTCMGQVRVNRSKPKIKPESRDNPTRRRCEWLRNASFYNKFAGKIKTMTFWPKWRLCSFSCACRNLKEKDSPRSQLDHPTTESVREIKEEIEGEENFEIPKLFVSPATTPPINALLLTRSRSAPYRSSSLAFRFWEENNQREVESQQNVRSEKTDSEVPIEKINGFHEPEYVDRDEEEFTKLRFVRQPVLTRSKSEPARIGEKMMVLLPDEEEG

SEQ ID NO: 88514 - protein, 282 aa, Arabidopsis thaliana
  peptide (1)..(282): Ceres Seq. ID no. 12710125
MISRRPVSSPGRVEKYPPPFMGFLRSKSNGGSTSRSRSRSRGRSRASPLFVRRNKSAAAVAQEPSSPKVTCMGQVRVNRSKPKIKPESRDNPTRRRCEWLRNASFYNKFAGKIKTMTFWPKWRLCSFSCACRNLKEKDSPRSQLDHPTTESVREIKEEIEGEENFEIPKLFVSPATTPPINALLLTRSRSAPYRSSSLAFRFWEENNQREVESQQNVRSEKTDSEVPIEKINGFHEPEYVDRDEEEFTKLRFVRQPVLTRSKSEPARIGEKMMVLLPDEEEG

SEQ ID NO: 88515 - protein, 262 aa, Arabidopsis thaliana
  peptide (1)..(262): Ceres Seq. ID no. 12710126
MGFLRSKSNGGSTSRSRSRSRGRSRASPLFVRRNKSAAAVAQEPSSPKVTCMGQVRVNRSKPKIKPESRDNPTRRRCEWLRNASFYNKFAGKIKTMTFWPKWRLCSFSCACRNLKEKDSPRSQLDHPTTESVREIKEEIEGEENFEIPKLFVSPATTPPINALLLTRSRSAPYRSSSLAFRFWEENNQREVESQQNVRSEKTDSEVPIEKINGFHEPEYVDRDEEEFTKLRFVRQPVLTRSKSEPARIGEKMMVLLPDEEEG

SEQ ID NO: 88516 - DNA, 2559 bp, Arabidopsis thaliana
  misc_feature (1)..(2559): Ceres Seq. ID no. 12710165
  misc_feature (1)..(2559): Ortholog of  Ceres SEQ ID NO 15172609 as cited in SEQ ID NO 61938
  misc_feature (1)..(2559): Ortholog of  Ceres SEQ ID NO 13595870 as cited in SEQ ID NO 62101
  misc_feature (1)..(2559): Ortholog of  Ceres SEQ ID NO 13590241 as cited in SEQ ID NO 63878
  misc_feature (1)..(2559): Ortholog of  Ceres SEQ ID NO 13657939 as cited in SEQ ID NO 66349
  misc_feature (1)..(2559): Ortholog of  Ceres SEQ ID NO 13660597 as cited in SEQ ID NO 67655
  misc_feature (1)..(2559): Ortholog of  Ceres SEQ ID NO 13654484 as cited in SEQ ID NO 67717
atgggtggtcgcttatttttccaacaagaaggaaatcacagagcgtataaaatcccgagttcagctcccttgagatcccattcatcatcatcatcatcatcaccaatcgatctctctagaaacaaatttcccaacttccttcttagagctctcttgaaaactaagaaggatttcagtactgcgattctagagaggaagaagtctccaaaccgacttgttgtcgatgaagctattaacgatgacaactctgttgtctctctccatcctactaccatggaaaaactccagcttttccgaggcgatacaattctcatcaagggtaagaagaggaaggacactgtatgcattgccctcgctgatgaaacatgtgaggaacccaagatcagaatgaataaggttgtaaggtctaacttgagggttaggctgggagatgttatttctgttcaccaatgcccagatgtcaagtatggaaagcgtgttcacatcttgcctgttgatgatacagttgaaggcgttactggaaacctctttgatgcttacctgaaaccttactttctggaggcgtaccgtccagtgaggaagggagatcttttcctagtgagaggaggaatgaggagtgtggagttcaaagtgatcgagactgatcctgctgagtactgtgtggtggctccagatacagagattttctgtgagggtgaaccagttaagagggaggacgaagaaaggcttgatgaggttggttatgacgatgttggtggtgtcaggaaacagatggctcagattagggaattggttgaacttcccttgaggcatccacaactctttaaatcaattggtgtgaagccaccaaagggaattctgctttacggacctcctggatccgggaagactcttattgctcgtgctgtggctaatgaaaccggagcattcttcttctgtatcaatggaccggaaatcatgtcgaaactagctggtgagagtgagagcaacctcaggaaagcatttgaggaggctgagaagaatgccccgtctatcatattcattgatgagattgactctattgcaccaaaaagagagaagacgaatggtgaggttgagaggaggattgtctctcagctccttacgcttatggatggactaaaatcacgtgcccatgttattgttatgggagcaacaaatcgtcccaacagtattgatccggctttgagaaggtttggaagattcgacagggaaattgatatcggtgttcctgatgaaattggacgtcttgaagttcttaggatccacacgaagaacatgaagctagctgaagatgttgatctagaaagaatctccaaggacacgcatggatatgttggagctgatcttgcagctctatgcactgaagctgcccttcaatgtatcagagagaagatggatgtgattgacttggaagatgactcaattgacgccgaaatcctcaattccatggctgtgtctaatgaacacttccacactgctcttggaaacagcaacccatccgcccttcgtgaaactgttgtggaggttccaaatgtctcctgggaggatattggaggtctcgagaatgttaagagagagcttcaggagactgttcaataccctgtggagcatccagagaaattcgagaagtttggtatgtctccatcaaagggagttcttttctacggtcctcctggatgtggtaaaaccctgttagccaaagctatagcaaacgagtgccaagcaaacttcatcagtgtcaagggacccgagcttctcacaatgtggtttggagaaagtgaagccaacgtccgagaaatctttgacaaggctcgtcaatctgctccttgtgttctgtttttcgatgagctagactccattgctactcagagagggaacagcgcgggtgatgccggcggtgcagctgacagagtgttgaatcagcttttgacagaaatggatggaatgaatgcaaagaagacggtattcattattggagcaactaacagaccggatatcatagattcagctcttcttcgacctggaagactcgaccagcttatctacattcctctacctgatgaagattcccgtctcaatatctttaaggcctgcttgagaaaatctcccgtcgctaaagatgtagatgttactgcactcgcaaagtacactcagggattcagtggtgctgatatcaccgagatctgccagagagcttgcaagtacgccatcagagaaaacatcgaaaaggatattgagaacgagcgtagaaggagccagaatccagaggccatggaggaagatatggtggatgatgaagtttcagagattagagctgctcatttcgaagagtcgatgaaatatgcaaggagaagtgtgagtgatgctgatattcgcaagtaccaagcttttgctcagacgctgcagcaatccagagggtttggatctgagttcaggtttgactcaaccgctggtgtcggacgcaccactggtgttgcagccgccgatccctttgccacttctgcagctgcagctgatgacgacgatctctacagttag

SEQ ID NO: 88517 - protein, 852 aa, Arabidopsis thaliana
  peptide (1)..(852): Ceres Seq. ID no. 12710166
MGGRLFFQQEGNHRAYKIPSSAPLRSHSSSSSSSPIDLSRNKFPNFLLRALLKTKKDFSTAILERKKSPNRLVVDEAINDDNSVVSLHPTTMEKLQLFRGDTILIKGKKRKDTVCIALADETCEEPKIRMNKVVRSNLRVRLGDVISVHQCPDVKYGKRVHILPVDDTVEGVTGNLFDAYLKPYFLEAYRPVRKGDLFLVRGGMRSVEFKVIETDPAEYCVVAPDTEIFCEGEPVKREDEERLDEVGYDDVGGVRKQMAQIRELVELPLRHPQLFKSIGVKPPKGILLYGPPGSGKTLIARAVANETGAFFFCINGPEIMSKLAGESESNLRKAFEEAEKNAPSIIFIDEIDSIAPKREKTNGEVERRIVSQLLTLMDGLKSRAHVIVMGATNRPNSIDPALRRFGRFDREIDIGVPDEIGRLEVLRIHTKNMKLAEDVDLERISKDTHGYVGADLAALCTEAALQCIREKMDVIDLEDDSIDAEILNSMAVSNEHFHTALGNSNPSALRETVVEVPNVSWEDIGGLENVKRELQETVQYPVEHPEKFEKFGMSPSKGVLFYGPPGCGKTLLAKAIANECQANFISVKGPELLTMWFGESEANVREIFDKARQSAPCVLFFDELDSIATQRGNSAGDAGGAADRVLNQLLTEMDGMNAKKTVFIIGATNRPDIIDSALLRPGRLDQLIYIPLPDEDSRLNIFKACLRKSPVAKDVDVTALAKYTQGFSGADITEICQRACKYAIRENIEKDIENERRRSQNPEAMEEDMVDDEVSEIRAAHFEESMKYARRSVSDADIRKYQAFAQTLQQSRGFGSEFRFDSTAGVGRTTGVAAADPFATSAAAADDDDLYS

SEQ ID NO: 88518 - protein, 761 aa, Arabidopsis thaliana; identical to SEQ ID NO: 42290
  peptide (1)..(761): Ceres Seq. ID no. 12710167

SEQ ID NO: 88519 - protein, 723 aa, Arabidopsis thaliana; identical to SEQ ID NO: 42291
  peptide (1)..(723): Ceres Seq. ID no. 12710168

SEQ ID NO: 88520 - DNA, 588 bp, Arabidopsis thaliana
  misc_feature (1)..(588): Ceres Seq. ID no. 12710245
  misc_feature (1)..(588): Ortholog of  Ceres SEQ ID NO 13595210 as cited in SEQ ID NO 56285
atgtcaatgacggaagaaaccaagacgacgaagctcgaatcggcgggagattcgtccgatgtagacaacgggaactgtagtagcagtggaagtggaggtgatacgaagaagacatgcgttgattgcggaacaagcaggactcctcttttggcgtggtggacctgcttgtcattgtgcaatgcgtgtggtatcaagagcagaaagaagagacaagcagctcttggaattagacaagatgatattaaaatcaagagcaaaagtaataacaatcttggtcttgagagccgaaatgtcaagaccggaaaaggcgaaccagttaatgttaagattgccaaatgtgaaccgggaattgtcaagattgccaaaggtgaaccaggaaatgtcaagaacaaaatcaagagagatcctgagaattccagtagcagcaataataacaagaagaacgtgaaaagggttggtagatttttggattttgggtttaaggtaccggcgatgaagagatcggctgtggagaagaagaggctatggaggaaacttggggaagaggaacgagccgcagtacttctcatggctctttcttgtggttga

SEQ ID NO: 88521 - protein, 195 aa, Arabidopsis thaliana
  peptide (1)..(195): Ceres Seq. ID no. 12710246
MSMTEETKTTKLESAGDSSDVDNGNCSSSGSGGDTKKTCVDCGTSRTPLLAWWTCLSLCNACGIKSRKKRQAALGIRQDDIKIKSKSNNNLGLESRNVKTGKGEPVNVKIAKCEPGIVKIAKGEPGNVKNKIKRDPENSSSSNNNKKNVKRVGRFLDFGFKVPAMKRSAVEKKRLWRKLGEEERAAVLLMALSCG

SEQ ID NO: 88522 - protein, 193 aa, Arabidopsis thaliana
  peptide (1)..(193): Ceres Seq. ID no. 12710247
MTEETKTTKLESAGDSSDVDNGNCSSSGSGGDTKKTCVDCGTSRTPLLAWWTCLSLCNACGIKSRKKRQAALGIRQDDIKIKSKSNNNLGLESRNVKTGKGEPVNVKIAKCEPGIVKIAKGEPGNVKNKIKRDPENSSSSNNNKKNVKRVGRFLDFGFKVPAMKRSAVEKKRLWRKLGEEERAAVLLMALSCG

SEQ ID NO: 88523 - DNA, 2730 bp, Arabidopsis thaliana
  misc_feature (1)..(2730): Ceres Seq. ID no. 12710256
  misc_feature (1)..(2730): Ortholog of  Ceres SEQ ID NO 14308747 as cited in SEQ ID NO 55372
atggccggcgttgattccggcaagcttatcggctctgagattcatggattccatactttacaagatctagatatacaaacaatgttagatgaagcatacagtaggtggctccgtcctaatgagatccatgctcttctctgtaaccataaattcttcaccatcaacgtcaagccctgtggtacgattgtgttgtttgatcgtaagatgttgaggaactttagaaaggatggtcataactggaaaaagaaaaaggatggaaagacaattaaggaagctcatgaacatctaaaagttggtaatgaggaaaggattcatgtttattatgcccacggtgaggatacccctacatttgtgcgaaggtgttactggttattggataagtctcaggagcacatagttcttgtccactatcgcgagacacatgaggttcatgcagctccagcaacacctgggaactcgtactcaagttcgatcactgaccacttatctcctaaaattgtagctgaagataccagttctggtgtccataatacttgtaatacaggttttgaagtgcggagcaacagtctgggttctagaaatcatgagattaggcttcatgagatcaacacacttgattgggatgagcttctagtacctgcagatattagcaaccaatctcatccaaccgaagaagatatgctatacttcacagaacagctccaaactgcacccaggggatctgtaaagcaaggaaatcaccttgcaggctacaacggatcagtagatataccatcattcccgggtcttgaagatcctgtatatcaaaataataactcatgtggtgcaggagaattttctagtcagcattcgcactgtggagtagatccaaatctacagagaagggatttcagtgcaacagttactgatcaaccaggtgatgctttgcttaataacggttatggaagtcaggatagttttggaaggtgggtgaacaacttcattagtgactctcctggttccgtcgatgatccttcccttgaagctgtatatacacctgggcaggattcatctactcctcctactgtatttcattcccactctgacataccggagcaagtattcaacataactgatgtttcacctgcctggggcgtattcgacagagaaaacaaaggtcttatgcatctcttatggctaagtgtgagtactgagtacttccaacatttgggaagatcaaacctcatctgcatatgtggagagttgcgtgtccccgccgaatttctccagatgggggtttatcgttgcttccttcctcctcaatctcctggggtggtgaacctttatcttagtgtcgatggaaacaaaccgatcagccaattgttcagcttcgaacaccgctcagttcagtttatcgaaaaagccatccctcaagacgaccagctatacaagtgggaagaatttgagttccaagtcagacttgctcatcttctgttcacttcttcgaacaaaatcagcgttttaactagtaaaatatcacctgaaaaccttcttgaggctaagaaactcgccagcaggacttcgcatctcttaaatagttgggcttatttaatgaagtcaattcaggcaaatgaggtaccgtttgatcaagcgagggaccatctctttgagcttactctgaaaaataggctgaaagagtggcttttggagaaggtcatcgaaaaccgcaacactaaggaatatgactctaaagggcttggagtgatccacctctgtgccgtcctaggatacacttggtcaatccttctcttctcctgggcaaatatatcgttggatttccgtgataagcagggttggactgctcttcattgggcagcatactatggaaggccaaacctggtgacagaccctactaaggaattcctcggcggctgcacggcagctgatctggcacaacagaaaggttatgacggtttagcagcttttcttgctgagaaatgtcttgtagcacagttcaaggacatgcaaacggctggaaacattagtggcaaccttgaaaccatcaaggcagagaagtcgtcaaatccagggaatgcaaatgaagaggagcaaagcctgaaggacactctagcggcatacagaactgctgcagaggcagcggcgcggattcagggagcgttcagggagcacgagctgaaagttaggtcaagcgcagttaggtttgctagcaaggaagaagaagccaaaaacataatagccgcgatgaagattcagcacgcgtttcgcaatttcgaggttcgtaggaagattgcagccgctgctcggattcagtataggttccaaacatggaaaatgaggcgggaatttctgaacatgcgaaagaaggcaattaggatccaggctgcgtttagaggtttccaagtaagaagacagtaccagaaaataacatggtcagtgggagttcttgagaaggcaattctgagatggagactgaagagaaaaggattcagaggccttcaggtaagtcaacctgacgagaaggaagggagtgaggcggtggaggatttctacaagacaagccagaaacaagcggaggaacggcttgagaggtcagtggttaaagtccaggccatgttccggtccaagaaggctcagcaagattacagaaggatgaaactggctcatgaagaagctcagctggagtatgatgggatgcaagaacttgatcaaatggctacggaggagagctga

SEQ ID NO: 88524 - protein, 909 aa, Arabidopsis thaliana
  peptide (1)..(909): Ceres Seq. ID no. 12710257
MAGVDSGKLIGSEIHGFHTLQDLDIQTMLDEAYSRWLRPNEIHALLCNHKFFTINVKPCGTIVLFDRKMLRNFRKDGHNWKKKKDGKTIKEAHEHLKVGNEERIHVYYAHGEDTPTFVRRCYWLLDKSQEHIVLVHYRETHEVHAAPATPGNSYSSSITDHLSPKIVAEDTSSGVHNTCNTGFEVRSNSLGSRNHEIRLHEINTLDWDELLVPADISNQSHPTEEDMLYFTEQLQTAPRGSVKQGNHLAGYNGSVDIPSFPGLEDPVYQNNNSCGAGEFSSQHSHCGVDPNLQRRDFSATVTDQPGDALLNNGYGSQDSFGRWVNNFISDSPGSVDDPSLEAVYTPGQDSSTPPTVFHSHSDIPEQVFNITDVSPAWGVFDRENKGLMHLLWLSVSTEYFQHLGRSNLICICGELRVPAEFLQMGVYRCFLPPQSPGVVNLYLSVDGNKPISQLFSFEHRSVQFIEKAIPQDDQLYKWEEFEFQVRLAHLLFTSSNKISVLTSKISPENLLEAKKLASRTSHLLNSWAYLMKSIQANEVPFDQARDHLFELTLKNRLKEWLLEKVIENRNTKEYDSKGLGVIHLCAVLGYTWSILLFSWANISLDFRDKQGWTALHWAAYYGRPNLVTDPTKEFLGGCTAADLAQQKGYDGLAAFLAEKCLVAQFKDMQTAGNISGNLETIKAEKSSNPGNANEEEQSLKDTLAAYRTAAEAAARIQGAFREHELKVRSSAVRFASKEEEAKNIIAAMKIQHAFRNFEVRRKIAAAARIQYRFQTWKMRREFLNMRKKAIRIQAAFRGFQVRRQYQKITWSVGVLEKAILRWRLKRKGFRGLQVSQPDEKEGSEAVEDFYKTSQKQAEERLERSVVKVQAMFRSKKAQQDYRRMKLAHEEAQLEYDGMQELDQMATEES

SEQ ID NO: 88525 - protein, 882 aa, Arabidopsis thaliana
  peptide (1)..(882): Ceres Seq. ID no. 12710258
MLDEAYSRWLRPNEIHALLCNHKFFTINVKPCGTIVLFDRKMLRNFRKDGHNWKKKKDGKTIKEAHEHLKVGNEERIHVYYAHGEDTPTFVRRCYWLLDKSQEHIVLVHYRETHEVHAAPATPGNSYSSSITDHLSPKIVAEDTSSGVHNTCNTGFEVRSNSLGSRNHEIRLHEINTLDWDELLVPADISNQSHPTEEDMLYFTEQLQTAPRGSVKQGNHLAGYNGSVDIPSFPGLEDPVYQNNNSCGAGEFSSQHSHCGVDPNLQRRDFSATVTDQPGDALLNNGYGSQDSFGRWVNNFISDSPGSVDDPSLEAVYTPGQDSSTPPTVFHSHSDIPEQVFNITDVSPAWGVFDRENKGLMHLLWLSVSTEYFQHLGRSNLICICGELRVPAEFLQMGVYRCFLPPQSPGVVNLYLSVDGNKPISQLFSFEHRSVQFIEKAIPQDDQLYKWEEFEFQVRLAHLLFTSSNKISVLTSKISPENLLEAKKLASRTSHLLNSWAYLMKSIQANEVPFDQARDHLFELTLKNRLKEWLLEKVIENRNTKEYDSKGLGVIHLCAVLGYTWSILLFSWANISLDFRDKQGWTALHWAAYYGRPNLVTDPTKEFLGGCTAADLAQQKGYDGLAAFLAEKCLVAQFKDMQTAGNISGNLETIKAEKSSNPGNANEEEQSLKDTLAAYRTAAEAAARIQGAFREHELKVRSSAVRFASKEEEAKNIIAAMKIQHAFRNFEVRRKIAAAARIQYRFQTWKMRREFLNMRKKAIRIQAAFRGFQVRRQYQKITWSVGVLEKAILRWRLKRKGFRGLQVSQPDEKEGSEAVEDFYKTSQKQAEERLERSVVKVQAMFRSKKAQQDYRRMKLAHEEAQLEYDGMQELDQMATEES

SEQ ID NO: 88526 - protein, 841 aa, Arabidopsis thaliana
  peptide (1)..(841): Ceres Seq. ID no. 12710259
MLRNFRKDGHNWKKKKDGKTIKEAHEHLKVGNEERIHVYYAHGEDTPTFVRRCYWLLDKSQEHIVLVHYRETHEVHAAPATPGNSYSSSITDHLSPKIVAEDTSSGVHNTCNTGFEVRSNSLGSRNHEIRLHEINTLDWDELLVPADISNQSHPTEEDMLYFTEQLQTAPRGSVKQGNHLAGYNGSVDIPSFPGLEDPVYQNNNSCGAGEFSSQHSHCGVDPNLQRRDFSATVTDQPGDALLNNGYGSQDSFGRWVNNFISDSPGSVDDPSLEAVYTPGQDSSTPPTVFHSHSDIPEQVFNITDVSPAWGVFDRENKGLMHLLWLSVSTEYFQHLGRSNLICICGELRVPAEFLQMGVYRCFLPPQSPGVVNLYLSVDGNKPISQLFSFEHRSVQFIEKAIPQDDQLYKWEEFEFQVRLAHLLFTSSNKISVLTSKISPENLLEAKKLASRTSHLLNSWAYLMKSIQANEVPFDQARDHLFELTLKNRLKEWLLEKVIENRNTKEYDSKGLGVIHLCAVLGYTWSILLFSWANISLDFRDKQGWTALHWAAYYGRPNLVTDPTKEFLGGCTAADLAQQKGYDGLAAFLAEKCLVAQFKDMQTAGNISGNLETIKAEKSSNPGNANEEEQSLKDTLAAYRTAAEAAARIQGAFREHELKVRSSAVRFASKEEEAKNIIAAMKIQHAFRNFEVRRKIAAAARIQYRFQTWKMRREFLNMRKKAIRIQAAFRGFQVRRQYQKITWSVGVLEKAILRWRLKRKGFRGLQVSQPDEKEGSEAVEDFYKTSQKQAEERLERSVVKVQAMFRSKKAQQDYRRMKLAHEEAQLEYDGMQELDQMATEES

SEQ ID NO: 88527 - DNA, 1083 bp, Arabidopsis thaliana
  misc_feature (1)..(1083): Ceres Seq. ID no. 12710287
  misc_feature (1)..(1083): Ortholog of  Ceres SEQ ID NO 12364737 as cited in SEQ ID NO 51089
  misc_feature (1)..(1083): Ortholog of  Ceres SEQ ID NO 14306553 as cited in SEQ ID NO 53121
  misc_feature (1)..(1083): Ortholog of  Ceres SEQ ID NO 13582301 as cited in SEQ ID NO 56509
  misc_feature (1)..(1083): Ortholog of  Ceres SEQ ID NO 13595567 as cited in SEQ ID NO 56760
  misc_feature (1)..(1083): Ortholog of  Ceres SEQ ID NO 13655302 as cited in SEQ ID NO 63307
  misc_feature (1)..(1083): Ortholog of  Ceres SEQ ID NO 13597380 as cited in SEQ ID NO 64054
  misc_feature (1)..(1083): Ortholog of  Ceres SEQ ID NO 12625474 as cited in SEQ ID NO 64169
  misc_feature (1)..(1083): Ortholog of  Ceres SEQ ID NO 13597502 as cited in SEQ ID NO 64681
  misc_feature (1)..(1083): Ortholog of  Ceres SEQ ID NO 15180805 as cited in SEQ ID NO 0
atgtcgttgcttgtatttctttgccaaattatagtattatcggtcttgttcttctccgaggtgtgccttgccggtaaaaaaattccagcaaattttgtgttcggagattcattggtggatgccggaaacaacaactacttagccacattgtcaaaggctaattatgttcctaatgggatcgattttggatcacctactggtcgattcactaacggaagaacaatcgtcgatatcgtatatcaagcattaggttccgacgagttaactccaccatacttagcaccaacaacaagcggatctctcattctcaatggcgttaattatgcttcgggcggaagtggaattctcaattccaccggaaaattatttggcgaacgtataaatgtggatgcacaactagacaactttgcaacgacaagacaagacatcatttcttggatcggtgaatccgaagccgctaaattattccggtcagcaattttctcggttacgacaggttctaatgatctaatcaacaattatttcactccggtcatatcaacccttcaacggaaagtagtagctccagaagtctttgttgatacaatgatctcaaaatttcgattacaactcaccagattgtaccaattgggtgcgaggaaaatcgtggtgattaatattggtcccatcggttgtataccattcgagagagagtctgatccagccgctggaaataactgtttggccgaacctaatgagctgaaaacactcgtagaagagttaaacaagaatctacaaggttcaagattcgtctacggtgacgtttttcgcattgttgatgatattatacaaaattattcatcttacggttttgagagtgagaagattccttgttgttcgttagttgggaaagtaggtgggctgattccatgtggtccaccttcaaaagtatgtatggaccgttccaaatatgtattttgggatccttaccatcctaccgaagctgctaacatcatcattgctcggcgtctactctccggcgacacctccgatatttatccgatcaatattcggcaactcgctaacctcaagataaatgcatga

SEQ ID NO: 88528 - protein, 360 aa, Arabidopsis thaliana
  peptide (1)..(360): Ceres Seq. ID no. 12710288
MSLLVFLCQIIVLSVLFFSEVCLAGKKIPANFVFGDSLVDAGNNNYLATLSKANYVPNGIDFGSPTGRFTNGRTIVDIVYQALGSDELTPPYLAPTTSGSLILNGVNYASGGSGILNSTGKLFGERINVDAQLDNFATTRQDIISWIGESEAAKLFRSAIFSVTTGSNDLINNYFTPVISTLQRKVVAPEVFVDTMISKFRLQLTRLYQLGARKIVVINIGPIGCIPFERESDPAAGNNCLAEPNELKTLVEELNKNLQGSRFVYGDVFRIVDDIIQNYSSYGFESEKIPCCSLVGKVGGLIPCGPPSKVCMDRSKYVFWDPYHPTEAANIIIARRLLSGDTSDIYPINIRQLANLKINA

SEQ ID NO: 88529 - DNA, 1250 bp, Arabidopsis thaliana
  misc_feature (1)..(1250): Ceres Seq. ID no. 12710302
  misc_feature (1)..(1250): Ortholog of  Ceres SEQ ID NO 13655812 as cited in SEQ ID NO 64743
  misc_feature (1)..(1250): Ortholog of  Ceres SEQ ID NO 15178828 as cited in SEQ ID NO 0
tgaaagttcttaagtggttccacgatgtttccattttgttctgacttccgaggccaacgagatgagtccaataaacaaagggcacggaaacattctttttaaattagtcttcttgagatcgaaggataacttcaattcaattctctccaaggtacacacagctgatttttgtgataagaagattgattgagatgggtactagagctcagcagattcctttacttgaaggtgagactgataattacgatggtgttactgtaaccatggtggaacctatggattctgaggtttttactgaaagtcttagggcttctctttcgcattggagagaagaggggaagaagggaatttggataaagctgcctcttggattggctaatcttgtggaggctgcagttagtgaaggatttagatatcaccacgcggagcctgagtacttgatgcttgtatcttggatctctgaaactcctgatacaatcccagccaatgcttctcatgttgtaggtgctggtgctttggtcatcaacaaaaatactaaagaggtcctcgttgtccaggagaggagtgggtttttcaaagataaaaatgtgtggaagctgcctactggtgttatcaacgagggcgaggatatatggactggagtagctagggaagtggaagaagaaactggaattattgcagattttgtcgaagtactggctttcaggcaaagccacaaagccatcttaaaaaagaaaacagatatgtttttcctgtgtgtcttaagtccgcgctcttacgatattactgaacaaaaatctgagatcttgcaagctaagtggatgccgatccaagagtatgtagaccaaccatggaacaagaagaacgagatgttcaagttcatggctaacatttgccaaaagaagtgtgaggaagaatacttgggattcgccattgtgccaactaccacatcatctggtaaagagagctttatctactgcaatgcggatcatgccaagcgccttaaagtatcgcgtgaccaagcctctgcttctctctgaaaacattctcatctgattctgtttgatctcggcatgtgtgtgtccagtgtgtacaaaacaggaaactttcttctatattattccgattctacaaaattgcgtctaaatatttaagtttataccatctctatgagccactgtaaaacttgccatcgacttctagtctatttccagtgatggtttgattctcccaacgcttacgtgcttttt

SEQ ID NO: 88530 - protein, 282 aa, Arabidopsis thaliana; identical to SEQ ID NO: 42540
  peptide (1)..(282): Ceres Seq. ID no. 12710303

SEQ ID NO: 88531 - protein, 258 aa, Arabidopsis thaliana; identical to SEQ ID NO: 21781
  peptide (1)..(258): Ceres Seq. ID no. 12710304

SEQ ID NO: 88532 - protein, 254 aa, Arabidopsis thaliana; identical to SEQ ID NO: 21782
  peptide (1)..(254): Ceres Seq. ID no. 12710305

SEQ ID NO: 88533 - DNA, 1152 bp, Arabidopsis thaliana
  misc_feature (1)..(1152): Ceres Seq. ID no. 12710436
  misc_feature (1)..(1152): Ortholog of  Ceres SEQ ID NO 15171549 as cited in SEQ ID NO 59640
atgtctctctcgtcggactccaccgttcctactgtttccacggtcaccatatcctactcagagctcaaggtcagattgagccaagtccttcttcttatttgtcttctctgtgttctgtttcgtcttctaaactcttccttattacaggagagcaacatagatttgtctgcaaggattgaagaaggatttggacctaatggacttggaatcctctctgttaaagatgttcctggatattctgctttaagacagaatctacttcagcttgcacctaggttagctggtcttcctgaagaggtgaagagggagcttgaagatcctcatagtaggtataattttggttggagtcatggcaaggagaaacttgaatccgggaagcttgacatgctgaagggttcttactatgctaatcctctacaagatgtacctacgagtaattcatatgaaatacagcggtatccatcgtattgtggatcaaatatatggccaaggaattctttaccggaacttgaaggagctttcaaagctcttggtaaactgatgttcgaagttgggctaatggtagcttaccactgtgatcaatatgtgtcaaagggtataaaacaacatgaaaagcaaaatcttgaaaagatactacttggctctcggtgtcacaaaggacggctgctttattatttccctgcacaagagagctctacgcatgacaacgattccatctcatcttggtgtggatggcatacagaccatggttcactcacaggtcttactcgagcaatattttctagagattcagttgaagtaccttgcccagatcctgcttctggcttatacatacaaacacgatcaggtcagatcgttaaggttgtgtatggggaagatgaaatagcataccaaataggcgagacaacatcaattctgtctagtggttatctttgtgctacacctcattgtgttcgggcgccacaaggagaagaggcgcgtggtctagagcgatcgacattcgcgttgttcatgcaacctgactgggaccagaagcttacattcccaaaagaagttacaatacatgaagagttatgtctctctgatgaagtcttgacgtttggagaatatacagagaaactgctcaacaaatactatgatacaaaaccttag

SEQ ID NO: 88534 - protein, 383 aa, Arabidopsis thaliana
  peptide (1)..(383): Ceres Seq. ID no. 12710437
MSLSSDSTVPTVSTVTISYSELKVRLSQVLLLICLLCVLFRLLNSSLLQESNIDLSARIEEGFGPNGLGILSVKDVPGYSALRQNLLQLAPRLAGLPEEVKRELEDPHSRYNFGWSHGKEKLESGKLDMLKGSYYANPLQDVPTSNSYEIQRYPSYCGSNIWPRNSLPELEGAFKALGKLMFEVGLMVAYHCDQYVSKGIKQHEKQNLEKILLGSRCHKGRLLYYFPAQESSTHDNDSISSWCGWHTDHGSLTGLTRAIFSRDSVEVPCPDPASGLYIQTRSGQIVKVVYGEDEIAYQIGETTSILSSGYLCATPHCVRAPQGEEARGLERSTFALFMQPDWDQKLTFPKEVTIHEELCLSDEVLTFGEYTEKLLNKYYDTKP

SEQ ID NO: 88535 - protein, 255 aa, Arabidopsis thaliana
  peptide (1)..(255): Ceres Seq. ID no. 12710438
MLKGSYYANPLQDVPTSNSYEIQRYPSYCGSNIWPRNSLPELEGAFKALGKLMFEVGLMVAYHCDQYVSKGIKQHEKQNLEKILLGSRCHKGRLLYYFPAQESSTHDNDSISSWCGWHTDHGSLTGLTRAIFSRDSVEVPCPDPASGLYIQTRSGQIVKVVYGEDEIAYQIGETTSILSSGYLCATPHCVRAPQGEEARGLERSTFALFMQPDWDQKLTFPKEVTIHEELCLSDEVLTFGEYTEKLLNKYYDTKP

SEQ ID NO: 88536 - protein, 203 aa, Arabidopsis thaliana; identical to SEQ ID NO: 84471
  peptide (1)..(203): Ceres Seq. ID no. 12710439

SEQ ID NO: 88537 - DNA, 1080 bp, Arabidopsis thaliana
  misc_feature (1)..(1080): Ceres Seq. ID no. 12710484
  misc_feature (1)..(1080): Ortholog of  Ceres SEQ ID NO 14312266 as cited in SEQ ID NO 59225
atgaagctcacaagcttgagcaagaatgctaattccacagcaacagcagtaactgtatcttcaatacagaaactcccgtttctgtctctgtctgaaactttgccttgtccgaagagttcgagaaaacccacgtttcttcctttaagatgtagacggagaccaaagttggatttgctctggggaaaatttagagttcgtgcatcagatgctggtgttggatctgggagttatagtggtggagaagaggatggatctcagagtagttctcttgatcagtctcctgccacttcatcagaaagcttaaaacctcgagggccatttccttattctttgtcaatagcgcttgtactactgagttgtggtttggtattttctcttatcacttttgtgaaaggaggaccatcttcagttttagcagcagtagcaaagtcaggcttcacagcagccttctcactcatatttgtttctgagattggagacaagacatttttcattgctgctttgttggccatgcagtatgagaaaacactggtccttttaggttcaatgggggctttatctttgatgactatcttatcagttgttattgggaagatatttcaatccgtgcctgctcagttccaaacgacactaccgataggagaatatgctgcaattgcgcttctcatgttttttggattgaaatccattaaagatgcatgggatcttccaccagtggaagccaagaatggtgaggaaactggtatagaacttggtgaatactccgaagctgaggaactcgtgaaagaaaaggcgtccaaaaagctcacaaacccacttgaaatcctctggaagtcattcagcctcgtgttctttgcggaatggggagatcgatcaatgcttgctactgttgcgcttggtgctgcacagtctccattgggagttgcgagcggagctattgctggacacttagtagcaacagtgcttgcaatcatgggcggcgcgttccttgccaactatatctctgagaaactggtgggctatgttgggggagctctcttcttagtttttgctgcagccacattctttggagtgttctga

SEQ ID NO: 88538 - protein, 359 aa, Arabidopsis thaliana
  peptide (1)..(359): Ceres Seq. ID no. 12710485
MKLTSLSKNANSTATAVTVSSIQKLPFLSLSETLPCPKSSRKPTFLPLRCRRRPKLDLLWGKFRVRASDAGVGSGSYSGGEEDGSQSSSLDQSPATSSESLKPRGPFPYSLSIALVLLSCGLVFSLITFVKGGPSSVLAAVAKSGFTAAFSLIFVSEIGDKTFFIAALLAMQYEKTLVLLGSMGALSLMTILSVVIGKIFQSVPAQFQTTLPIGEYAAIALLMFFGLKSIKDAWDLPPVEAKNGEETGIELGEYSEAEELVKEKASKKLTNPLEILWKSFSLVFFAEWGDRSMLATVALGAAQSPLGVASGAIAGHLVATVLAIMGGAFLANYISEKLVGYVGGALFLVFAAATFFGVF

SEQ ID NO: 88539 - protein, 189 aa, Arabidopsis thaliana
  peptide (1)..(189): Ceres Seq. ID no. 12710486
MQYEKTLVLLGSMGALSLMTILSVVIGKIFQSVPAQFQTTLPIGEYAAIALLMFFGLKSIKDAWDLPPVEAKNGEETGIELGEYSEAEELVKEKASKKLTNPLEILWKSFSLVFFAEWGDRSMLATVALGAAQSPLGVASGAIAGHLVATVLAIMGGAFLANYISEKLVGYVGGALFLVFAAATFFGVF

SEQ ID NO: 88540 - DNA, 2382 bp, Arabidopsis thaliana
  misc_feature (1)..(2382): Ceres Seq. ID no. 12710524
  misc_feature (1)..(2382): Ortholog of  Ceres SEQ ID NO 13596194 as cited in SEQ ID NO 68484
atggaagacgacggcaagagcagccccaagttaccgatccctggaaagagaaatatactaatcaccagtgctttgccttacgtcaacaacgttcctcatctcggaaacatcatcggatgtgttctgagcgctgatgtgtatgctagatactgtcgtctccgtggctataatgcgatttacatatgtggaaccgatgaatatgggactgcaactgagaccaaagctttggaggagaattgcacccccaaggaaatctgtgacaagtaccatgccattcataaagaagtttatgactggtttggtataagttttgacaagtttgggcgaacttcaactccagaacagactgaggtgtgccaagcaattttcaacaagttgtgggacaacaagtggctttcagagaacaccatgcagcagctttactgcgatacatgcaagaagttcttagctgaccggcttgttgagggttcttgtccgttcgaaggatgtaattatgattctgctcgtggagatcagtgcgaaaaatgtggaaagctcctgaatcctactgaacttaaagatccgaagtgcaaggtctgtcaaaacacaccccgaattcgcgacacagaccacctgtttattgagcttccgttactgaaagataggttggaagcgtatattaaaaagacctctgttactggatcttggagtcaaaatgctattcaaacgacaaatgcatggcttagggatgggcttagacagagatgcattacgagggatcttaagtggggagtgcctgtcccacatgagaaatacaaggacaaagtcttctatgtttggtttgatgctcctattggatacgtctcaataacgtcttgctacacatctgaatgggagaagtggtggaagaatcctgagaatgtggagctttatcagtttatggggaaagacaatgtgccatttcacactgtgatgtttccctctacccagcttggaactgaggaaaattggacactcatgaagacaatcagtgtgactgaatatttaaactatgaagacggaaagttctccaagagtaaaggtgttggagtgtttggtaatgatgtaaaagatacaaatatacctgtcgaagtgtggagatactacttgctgaccaacaggcctgaggtgtctgacacatcgttttcatggactgatttgcaagcaaaactgaatggcgagttgctgagcaacctaggcaactttgttaatcgagttctgagttttatagcaaagcctgataatgcaggttacgggtctgtcattcctgatgctcatgatgctgaatctcattctttaacaaaatcactggcggaaaaggttgaaaagtttgtggcagagtatgttgaagccatggaaaaggttaagctcaagcagggactgaaaactgctatgctgatttcaagcgaagggaactattacttgcaggcaagccaattttggaaactttacaaggaagataaacctttgtgtgcagttgttataagaactgctgctggtttagtacaccttcttgctcaattgttagaacctttcatgccatccttttcttgtgagctaaatttgcctccacaattttctctctccgacgagaggggagaggtattactagcaagtagaccatgggatattctgcctcctagccacaggataggcacccctcaacctttgttcaaggagttggaaaacgacgaagtggcacggtacagagaaaagtttgctggaagtcagtctgatagacgtgctagggatgaagcagcaaatttggcggatcaacttaataaaacaaaactttcagatgccaagaaacaaaaggcatcatcaaaaggcggaggaaaacccaaacctcaaccagctgctgatcgtgaaataactatggcaagacttgatatccgagttggtaaaattgtgaaggctgagaaacatcccaaggcagatgcattgtatgtagaagaaattgatgttgggggtggtgaaattcgcactgttgtcagtggactggtcaaatatatacctcttgaggaaatgcagaatcgtatggtttgtgttctttgcaacttgaaaccggcgaaaatgagggatattgtgtcacaagcaatggttcttgcagcttccagtagtgatggaagcaaggtggagttagttgagccccctaaaactgctaatattggagagcgagttacatttcccgggtttgaaggcgagccagacgatgtcttaaacccaaagaagaaagtatgggagacgcttttggttgatctaaacacaaaagagaatctagttgcttgctacaaagatgtgcccttcactacatctgcaggtgtatgcaaagtttcatccatcagcaatggcacgatccggtaa

SEQ ID NO: 88541 - protein, 793 aa, Arabidopsis thaliana
  peptide (1)..(793): Ceres Seq. ID no. 12710525
MEDDGKSSPKLPIPGKRNILITSALPYVNNVPHLGNIIGCVLSADVYARYCRLRGYNAIYICGTDEYGTATETKALEENCTPKEICDKYHAIHKEVYDWFGISFDKFGRTSTPEQTEVCQAIFNKLWDNKWLSENTMQQLYCDTCKKFLADRLVEGSCPFEGCNYDSARGDQCEKCGKLLNPTELKDPKCKVCQNTPRIRDTDHLFIELPLLKDRLEAYIKKTSVTGSWSQNAIQTTNAWLRDGLRQRCITRDLKWGVPVPHEKYKDKVFYVWFDAPIGYVSITSCYTSEWEKWWKNPENVELYQFMGKDNVPFHTVMFPSTQLGTEENWTLMKTISVTEYLNYEDGKFSKSKGVGVFGNDVKDTNIPVEVWRYYLLTNRPEVSDTSFSWTDLQAKLNGELLSNLGNFVNRVLSFIAKPDNAGYGSVIPDAHDAESHSLTKSLAEKVEKFVAEYVEAMEKVKLKQGLKTAMLISSEGNYYLQASQFWKLYKEDKPLCAVVIRTAAGLVHLLAQLLEPFMPSFSCELNLPPQFSLSDERGEVLLASRPWDILPPSHRIGTPQPLFKELENDEVARYREKFAGSQSDRRARDEAANLADQLNKTKLSDAKKQKASSKGGGKPKPQPAADREITMARLDIRVGKIVKAEKHPKADALYVEEIDVGGGEIRTVVSGLVKYIPLEEMQNRMVCVLCNLKPAKMRDIVSQAMVLAASSSDGSKVELVEPPKTANIGERVTFPGFEGEPDDVLNPKKKVWETLLVDLNTKENLVACYKDVPFTTSAGVCKVSSISNGTIR

SEQ ID NO: 88542 - protein, 657 aa, Arabidopsis thaliana
  peptide (1)..(657): Ceres Seq. ID no. 12710526
MQQLYCDTCKKFLADRLVEGSCPFEGCNYDSARGDQCEKCGKLLNPTELKDPKCKVCQNTPRIRDTDHLFIELPLLKDRLEAYIKKTSVTGSWSQNAIQTTNAWLRDGLRQRCITRDLKWGVPVPHEKYKDKVFYVWFDAPIGYVSITSCYTSEWEKWWKNPENVELYQFMGKDNVPFHTVMFPSTQLGTEENWTLMKTISVTEYLNYEDGKFSKSKGVGVFGNDVKDTNIPVEVWRYYLLTNRPEVSDTSFSWTDLQAKLNGELLSNLGNFVNRVLSFIAKPDNAGYGSVIPDAHDAESHSLTKSLAEKVEKFVAEYVEAMEKVKLKQGLKTAMLISSEGNYYLQASQFWKLYKEDKPLCAVVIRTAAGLVHLLAQLLEPFMPSFSCELNLPPQFSLSDERGEVLLASRPWDILPPSHRIGTPQPLFKELENDEVARYREKFAGSQSDRRARDEAANLADQLNKTKLSDAKKQKASSKGGGKPKPQPAADREITMARLDIRVGKIVKAEKHPKADALYVEEIDVGGGEIRTVVSGLVKYIPLEEMQNRMVCVLCNLKPAKMRDIVSQAMVLAASSSDGSKVELVEPPKTANIGERVTFPGFEGEPDDVLNPKKKVWETLLVDLNTKENLVACYKDVPFTTSAGVCKVSSISNGTIR

SEQ ID NO: 88543 - protein, 487 aa, Arabidopsis thaliana
  peptide (1)..(487): Ceres Seq. ID no. 12710527
MGKDNVPFHTVMFPSTQLGTEENWTLMKTISVTEYLNYEDGKFSKSKGVGVFGNDVKDTNIPVEVWRYYLLTNRPEVSDTSFSWTDLQAKLNGELLSNLGNFVNRVLSFIAKPDNAGYGSVIPDAHDAESHSLTKSLAEKVEKFVAEYVEAMEKVKLKQGLKTAMLISSEGNYYLQASQFWKLYKEDKPLCAVVIRTAAGLVHLLAQLLEPFMPSFSCELNLPPQFSLSDERGEVLLASRPWDILPPSHRIGTPQPLFKELENDEVARYREKFAGSQSDRRARDEAANLADQLNKTKLSDAKKQKASSKGGGKPKPQPAADREITMARLDIRVGKIVKAEKHPKADALYVEEIDVGGGEIRTVVSGLVKYIPLEEMQNRMVCVLCNLKPAKMRDIVSQAMVLAASSSDGSKVELVEPPKTANIGERVTFPGFEGEPDDVLNPKKKVWETLLVDLNTKENLVACYKDVPFTTSAGVCKVSSISNGTIR

SEQ ID NO: 88544 - DNA, 1416 bp, Arabidopsis thaliana
  misc_feature (1)..(1416): Ceres Seq. ID no. 12710554
  misc_feature (1)..(1416): Ortholog of  Ceres SEQ ID NO 13597732 as cited in SEQ ID NO 64810
  misc_feature (1)..(1416): Ortholog of  Ceres SEQ ID NO 14301912 as cited in SEQ ID NO 67786
atggaaccagtctcttcatggggtaacacctctctcgtctccgtagatccagagatccacgacctaatcgagaaggagaaacgtcggcaatgtcgaggaatcgaacttatcgcttccgagaatttcacttccttcgccgtcatcgaagctctcggaagtgccttaaccaacaaatactccgaaggtattcctggtaatcgttattacggaggtaacgaattcatcgatgagatcgagaatctttgccgttcaagagctctcgaagctttccattgtgatccagcagcgtggggcgttaatgttcagccgtattctggatctccggcaaatttcgctgcttacacggctttgcttcagcctcacgatcgtatcatggggcttgatttgccttcaggtggtcatttgactcatggttactatacatctggtggtaagaagatctctgcgacttcgatctactttgagagtcttccgtataaggtgaatttcaccactggttacattgattacgataagcttgaagagaaggcgttggatttcaggcctaagttgcttatctgtggtggtagtgcgtatcctagggattgggattacgctagatttagagctattgctgataaggttggagctcttttgctttgtgacatggctcacatcagtggtctcgttgctgctcaggaagctgcaaacccatttgagtactgtgacgttgtgacaaccacaacccacaagagtttgaggggtccaagggctggtatgattttctacaggaagggtccaaaaccaccaaagaagggtcaacccgagggtgcagtctatgattttgaggacaaaatcaactttgctgtattccctgcgcttcaaggtggtcctcacaatcaccagattggtgctctagctgttgcgttgaagcaggctaatactcctgggttcaaggtctacgcaaaacaagtgaaagccaatgctgttgcccttggaaactacctaatgagcaagggttaccagattgtgaccaatggaactgagaaccaccttgttctctgggatcttcgccctcttggattgaccggaaacaaggttgagaagctctgcgatctgtgcagcattacattgaacaagaacgcagtatttggagacagtagtgctcttgctcctggaggtgtaagaatcggtgcacccgcgatgacatcgagaggattggtggagaaggactttgagcagataggagaattcctgagccgtgcagtgacactgacgttggacatccaaaagacatacggtaagttgttgaaggacttcaacaagggtttggtgaacaacaaagatctcgatcagctcaaggctgatgtcgagaagttctcggcgtcttatgagatgcctggattcctcatgtctgagatgaagtacaaggattag

SEQ ID NO: 88545 - protein, 471 aa, Arabidopsis thaliana; identical to SEQ ID NO: 77200
  peptide (1)..(471): Ceres Seq. ID no. 12710555

SEQ ID NO: 88546 - protein, 347 aa, Arabidopsis thaliana
  peptide (1)..(347): Ceres Seq. ID no. 12710556
MGLDLPSGGHLTHGYYTSGGKKISATSIYFESLPYKVNFTTGYIDYDKLEEKALDFRPKLLICGGSAYPRDWDYARFRAIADKVGALLLCDMAHISGLVAAQEAANPFEYCDVVTTTTHKSLRGPRAGMIFYRKGPKPPKKGQPEGAVYDFEDKINFAVFPALQGGPHNHQIGALAVALKQANTPGFKVYAKQVKANAVALGNYLMSKGYQIVTNGTENHLVLWDLRPLGLTGNKVEKLCDLCSITLNKNAVFGDSSALAPGGVRIGAPAMTSRGLVEKDFEQIGEFLSRAVTLTLDIQKTYGKLLKDFNKGLVNNKDLDQLKADVEKFSASYEMPGFLMSEMKYKD

SEQ ID NO: 88547 - protein, 256 aa, Arabidopsis thaliana
  peptide (1)..(256): Ceres Seq. ID no. 12710557
MAHISGLVAAQEAANPFEYCDVVTTTTHKSLRGPRAGMIFYRKGPKPPKKGQPEGAVYDFEDKINFAVFPALQGGPHNHQIGALAVALKQANTPGFKVYAKQVKANAVALGNYLMSKGYQIVTNGTENHLVLWDLRPLGLTGNKVEKLCDLCSITLNKNAVFGDSSALAPGGVRIGAPAMTSRGLVEKDFEQIGEFLSRAVTLTLDIQKTYGKLLKDFNKGLVNNKDLDQLKADVEKFSASYEMPGFLMSEMKYKD

SEQ ID NO: 88548 - DNA, 1799 bp, Arabidopsis thaliana
  misc_feature (1)..(1799): Ceres Seq. ID no. 12710588
  misc_feature (1)..(1799): Ortholog of  Ceres SEQ ID NO 14311535 as cited in SEQ ID NO 51559
  misc_feature (1)..(1799): Ortholog of  Ceres SEQ ID NO 15176200 as cited in SEQ ID NO 55188
atactcagagacgtgtagcttcactaattccacatactcagagagaaatggcaaccgaaaccgtattagccacggcggtgagcaatggcaaaagcaaaggatgttgcaagtccggtccaggttacgcgacgcctctcgccgccatggccggtccacgggaaaagctcatctatgtcactgccctttactccggaacggggcgagacaaaccggactacttggcaacggtggatgtggatccaagctcacccacattttcaagcgtcattcacagactaaaaatgccatatataggagatgagcttcaccacactggttggaactcttgcagctcttgccatggtgatgcttctgctgatagacgttaccttgtcttaccaggcttaatttctggtcgcatctatgcaatcgacacaaagaccgacccaaaggctccgtctttgtacaaggttgtagagcctaaggagattgctgaaaagacaggattagcatttccacatacatctcattgcctagcttcaggggatatgttggtgtcatgccttggggacaaagaaggaaacgccaaagggaacgggtttcttttgctagactctgacttcaatgtcaaaagcaggtgggacaaaccaggacatggtcctttgtttggttatgatttttggtaccaacctcggttcaagaccatgatcagcacttcttggggtgcacctaaagccttctccaaaggtttcaatctccagcatgttgcggatggcttgtatggaagtcatttgcatatttatcaatggcctgaaggtgaaatgaaacagataattgaccttggaaataccggtctcttacctcttgagatcagattcttgcatgatccttctaaagatacagggtatgttgggagtgctttgtctagtaatatgataaggtttttcaagaacagtgatgacacgtggagccatgaggttgttatatcggttaaaccgttgaaagtcgaaaactggatacttccagaaatgccggggcttatcaccgacttcttgatctccctcgatgaccggtttttctactttgtgaactggcttcatggagacattcgtcagtacaacatcgaagaccctaaaaacccggtcttaaccggacaaatatgggtcggaggattactacaaaagggtagtccttataaggctgttggagaagatggtaatacttaccaattcgatgttcctcagatcaaggggaagtctctaagagcaggacctcagatgatccaactaagcctagatgggaaaagattatatgcgacaaactcgctatttagcgcatgggaccgtcagttttacccggaaatcatggagaaaggctcacacataattcaaatcgatgttgatacagacaaaggtggtctcactctaaaccctgacttctttgtggactttggtgatgaaccagacggtcctgcactagctcacgagatgagatatcccggcggagactgcacttccgatatctggatctgattttggctccctaagagtgtaagctggatttgtggctagattcgtgatcaagacaattaaagttgttcttactcctttgtggcttattccgtgataataaaactttctatttatgttgtgtgtctctatctttcgagtaaccgaattgaaccgatcaaaaccgggtcgaattatggatcatcaactcaaaaacacgtcagatacagtgtacgtggacacatggaccagatttgttatcttcttcttgttattttgttaatggacaagatctggttaattgtttatgtt

SEQ ID NO: 88549 - protein, 502 aa, Arabidopsis thaliana
  peptide (1)..(502): Ceres Seq. ID no. 12710589
TQRRVASLIPHTQREMATETVLATAVSNGKSKGCCKSGPGYATPLAAMAGPREKLIYVTALYSGTGRDKPDYLATVDVDPSSPTFSSVIHRLKMPYIGDELHHTGWNSCSSCHGDASADRRYLVLPGLISGRIYAIDTKTDPKAPSLYKVVEPKEIAEKTGLAFPHTSHCLASGDMLVSCLGDKEGNAKGNGFLLLDSDFNVKSRWDKPGHGPLFGYDFWYQPRFKTMISTSWGAPKAFSKGFNLQHVADGLYGSHLHIYQWPEGEMKQIIDLGNTGLLPLEIRFLHDPSKDTGYVGSALSSNMIRFFKNSDDTWSHEVVISVKPLKVENWILPEMPGLITDFLISLDDRFFYFVNWLHGDIRQYNIEDPKNPVLTGQIWVGGLLQKGSPYKAVGEDGNTYQFDVPQIKGKSLRAGPQMIQLSLDGKRLYATNSLFSAWDRQFYPEIMEKGSHIIQIDVDTDKGGLTLNPDFFVDFGDEPDGPALAHEMRYPGGDCTSDIWI

SEQ ID NO: 88550 - protein, 487 aa, Arabidopsis thaliana
  peptide (1)..(487): Ceres Seq. ID no. 12710590
MATETVLATAVSNGKSKGCCKSGPGYATPLAAMAGPREKLIYVTALYSGTGRDKPDYLATVDVDPSSPTFSSVIHRLKMPYIGDELHHTGWNSCSSCHGDASADRRYLVLPGLISGRIYAIDTKTDPKAPSLYKVVEPKEIAEKTGLAFPHTSHCLASGDMLVSCLGDKEGNAKGNGFLLLDSDFNVKSRWDKPGHGPLFGYDFWYQPRFKTMISTSWGAPKAFSKGFNLQHVADGLYGSHLHIYQWPEGEMKQIIDLGNTGLLPLEIRFLHDPSKDTGYVGSALSSNMIRFFKNSDDTWSHEVVISVKPLKVENWILPEMPGLITDFLISLDDRFFYFVNWLHGDIRQYNIEDPKNPVLTGQIWVGGLLQKGSPYKAVGEDGNTYQFDVPQIKGKSLRAGPQMIQLSLDGKRLYATNSLFSAWDRQFYPEIMEKGSHIIQIDVDTDKGGLTLNPDFFVDFGDEPDGPALAHEMRYPGGDCTSDIWI

SEQ ID NO: 88551 - protein, 455 aa, Arabidopsis thaliana
  peptide (1)..(455): Ceres Seq. ID no. 12710591
MAGPREKLIYVTALYSGTGRDKPDYLATVDVDPSSPTFSSVIHRLKMPYIGDELHHTGWNSCSSCHGDASADRRYLVLPGLISGRIYAIDTKTDPKAPSLYKVVEPKEIAEKTGLAFPHTSHCLASGDMLVSCLGDKEGNAKGNGFLLLDSDFNVKSRWDKPGHGPLFGYDFWYQPRFKTMISTSWGAPKAFSKGFNLQHVADGLYGSHLHIYQWPEGEMKQIIDLGNTGLLPLEIRFLHDPSKDTGYVGSALSSNMIRFFKNSDDTWSHEVVISVKPLKVENWILPEMPGLITDFLISLDDRFFYFVNWLHGDIRQYNIEDPKNPVLTGQIWVGGLLQKGSPYKAVGEDGNTYQFDVPQIKGKSLRAGPQMIQLSLDGKRLYATNSLFSAWDRQFYPEIMEKGSHIIQIDVDTDKGGLTLNPDFFVDFGDEPDGPALAHEMRYPGGDCTSDIWI

SEQ ID NO: 88552 - DNA, 663 bp, Arabidopsis thaliana
  misc_feature (1)..(663): Ceres Seq. ID no. 12710652
  misc_feature (1)..(663): Ortholog of  Ceres SEQ ID NO 12609146 as cited in SEQ ID NO 52118
  misc_feature (1)..(663): Ortholog of  Ceres SEQ ID NO 14316158 as cited in SEQ ID NO 52413
  misc_feature (1)..(663): Ortholog of  Ceres SEQ ID NO 13638136 as cited in SEQ ID NO 58644
  misc_feature (1)..(663): Ortholog of  Ceres SEQ ID NO 12587035 as cited in SEQ ID NO 63605
atggaggatcggttctccactatcaccaatcttcatggagatcgtaaacaggcaatatttggagtctatgttggtcatggaggagttaaagcggctgagtttgcagctaagaacttagataagaacattgtagaagaagtagttgacacaacgtttcttaaggaggaaggttttaagggtggttcatcctgtgtcacggctttggttagcgaagggagccttgttgtgtcaaacgccggtgactgtcgtgctgttatgagtgtaggaggtgtagctaaagttttattttctgatcattgtccgtctagagatgatgaacggaaaagaattgaaaccacgggaggatatgttgatacgtttcacggatccttagttgtgccaagaggaatcggagatgctcaacttaagaaatgggttatagctgaaccagagacaaagatctcgagagttgagcatgaccatgagttcttaatcttggcatcacatggtttatgggataaggtgagtaaccaagaagcagtagacattgctcgtcccttctgcttacgaaccgagaagccattgttgttagcagcttgtaagaagcttgttgatctctcggcttcacgaggctcgtttgatgatatcagtgtgatgttgatcccattgcgccagttcatatag

SEQ ID NO: 88553 - protein, 220 aa, Arabidopsis thaliana
  peptide (1)..(220): Ceres Seq. ID no. 12710653
MEDRFSTITNLHGDRKQAIFGVYVGHGGVKAAEFAAKNLDKNIVEEVVDTTFLKEEGFKGGSSCVTALVSEGSLVVSNAGDCRAVMSVGGVAKVLFSDHCPSRDDERKRIETTGGYVDTFHGSLVVPRGIGDAQLKKWVIAEPETKISRVEHDHEFLILASHGLWDKVSNQEAVDIARPFCLRTEKPLLLAACKKLVDLSASRGSFDDISVMLIPLRQFI

SEQ ID NO: 88554 - protein, 135 aa, Arabidopsis thaliana
  peptide (1)..(135): Ceres Seq. ID no. 12710654
MSVGGVAKVLFSDHCPSRDDERKRIETTGGYVDTFHGSLVVPRGIGDAQLKKWVIAEPETKISRVEHDHEFLILASHGLWDKVSNQEAVDIARPFCLRTEKPLLLAACKKLVDLSASRGSFDDISVMLIPLRQFI

SEQ ID NO: 88555 - DNA, 958 bp, Arabidopsis thaliana
  misc_feature (1)..(958): Ceres Seq. ID no. 12710655
  misc_feature (1)..(958): Ortholog of  Ceres SEQ ID NO 13591776 as cited in SEQ ID NO 20695
  misc_feature (1)..(958): Ortholog of  Ceres SEQ ID NO 13595072 as cited in SEQ ID NO 55971
ataactcacactctctcttcaatcctttcctttcattgtagttaaacaaagattacgattatggccacatcagctatccaacaatcctccttcgccggccaaacggctctcaagccctccagcgacctcatccaaaaggtgggcgtcttgggcggtggccgtgtgaccatgcgtcgtaccgtcaagtctactccccaaagcatctggtatggaccagaccgtcccaagtacttgggaccattctcggagaacacaccgtcttacttaactggagaataccccggagactacggctgggacaccgctggactctcggctgacccggagacattcgctaagaaccgtgagcttgaagtaatccacagcagatgggctatgttgggtgctctcggatgcacattccctgaaattctctccaagaacggtgttaaattcggagaagccgtgtggttcaaggcaggctctcagattttctcagaaggaggtcttgattacctcggaaaccctaacttgatccacgcgcaaagcatcttagccatctgggctgttcaagttgtgctcatggggttcattgaaggctacagaatcggaggtggaccactcggagaaggacttgacccgctttatcccggaggtgcgttcgacccattgaacttggctgaggatccagaggctttctctgagctgaaggtgaaggagctcaagaacggtcgtcttgccatgttctctatgtttggattctttgtccaagccattgttactggtaaaggtcccattgagaacttatttgatcatttggctgatcctgtggctaacaacgcctggtcttacgctactaactttgtccccggaaagtaattatcttatgtatttgcttcataatctctctgctttgtaaactcgtgattgtgtaatattgacgtttgatgtgaatttggcacttaatgatgtttcttgg

SEQ ID NO: 88556 - protein, 265 aa, Arabidopsis thaliana
  peptide (1)..(265): Ceres Seq. ID no. 12710656
MATSAIQQSSFAGQTALKPSSDLIQKVGVLGGGRVTMRRTVKSTPQSIWYGPDRPKYLGPFSENTPSYLTGEYPGDYGWDTAGLSADPETFAKNRELEVIHSRWAMLGALGCTFPEILSKNGVKFGEAVWFKAGSQIFSEGGLDYLGNPNLIHAQSILAIWAVQVVLMGFIEGYRIGGGPLGEGLDPLYPGGAFDPLNLAEDPEAFSELKVKELKNGRLAMFSMFGFFVQAIVTGKGPIENLFDHLADPVANNAWSYATNFVPGK

SEQ ID NO: 88557 - protein, 229 aa, Arabidopsis thaliana
  peptide (1)..(229): Ceres Seq. ID no. 12710657
MRRTVKSTPQSIWYGPDRPKYLGPFSENTPSYLTGEYPGDYGWDTAGLSADPETFAKNRELEVIHSRWAMLGALGCTFPEILSKNGVKFGEAVWFKAGSQIFSEGGLDYLGNPNLIHAQSILAIWAVQVVLMGFIEGYRIGGGPLGEGLDPLYPGGAFDPLNLAEDPEAFSELKVKELKNGRLAMFSMFGFFVQAIVTGKGPIENLFDHLADPVANNAWSYATNFVPGK

SEQ ID NO: 88558 - protein, 160 aa, Arabidopsis thaliana; identical to SEQ ID NO: 25132
  peptide (1)..(160): Ceres Seq. ID no. 12710658

SEQ ID NO: 88559 - DNA, 1083 bp, Arabidopsis thaliana
  misc_feature (1)..(1083): Ceres Seq. ID no. 12710909
  misc_feature (1)..(1083): Ortholog of  Ceres SEQ ID NO 15226408 as cited in SEQ ID NO 55563
atgtcaacggagagacgtgcttcgtcgaatccaatgaccaacgaagagaacgctatgtatatatctcttacgttccttgatatattgcatgaagcaccattatttggtcacaggaaatctagaagccttgttggaagttacctctatatgcttctattggcaggttatgctattttagctgctggtgctccttggatgtttcaccgagtccaacagttgaccccttcattgctctgctgctgcgatgttgcgcttttggttgtcacaggtgtctttcaacaatactttgtttatcaagtccagaaaatacgtctccagggttattacagtttcagtcaaaagttgaagcatgttgttcgtctgccatttgcaatcgctgcatatgggactgctgcaatgcttcttgtgatagtgtggaggcctcaaatccacattctttctatttcttctttgcaacggatcatcatgttggttgaagcagtgggcgctggctttttcatgggtttatacatcggttatgtgcaccaatacaattccgtgaattcccggccagatgtcttgaagtcattatattctcctcttcagccgtcaagttctatggaaggtttgaggtattatgaaggccggctttctgatcaacaaacggctttgttacaatatcaacgcgaaaatctccattttctaagcgaggagattctgtgcttgcaagagaaacttagcaaatatgaacaatctgatgatggaagcacacctcaggttgatctcgcacatcttttagctgctcgagatcaagagctgaggacactttcagctgagatgaatcagcttcagtctgagctacggcttgctcgttctttaatagccgagagagatgcagaggtgcagcgtgtcaacagtaccaacaaccagtatatcgaagaaaacgaaagactgagggcaattttgagtgaatggagcatgcgggcagcgaatcttgagagagctttggaagtggaacggatgtcgaactcagaactacagaaggaagtagcaagcacgcgtagaaagcagatgcttgagacaacaacgtctgagcaaccttaa

SEQ ID NO: 88560 - protein, 360 aa, Arabidopsis thaliana
  peptide (1)..(360): Ceres Seq. ID no. 12710910
MSTERRASSNPMTNEENAMYISLTFLDILHEAPLFGHRKSRSLVGSYLYMLLLAGYAILAAGAPWMFHRVQQLTPSLLCCCDVALLVVTGVFQQYFVYQVQKIRLQGYYSFSQKLKHVVRLPFAIAAYGTAAMLLVIVWRPQIHILSISSLQRIIMLVEAVGAGFFMGLYIGYVHQYNSVNSRPDVLKSLYSPLQPSSSMEGLRYYEGRLSDQQTALLQYQRENLHFLSEEILCLQEKLSKYEQSDDGSTPQVDLAHLLAARDQELRTLSAEMNQLQSELRLARSLIAERDAEVQRVNSTNNQYIEENERLRAILSEWSMRAANLERALEVERMSNSELQKEVASTRRKQMLETTTSEQP

SEQ ID NO: 88561 - protein, 349 aa, Arabidopsis thaliana
  peptide (1)..(349): Ceres Seq. ID no. 12710911
MTNEENAMYISLTFLDILHEAPLFGHRKSRSLVGSYLYMLLLAGYAILAAGAPWMFHRVQQLTPSLLCCCDVALLVVTGVFQQYFVYQVQKIRLQGYYSFSQKLKHVVRLPFAIAAYGTAAMLLVIVWRPQIHILSISSLQRIIMLVEAVGAGFFMGLYIGYVHQYNSVNSRPDVLKSLYSPLQPSSSMEGLRYYEGRLSDQQTALLQYQRENLHFLSEEILCLQEKLSKYEQSDDGSTPQVDLAHLLAARDQELRTLSAEMNQLQSELRLARSLIAERDAEVQRVNSTNNQYIEENERLRAILSEWSMRAANLERALEVERMSNSELQKEVASTRRKQMLETTTSEQP

SEQ ID NO: 88562 - protein, 342 aa, Arabidopsis thaliana
  peptide (1)..(342): Ceres Seq. ID no. 12710912
MYISLTFLDILHEAPLFGHRKSRSLVGSYLYMLLLAGYAILAAGAPWMFHRVQQLTPSLLCCCDVALLVVTGVFQQYFVYQVQKIRLQGYYSFSQKLKHVVRLPFAIAAYGTAAMLLVIVWRPQIHILSISSLQRIIMLVEAVGAGFFMGLYIGYVHQYNSVNSRPDVLKSLYSPLQPSSSMEGLRYYEGRLSDQQTALLQYQRENLHFLSEEILCLQEKLSKYEQSDDGSTPQVDLAHLLAARDQELRTLSAEMNQLQSELRLARSLIAERDAEVQRVNSTNNQYIEENERLRAILSEWSMRAANLERALEVERMSNSELQKEVASTRRKQMLETTTSEQP

SEQ ID NO: 88563 - DNA, 501 bp, Arabidopsis thaliana
  misc_feature (1)..(501): Ceres Seq. ID no. 12710913
  misc_feature (1)..(501): Ortholog of  Ceres SEQ ID NO 13584023 as cited in SEQ ID NO 63516
atgccatcggagctattccttaagttccgcaaagagcttcaaggccttcgcgtcggcgtcaatctcgagttatataacgaacccacgaatgattaccacgcaaagcttgttttgaagcctctatgtccagaaaggaagtggaagtttatatatgagccgctacaccaagaagttcgtgttttatcgaagaagattcctgtcaccagatttctaaacctccaggttggtgttggacataactttcaaatgaatgcaattggttggaaatggaagcttacttcatgtttgggtggagatggtgtgtctcggattcgaaataaaactactcttggtcttagtcctggtatcgatttccggtttggatggagagctgattttgtactcccagaggttactggggcccttggtactgaggaaccgttattcaacatgagctccgggcgtttagaggcatcactagacagagtagaggccattgtaacccattcagattatctatag

SEQ ID NO: 88564 - protein, 166 aa, Arabidopsis thaliana; identical to SEQ ID NO: 47917
  peptide (1)..(166): Ceres Seq. ID no. 12710914

SEQ ID NO: 88565 - protein, 84 aa, Arabidopsis thaliana
  peptide (1)..(84): Ceres Seq. ID no. 12710915
MNAIGWKWKLTSCLGGDGVSRIRNKTTLGLSPGIDFRFGWRADFVLPEVTGALGTEEPLFNMSSGRLEASLDRVEAIVTHSDYL

SEQ ID NO: 88566 - DNA, 1724 bp, Arabidopsis thaliana
  misc_feature (1)..(1724): Ceres Seq. ID no. 12710988
  misc_feature (1)..(1724): Ortholog of  Ceres SEQ ID NO 15227026 as cited in SEQ ID NO 52193
  misc_feature (1)..(1724): Ortholog of  Ceres SEQ ID NO 15177994 as cited in SEQ ID NO 55641
  misc_feature (1)..(1724): Ortholog of  Ceres SEQ ID NO 13595454 as cited in SEQ ID NO 56502
attcaacctctctacttcagtttctctgtccccatttttcatctgagagttaaaactgtaacctcaaaatctgagataaagtcaaaaaaaaaaccccagtttatgattctcattttctctttataatcgaaagcttcgatttttaacaaaacccagaatctgtgttcttgtttttttttttttttggtgagagttatcttttttttttttggaatattgggtgagaatctgagtaatgggatttacataaaaagattctatgtaaatactaaaataatctggaaattattaaatttccaaactttgtgttccattttgtggactcaaatttgtttataaagatctcaaatcagagagattgagacgaccaagaacaagcagaagaagaagaagaattgagagaatgtggtggtggtcttcttcaactaaaggtcgttcgaatctggagaggtttcttttaggaatcactcctaagcctccttccttctctcttcctcaggaacagggaaaggaggagattgagtatttcaggcttggtgatctctgggattgttatgatgagatgagtgcgtatggctttggcacacaggttgatttaaacaatggcgaaaccgttatgcagtactacgtcccgtacctatccgctatccaaatccacactaacaaacccgccttgctttccaggaaccagaatgaggtggctgaatctgagagtagcgagggttggagcgatagtgagagtgaaaagttgttgtcaaggtcaatgagcaatgattcaagcaaaacatgggatgctgtctctgaagattcggttttcgatccggatggttcaccgttgctgaaagatagacttggtaaccttgactttaagtacattgaaagagatcctccgcacaagcggattcccttaaccgacaagataaacgtattggtggagaaatatccgggactcatgaccttaaggagtgtcgacatgtctcctgcaagttggatggctgttgcgtggtacccgatataccacatcccaacctgcaggaacgagaaagatttgacgacaggcttcctaacttatcatactctatcttcgtcttttcaagataatgtggtggaaggagatcaaagcaacaacaatgaagaaacagagttttgtgaagattccgtaataaacaagagaatgccattgcctccgtttggtgtaacaacttacaaaatgcaaggagatctttgggggaagacggggtttgaccaggaccggttgctttatcttcaaagcgctgcggattcatggctgaaacagctcaatgttgatcaccatgactataacttcttccttaactcgagcttctaaagatcaatcgggtcgttcgtatgtttatccttctccaaaccttaaacaaaaaaaaaagacctcataaccctttttctttgttgttttcaagctccttttgtttctctgtgttttttgttctttttgtttttgtctggctcgttgtgttgttttaggtagcaaccgccatcgcggagttttttctccttttgcaagccaatcatggaagtttctaagaagaaaacagagcttttttttctttttttttaacggtgttgagaaaacaagaaagttgttttcttttcttgggtgagagatcatgtaaattgaccttgaacagaggactctgttttgtacttttctgtctaaaatatataaaaaaatctgtctttcttgt

SEQ ID NO: 88567 - protein, 314 aa, Arabidopsis thaliana
  peptide (1)..(314): Ceres Seq. ID no. 12710989
MWWWSSSTKGRSNLERFLLGITPKPPSFSLPQEQGKEEIEYFRLGDLWDCYDEMSAYGFGTQVDLNNGETVMQYYVPYLSAIQIHTNKPALLSRNQNEVAESESSEGWSDSESEKLLSRSMSNDSSKTWDAVSEDSVFDPDGSPLLKDRLGNLDFKYIERDPPHKRIPLTDKINVLVEKYPGLMTLRSVDMSPASWMAVAWYPIYHIPTCRNEKDLTTGFLTYHTLSSSFQDNVVEGDQSNNNEETEFCEDSVINKRMPLPPFGVTTYKMQGDLWGKTGFDQDRLLYLQSAADSWLKQLNVDHHDYNFFLNSSF

SEQ ID NO: 88568 - protein, 261 aa, Arabidopsis thaliana; identical to SEQ ID NO: 42859
  peptide (1)..(261): Ceres Seq. ID no. 12710990

SEQ ID NO: 88569 - protein, 243 aa, Arabidopsis thaliana; identical to SEQ ID NO: 42860
  peptide (1)..(243): Ceres Seq. ID no. 12710991

SEQ ID NO: 88570 - DNA, 894 bp, Arabidopsis thaliana
  misc_feature (1)..(894): Ceres Seq. ID no. 12710992
  misc_feature (1)..(894): Ortholog of  Ceres SEQ ID NO 15180374 as cited in SEQ ID NO 0
gcatttacttaaagggcaaaaccctccagcgccgcttggatctctctctcctctgttctctcttcccttatcttcttcttatacccttcgaccaacgaagaaccctagaaatcgattaacaagatgaatagggaaaagttgatgaagatggctaacactgtccgcactggcggaaaggggacagtaagaagaaagaagaaggctgttcacaagaccactacaaccgatgacaagaggctccagagcactcttaagagagttggagtcaattccattcccgccattgaagaagttaacatttttaaggatgatgtagtcattcagttcattaaccctaaagttcaagcttcaattgctgctaacacatgggttgtgagtggtacaccacagacgaaaaaattgcaagacattcttcctcagattatcagccaacttggaccagataacttggacaacctgaagaagctagcagagcaattccagaaacaagctccaggtgcaggtgatgtcccagcaacaatccaagaagaggacgatgatgatgatgtcccagatcttgtagtgggagagactttcgagacccctgctactgaagaggctcccaaagctgctgcttcttagaggaggaggaagaagaaggagaagagctcacctgcaaaacccatcataaaaatgtttgtcgctcgacctcttctgagcactgtcagattcttgttttctctaatgcttgcgaacagaaagacttggttttattatcacttgatgctttttggtccgaacagcaattttccttttattaaggttagatcgctttttgtttaccacctgttcaaatgagtactactatgtcctgtcgcttcatacacttcttgcaacacagtcctttgttttgag

SEQ ID NO: 88571 - protein, 165 aa, Arabidopsis thaliana; identical to SEQ ID NO: 41188
  peptide (1)..(165): Ceres Seq. ID no. 12710993

SEQ ID NO: 88572 - protein, 159 aa, Arabidopsis thaliana; identical to SEQ ID NO: 41189
  peptide (1)..(159): Ceres Seq. ID no. 12710994

SEQ ID NO: 88573 - protein, 157 aa, Arabidopsis thaliana; identical to SEQ ID NO: 41190
  peptide (1)..(157): Ceres Seq. ID no. 12710995

SEQ ID NO: 88574 - DNA, 1308 bp, Arabidopsis thaliana
  misc_feature (1)..(1308): Ceres Seq. ID no. 12710999
  misc_feature (1)..(1308): Ortholog of  Ceres SEQ ID NO 13663419 as cited in SEQ ID NO 66561
atggcaaacaacaacgtttactctgttctgaagtcgctgcttctgcttcttcaccttgtattcttgagtaagcaacatgttgactctgcctcaatcgtcaaattccttcctggttttgaaggccctcttccctttgagctcgaaaccgggtatattggtgttggtgaggaagaggaggtgcaactgttctactacttcatcaagtctgagaggaacccaaaagaagaccctcttcttctctggctaactggaggacctggctgctctgccatctctggccttctttatcagaatgggcctctggctatgaagctcgatgtttacaatggaactctcccttctttggtctctactacatattcttggacaaagacttcgagcatgatattcttggaccagcccgttggaactggcttctcctattcaagaacgcaactttttaataaacctagtgatacaggagaagccaaacggatccatgagtttcttcaaaagtggctaggcaagcatcaagagttttcctccaaccctttctatgttggcggagattcctattccggtctggttgttccagctaccgttcaagaaatttcaaaaggaaattgtcaatgctgcaatcgtccaataaatcttcagggctatgtgctcggtaacccgttaacagactgtgtatatgattgtaactaccgcgttccatttgctcataaaatggcactgatctctgatgaactctacgagtcgttgaagagaacctgcagaggagaatatgtaaatgttcatccacatgacacagaatgcttgaaattcgttgaagaatttaacaagttaacaaacagagtatgcgaacgacatatattacattcatgttgcgaaactgaaactccaagttgctattcttataggtttatgctaactacctactgggccaatgacgaaaccgtacgcaaagctcttcaaatcaataaggaggatctacgattgcaggagagtataggggaatggacacgatgttatcgcggtattccttacaatcatgacattaaaagtagcgtaccttaccatatgaataacagcatcgatggttatcgttctctcatctacagtggtgatcatgatatccaagtacctttccttgggactcaagcttggataagatcgctcaactattctatcattgatgactggaggccatggatgatcaaagatcaaatcgctgggtatatacggggaggtgggcacacagcagagtttacaccaaaggaaacctttatgatgttccaaaggtggatcaatggccaacctctgtga

SEQ ID NO: 88575 - protein, 435 aa, Arabidopsis thaliana
  peptide (1)..(435): Ceres Seq. ID no. 12711000
MANNNVYSVLKSLLLLLHLVFLSKQHVDSASIVKFLPGFEGPLPFELETGYIGVGEEEEVQLFYYFIKSERNPKEDPLLLWLTGGPGCSAISGLLYQNGPLAMKLDVYNGTLPSLVSTTYSWTKTSSMIFLDQPVGTGFSYSRTQLFNKPSDTGEAKRIHEFLQKWLGKHQEFSSNPFYVGGDSYSGLVVPATVQEISKGNCQCCNRPINLQGYVLGNPLTDCVYDCNYRVPFAHKMALISDELYESLKRTCRGEYVNVHPHDTECLKFVEEFNKLTNRVCERHILHSCCETETPSCYSYRFMLTTYWANDETVRKALQINKEDLRLQESIGEWTRCYRGIPYNHDIKSSVPYHMNNSIDGYRSLIYSGDHDIQVPFLGTQAWIRSLNYSIIDDWRPWMIKDQIAGYIRGGGHTAEFTPKETFMMFQRWINGQPL

SEQ ID NO: 88576 - protein, 333 aa, Arabidopsis thaliana
  peptide (1)..(333): Ceres Seq. ID no. 12711001
MKLDVYNGTLPSLVSTTYSWTKTSSMIFLDQPVGTGFSYSRTQLFNKPSDTGEAKRIHEFLQKWLGKHQEFSSNPFYVGGDSYSGLVVPATVQEISKGNCQCCNRPINLQGYVLGNPLTDCVYDCNYRVPFAHKMALISDELYESLKRTCRGEYVNVHPHDTECLKFVEEFNKLTNRVCERHILHSCCETETPSCYSYRFMLTTYWANDETVRKALQINKEDLRLQESIGEWTRCYRGIPYNHDIKSSVPYHMNNSIDGYRSLIYSGDHDIQVPFLGTQAWIRSLNYSIIDDWRPWMIKDQIAGYIRGGGHTAEFTPKETFMMFQRWINGQPL

SEQ ID NO: 88577 - protein, 308 aa, Arabidopsis thaliana
  peptide (1)..(308): Ceres Seq. ID no. 12711002
MIFLDQPVGTGFSYSRTQLFNKPSDTGEAKRIHEFLQKWLGKHQEFSSNPFYVGGDSYSGLVVPATVQEISKGNCQCCNRPINLQGYVLGNPLTDCVYDCNYRVPFAHKMALISDELYESLKRTCRGEYVNVHPHDTECLKFVEEFNKLTNRVCERHILHSCCETETPSCYSYRFMLTTYWANDETVRKALQINKEDLRLQESIGEWTRCYRGIPYNHDIKSSVPYHMNNSIDGYRSLIYSGDHDIQVPFLGTQAWIRSLNYSIIDDWRPWMIKDQIAGYIRGGGHTAEFTPKETFMMFQRWINGQPL

SEQ ID NO: 88578 - DNA, 1563 bp, Arabidopsis thaliana
  misc_feature (1)..(1563): Ceres Seq. ID no. 12711003
  misc_feature (1)..(1563): Ortholog of  Ceres SEQ ID NO 15176532 as cited in SEQ ID NO 58184
  misc_feature (1)..(1563): Ortholog of  Ceres SEQ ID NO 13597546 as cited in SEQ ID NO 65017
  misc_feature (1)..(1563): Ortholog of  Ceres SEQ ID NO 14307908 as cited in SEQ ID NO 67189
  misc_feature (1)..(1563): Ortholog of  Ceres SEQ ID NO 13654353 as cited in SEQ ID NO 68318
atggcggaatctgcaggagaatcctataggcttctctctgtttcttcatcaaccacatttcttgccttcataatcatcttcttacttgcgggtatagcaagaagaaagagaagagcgcctcacaggctgcctccgggaagcagaggatggcctttgatcggagataccttcgcttggctcaacgccgtcgctggttctcatccttcaagcttcgtcgagaaacaaataaaaaagttcgtctctttgctatgctctgttttgttattaatactcaagaggcctgataatagtggttttaatgaaattaggtatgggaggatattctcgtgtagcttgtttgggaaatgggcagtggtatcagcagacccggattttaaccggtttataatgcagaacgaaggaaagctatttcagtcaagttatccaaagtctttcagggatttggttgggaaagatggagtgatcacagtgcatggtgatcagcagagacggcttcactcgattgcatcgagcatgatgcgtcatgaccagctcaagactcattttcttgaggttattcccgtcgttatgctccagacactgagtaatttcaaggacggtgaagtcgtgcttctccaagatatctgcagaaaggttgccattcatcttatggttaaccaacttctcggtgtgtcgagcgaatcagaagtcgatgaaatgtctcagcttttctctgattttgttgatggatgtctctctgttcctattgacttgcctggtttcacatacaacaaagcaatgaaggcacgaaaggagatcataaggaagataaacaagacgatagaaaagcggttgcaaaacaaagcagcatcagatactgctggtaatggtgtacttggaagattgcttgaagaagaaagtttaccaaacgaatcaatggcagattttatcatcaatctactgtttgccggaaatgaaacaacctcaaaaacaatgctgtttgcggtttacttcctcactcattgtcctaaggccatgacccaactcctggaggaacatgataggctcgcgggtggaatgttaacatggcaagattacaagacaatggacttcactcaatgcgtaatagatgaaacactcaggcttggtggaattgcgatatggcttatgagagaggccaaagaagatgtctcatatcaagattatgtcattcccaagggatgcttcgtagttccgtttctctcggcagtgcacttagacgagagctattacaaagaaagtctctccttcaatccatggcgatggcttgaccctgaaactcagcaaaagaggaattggagaacgagccctttttattgcccatttggtggaggaactcggttttgcccaggagcagaactggctcgccttcaaattgctctctttctgcattacttcatcaccacatataagtcagtacatgttatgcttctgaagtggacacaacttaaggaagatcgtatctccttcttcccttcggctcgtctagtgaatggcttcaaaatccagttgaacagacgagacagtgatcctccgaatcaataa

SEQ ID NO: 88579 - protein, 520 aa, Arabidopsis thaliana
  peptide (1)..(520): Ceres Seq. ID no. 12711004
MAESAGESYRLLSVSSSTTFLAFIIIFLLAGIARRKRRAPHRLPPGSRGWPLIGDTFAWLNAVAGSHPSSFVEKQIKKFVSLLCSVLLLILKRPDNSGFNEIRYGRIFSCSLFGKWAVVSADPDFNRFIMQNEGKLFQSSYPKSFRDLVGKDGVITVHGDQQRRLHSIASSMMRHDQLKTHFLEVIPVVMLQTLSNFKDGEVVLLQDICRKVAIHLMVNQLLGVSSESEVDEMSQLFSDFVDGCLSVPIDLPGFTYNKAMKARKEIIRKINKTIEKRLQNKAASDTAGNGVLGRLLEEESLPNESMADFIINLLFAGNETTSKTMLFAVYFLTHCPKAMTQLLEEHDRLAGGMLTWQDYKTMDFTQCVIDETLRLGGIAIWLMREAKEDVSYQDYVIPKGCFVVPFLSAVHLDESYYKESLSFNPWRWLDPETQQKRNWRTSPFYCPFGGGTRFCPGAELARLQIALFLHYFITTYKSVHVMLLKWTQLKEDRISFFPSARLVNGFKIQLNRRDSDPPNQ

SEQ ID NO: 88580 - protein, 391 aa, Arabidopsis thaliana
  peptide (1)..(391): Ceres Seq. ID no. 12711005
MQNEGKLFQSSYPKSFRDLVGKDGVITVHGDQQRRLHSIASSMMRHDQLKTHFLEVIPVVMLQTLSNFKDGEVVLLQDICRKVAIHLMVNQLLGVSSESEVDEMSQLFSDFVDGCLSVPIDLPGFTYNKAMKARKEIIRKINKTIEKRLQNKAASDTAGNGVLGRLLEEESLPNESMADFIINLLFAGNETTSKTMLFAVYFLTHCPKAMTQLLEEHDRLAGGMLTWQDYKTMDFTQCVIDETLRLGGIAIWLMREAKEDVSYQDYVIPKGCFVVPFLSAVHLDESYYKESLSFNPWRWLDPETQQKRNWRTSPFYCPFGGGTRFCPGAELARLQIALFLHYFITTYKSVHVMLLKWTQLKEDRISFFPSARLVNGFKIQLNRRDSDPPNQ

SEQ ID NO: 88581 - protein, 349 aa, Arabidopsis thaliana
  peptide (1)..(349): Ceres Seq. ID no. 12711006
MMRHDQLKTHFLEVIPVVMLQTLSNFKDGEVVLLQDICRKVAIHLMVNQLLGVSSESEVDEMSQLFSDFVDGCLSVPIDLPGFTYNKAMKARKEIIRKINKTIEKRLQNKAASDTAGNGVLGRLLEEESLPNESMADFIINLLFAGNETTSKTMLFAVYFLTHCPKAMTQLLEEHDRLAGGMLTWQDYKTMDFTQCVIDETLRLGGIAIWLMREAKEDVSYQDYVIPKGCFVVPFLSAVHLDESYYKESLSFNPWRWLDPETQQKRNWRTSPFYCPFGGGTRFCPGAELARLQIALFLHYFITTYKSVHVMLLKWTQLKEDRISFFPSARLVNGFKIQLNRRDSDPPNQ

SEQ ID NO: 88582 - DNA, 1623 bp, Arabidopsis thaliana
  misc_feature (1)..(1623): Ceres Seq. ID no. 12711037
  misc_feature (1)..(1623): Ortholog of  Ceres SEQ ID NO 15179554 as cited in SEQ ID NO 1174
  misc_feature (1)..(1623): Ortholog of  Ceres SEQ ID NO 15177814 as cited in SEQ ID NO 55489
atggctcacagtcacactaatggcgccatctctccttctttctccaaagacttattcatctccgtctcgaatttcttctctattcatagatttcattaccctcgtgaaaaaatcgtctcttttttgtttcctagtgtgttctcaaggataatggcttcgtatggcgaggagcgtgaaatccaaaagaattactggaaagagcattcagtgggattgagtgttgaagctatgatgcttgattccaaagcttctgacctcgacaaagaagaacgtcctgagatacttgcgtttcttccacctattgaagggacaacagtgctagagtttggtgctggaattggtcgttttactactgaattagctcagaaggccggccaggtcattgcggttgacttcattgaaagtgttatcaaaaagaatgagaacattaacggtcactacaagaacgtcaaatttctgtgcgctgatgtcacatcaccaaatatgaactttccaaatgagtctatggatctgatattctccaactggctgctaatgtatctctctgatcaagaggttgaagatttggcgaaaaagatgttacaatggacaaaggttggcgggtatattttctttcgggagtcttgtttccatcagtctggtgataacaagcggaagtacaacccaacacactaccgtgaacctaaattttacacaaagcttttcaaagaatgccatatgaatgacgaagatgggaattcgtatgaactctctttggttagctgtaaatgcattggagcttatgtgagaaacaaaaagaaccagaaccagatatgctggctttggcagaaagtcagttcggataatgataggggcttccaacgcttcttggacaatgtccagtataagtctagtggtatcttacgctatgagcgtgtctttggagaagggtttgttagcacagggggactcgagacaacaaaggaattcgtggatatgctggatctgaaacctggccaaaaagttctagacgttgggtgcggaataggaggaggggacttctacatggctgagaactttgacgtggatgttgtgggcattgatctatctgtaaacatgatctcttttgcgcttgaacacgcaataggactcaaatgctctgtagaattcgaagtagctgattgcaccaagaaggagtatcctgataacacctttgatgttatttatagcagagacaccattctacatatccaagacaagccagcattgttcagaagattctacaaatggttgaagccgggagggaaagttctcatcactgattactgcagaagccccaaaaccccatctccagactttgcaatctacatcaagaaacgaggttatgatcttcatgatgtacaagcatacggtcagatgctgagagatgctggtttcgaggaggtaatcgcggaggatagaaccgatcagttcatgaaagtcctgaaacgggaactggatgcagtggagaaggagaaggaagaattcatcagtgacttctcgaaagaggattacgaggatattataggcgggtggaagtcaaagctacttaggagctcaagtggtgagcagaagtggggtttgttcatcgccaagagaaactga

SEQ ID NO: 88583 - protein, 540 aa, Arabidopsis thaliana
  peptide (1)..(540): Ceres Seq. ID no. 12711038
MAHSHTNGAISPSFSKDLFISVSNFFSIHRFHYPREKIVSFLFPSVFSRIMASYGEEREIQKNYWKEHSVGLSVEAMMLDSKASDLDKEERPEILAFLPPIEGTTVLEFGAGIGRFTTELAQKAGQVIAVDFIESVIKKNENINGHYKNVKFLCADVTSPNMNFPNESMDLIFSNWLLMYLSDQEVEDLAKKMLQWTKVGGYIFFRESCFHQSGDNKRKYNPTHYREPKFYTKLFKECHMNDEDGNSYELSLVSCKCIGAYVRNKKNQNQICWLWQKVSSDNDRGFQRFLDNVQYKSSGILRYERVFGEGFVSTGGLETTKEFVDMLDLKPGQKVLDVGCGIGGGDFYMAENFDVDVVGIDLSVNMISFALEHAIGLKCSVEFEVADCTKKEYPDNTFDVIYSRDTILHIQDKPALFRRFYKWLKPGGKVLITDYCRSPKTPSPDFAIYIKKRGYDLHDVQAYGQMLRDAGFEEVIAEDRTDQFMKVLKRELDAVEKEKEEFISDFSKEDYEDIIGGWKSKLLRSSSGEQKWGLFIAKRN

SEQ ID NO: 88584 - protein, 490 aa, Arabidopsis thaliana
  peptide (1)..(490): Ceres Seq. ID no. 12711039
MASYGEEREIQKNYWKEHSVGLSVEAMMLDSKASDLDKEERPEILAFLPPIEGTTVLEFGAGIGRFTTELAQKAGQVIAVDFIESVIKKNENINGHYKNVKFLCADVTSPNMNFPNESMDLIFSNWLLMYLSDQEVEDLAKKMLQWTKVGGYIFFRESCFHQSGDNKRKYNPTHYREPKFYTKLFKECHMNDEDGNSYELSLVSCKCIGAYVRNKKNQNQICWLWQKVSSDNDRGFQRFLDNVQYKSSGILRYERVFGEGFVSTGGLETTKEFVDMLDLKPGQKVLDVGCGIGGGDFYMAENFDVDVVGIDLSVNMISFALEHAIGLKCSVEFEVADCTKKEYPDNTFDVIYSRDTILHIQDKPALFRRFYKWLKPGGKVLITDYCRSPKTPSPDFAIYIKKRGYDLHDVQAYGQMLRDAGFEEVIAEDRTDQFMKVLKRELDAVEKEKEEFISDFSKEDYEDIIGGWKSKLLRSSSGEQKWGLFIAKRN

SEQ ID NO: 88585 - protein, 464 aa, Arabidopsis thaliana
  peptide (1)..(464): Ceres Seq. ID no. 12711040
MMLDSKASDLDKEERPEILAFLPPIEGTTVLEFGAGIGRFTTELAQKAGQVIAVDFIESVIKKNENINGHYKNVKFLCADVTSPNMNFPNESMDLIFSNWLLMYLSDQEVEDLAKKMLQWTKVGGYIFFRESCFHQSGDNKRKYNPTHYREPKFYTKLFKECHMNDEDGNSYELSLVSCKCIGAYVRNKKNQNQICWLWQKVSSDNDRGFQRFLDNVQYKSSGILRYERVFGEGFVSTGGLETTKEFVDMLDLKPGQKVLDVGCGIGGGDFYMAENFDVDVVGIDLSVNMISFALEHAIGLKCSVEFEVADCTKKEYPDNTFDVIYSRDTILHIQDKPALFRRFYKWLKPGGKVLITDYCRSPKTPSPDFAIYIKKRGYDLHDVQAYGQMLRDAGFEEVIAEDRTDQFMKVLKRELDAVEKEKEEFISDFSKEDYEDIIGGWKSKLLRSSSGEQKWGLFIAKRN

SEQ ID NO: 88586 - DNA, 3009 bp, Arabidopsis thaliana
  misc_feature (1)..(3009): Ceres Seq. ID no. 12711064
  misc_feature (1)..(3009): Ortholog of  Ceres SEQ ID NO 13593889 as cited in SEQ ID NO 53305
  misc_feature (1)..(3009): Ortholog of  Ceres SEQ ID NO 13581959 as cited in SEQ ID NO 56156
atgaagatgaacatgaagaactttcttaagaaacttcatatctcgcccaatcaatcagatgaagctgaaggatcaatttcaacaactaagagcaatcatcataagtctatcgatgtatcatcatcatcatcaccgaggtctcatcacagcaatagccctgaaatcaaacctttttctggtttatctaattggttaagttctgttggtcatagaaaaatccctagtcctcctaattctttcaatgccaagaacagagccgccacggttgatgacactgttgttgttaatgggtcagaacatgtggatttaggttccaaagatccagctgttgaagaagagaatcagatacagttggctttagagttaagtgctagagaagatcctgaggctactcagattgaggctattaagcaattcagtttaggctcttgtgctcctgagaactctccagctgaactcatcgcttatcgctactggaattacaattgtcttggctatgatgacaagatcttggatggtttttatgacttgtatggagtgttgaatgcatcctcagcagaaagaatacctcctttgctcgatcttcaagggacacctgtttcagacggtgtgacatgggaagctgttcttgtgaacagaagtggggattctaatctgttgagacttgaacagatggctcttgatattgctgctaaatcaagatcagtttcttcctctggttttgtgaatagtgaattggtaaggaaactggctattttagtgggagattacatgggtggaccagtcgtgcacccagagagcatgttgagagcttggaggagtcttagctatagtttgaaagcaactcttggaagcatggttttgccacttggttctctgactattggtttggctcgtcaccgagccttgttattcaaagtattgtgtgatagtgttggtgttccttgtcgaatagtcaaaggtcagcaatataccggttctgaagatgtggcaatgaactttattaaggctgatgatggcagggagtacattgttgatcttatgggagatcccggcacgcttattccagctgatgcagctggactacaaatagactatgatgaatctgcctattccgctagtcctggagacaatgattcaattcatgtagcttcttccagcaatggtattgaaagctcatatgaagagaatacagagtttcgaacaggggaacatcgttctagtaccaagagttctggggagagaaaccaatccggaggtggaggcgatctcattgttcatccaaatatttctagagaagatgtgaaaaatcagaagaaagttgaaaaggctccatttcaaaatctgtctagcaggcctattcattctttcacccatatgagatcaccttcttggactgaaggggttagctccccagctgcacaaaggatgaaagtcaaagatgtttcacaatatatgattgatgctgctaaagagaatccacggttagctcagaagcttcatgatgtattacttgaaagcggagttgtagctcctcccaatttattttccgaagtctatccccagcaattggaggcaactgttgaaagcaaaaactcgactgaagccaagaaagagagaggaaaagatttagagacaactcaggaaggaagacaccaaaacggttttggtccagtgaggtttttgcctccattaccaagagtgcaatctaaaacaaatgcacatgatcaacgtgataatggcaaagttgtaagtcagtctgattcttcacattctgaagcatcttcgacagaatatgccagaaccgtccctgctgctgtagctgcagctgctgttgttgcatcttccatggttgctgctgctgctgccaagtctgcaaactcagactcctcccccatagaacttcctgctgcagctgctgccacggccactgctgctgcagttgtggcaacagctgcagccgtgtccaggcaacttgaattaggctcgaatagcgacggggatgatggttctggtgggcatgagcctcaaggtagtggggactctaatcatgggccaaattcaggaggggaaagaatatctgacaaatctattggcaatgaaagttctaagtcagactgtgatgatgtatctgactgtgagattttgtgggaagaaattactgtgggagaacgtattggacttggatcttatggagaagtgtatcggggagattggcacgggactgaagtggctgtcaagaagttccttgatcaagatttaacaggagaagcattggaggaattcagaagtgaggtccgaatcatgaaaaagctaagacatcccaacattgttctcttcatgggagctgtgactcgcccaccgaatctttcaattgttacagagtttcttcctagaggtagcttgtataggttaatccaccggccaaataaccaattagacgagaggaggcgcctgagaatggcccttgatgctgctcgtggaatgaactatttgcacagctgtaatccgatgattgtccatcgcgatcttaagtccccaaaccttctagttgacaaaaactgggtcgtgaaggtgtgtgattttggattgtctaggatgaaacacagtacatacctctcttcaaagtcaacagcagggacggctgaatggatggctccagaagtgctaagaaacgaacctgctgatgagaagtgcgatgtttacagctacggtgtgatcttatgggaactctttacgttacaacaaccgtggggaaagatgaacccgatgcaagtagttggggcagttgggtttcagcatcgacgtcttgacattcccgactttgtagatccagcaattgcagatctcatcagtaaatgctggcagacggattcaaagttaaggccaagttttgcagagataatggcgtctctaaagcggctacagaaacctgtaacaggttccaacatcccaagaccagtccccagttcctcttcattaccaactgaacatgaacaaaaggattga

SEQ ID NO: 88587 - protein, 1002 aa, Arabidopsis thaliana
  peptide (1)..(1002): Ceres Seq. ID no. 12711065
MKMNMKNFLKKLHISPNQSDEAEGSISTTKSNHHKSIDVSSSSSPRSHHSNSPEIKPFSGLSNWLSSVGHRKIPSPPNSFNAKNRAATVDDTVVVNGSEHVDLGSKDPAVEEENQIQLALELSAREDPEATQIEAIKQFSLGSCAPENSPAELIAYRYWNYNCLGYDDKILDGFYDLYGVLNASSAERIPPLLDLQGTPVSDGVTWEAVLVNRSGDSNLLRLEQMALDIAAKSRSVSSSGFVNSELVRKLAILVGDYMGGPVVHPESMLRAWRSLSYSLKATLGSMVLPLGSLTIGLARHRALLFKVLCDSVGVPCRIVKGQQYTGSEDVAMNFIKADDGREYIVDLMGDPGTLIPADAAGLQIDYDESAYSASPGDNDSIHVASSSNGIESSYEENTEFRTGEHRSSTKSSGERNQSGGGGDLIVHPNISREDVKNQKKVEKAPFQNLSSRPIHSFTHMRSPSWTEGVSSPAAQRMKVKDVSQYMIDAAKENPRLAQKLHDVLLESGVVAPPNLFSEVYPQQLEATVESKNSTEAKKERGKDLETTQEGRHQNGFGPVRFLPPLPRVQSKTNAHDQRDNGKVVSQSDSSHSEASSTEYARTVPAAVAAAAVVASSMVAAAAAKSANSDSSPIELPAAAAATATAAAVVATAAAVSRQLELGSNSDGDDGSGGHEPQGSGDSNHGPNSGGERISDKSIGNESSKSDCDDVSDCEILWEEITVGERIGLGSYGEVYRGDWHGTEVAVKKFLDQDLTGEALEEFRSEVRIMKKLRHPNIVLFMGAVTRPPNLSIVTEFLPRGSLYRLIHRPNNQLDERRRLRMALDAARGMNYLHSCNPMIVHRDLKSPNLLVDKNWVVKVCDFGLSRMKHSTYLSSKSTAGTAEWMAPEVLRNEPADEKCDVYSYGVILWELFTLQQPWGKMNPMQVVGAVGFQHRRLDIPDFVDPAIADLISKCWQTDSKLRPSFAEIMASLKRLQKPVTGSNIPRPVPSSSSLPTEHEQKD

SEQ ID NO: 88588 - protein, 1000 aa, Arabidopsis thaliana
  peptide (1)..(1000): Ceres Seq. ID no. 12711066
MNMKNFLKKLHISPNQSDEAEGSISTTKSNHHKSIDVSSSSSPRSHHSNSPEIKPFSGLSNWLSSVGHRKIPSPPNSFNAKNRAATVDDTVVVNGSEHVDLGSKDPAVEEENQIQLALELSAREDPEATQIEAIKQFSLGSCAPENSPAELIAYRYWNYNCLGYDDKILDGFYDLYGVLNASSAERIPPLLDLQGTPVSDGVTWEAVLVNRSGDSNLLRLEQMALDIAAKSRSVSSSGFVNSELVRKLAILVGDYMGGPVVHPESMLRAWRSLSYSLKATLGSMVLPLGSLTIGLARHRALLFKVLCDSVGVPCRIVKGQQYTGSEDVAMNFIKADDGREYIVDLMGDPGTLIPADAAGLQIDYDESAYSASPGDNDSIHVASSSNGIESSYEENTEFRTGEHRSSTKSSGERNQSGGGGDLIVHPNISREDVKNQKKVEKAPFQNLSSRPIHSFTHMRSPSWTEGVSSPAAQRMKVKDVSQYMIDAAKENPRLAQKLHDVLLESGVVAPPNLFSEVYPQQLEATVESKNSTEAKKERGKDLETTQEGRHQNGFGPVRFLPPLPRVQSKTNAHDQRDNGKVVSQSDSSHSEASSTEYARTVPAAVAAAAVVASSMVAAAAAKSANSDSSPIELPAAAAATATAAAVVATAAAVSRQLELGSNSDGDDGSGGHEPQGSGDSNHGPNSGGERISDKSIGNESSKSDCDDVSDCEILWEEITVGERIGLGSYGEVYRGDWHGTEVAVKKFLDQDLTGEALEEFRSEVRIMKKLRHPNIVLFMGAVTRPPNLSIVTEFLPRGSLYRLIHRPNNQLDERRRLRMALDAARGMNYLHSCNPMIVHRDLKSPNLLVDKNWVVKVCDFGLSRMKHSTYLSSKSTAGTAEWMAPEVLRNEPADEKCDVYSYGVILWELFTLQQPWGKMNPMQVVGAVGFQHRRLDIPDFVDPAIADLISKCWQTDSKLRPSFAEIMASLKRLQKPVTGSNIPRPVPSSSSLPTEHEQKD

SEQ ID NO: 88589 - protein, 998 aa, Arabidopsis thaliana
  peptide (1)..(998): Ceres Seq. ID no. 12711067
MKNFLKKLHISPNQSDEAEGSISTTKSNHHKSIDVSSSSSPRSHHSNSPEIKPFSGLSNWLSSVGHRKIPSPPNSFNAKNRAATVDDTVVVNGSEHVDLGSKDPAVEEENQIQLALELSAREDPEATQIEAIKQFSLGSCAPENSPAELIAYRYWNYNCLGYDDKILDGFYDLYGVLNASSAERIPPLLDLQGTPVSDGVTWEAVLVNRSGDSNLLRLEQMALDIAAKSRSVSSSGFVNSELVRKLAILVGDYMGGPVVHPESMLRAWRSLSYSLKATLGSMVLPLGSLTIGLARHRALLFKVLCDSVGVPCRIVKGQQYTGSEDVAMNFIKADDGREYIVDLMGDPGTLIPADAAGLQIDYDESAYSASPGDNDSIHVASSSNGIESSYEENTEFRTGEHRSSTKSSGERNQSGGGGDLIVHPNISREDVKNQKKVEKAPFQNLSSRPIHSFTHMRSPSWTEGVSSPAAQRMKVKDVSQYMIDAAKENPRLAQKLHDVLLESGVVAPPNLFSEVYPQQLEATVESKNSTEAKKERGKDLETTQEGRHQNGFGPVRFLPPLPRVQSKTNAHDQRDNGKVVSQSDSSHSEASSTEYARTVPAAVAAAAVVASSMVAAAAAKSANSDSSPIELPAAAAATATAAAVVATAAAVSRQLELGSNSDGDDGSGGHEPQGSGDSNHGPNSGGERISDKSIGNESSKSDCDDVSDCEILWEEITVGERIGLGSYGEVYRGDWHGTEVAVKKFLDQDLTGEALEEFRSEVRIMKKLRHPNIVLFMGAVTRPPNLSIVTEFLPRGSLYRLIHRPNNQLDERRRLRMALDAARGMNYLHSCNPMIVHRDLKSPNLLVDKNWVVKVCDFGLSRMKHSTYLSSKSTAGTAEWMAPEVLRNEPADEKCDVYSYGVILWELFTLQQPWGKMNPMQVVGAVGFQHRRLDIPDFVDPAIADLISKCWQTDSKLRPSFAEIMASLKRLQKPVTGSNIPRPVPSSSSLPTEHEQKD

SEQ ID NO: 88590 - DNA, 3042 bp, Arabidopsis thaliana
  misc_feature (1)..(3042): Ceres Seq. ID no. 12711084
  misc_feature (1)..(3042): Ortholog of  Ceres SEQ ID NO 13600310 as cited in SEQ ID NO 5086
atgaatcctatgcgtgatcaaccgggcagcccttatggagattcaactcctcgtagtccgttttctcccttttctccattatctgtagatgataggcatagaaatcatgcagatacaaaaactcctcgtagtcctttctctccattttctccattatccggagatgaaaggcacaaaagtctggcagagtccaaatttcagcaagcccttgccagctctggccaattagatccattatctcctggatcaatgcatcatggaggacacaagtttcatgaggttttccaaatgaaacaggggcgttatgatcttcaagcttcaaagatttctgaaatgatgaaatcaagtagcttagataatgctcctacgcagtcattgctaagcgtcttgaatggaattctagatgaaagtatcgaaagaaagaatggtgaaatccctcagcgtgtggcatgcctgttaagaaaagtcgtgcaggagattgagcggcgtatatcaactcaagctgaacatctaagaacgcaaaacaatattttcaaaactcgcgaggaaaaataccagtcaaggatcaatgtccttgaagccttagcatcaggaactggtgtagaacacgagacagaaaagtcaatgtgggaggaaaagaagaaacacgaagaggaagatatggttaagctaatgaaacaaaatgatcagcacaacctcgaaatttctgcgctgaagcaagaactggagacaactaaaagaaaatatgaacaacaatactcgcaaattgaaagccaaacaaagacagagaagtcaaagtgggaagaacagaagaaaaatgaagaggaggatatggacaagctattgaaagaaaatgatcagttcaaccttcagatttctgcgttaaggcaagagctggagacaacaagaaaagcgtatgaacagcaatgctcgcaaatggaaagccaaacaatggtcgctacaacaggacttgagagcaggctcaaggaacttgaacaagagggaaaagtggtaaacactgcaaaaaatgcccttgaggaaagggttaaagagcttgaacaaatgggaaaagaagcacattctgctaaaaatgctcttgaggaaaagattaaacagcttcaacaaatggaaaaagaaacaaaaactgctaatacaagccttgaaggaaagatccaagagcttgaacaaaacctcgtaatgtggaagactaaagtcagagaaatggagaaaaagtctgagtccaaccaccaaagatggagtcagaaagaactttcctataaaagctttattgataaccagtctcaggcactactggagttgaggtcctattcaagatccatcaagcaagaaatactgaaggtacaagagaactatacagaccagttcagccaactaggaaagaaactgattgaacttagcaatgctgctgaaaactatcacgctgtactaactgaaaaccggaagcttttcaacgagcttcaggagctaaaaggaaacatcagagtgttttgccgggtgaggcctttccttcctgcacagggtgcagcaaacacagtggtcgagtatgtcggtgaagatggagaattagtagttaccaatccaactagacccgggaaagacggtcttcgccagtttaagttcaacaaggtgtatagtccaactgcttcacaagctgacgtcttttcagacataagaccgctggttaggtcagtacttgatgggtacaatgtttgtatatttgcatatggccagacaggatcagggaaaacttatacaatgactggtccagatggatcaagtgaagaagactggggagtaaattatcgcgctctcaatgatctttttaaaatctctcagtccagaaagggaaacatatcgtatgaagtcggggtgcaaatggtggagatatataatgaacaaccattcctttttgttttccttgaccttcacacaacactagggatcctttctacaactcaacaaaatggcctggctgtgcctgacgcaagcatgtatcctgtgacatcaacttcagatgtgattacattgatggacattggactacagaatcgagccgttggttctactgccttgaatgaaagaagtagtcgttcacatagcattgtcactgttcacgttcgcggtaaagatttaaagaccggttccgtgctatacggtaatcttcatttggtggatctggcaggaagtgagagagtagatcgctctgaagttacaggagacagactaagagaagcacaacatataaacaagtcgctctcatctcttggagatgtgatattctctctcgcttcaaagagttctcatgtaccatacagaaacagcaagctaacacagcttctccaaacctctcttggaggacgagcaaagacactaatgtttgtgcaactcaaccctgacgctacttcatactcagagtcaatgagtaccttgaaatttgcagagcgtgtctctggagtcgaacttggtgctgcaaagacaagtaaagaaggtaaagatgttcgagacttgatggaacagttagcgtcccttaaggacaccatagcgagaaaagacgaagagatagagagacttcagcatcagcctcagagacttcagaaatcaatgatgagaagaaaaagcataggacatacagatgacataaactcagatacaggagaatattcatcacaatcaagatactctgttactgacggcgaaagtttagcatcctctgccgaggcagagtacgacgagagactaagcgagattacgtctgatgctgcatctatgggaacacaaggatccattgatgttaccaaaagaccacccagaatttcagacagagctaagtcggtgactgcaaaatcatctacgagtgtaacacggccactcgataaacttcggaaagtagctacaagaacaacatcgaccgttgctaaggtcacgggcttgacatcatcaagtaaaggcttagcgtcatcaagcattaagaagacgggaagtacatcaagtttggcaaagtcttcaaaacggtgggcgtaa

SEQ ID NO: 88591 - protein, 1013 aa, Arabidopsis thaliana
  peptide (1)..(1013): Ceres Seq. ID no. 12711085
MNPMRDQPGSPYGDSTPRSPFSPFSPLSVDDRHRNHADTKTPRSPFSPFSPLSGDERHKSLAESKFQQALASSGQLDPLSPGSMHHGGHKFHEVFQMKQGRYDLQASKISEMMKSSSLDNAPTQSLLSVLNGILDESIERKNGEIPQRVACLLRKVVQEIERRISTQAEHLRTQNNIFKTREEKYQSRINVLEALASGTGVEHETEKSMWEEKKKHEEEDMVKLMKQNDQHNLEISALKQELETTKRKYEQQYSQIESQTKTEKSKWEEQKKNEEEDMDKLLKENDQFNLQISALRQELETTRKAYEQQCSQMESQTMVATTGLESRLKELEQEGKVVNTAKNALEERVKELEQMGKEAHSAKNALEEKIKQLQQMEKETKTANTSLEGKIQELEQNLVMWKTKVREMEKKSESNHQRWSQKELSYKSFIDNQSQALLELRSYSRSIKQEILKVQENYTDQFSQLGKKLIELSNAAENYHAVLTENRKLFNELQELKGNIRVFCRVRPFLPAQGAANTVVEYVGEDGELVVTNPTRPGKDGLRQFKFNKVYSPTASQADVFSDIRPLVRSVLDGYNVCIFAYGQTGSGKTYTMTGPDGSSEEDWGVNYRALNDLFKISQSRKGNISYEVGVQMVEIYNEQPFLFVFLDLHTTLGILSTTQQNGLAVPDASMYPVTSTSDVITLMDIGLQNRAVGSTALNERSSRSHSIVTVHVRGKDLKTGSVLYGNLHLVDLAGSERVDRSEVTGDRLREAQHINKSLSSLGDVIFSLASKSSHVPYRNSKLTQLLQTSLGGRAKTLMFVQLNPDATSYSESMSTLKFAERVSGVELGAAKTSKEGKDVRDLMEQLASLKDTIARKDEEIERLQHQPQRLQKSMMRRKSIGHTDDINSDTGEYSSQSRYSVTDGESLASSAEAEYDERLSEITSDAASMGTQGSIDVTKRPPRISDRAKSVTAKSSTSVTRPLDKLRKVATRTTSTVAKVTGLTSSSKGLASSSIKKTGSTSSLAKSSKRWA

SEQ ID NO: 88592 - protein, 1010 aa, Arabidopsis thaliana
  peptide (1)..(1010): Ceres Seq. ID no. 12711086
MRDQPGSPYGDSTPRSPFSPFSPLSVDDRHRNHADTKTPRSPFSPFSPLSGDERHKSLAESKFQQALASSGQLDPLSPGSMHHGGHKFHEVFQMKQGRYDLQASKISEMMKSSSLDNAPTQSLLSVLNGILDESIERKNGEIPQRVACLLRKVVQEIERRISTQAEHLRTQNNIFKTREEKYQSRINVLEALASGTGVEHETEKSMWEEKKKHEEEDMVKLMKQNDQHNLEISALKQELETTKRKYEQQYSQIESQTKTEKSKWEEQKKNEEEDMDKLLKENDQFNLQISALRQELETTRKAYEQQCSQMESQTMVATTGLESRLKELEQEGKVVNTAKNALEERVKELEQMGKEAHSAKNALEEKIKQLQQMEKETKTANTSLEGKIQELEQNLVMWKTKVREMEKKSESNHQRWSQKELSYKSFIDNQSQALLELRSYSRSIKQEILKVQENYTDQFSQLGKKLIELSNAAENYHAVLTENRKLFNELQELKGNIRVFCRVRPFLPAQGAANTVVEYVGEDGELVVTNPTRPGKDGLRQFKFNKVYSPTASQADVFSDIRPLVRSVLDGYNVCIFAYGQTGSGKTYTMTGPDGSSEEDWGVNYRALNDLFKISQSRKGNISYEVGVQMVEIYNEQPFLFVFLDLHTTLGILSTTQQNGLAVPDASMYPVTSTSDVITLMDIGLQNRAVGSTALNERSSRSHSIVTVHVRGKDLKTGSVLYGNLHLVDLAGSERVDRSEVTGDRLREAQHINKSLSSLGDVIFSLASKSSHVPYRNSKLTQLLQTSLGGRAKTLMFVQLNPDATSYSESMSTLKFAERVSGVELGAAKTSKEGKDVRDLMEQLASLKDTIARKDEEIERLQHQPQRLQKSMMRRKSIGHTDDINSDTGEYSSQSRYSVTDGESLASSAEAEYDERLSEITSDAASMGTQGSIDVTKRPPRISDRAKSVTAKSSTSVTRPLDKLRKVATRTTSTVAKVTGLTSSSKGLASSSIKKTGSTSSLAKSSKRWA

SEQ ID NO: 88593 - protein, 930 aa, Arabidopsis thaliana
  peptide (1)..(930): Ceres Seq. ID no. 12711087
MHHGGHKFHEVFQMKQGRYDLQASKISEMMKSSSLDNAPTQSLLSVLNGILDESIERKNGEIPQRVACLLRKVVQEIERRISTQAEHLRTQNNIFKTREEKYQSRINVLEALASGTGVEHETEKSMWEEKKKHEEEDMVKLMKQNDQHNLEISALKQELETTKRKYEQQYSQIESQTKTEKSKWEEQKKNEEEDMDKLLKENDQFNLQISALRQELETTRKAYEQQCSQMESQTMVATTGLESRLKELEQEGKVVNTAKNALEERVKELEQMGKEAHSAKNALEEKIKQLQQMEKETKTANTSLEGKIQELEQNLVMWKTKVREMEKKSESNHQRWSQKELSYKSFIDNQSQALLELRSYSRSIKQEILKVQENYTDQFSQLGKKLIELSNAAENYHAVLTENRKLFNELQELKGNIRVFCRVRPFLPAQGAANTVVEYVGEDGELVVTNPTRPGKDGLRQFKFNKVYSPTASQADVFSDIRPLVRSVLDGYNVCIFAYGQTGSGKTYTMTGPDGSSEEDWGVNYRALNDLFKISQSRKGNISYEVGVQMVEIYNEQPFLFVFLDLHTTLGILSTTQQNGLAVPDASMYPVTSTSDVITLMDIGLQNRAVGSTALNERSSRSHSIVTVHVRGKDLKTGSVLYGNLHLVDLAGSERVDRSEVTGDRLREAQHINKSLSSLGDVIFSLASKSSHVPYRNSKLTQLLQTSLGGRAKTLMFVQLNPDATSYSESMSTLKFAERVSGVELGAAKTSKEGKDVRDLMEQLASLKDTIARKDEEIERLQHQPQRLQKSMMRRKSIGHTDDINSDTGEYSSQSRYSVTDGESLASSAEAEYDERLSEITSDAASMGTQGSIDVTKRPPRISDRAKSVTAKSSTSVTRPLDKLRKVATRTTSTVAKVTGLTSSSKGLASSSIKKTGSTSSLAKSSKRWA

SEQ ID NO: 88594 - DNA, 1683 bp, Arabidopsis thaliana
  misc_feature (1)..(1683): Ceres Seq. ID no. 12711092
  misc_feature (1)..(1683): Ortholog of  Ceres SEQ ID NO 13597574 as cited in SEQ ID NO 64677
  misc_feature (1)..(1683): Ortholog of  Ceres SEQ ID NO 13597843 as cited in SEQ ID NO 64850
  misc_feature (1)..(1683): Ortholog of  Ceres SEQ ID NO 12617417 as cited in SEQ ID NO 65089
  misc_feature (1)..(1683): Ortholog of  Ceres SEQ ID NO 13597678 as cited in SEQ ID NO 65375
  misc_feature (1)..(1683): Ortholog of  Ceres SEQ ID NO 12779098 as cited in SEQ ID NO 67698
  misc_feature (1)..(1683): Ortholog of  Ceres SEQ ID NO 13596180 as cited in SEQ ID NO 67941
  misc_feature (1)..(1683): Ortholog of  Ceres SEQ ID NO 13591190 as cited in SEQ ID NO 68044
  misc_feature (1)..(1683): Ortholog of  Ceres SEQ ID NO 13595961 as cited in SEQ ID NO 68223
atgaaagtgaacgaggaaaacaacaagccgacaaagacccatgtcttaatcttcccatttccggcgcaaggtcacatgattcccctcctcgacttcacccaccgccttgctctccgcggcggcgccgccttaaaaataaccgtcctagtcactccaaaaaaccttccttttctctctccgcttctctccgccgtagttaacatcgaaccacttatcctcccttttccctcccacccttcaatcccctccggcgtcgaaaacgtccaagacttacctccttcaggcttccctttaatgatccacgcgcttggtaatctccacgcgccgcttatctcttggattacttctcacccttctcctccagtagccatcgtatctgatttcttccttggttggaccaaaaacctcggaatccctcgtttcgatttctctccctccgctgctatcacttgctgcatactcaatactctctggatcgaaatgcccaccaagatcaacgaagatgacgataacgagatcctccactttcccaagatcccgaattgtccaaaataccgttttgatcagatctcctctctttacagaagttacgttcacggagatccagcttgggagttcataagagactcctttagagataacgtggcgagttggggactcgtcgtgaactcgttcaccgccatggaaggtgtttatctcgaacatcttaagcgagagatgggccatgatcgtgtatgggctgtaggcccaattattccgttatctggggataaccgtggtggcccgacttctgtttctgttgatcacgtgatgtcgtggcttgacgcacgtgaggataaccacgtggtgtacgtgtgctttggaagtcaagtagttttgactaaagagcagactcttgcactcgcctctgggcttgagaaaagcggcgtccatttcatatgggccgtaaaggagcccgttgagaaagactcaacacgtggcaacatcctggacggtttcgacgatcgcgtggctgggagaggtctggtgatcagaggatgggctccacaagtagctgtgctacgtcaccgagccgttggcgcgtttttaacgcactgtggttggaactctgtggtggaggcggttgtcgccggcgttttgatgctgacgtggccgatgagagctgaccagtacactgacgcgtctctggtggttgatgagttgaaagtaggtgtgcgtgcttgcgaaggacctgacacggtgcctgacccggacgagttagctcgagttttcgctgattccgtgaccggaaatcaaacggagaggatcaaagccgtggagctgaggaaagcagcgttggatgcgattcaagaacgtgggagctcagtgaatgatttagatggatttatccaacatgtcgttagagctagaatccgctgcaacgacctcaccgattcttctcgtaaccctttctccaccttccgactcgtaaacttccctaatccatcaagaaccggtcttcacgttgtctctgccgccaaaaaaccttccacacagaccggtcgtttcgacagcaagaagcgtcggactctcgttcctacaacgactaagaacagcaggaagagggaaacgaaggttttgacggcgagaacccgccgtctcagatcgttatcaacgacgaagatggagatagaacggtggtga

SEQ ID NO: 88595 - protein, 560 aa, Arabidopsis thaliana
  peptide (1)..(560): Ceres Seq. ID no. 12711093
MKVNEENNKPTKTHVLIFPFPAQGHMIPLLDFTHRLALRGGAALKITVLVTPKNLPFLSPLLSAVVNIEPLILPFPSHPSIPSGVENVQDLPPSGFPLMIHALGNLHAPLISWITSHPSPPVAIVSDFFLGWTKNLGIPRFDFSPSAAITCCILNTLWIEMPTKINEDDDNEILHFPKIPNCPKYRFDQISSLYRSYVHGDPAWEFIRDSFRDNVASWGLVVNSFTAMEGVYLEHLKREMGHDRVWAVGPIIPLSGDNRGGPTSVSVDHVMSWLDAREDNHVVYVCFGSQVVLTKEQTLALASGLEKSGVHFIWAVKEPVEKDSTRGNILDGFDDRVAGRGLVIRGWAPQVAVLRHRAVGAFLTHCGWNSVVEAVVAGVLMLTWPMRADQYTDASLVVDELKVGVRACEGPDTVPDPDELARVFADSVTGNQTERIKAVELRKAALDAIQERGSSVNDLDGFIQHVVRARIRCNDLTDSSRNPFSTFRLVNFPNPSRTGLHVVSAAKKPSTQTGRFDSKKRRTLVPTTTKNSRKRETKVLTARTRRLRSLSTTKMEIERW

SEQ ID NO: 88596 - protein, 535 aa, Arabidopsis thaliana
  peptide (1)..(535): Ceres Seq. ID no. 12711094
MIPLLDFTHRLALRGGAALKITVLVTPKNLPFLSPLLSAVVNIEPLILPFPSHPSIPSGVENVQDLPPSGFPLMIHALGNLHAPLISWITSHPSPPVAIVSDFFLGWTKNLGIPRFDFSPSAAITCCILNTLWIEMPTKINEDDDNEILHFPKIPNCPKYRFDQISSLYRSYVHGDPAWEFIRDSFRDNVASWGLVVNSFTAMEGVYLEHLKREMGHDRVWAVGPIIPLSGDNRGGPTSVSVDHVMSWLDAREDNHVVYVCFGSQVVLTKEQTLALASGLEKSGVHFIWAVKEPVEKDSTRGNILDGFDDRVAGRGLVIRGWAPQVAVLRHRAVGAFLTHCGWNSVVEAVVAGVLMLTWPMRADQYTDASLVVDELKVGVRACEGPDTVPDPDELARVFADSVTGNQTERIKAVELRKAALDAIQERGSSVNDLDGFIQHVVRARIRCNDLTDSSRNPFSTFRLVNFPNPSRTGLHVVSAAKKPSTQTGRFDSKKRRTLVPTTTKNSRKRETKVLTARTRRLRSLSTTKMEIERW

SEQ ID NO: 88597 - protein, 462 aa, Arabidopsis thaliana
  peptide (1)..(462): Ceres Seq. ID no. 12711095
MIHALGNLHAPLISWITSHPSPPVAIVSDFFLGWTKNLGIPRFDFSPSAAITCCILNTLWIEMPTKINEDDDNEILHFPKIPNCPKYRFDQISSLYRSYVHGDPAWEFIRDSFRDNVASWGLVVNSFTAMEGVYLEHLKREMGHDRVWAVGPIIPLSGDNRGGPTSVSVDHVMSWLDAREDNHVVYVCFGSQVVLTKEQTLALASGLEKSGVHFIWAVKEPVEKDSTRGNILDGFDDRVAGRGLVIRGWAPQVAVLRHRAVGAFLTHCGWNSVVEAVVAGVLMLTWPMRADQYTDASLVVDELKVGVRACEGPDTVPDPDELARVFADSVTGNQTERIKAVELRKAALDAIQERGSSVNDLDGFIQHVVRARIRCNDLTDSSRNPFSTFRLVNFPNPSRTGLHVVSAAKKPSTQTGRFDSKKRRTLVPTTTKNSRKRETKVLTARTRRLRSLSTTKMEIERW

SEQ ID NO: 88598 - DNA, 987 bp, Arabidopsis thaliana
  misc_feature (1)..(987): Ceres Seq. ID no. 12711102
  misc_feature (1)..(987): Ortholog of  Ceres SEQ ID NO 13664220 as cited in SEQ ID NO 61151
  misc_feature (1)..(987): Ortholog of  Ceres SEQ ID NO 13597477 as cited in SEQ ID NO 65160
atgaggtcgtttgtctcgttgatttctcttctccttcttctctcattttcttcatctgttctctcaaccaaaaagtcatcatttcaaaaacttccggtgccaggaaacagaacaggccctgaagctttcgcttttgattccaccggaaaaggattctacaccggagtcaccggcggtaaaatcctaaaatatcttccaaagaaaggttatgtcgactttgcccagatcacaaactcttcgaagtcttcgttgtgcgacggagcacttggaaccactaacgtcgaaaaatgtggtcgaccagccggaatagccttcaacacgaaaacaggtgatctttacgtcgcagatgctgcattgggtctccacgtcatccctcgccgtgggggtttggctaagaagatcgccgacagtgtcggcggcaagccctttttgtttcttgacgggcttgacgtagatcccactaccggcgtcgtctatttcacttccttcagctcaacatttggccctagggatgtgttgaaagcagtggcaacaaaagactcgaccggtaagttcttcaaatacgatccatcaaaaaaggtcgtgactgtattgatggaaggtcttagcggctcagccggatgtgccgttagctcagatggttcattcgtgctggttggtcagttcacaaaaagtaacatcaagaggtattggatcaaaggatccaaagctggtacttctgaagacttcaccaactcggtctcgaaccctgacaacatcaagaggatcggttctactggaaacttttgggttgcttcggtcgtgaactcagccaccggaccgacaaacccttcggcggttaaagtcagttctgccggtaaagtgcttcagaccattcccctaaaagacaagtttggggatactttggttagtgaagttaacgaatacaaaggacagctttacatcggagctctttttggtcctttcgccggaattcttaagctttaa

SEQ ID NO: 88599 - protein, 328 aa, Arabidopsis thaliana
  peptide (1)..(328): Ceres Seq. ID no. 12711103
MRSFVSLISLLLLLSFSSSVLSTKKSSFQKLPVPGNRTGPEAFAFDSTGKGFYTGVTGGKILKYLPKKGYVDFAQITNSSKSSLCDGALGTTNVEKCGRPAGIAFNTKTGDLYVADAALGLHVIPRRGGLAKKIADSVGGKPFLFLDGLDVDPTTGVVYFTSFSSTFGPRDVLKAVATKDSTGKFFKYDPSKKVVTVLMEGLSGSAGCAVSSDGSFVLVGQFTKSNIKRYWIKGSKAGTSEDFTNSVSNPDNIKRIGSTGNFWVASVVNSATGPTNPSAVKVSSAGKVLQTIPLKDKFGDTLVSEVNEYKGQLYIGALFGPFAGILKL

SEQ ID NO: 88600 - DNA, 1344 bp, Arabidopsis thaliana
  misc_feature (1)..(1344): Ceres Seq. ID no. 12711141
  misc_feature (1)..(1344): Ortholog of  Ceres SEQ ID NO 14301471 as cited in SEQ ID NO 68064
  misc_feature (1)..(1344): Ortholog of  Ceres SEQ ID NO 13574418 as cited in SEQ ID NO 0
  misc_feature (1)..(1344): Ortholog of  Ceres SEQ ID NO 13600272 as cited in SEQ ID NO 0
atggcgggaagtgaagcggtagaagataaggagataaaatcggcggtttcaagctgtgaagcgtatttcgagaaagtacaatcaaggaagaatctacccaaatctcttcaagaaaccctaaactctgctttcgccggaatcccagtctcctccttccctcaagtccccggcggcagagtgatagagattcaagcggaaacacctgtatcagaagcagtaaagatcttatcagatagcaagattctatcagctcctgtgattaacacagatcacgagagttctttagattggagagaaagatatttaggaatcattgactactcttcaatcatcttatgggtgctagagagtgctgaactcgctgcaatcgcgttgtccgctacgtcagcaactgctgctggtgttggtgctggagctgttggagctcttggtgttgcagcgctcgggatgaccggtccggttgctgctgcggggctagccgcagctgcggttggagccgcggttgctggtggtgttgcagctgaacgtgggattggaaaagatgctccaactgctgctgataagttggggaaagatttctatgaagttattcttcaagaagagccttttaaatcaaccactgttagaacaatacttaagtcgtttagatgggctccttttcttccggtttcaacagagagttcgatgttgagtgttatgttgttactctcgaaatatcggttaagaaatgtgccggttattaaaacaggagaaccggatatcaagaactacgttactcaatctgcagttgttcatggtcttgaaggttgcaaaggtagagattggtttgatcacatttccgctctcccgatttctgatctcggcctcccgtttatgtcacccaatgaggttattagcattgagagtgaggaacttatccttgaagcatttaaaaggatgagagacaacaacattggtggtctccctgtagttgaagggttgaataagaagattgttggtaacattagcatgagagacattagatatttgcttttacaacctgaagtcttttccaatttcagacaactcacggtgaagagtttcgcgacaaagattgctacagcgggagaggaatacggtttagcgattcctgcaataacttgtaggcctgattcgactttagggagtgttataaacagtttggcttcgaggtcggtgcatcgggtttatgtagcggctggagatgagaatgagctttatggggttataacactgagggatgtgatctcttgtttcgtatcagaacctccaaattactttgagaactgtctcggtttctcggttaaggaaatgcttaaccgatga

SEQ ID NO: 88601 - protein, 447 aa, Arabidopsis thaliana
  peptide (1)..(447): Ceres Seq. ID no. 12711142
MAGSEAVEDKEIKSAVSSCEAYFEKVQSRKNLPKSLQETLNSAFAGIPVSSFPQVPGGRVIEIQAETPVSEAVKILSDSKILSAPVINTDHESSLDWRERYLGIIDYSSIILWVLESAELAAIALSATSATAAGVGAGAVGALGVAALGMTGPVAAAGLAAAAVGAAVAGGVAAERGIGKDAPTAADKLGKDFYEVILQEEPFKSTTVRTILKSFRWAPFLPVSTESSMLSVMLLLSKYRLRNVPVIKTGEPDIKNYVTQSAVVHGLEGCKGRDWFDHISALPISDLGLPFMSPNEVISIESEELILEAFKRMRDNNIGGLPVVEGLNKKIVGNISMRDIRYLLLQPEVFSNFRQLTVKSFATKIATAGEEYGLAIPAITCRPDSTLGSVINSLASRSVHRVYVAAGDENELYGVITLRDVISCFVSEPPNYFENCLGFSVKEMLNR

SEQ ID NO: 88602 - protein, 298 aa, Arabidopsis thaliana
  peptide (1)..(298): Ceres Seq. ID no. 12711143
MTGPVAAAGLAAAAVGAAVAGGVAAERGIGKDAPTAADKLGKDFYEVILQEEPFKSTTVRTILKSFRWAPFLPVSTESSMLSVMLLLSKYRLRNVPVIKTGEPDIKNYVTQSAVVHGLEGCKGRDWFDHISALPISDLGLPFMSPNEVISIESEELILEAFKRMRDNNIGGLPVVEGLNKKIVGNISMRDIRYLLLQPEVFSNFRQLTVKSFATKIATAGEEYGLAIPAITCRPDSTLGSVINSLASRSVHRVYVAAGDENELYGVITLRDVISCFVSEPPNYFENCLGFSVKEMLNR

SEQ ID NO: 88603 - DNA, 1812 bp, Arabidopsis thaliana
  misc_feature (1)..(1812): Ceres Seq. ID no. 12711144
  misc_feature (1)..(1812): Ortholog of  Ceres SEQ ID NO 15171212 as cited in SEQ ID NO 56899
  misc_feature (1)..(1812): Ortholog of  Ceres SEQ ID NO 12613725 as cited in SEQ ID NO 68196
atgaaatatatgtctttttctcaaagtcttgttttgttctttgccatattattacaggaagtggaagaagaggtctcaagatgggaaggctacgccgattggagaaacagagcagccgtgaaaggccgtcacggtggcatgctcgccgcctctttcgtcttagtggtggagatattagagaatctagcgtatttggcgaatgcgagtaatcttgtgctatacctaagagaatacatgcacatgtctccatcaaaatcggcaaatgacgtcaccaatttcatgggcacagcttttctcctagctctcctcggtggtttcctctccgacgctttcttctccacttttcaaatcttcctcatctcagcttccatcgagtttttgggattgatcatactcacaattcaagctcggacaccatccttaatgcctccatcgtgcgatagtcccacatgtgaagaagtgagtggttcgaaggcagcgatgctattcgtggggttgtaccttgtagctttgggtgtgggagggatcaaaggttcattagcatctcacggagcagaacagtttgatgagagtacacctaaaggtcggaaacaaaggtcaacgttctttaactacttcgtgttttgtcttgcttgtggagcactagttgctgtcacgtttgtagtttggttagaagacaacaaaggatgggaatggggattcggtgtttctaccattgctatcttcgtctctattctcatctttctctctggatcaagattttataggaacaagattccatgtggaagtcctctcaccacaatcttgaaggttcttcttgcggcttcggttaagtgctgctcgagtggaagttcaagcaatgcggttgcgagtatgtccgtgagtccctcaaatcattgcgtatcaaaggggaaaaaagaagttgaatcacaaggagaattggaaaagccacgtcaagaagaagctttgcctcctcgggcacaactaactaacagtttgaaagtattaaatggagctgcggatgaaaaacctgtccatagattgttagaatgcacagtccaacaagtggaagatgtgaagattgtcttgaaaatgcttccgatatttgcttgcactatcatgcttaactgttgcttagctcagctctctacattctccgtccaacaagctgcttccatgaacacaaagataggaagcctaaagatacctccagcttccttaccgatcttccccgtcgttttcataatgatcctcgcacctatctacgaccatctcattatcccattcgctagaaaagctaccaagaccgaaacaggagtcactcatctacaaagaatcggagtaggtttagttctttcgatattagcaatggcggttgcagctctagttgagattaaacgaaagggagtggctaaagactccggcttgcttgactcgaaagaaaccttacccgtgactttcctatggatcgcacttcagtatcttttcctagggtcagccgatctattcacactagctggactactagagtatttcttcacggaagcaccttcctcaatgagatctctcgcaacatcgctctcgtgggcttctttggctatggggtattacctaagctcagtgatcgtgtccatagtaaacagcatcacaggaagctcagggaacacaccttggctcagaggaaaaagcataaaccgttacaaactagactacttctattggctaatgtgtgttcttagtgcagctaacttcttgcactacctcttttgggcaatgcgttacaagtatagatcaactggttcaagaagctaa

SEQ ID NO: 88604 - protein, 603 aa, Arabidopsis thaliana
  peptide (1)..(603): Ceres Seq. ID no. 12711145
MKYMSFSQSLVLFFAILLQEVEEEVSRWEGYADWRNRAAVKGRHGGMLAASFVLVVEILENLAYLANASNLVLYLREYMHMSPSKSANDVTNFMGTAFLLALLGGFLSDAFFSTFQIFLISASIEFLGLIILTIQARTPSLMPPSCDSPTCEEVSGSKAAMLFVGLYLVALGVGGIKGSLASHGAEQFDESTPKGRKQRSTFFNYFVFCLACGALVAVTFVVWLEDNKGWEWGFGVSTIAIFVSILIFLSGSRFYRNKIPCGSPLTTILKVLLAASVKCCSSGSSSNAVASMSVSPSNHCVSKGKKEVESQGELEKPRQEEALPPRAQLTNSLKVLNGAADEKPVHRLLECTVQQVEDVKIVLKMLPIFACTIMLNCCLAQLSTFSVQQAASMNTKIGSLKIPPASLPIFPVVFIMILAPIYDHLIIPFARKATKTETGVTHLQRIGVGLVLSILAMAVAALVEIKRKGVAKDSGLLDSKETLPVTFLWIALQYLFLGSADLFTLAGLLEYFFTEAPSSMRSLATSLSWASLAMGYYLSSVIVSIVNSITGSSGNTPWLRGKSINRYKLDYFYWLMCVLSAANFLHYLFWAMRYKYRSTGSRS

SEQ ID NO: 88605 - protein, 600 aa, Arabidopsis thaliana
  peptide (1)..(600): Ceres Seq. ID no. 12711146
MSFSQSLVLFFAILLQEVEEEVSRWEGYADWRNRAAVKGRHGGMLAASFVLVVEILENLAYLANASNLVLYLREYMHMSPSKSANDVTNFMGTAFLLALLGGFLSDAFFSTFQIFLISASIEFLGLIILTIQARTPSLMPPSCDSPTCEEVSGSKAAMLFVGLYLVALGVGGIKGSLASHGAEQFDESTPKGRKQRSTFFNYFVFCLACGALVAVTFVVWLEDNKGWEWGFGVSTIAIFVSILIFLSGSRFYRNKIPCGSPLTTILKVLLAASVKCCSSGSSSNAVASMSVSPSNHCVSKGKKEVESQGELEKPRQEEALPPRAQLTNSLKVLNGAADEKPVHRLLECTVQQVEDVKIVLKMLPIFACTIMLNCCLAQLSTFSVQQAASMNTKIGSLKIPPASLPIFPVVFIMILAPIYDHLIIPFARKATKTETGVTHLQRIGVGLVLSILAMAVAALVEIKRKGVAKDSGLLDSKETLPVTFLWIALQYLFLGSADLFTLAGLLEYFFTEAPSSMRSLATSLSWASLAMGYYLSSVIVSIVNSITGSSGNTPWLRGKSINRYKLDYFYWLMCVLSAANFLHYLFWAMRYKYRSTGSRS

SEQ ID NO: 88606 - protein, 557 aa, Arabidopsis thaliana
  peptide (1)..(557): Ceres Seq. ID no. 12711147
MLAASFVLVVEILENLAYLANASNLVLYLREYMHMSPSKSANDVTNFMGTAFLLALLGGFLSDAFFSTFQIFLISASIEFLGLIILTIQARTPSLMPPSCDSPTCEEVSGSKAAMLFVGLYLVALGVGGIKGSLASHGAEQFDESTPKGRKQRSTFFNYFVFCLACGALVAVTFVVWLEDNKGWEWGFGVSTIAIFVSILIFLSGSRFYRNKIPCGSPLTTILKVLLAASVKCCSSGSSSNAVASMSVSPSNHCVSKGKKEVESQGELEKPRQEEALPPRAQLTNSLKVLNGAADEKPVHRLLECTVQQVEDVKIVLKMLPIFACTIMLNCCLAQLSTFSVQQAASMNTKIGSLKIPPASLPIFPVVFIMILAPIYDHLIIPFARKATKTETGVTHLQRIGVGLVLSILAMAVAALVEIKRKGVAKDSGLLDSKETLPVTFLWIALQYLFLGSADLFTLAGLLEYFFTEAPSSMRSLATSLSWASLAMGYYLSSVIVSIVNSITGSSGNTPWLRGKSINRYKLDYFYWLMCVLSAANFLHYLFWAMRYKYRSTGSRS

SEQ ID NO: 88607 - DNA, 1554 bp, Arabidopsis thaliana
  misc_feature (1)..(1554): Ceres Seq. ID no. 12711148
  misc_feature (1)..(1554): Ortholog of  Ceres SEQ ID NO 12613725 as cited in SEQ ID NO 68196
atggacaatgagaaagggacaagttcctcggatttaacgacgagacaaaggaagcctcttggttggaaagcgatgccttatatcatagggaatgaaacattggagaggcttgccacattcggtttgatggcgaatttcatggtgtatatggtaagagagtatcatatggaccaagttcaagctgtcactcttatcaacacttggtctgctctcaccaactttgctcctatcatcggagctttcatctccgactcctacaccggaaaatttaataccattgtcttcggttccatcgctgagttgttgtgtttggaacgacttttcttgttatcagttggaacaggtggaatccggtcatgcagtgttcctttcagtctcgatcagttcgatgattcgactgaagaaggaagagaaggaagtagaagcttctttagctggtactataccactcatacaatcgtccagttagtttcaatgacactagtgttgtacgtacagaacaacatcagttggggcattggattcgcaatcccgaccgttctcaatttttttgcgcttcttctgctttttgtgggtactcggtattatgtctttgtcaaacccgaaggaagtgtcttctctggagttttcaaggttcttgtggctgcttataagaaacgcaaggcacggtttacttctggaattgactaccatcaacccttactagagacagatttacaatcaaataaactcgtactcactgatcaattcagattcttgaacaaagctgtgatagtgatgaacaatgatgaagctggaaatgaggagtggagaacctgcacagtgagacagatagaggacatcaagtcaataatcagtattattccaatatttgcttcgagcattattggatttttggctatgaaccaacaacagacgtttacagtctcacaagcactaaaaatggacctccaatttccaggcacttcttacctaatccctcctgcttctataaccgtcatatcattattaaacataggtatatggcttcccttctatgaaaccgttttggtccgacacatcgaaaacattacaaaacaaaacggaggtatctcgttactacaaaaagtcggcattgggaatattttctccatctcgacgatgctcatatccggtattgtggagcgaaagagaagagatttatcgcttaatggagtaaaaatgtcggttttctggctaaccccgcaacaagtactaatgggattttatcaagtcttcacgattgttggtctcaccgagttcttcaacaaacaagttccaatcaacatgagaagcattgggaactcgttgctttacttaggtttgtctctagccagttatctaagcagtgccatggtgagcattgttcatagtgtgactgctcgtggaggacagagttggctaacggatgatattgacaaaagcaagttggattgtttctattactttattgccgctttaagcactcttaatttcatcttcttcttctggtgtgctcgaaggtatcgttacagaaactatagtaatgaacaataa

SEQ ID NO: 88608 - protein, 517 aa, Arabidopsis thaliana
  peptide (1)..(517): Ceres Seq. ID no. 12711149
MDNEKGTSSSDLTTRQRKPLGWKAMPYIIGNETLERLATFGLMANFMVYMVREYHMDQVQAVTLINTWSALTNFAPIIGAFISDSYTGKFNTIVFGSIAELLCLERLFLLSVGTGGIRSCSVPFSLDQFDDSTEEGREGSRSFFSWYYTTHTIVQLVSMTLVLYVQNNISWGIGFAIPTVLNFFALLLLFVGTRYYVFVKPEGSVFSGVFKVLVAAYKKRKARFTSGIDYHQPLLETDLQSNKLVLTDQFRFLNKAVIVMNNDEAGNEEWRTCTVRQIEDIKSIISIIPIFASSIIGFLAMNQQQTFTVSQALKMDLQFPGTSYLIPPASITVISLLNIGIWLPFYETVLVRHIENITKQNGGISLLQKVGIGNIFSISTMLISGIVERKRRDLSLNGVKMSVFWLTPQQVLMGFYQVFTIVGLTEFFNKQVPINMRSIGNSLLYLGLSLASYLSSAMVSIVHSVTARGGQSWLTDDIDKSKLDCFYYFIAALSTLNFIFFFWCARRYRYRNYSNEQ

SEQ ID NO: 88609 - protein, 493 aa, Arabidopsis thaliana
  peptide (1)..(493): Ceres Seq. ID no. 12711150
MPYIIGNETLERLATFGLMANFMVYMVREYHMDQVQAVTLINTWSALTNFAPIIGAFISDSYTGKFNTIVFGSIAELLCLERLFLLSVGTGGIRSCSVPFSLDQFDDSTEEGREGSRSFFSWYYTTHTIVQLVSMTLVLYVQNNISWGIGFAIPTVLNFFALLLLFVGTRYYVFVKPEGSVFSGVFKVLVAAYKKRKARFTSGIDYHQPLLETDLQSNKLVLTDQFRFLNKAVIVMNNDEAGNEEWRTCTVRQIEDIKSIISIIPIFASSIIGFLAMNQQQTFTVSQALKMDLQFPGTSYLIPPASITVISLLNIGIWLPFYETVLVRHIENITKQNGGISLLQKVGIGNIFSISTMLISGIVERKRRDLSLNGVKMSVFWLTPQQVLMGFYQVFTIVGLTEFFNKQVPINMRSIGNSLLYLGLSLASYLSSAMVSIVHSVTARGGQSWLTDDIDKSKLDCFYYFIAALSTLNFIFFFWCARRYRYRNYSNEQ

SEQ ID NO: 88610 - protein, 475 aa, Arabidopsis thaliana
  peptide (1)..(475): Ceres Seq. ID no. 12711151
MANFMVYMVREYHMDQVQAVTLINTWSALTNFAPIIGAFISDSYTGKFNTIVFGSIAELLCLERLFLLSVGTGGIRSCSVPFSLDQFDDSTEEGREGSRSFFSWYYTTHTIVQLVSMTLVLYVQNNISWGIGFAIPTVLNFFALLLLFVGTRYYVFVKPEGSVFSGVFKVLVAAYKKRKARFTSGIDYHQPLLETDLQSNKLVLTDQFRFLNKAVIVMNNDEAGNEEWRTCTVRQIEDIKSIISIIPIFASSIIGFLAMNQQQTFTVSQALKMDLQFPGTSYLIPPASITVISLLNIGIWLPFYETVLVRHIENITKQNGGISLLQKVGIGNIFSISTMLISGIVERKRRDLSLNGVKMSVFWLTPQQVLMGFYQVFTIVGLTEFFNKQVPINMRSIGNSLLYLGLSLASYLSSAMVSIVHSVTARGGQSWLTDDIDKSKLDCFYYFIAALSTLNFIFFFWCARRYRYRNYSNEQ

SEQ ID NO: 88611 - DNA, 1911 bp, Arabidopsis thaliana
  misc_feature (1)..(1911): Ceres Seq. ID no. 12711160
  misc_feature (1)..(1911): Ortholog of  Ceres SEQ ID NO 13654989 as cited in SEQ ID NO 63117
  misc_feature (1)..(1911): Ortholog of  Ceres SEQ ID NO 13584744 as cited in SEQ ID NO 69137
atgtctcaaccaccgtggagatgtttctctctactcatctttgttctcaccatttttagtactaaaccttcctctgcatctacttcatgttcttcttcatttcattgcccaccgttcaactcctcaccaccgtaccctttctcagcttctccgggatgtggccacccaaacttccagatccaatgctcatcttcacgcgccaccatcacaatcaaaaacctcactttctctatcctccattactcatcaatctcctcttctctaaccctctctcccattacaaacactaaccggaacacaaacaactgttcttctctccggttctcctcctcaccaaaccggttcatcgacttaaccggttcacctttcagagtctctgactcttcttgctctcgtctctctcttctccgtccttgctctccttttactctccccaactgttctcgttgtccttgggactgtaaactcctaaagaatccgggtcggatcctccacggttgtgaatcaacccacgggtcgttatctgaacaaggctgtcaaggagatcttcttggttttcttcaagatttcttcactagatttggatttgaagttgaatgggacgaatctcaagatccatacttcattaaatgcagagattgtcaaatcaagaatggtgtttgcgggtttaattcgacccacccgaatcaagatttcatctgtttccacaaatcaagatccgaattagtaactcaaagagataacaacaaaagagtcaatcatattgctgtgttgtctcttatcttcgctttgacttgtctcttacttgttttctccgtcgccgtagcgattttccgatcacgaagagctagctttttatcctcaatcaatgaagaagacccggctgctctgttcctccgtcaccaccgctccgccgctcttctcccaccagtcttcaccttcgaagaactcgaatccgccacaaacaaattcgaccccaagcgaaaaatcggagacggtggtttcggttctgtttacttaggccaactcagcgacggacaactcctcgccgttaaattcctccaccatcaccacggcgcaaccgccgcagccaccgagcattgcaaagctttctcaatgaagtctttttgcaatgagattttgatcctttcttcaatcaaccatcctaacctcgtcaagctccatggctattgctctgacccgagaggacttcttcttgttcacgattacgtcactaacggtactctcgctgatcatcttcacggcaggggaccgaagatgacgtggcgtgtaaggttagatattgcgttgcaaacggctttagctatggagtatcttcacttcgatattgttcctccggttgttcatagagatataacttcgtcgaatatctttgtggagaaggatatgaaaatcaaagtcggagactttggtctctctaggctcttggtgttttcagagacgactgtgaattcagctacttcgtctgattacgtttgtaccggaccacaaggtacgcccggttatttagacccggattatcaccggtcttttcggttaacggagaaaagtgacgtgtatagctacggtgtcgttttgatggagttgattacgggtatgaaagcggttgatcaacgacgtgagaagagggacatggctttagcggatcttgttgtatccaagattcaaatgggtcttttggatcaggtgattgaccccttgcttgcgttagacggcgatgatgtggctgcggtgagtgacggattcggtgttgcggcggttgctgagctggcgttccggtgtgttgcgacggataaggatgatcgtccggatgctaaagagattgttcaggagttgaggaggattaggagccatacacgtgtagcggatgatgacgtggcgaaaaattga

SEQ ID NO: 88612 - protein, 636 aa, Arabidopsis thaliana
  peptide (1)..(636): Ceres Seq. ID no. 12711161
MSQPPWRCFSLLIFVLTIFSTKPSSASTSCSSSFHCPPFNSSPPYPFSASPGCGHPNFQIQCSSSRATITIKNLTFSILHYSSISSSLTLSPITNTNRNTNNCSSLRFSSSPNRFIDLTGSPFRVSDSSCSRLSLLRPCSPFTLPNCSRCPWDCKLLKNPGRILHGCESTHGSLSEQGCQGDLLGFLQDFFTRFGFEVEWDESQDPYFIKCRDCQIKNGVCGFNSTHPNQDFICFHKSRSELVTQRDNNKRVNHIAVLSLIFALTCLLLVFSVAVAIFRSRRASFLSSINEEDPAALFLRHHRSAALLPPVFTFEELESATNKFDPKRKIGDGGFGSVYLGQLSDGQLLAVKFLHHHHGATAAATEHCKAFSMKSFCNEILILSSINHPNLVKLHGYCSDPRGLLLVHDYVTNGTLADHLHGRGPKMTWRVRLDIALQTALAMEYLHFDIVPPVVHRDITSSNIFVEKDMKIKVGDFGLSRLLVFSETTVNSATSSDYVCTGPQGTPGYLDPDYHRSFRLTEKSDVYSYGVVLMELITGMKAVDQRREKRDMALADLVVSKIQMGLLDQVIDPLLALDGDDVAAVSDGFGVAAVAELAFRCVATDKDDRPDAKEIVQELRRIRSHTRVADDDVAKN

SEQ ID NO: 88613 - DNA, 1302 bp, Arabidopsis thaliana
  misc_feature (1)..(1302): Ceres Seq. ID no. 12711162
  misc_feature (1)..(1302): Ortholog of  Ceres SEQ ID NO 12611884 as cited in SEQ ID NO 51018
  misc_feature (1)..(1302): Ortholog of  Ceres SEQ ID NO 12609093 as cited in SEQ ID NO 52008
  misc_feature (1)..(1302): Ortholog of  Ceres SEQ ID NO 12609839 as cited in SEQ ID NO 52022
  misc_feature (1)..(1302): Ortholog of  Ceres SEQ ID NO 13638885 as cited in SEQ ID NO 55803
  misc_feature (1)..(1302): Ortholog of  Ceres SEQ ID NO 14301452 as cited in SEQ ID NO 60984
  misc_feature (1)..(1302): Ortholog of  Ceres SEQ ID NO 12587429 as cited in SEQ ID NO 63113
  misc_feature (1)..(1302): Ortholog of  Ceres SEQ ID NO 12615635 as cited in SEQ ID NO 63133
  misc_feature (1)..(1302): Ortholog of  Ceres SEQ ID NO 12586351 as cited in SEQ ID NO 64028
  misc_feature (1)..(1302): Ortholog of  Ceres SEQ ID NO 15173174 as cited in SEQ ID NO 64046
  misc_feature (1)..(1302): Ortholog of  Ceres SEQ ID NO 13654441 as cited in SEQ ID NO 67814
  misc_feature (1)..(1302): Ortholog of  Ceres SEQ ID NO 12635608 as cited in SEQ ID NO 0
  misc_feature (1)..(1302): Ortholog of  Ceres SEQ ID NO 14309027 as cited in SEQ ID NO 0
atgggtctaatgaatcggtcaaagaatgatgagtacgtaaagctactaggagcatggcctagcccttttgtgctgagaactcggatcgcacttaacctaaagaacgtagcatacgagtatctagaagaagaagatactttgagttcggagagcgttttaaactataaccccgtccataaacagatccctatcctcattcatggcaacaaaccaatccgtgaatctctcaacatcgtcatgtatgttgatgagacttggctctccggtcctcccatccttccctctgatccatttgatcgcgctgtggctcgattttgggacgtctatatcgatgaacactgtttcacatcaatcaatggagtggcagtagcaaaaggtgaggagaacataaatgcggcgatagctaagctagagcagtgtatggctctattggaagaaacgtttcaagaatgcagcaaaggaagaggcttctttggaggagaaaacatcgggttcatcgacattggtttcggctcgatgttgggtcctcttacggttcttgagaaatttaccggcgtcaagttcatacatcctgaaaacacaccaggtcttttccattgggctgacagattctacgcccatgaagcggtcaagcctgtcatgcccgatatcgaaaaactggtccagttcgctaggctcaaggctcaagtggctctacacctcaagtcagtagagcacgagtatgtcgaagaaaccgatgttctgaaaggaaagagcgatcttcttattaaatccaaccctatacacaagaaagtccctgtcctcatccatggtgatgtatcaatctgtgaatctctcaacatcgtccaatacgtcgatgaatcttggccgtctgatctttccatcctcccaacacttccctcggaacgtgcctttgcccgtttttgggctcacttcgttgacggaaagttgtttgaatcgatcgatgcggtggcgggagcaaaagacgacgccgccaggatgacattggcggggaatctgatggagaatctagcggcacttgaagaggcgtttcaaaagagtagcaaaggcggggacttttttggaggggggaacattgggtttgtcgatataactgttggggccatagtaggtccaatctctgtcattgaagctttttcaggtgttaagtttttgcgtccagacacaacaccgggcctgattcagtgggctgagaaatttagggcccatgaagctgtaaaaccttacatgcctaccgttgccgagttcatcgagtttgccaaaaagaaattcagtgtttag

SEQ ID NO: 88614 - protein, 433 aa, Arabidopsis thaliana
  peptide (1)..(433): Ceres Seq. ID no. 12711163
MGLMNRSKNDEYVKLLGAWPSPFVLRTRIALNLKNVAYEYLEEEDTLSSESVLNYNPVHKQIPILIHGNKPIRESLNIVMYVDETWLSGPPILPSDPFDRAVARFWDVYIDEHCFTSINGVAVAKGEENINAAIAKLEQCMALLEETFQECSKGRGFFGGENIGFIDIGFGSMLGPLTVLEKFTGVKFIHPENTPGLFHWADRFYAHEAVKPVMPDIEKLVQFARLKAQVALHLKSVEHEYVEETDVLKGKSDLLIKSNPIHKKVPVLIHGDVSICESLNIVQYVDESWPSDLSILPTLPSERAFARFWAHFVDGKLFESIDAVAGAKDDAARMTLAGNLMENLAALEEAFQKSSKGGDFFGGGNIGFVDITVGAIVGPISVIEAFSGVKFLRPDTTPGLIQWAEKFRAHEAVKPYMPTVAEFIEFAKKKFSV

SEQ ID NO: 88615 - protein, 430 aa, Arabidopsis thaliana
  peptide (1)..(430): Ceres Seq. ID no. 12711164
MNRSKNDEYVKLLGAWPSPFVLRTRIALNLKNVAYEYLEEEDTLSSESVLNYNPVHKQIPILIHGNKPIRESLNIVMYVDETWLSGPPILPSDPFDRAVARFWDVYIDEHCFTSINGVAVAKGEENINAAIAKLEQCMALLEETFQECSKGRGFFGGENIGFIDIGFGSMLGPLTVLEKFTGVKFIHPENTPGLFHWADRFYAHEAVKPVMPDIEKLVQFARLKAQVALHLKSVEHEYVEETDVLKGKSDLLIKSNPIHKKVPVLIHGDVSICESLNIVQYVDESWPSDLSILPTLPSERAFARFWAHFVDGKLFESIDAVAGAKDDAARMTLAGNLMENLAALEEAFQKSSKGGDFFGGGNIGFVDITVGAIVGPISVIEAFSGVKFLRPDTTPGLIQWAEKFRAHEAVKPYMPTVAEFIEFAKKKFSV

SEQ ID NO: 88616 - protein, 354 aa, Arabidopsis thaliana
  peptide (1)..(354): Ceres Seq. ID no. 12711165
MYVDETWLSGPPILPSDPFDRAVARFWDVYIDEHCFTSINGVAVAKGEENINAAIAKLEQCMALLEETFQECSKGRGFFGGENIGFIDIGFGSMLGPLTVLEKFTGVKFIHPENTPGLFHWADRFYAHEAVKPVMPDIEKLVQFARLKAQVALHLKSVEHEYVEETDVLKGKSDLLIKSNPIHKKVPVLIHGDVSICESLNIVQYVDESWPSDLSILPTLPSERAFARFWAHFVDGKLFESIDAVAGAKDDAARMTLAGNLMENLAALEEAFQKSSKGGDFFGGGNIGFVDITVGAIVGPISVIEAFSGVKFLRPDTTPGLIQWAEKFRAHEAVKPYMPTVAEFIEFAKKKFSV

SEQ ID NO: 88617 - DNA, 2358 bp, Arabidopsis thaliana
  misc_feature (1)..(2358): Ceres Seq. ID no. 12711168
  misc_feature (1)..(2358): Ortholog of  Ceres SEQ ID NO 15226209 as cited in SEQ ID NO 0
atgtcgagagacacatccgaggagatcgagattttcatttttgaagagcaattcttagagaagtatgtccaacttcattctgagcctcaatatcggctccacaattcaaaagcagctgagtcatacaactctagttacttaaacaacgcggagaggggtttcaaagcagtgactgcgagcttccaaagcggctctatgttcgacaagatgaacaacatatcgcagacgttcaggctcaaaccttgcgacgtggagagaaacaaaaacattagaaaccagttaaggacaacaaggagagggagttgtgagaaatacaaaggcgggatccaaacgtggagacagaagaaactgatgataaacaatgagatggatttgtcagatgcagtgattgtaaaatctggtagattgaaatcagtagtgtggaatgatttcgatagagttagaaaaggtgagacatacattgcaatctgcaggcattgtaagaagcgacttagcggctcaagcgcgagcgggacttcgcatttgaggaaccatttgattagatgtaggaggagaactaatggtaacaacaacggtgttgctcagtatttcgttaaggggaagaagaaagagttagctaatgagcggataaaggatgaagaagtgcttagtgtagtgaatgttagatatgaacatgagaaagaagaacatgaagatgttaatgttgtgagtatgggtttggatcagaggcggtgtcgattcgatttagccaggatgattatcttacatggttatccgttgagtatggttgaagatgttggattcagaatgtttattggaaatttacagcctttgtttgagcttgttgcttttgaaagagttgaatctgattgtatggagatttatgcgaaagagaagcataagattttcgaagcgttggataagttacctgggaagattagtattagtgttgatgtgtggagtggttcgggtgattctgatgaattcttgtgtttggcagcgcattatattgatgaaggatgggaattgaaaaagagagttttgaacttctttatggttgatccatctcatagtggtgagatgcttgctgaagttataatgacgtgtttgatggagtgggatattgaccggaagttgttttctatggcgtcgagtcatgctcctccgtttagtgagaacgtagctagtaaaatcagagaccggttatcgcagaataagttcctttactgttacggccaattgtttgatgtgagctgtggagttaatgtcattaacgagatggttcaagattccctggaagcttgttgtgacacaataaacattattcgagagagtattagatatgttaaaagctcagaatctattcaagatagattcaaccagtggatagttgaaacgggagctgtaagtgaaaggaacctatgcatcgatgacccaatgagatgggactcaacatgcaccatgctggagaatgctttagagcaaaagagcgcgttttcgctcatgaatgaacatgatcctgattccgtgttatgtccatctgatttggaatgggagagattaggaacaattgttgagttcttgaaagtctttgttgaagtgataaatgcattcacaaagagcagttgtttacccgccaatatgtacttcccagaggtatgcgacatacacctccggttaattgagtggagcaagaacccggatgatttcattagctctctagttgtaaacatgagaaagaaatttgacgatttctgggataaaaactacctggttctagccatcgctaccatattagacccgcggttcaaaatgaagctggttgaatactattaccctctgttttatggtactagtgcttcagagctcattgaagatatttctgagtgcatcaaactgctgtacgatgagcattctgtaggatcgctattagcgtcgtcaaatcaagctcttgactggcagaatcatcatcatcggtcaaacggtgttgcccatgggaaagagcctgacgatagactcacagaattcgataggtacattaacgaaacaactactacaccgggtcaagactctaaatcagatctagaaaagtatctagaagagccactttttccccggaattcagatttcgacatcctgaactggtggaaagttcacacacctaagtacccaattctctccatgatggcacgtaacgtgttagcagttccaatgttgaatgtatcatcagaagaagacgcctttgaaacttgtcaaaggagacgggttagtgaaacatggcgttcgcttagaccgagtaccgtgcaagccttgatgtgtgcacaagattggatccaaagcgaactagaaagctcttga

SEQ ID NO: 88618 - protein, 785 aa, Arabidopsis thaliana
  peptide (1)..(785): Ceres Seq. ID no. 12711169
MSRDTSEEIEIFIFEEQFLEKYVQLHSEPQYRLHNSKAAESYNSSYLNNAERGFKAVTASFQSGSMFDKMNNISQTFRLKPCDVERNKNIRNQLRTTRRGSCEKYKGGIQTWRQKKLMINNEMDLSDAVIVKSGRLKSVVWNDFDRVRKGETYIAICRHCKKRLSGSSASGTSHLRNHLIRCRRRTNGNNNGVAQYFVKGKKKELANERIKDEEVLSVVNVRYEHEKEEHEDVNVVSMGLDQRRCRFDLARMIILHGYPLSMVEDVGFRMFIGNLQPLFELVAFERVESDCMEIYAKEKHKIFEALDKLPGKISISVDVWSGSGDSDEFLCLAAHYIDEGWELKKRVLNFFMVDPSHSGEMLAEVIMTCLMEWDIDRKLFSMASSHAPPFSENVASKIRDRLSQNKFLYCYGQLFDVSCGVNVINEMVQDSLEACCDTINIIRESIRYVKSSESIQDRFNQWIVETGAVSERNLCIDDPMRWDSTCTMLENALEQKSAFSLMNEHDPDSVLCPSDLEWERLGTIVEFLKVFVEVINAFTKSSCLPANMYFPEVCDIHLRLIEWSKNPDDFISSLVVNMRKKFDDFWDKNYLVLAIATILDPRFKMKLVEYYYPLFYGTSASELIEDISECIKLLYDEHSVGSLLASSNQALDWQNHHHRSNGVAHGKEPDDRLTEFDRYINETTTTPGQDSKSDLEKYLEEPLFPRNSDFDILNWWKVHTPKYPILSMMARNVLAVPMLNVSSEEDAFETCQRRRVSETWRSLRPSTVQALMCAQDWIQSELESS

SEQ ID NO: 88619 - protein, 720 aa, Arabidopsis thaliana
  peptide (1)..(720): Ceres Seq. ID no. 12711170
MFDKMNNISQTFRLKPCDVERNKNIRNQLRTTRRGSCEKYKGGIQTWRQKKLMINNEMDLSDAVIVKSGRLKSVVWNDFDRVRKGETYIAICRHCKKRLSGSSASGTSHLRNHLIRCRRRTNGNNNGVAQYFVKGKKKELANERIKDEEVLSVVNVRYEHEKEEHEDVNVVSMGLDQRRCRFDLARMIILHGYPLSMVEDVGFRMFIGNLQPLFELVAFERVESDCMEIYAKEKHKIFEALDKLPGKISISVDVWSGSGDSDEFLCLAAHYIDEGWELKKRVLNFFMVDPSHSGEMLAEVIMTCLMEWDIDRKLFSMASSHAPPFSENVASKIRDRLSQNKFLYCYGQLFDVSCGVNVINEMVQDSLEACCDTINIIRESIRYVKSSESIQDRFNQWIVETGAVSERNLCIDDPMRWDSTCTMLENALEQKSAFSLMNEHDPDSVLCPSDLEWERLGTIVEFLKVFVEVINAFTKSSCLPANMYFPEVCDIHLRLIEWSKNPDDFISSLVVNMRKKFDDFWDKNYLVLAIATILDPRFKMKLVEYYYPLFYGTSASELIEDISECIKLLYDEHSVGSLLASSNQALDWQNHHHRSNGVAHGKEPDDRLTEFDRYINETTTTPGQDSKSDLEKYLEEPLFPRNSDFDILNWWKVHTPKYPILSMMARNVLAVPMLNVSSEEDAFETCQRRRVSETWRSLRPSTVQALMCAQDWIQSELESS

SEQ ID NO: 88620 - protein, 716 aa, Arabidopsis thaliana
  peptide (1)..(716): Ceres Seq. ID no. 12711171
MNNISQTFRLKPCDVERNKNIRNQLRTTRRGSCEKYKGGIQTWRQKKLMINNEMDLSDAVIVKSGRLKSVVWNDFDRVRKGETYIAICRHCKKRLSGSSASGTSHLRNHLIRCRRRTNGNNNGVAQYFVKGKKKELANERIKDEEVLSVVNVRYEHEKEEHEDVNVVSMGLDQRRCRFDLARMIILHGYPLSMVEDVGFRMFIGNLQPLFELVAFERVESDCMEIYAKEKHKIFEALDKLPGKISISVDVWSGSGDSDEFLCLAAHYIDEGWELKKRVLNFFMVDPSHSGEMLAEVIMTCLMEWDIDRKLFSMASSHAPPFSENVASKIRDRLSQNKFLYCYGQLFDVSCGVNVINEMVQDSLEACCDTINIIRESIRYVKSSESIQDRFNQWIVETGAVSERNLCIDDPMRWDSTCTMLENALEQKSAFSLMNEHDPDSVLCPSDLEWERLGTIVEFLKVFVEVINAFTKSSCLPANMYFPEVCDIHLRLIEWSKNPDDFISSLVVNMRKKFDDFWDKNYLVLAIATILDPRFKMKLVEYYYPLFYGTSASELIEDISECIKLLYDEHSVGSLLASSNQALDWQNHHHRSNGVAHGKEPDDRLTEFDRYINETTTTPGQDSKSDLEKYLEEPLFPRNSDFDILNWWKVHTPKYPILSMMARNVLAVPMLNVSSEEDAFETCQRRRVSETWRSLRPSTVQALMCAQDWIQSELESS

SEQ ID NO: 88621 - DNA, 3798 bp, Arabidopsis thaliana
  misc_feature (1)..(3798): Ceres Seq. ID no. 12711186
  misc_feature (1)..(3798): Ortholog of  Ceres SEQ ID NO 13600485 as cited in SEQ ID NO 1221
atggttggaggaagtagtgcacagaagctaactacaaatgatgcacttgcatatcttaaagctgtcaaggataaatttcaagataaacgtgacaaatacgatgagtttcttgaggttatgaaagattttaaagctcagagagttgatactactggtgttatcttaagggtgaaagaactttttaaagggaacagagaattgattttggggtttaatactttcttaccaaagggtttcgagataactctccgacccgaggatgaccaacccgctgcaccaaagaagcctgttgagtttgaggaagctattagttttgttaacaagattaagacaaggtttcaaggcgatgatcgtgtatacaaatcgtttttagacattttgaacatgtatagaaaggaaaacaagtctattactgaggtctaccatgaggtggctatcctttttcgggaccatcacgatttgcttggagagttcactcactttctccctgatacttcagcaactgcatctactaatgattctgtaaaagttccagtacgtgatagaggcattaagtctcttcccaccatgcgtcaaatagatcttgataagaaggaccggattattacttcgcatcctaaccgtgccctcaaaaccgaaaatatggacgtagaccatgagaggtctttgttgaaagatagtaaagaagaagtgagacgcattgacaaaaagaatgatttcatggatgatagagacaggaaagattacagaggtcttgaccacgatagccataaagaacatttcttcaacagcaaaaagaaattgatacgtaaggatgatgattctgctgaaatgtcagatcaagccagggaaggagacaagttttctggagccattccgagttcatctacttatgatgaaaaaggtcatagccaagaacttgcttttgttgatagagtgaaggcaaagcttgataccgcggataaccaagagttcttacgatgtcttaatctctattcaaaggagataatcagccaaccagaattgcagtctttggtgagtgatttaattggtgtatatccagaccttatggacgccttcaaagtctttttggctcagtgtgacaagaatgatggattactctctggtatcgtgtctaagaaatccttgtggagtgaaggcaaatgtcctcaacctactaagtcacttgacaaagatacagaccgagaacgtgagaagattgaaaggtatagagaaagagaccgtgagaaggagaggcttgaaaaggtggcagcgagtcagaaatgggctaaacctatcagtgaactagatctctcgaactgtgaacagtgcacacctagttatcggagacttccaaagaattatccaattcctatagcaagccaaaaaatggagattggtagccaagtgcttaatgatcattgggtctctgtcacttcaggaagtgaagactattcattcaaacacatgcgcaagaaccaatacgaagagagcctattcaaatgtgaagatgacaggttcgagctagacatgttattagagtctgtgatctcggctactaatcgagttgaagagttattggcaaagattaacagtaatgaattgaaaaccgatactcccatctgtatcgaggatcacctcacagctctaaacctaagatgcatagaacggttatacagtgaccatgggctcgatgtgttggatttgttaaagaagaatgcatatcttgctttaccggtaatactaacccgtttgaaacaaaagcaagaagaatgggcaaggtgtcgtactgagtttaacaaagtctgggctgacatatatacaaagaactaccacaggtcgcttgatcatcgcagtttttatttcaaacagcaggattcaaagaatctgagcacaaaagcattgctggcagagataaaagagatctctgaaaagaagcgaggcgaagatgatgcacttcttgctcttgcggctggaaatagacgaactatttcttccaatatgagttttgattatccggatcctgatcttcacgaagatctgtatcagctgatcaagtattcatgtggagaaatgtgttcaacagaacagttagataaggtaatgaaggtatggacagaatttttggaaccaatatttggtgttccttctcgccctcaaggtgccgaagaccgagaagatgctgtcaagtctacaaaccatgaccgagaagaccaagaagatgctgtcagtcctcaaaatggagctagtattgccaactctatgcggtcaaatggccctcgaaaagtcaatgaaagtaatcaagtgcggcaagctagtgagttggataaagatgttacttctagtaagacctcagatgccttgttatcatgtgacaacactcagaatgataaaatgccgaagaatctgaccacacctgacgaaagagccgaaaccaaacaaattggcgacaaccctgtaattccaaatgggacagtagcagaatggttcgctggggaagccaaagtcgaaagagaggagggtgaactttctccaacaggagattttgaagaagataattatgcagttcatggagagaatgacatggaggctctcagcaaaagtaaggagaatgatgcaactgcagatgatgcaagtgctccaagatcatcagatggtagcggaaacacatctcacaacggtgatgtttctggaactgactctggtgatggtgaagattgttatcgcgaagatgatatagaccataataaggtagaaagtgaaggtgaggctgaagaaggtatgtctgatggccatgatgatactgaaggagatatgcctgtgttgtccatctcagtaaaaaacctgctacatgtgaaacctcttgcaaagtatgtccctccagctttgtacgataaggacaacgatgattctcggaagaactcacaagtcttttatgggaatgattctttttatgttctattcaggcttcatcagattttgtatgacagaatattatcagcaaaaatcaattcatcatctccagatagaaagtggaagacctcaaatccaacaaaccccgctgattcgtacgccagaatcatggatgctctctacaatttgctcgatggcacatccgataattcaaagttcgaagatgattgccgagcaattatcgggacccagtcatatgttctcttcacattagacaaactgatctataagctcatcaagcatctccaagcagtagcagctgatgagatggacaacaaattacaacagctttatgcttatgagaaatccagaaagcctgagaagtttctggatgctgtttattacgaaaatgctcttgtgcttcttcccgatgaggatatataccgcattgaatgtgaacaatcgacaccaagcaaactctctattcagcttctggactatggacatgataagcctgatgtgacatccatatccatggacccaacttttgcagcttacctccacaatgtattcctttcttatcaacctaatgcgaaagagaatcctcgaatctatttgaaacggaataagcgtaaaaatggtggtgacgatgaactctgcaccacggatgaagttaagattattaatggtttggaatgtaagataacctgcagttcttcaaaggtctcctatgtattagacaccgaggatgtgttgcatcgtgctaagaggaggaaacttttaaaccaaagcggtttacccctcgcacatgattctgtttgcagtggttctttaattaggcaaaggagaacacaaagatatcaaaaacttctcaccggtcaatga

SEQ ID NO: 88622 - protein, 1265 aa, Arabidopsis thaliana
  peptide (1)..(1265): Ceres Seq. ID no. 12711187
MVGGSSAQKLTTNDALAYLKAVKDKFQDKRDKYDEFLEVMKDFKAQRVDTTGVILRVKELFKGNRELILGFNTFLPKGFEITLRPEDDQPAAPKKPVEFEEAISFVNKIKTRFQGDDRVYKSFLDILNMYRKENKSITEVYHEVAILFRDHHDLLGEFTHFLPDTSATASTNDSVKVPVRDRGIKSLPTMRQIDLDKKDRIITSHPNRALKTENMDVDHERSLLKDSKEEVRRIDKKNDFMDDRDRKDYRGLDHDSHKEHFFNSKKKLIRKDDDSAEMSDQAREGDKFSGAIPSSSTYDEKGHSQELAFVDRVKAKLDTADNQEFLRCLNLYSKEIISQPELQSLVSDLIGVYPDLMDAFKVFLAQCDKNDGLLSGIVSKKSLWSEGKCPQPTKSLDKDTDREREKIERYRERDREKERLEKVAASQKWAKPISELDLSNCEQCTPSYRRLPKNYPIPIASQKMEIGSQVLNDHWVSVTSGSEDYSFKHMRKNQYEESLFKCEDDRFELDMLLESVISATNRVEELLAKINSNELKTDTPICIEDHLTALNLRCIERLYSDHGLDVLDLLKKNAYLALPVILTRLKQKQEEWARCRTEFNKVWADIYTKNYHRSLDHRSFYFKQQDSKNLSTKALLAEIKEISEKKRGEDDALLALAAGNRRTISSNMSFDYPDPDLHEDLYQLIKYSCGEMCSTEQLDKVMKVWTEFLEPIFGVPSRPQGAEDREDAVKSTNHDREDQEDAVSPQNGASIANSMRSNGPRKVNESNQVRQASELDKDVTSSKTSDALLSCDNTQNDKMPKNLTTPDERAETKQIGDNPVIPNGTVAEWFAGEAKVEREEGELSPTGDFEEDNYAVHGENDMEALSKSKENDATADDASAPRSSDGSGNTSHNGDVSGTDSGDGEDCYREDDIDHNKVESEGEAEEGMSDGHDDTEGDMPVLSISVKNLLHVKPLAKYVPPALYDKDNDDSRKNSQVFYGNDSFYVLFRLHQILYDRILSAKINSSSPDRKWKTSNPTNPADSYARIMDALYNLLDGTSDNSKFEDDCRAIIGTQSYVLFTLDKLIYKLIKHLQAVAADEMDNKLQQLYAYEKSRKPEKFLDAVYYENALVLLPDEDIYRIECEQSTPSKLSIQLLDYGHDKPDVTSISMDPTFAAYLHNVFLSYQPNAKENPRIYLKRNKRKNGGDDELCTTDEVKIINGLECKITCSSSKVSYVLDTEDVLHRAKRRKLLNQSGLPLAHDSVCSGSLIRQRRTQRYQKLLTGQ

SEQ ID NO: 88623 - protein, 1226 aa, Arabidopsis thaliana
  peptide (1)..(1226): Ceres Seq. ID no. 12711188
MKDFKAQRVDTTGVILRVKELFKGNRELILGFNTFLPKGFEITLRPEDDQPAAPKKPVEFEEAISFVNKIKTRFQGDDRVYKSFLDILNMYRKENKSITEVYHEVAILFRDHHDLLGEFTHFLPDTSATASTNDSVKVPVRDRGIKSLPTMRQIDLDKKDRIITSHPNRALKTENMDVDHERSLLKDSKEEVRRIDKKNDFMDDRDRKDYRGLDHDSHKEHFFNSKKKLIRKDDDSAEMSDQAREGDKFSGAIPSSSTYDEKGHSQELAFVDRVKAKLDTADNQEFLRCLNLYSKEIISQPELQSLVSDLIGVYPDLMDAFKVFLAQCDKNDGLLSGIVSKKSLWSEGKCPQPTKSLDKDTDREREKIERYRERDREKERLEKVAASQKWAKPISELDLSNCEQCTPSYRRLPKNYPIPIASQKMEIGSQVLNDHWVSVTSGSEDYSFKHMRKNQYEESLFKCEDDRFELDMLLESVISATNRVEELLAKINSNELKTDTPICIEDHLTALNLRCIERLYSDHGLDVLDLLKKNAYLALPVILTRLKQKQEEWARCRTEFNKVWADIYTKNYHRSLDHRSFYFKQQDSKNLSTKALLAEIKEISEKKRGEDDALLALAAGNRRTISSNMSFDYPDPDLHEDLYQLIKYSCGEMCSTEQLDKVMKVWTEFLEPIFGVPSRPQGAEDREDAVKSTNHDREDQEDAVSPQNGASIANSMRSNGPRKVNESNQVRQASELDKDVTSSKTSDALLSCDNTQNDKMPKNLTTPDERAETKQIGDNPVIPNGTVAEWFAGEAKVEREEGELSPTGDFEEDNYAVHGENDMEALSKSKENDATADDASAPRSSDGSGNTSHNGDVSGTDSGDGEDCYREDDIDHNKVESEGEAEEGMSDGHDDTEGDMPVLSISVKNLLHVKPLAKYVPPALYDKDNDDSRKNSQVFYGNDSFYVLFRLHQILYDRILSAKINSSSPDRKWKTSNPTNPADSYARIMDALYNLLDGTSDNSKFEDDCRAIIGTQSYVLFTLDKLIYKLIKHLQAVAADEMDNKLQQLYAYEKSRKPEKFLDAVYYENALVLLPDEDIYRIECEQSTPSKLSIQLLDYGHDKPDVTSISMDPTFAAYLHNVFLSYQPNAKENPRIYLKRNKRKNGGDDELCTTDEVKIINGLECKITCSSSKVSYVLDTEDVLHRAKRRKLLNQSGLPLAHDSVCSGSLIRQRRTQRYQKLLTGQ

SEQ ID NO: 88624 - protein, 1137 aa, Arabidopsis thaliana
  peptide (1)..(1137): Ceres Seq. ID no. 12711189
MYRKENKSITEVYHEVAILFRDHHDLLGEFTHFLPDTSATASTNDSVKVPVRDRGIKSLPTMRQIDLDKKDRIITSHPNRALKTENMDVDHERSLLKDSKEEVRRIDKKNDFMDDRDRKDYRGLDHDSHKEHFFNSKKKLIRKDDDSAEMSDQAREGDKFSGAIPSSSTYDEKGHSQELAFVDRVKAKLDTADNQEFLRCLNLYSKEIISQPELQSLVSDLIGVYPDLMDAFKVFLAQCDKNDGLLSGIVSKKSLWSEGKCPQPTKSLDKDTDREREKIERYRERDREKERLEKVAASQKWAKPISELDLSNCEQCTPSYRRLPKNYPIPIASQKMEIGSQVLNDHWVSVTSGSEDYSFKHMRKNQYEESLFKCEDDRFELDMLLESVISATNRVEELLAKINSNELKTDTPICIEDHLTALNLRCIERLYSDHGLDVLDLLKKNAYLALPVILTRLKQKQEEWARCRTEFNKVWADIYTKNYHRSLDHRSFYFKQQDSKNLSTKALLAEIKEISEKKRGEDDALLALAAGNRRTISSNMSFDYPDPDLHEDLYQLIKYSCGEMCSTEQLDKVMKVWTEFLEPIFGVPSRPQGAEDREDAVKSTNHDREDQEDAVSPQNGASIANSMRSNGPRKVNESNQVRQASELDKDVTSSKTSDALLSCDNTQNDKMPKNLTTPDERAETKQIGDNPVIPNGTVAEWFAGEAKVEREEGELSPTGDFEEDNYAVHGENDMEALSKSKENDATADDASAPRSSDGSGNTSHNGDVSGTDSGDGEDCYREDDIDHNKVESEGEAEEGMSDGHDDTEGDMPVLSISVKNLLHVKPLAKYVPPALYDKDNDDSRKNSQVFYGNDSFYVLFRLHQILYDRILSAKINSSSPDRKWKTSNPTNPADSYARIMDALYNLLDGTSDNSKFEDDCRAIIGTQSYVLFTLDKLIYKLIKHLQAVAADEMDNKLQQLYAYEKSRKPEKFLDAVYYENALVLLPDEDIYRIECEQSTPSKLSIQLLDYGHDKPDVTSISMDPTFAAYLHNVFLSYQPNAKENPRIYLKRNKRKNGGDDELCTTDEVKIINGLECKITCSSSKVSYVLDTEDVLHRAKRRKLLNQSGLPLAHDSVCSGSLIRQRRTQRYQKLLTGQ

SEQ ID NO: 88625 - DNA, 1282 bp, Arabidopsis thaliana
  misc_feature (1)..(1282): Ceres Seq. ID no. 12711202
  misc_feature (1)..(1282): Ortholog of  Ceres SEQ ID NO 13659033 as cited in SEQ ID NO 66372
  misc_feature (1)..(1282): Ortholog of  Ceres SEQ ID NO 13655724 as cited in SEQ ID NO 68973
  misc_feature (1)..(1282): Ortholog of  Ceres SEQ ID NO 12625899 as cited in SEQ ID NO 69079
atgggattaaacgagcaacaaaatgttccaagtcagaggaagatcatagtttttatagtcttagcttttataccaatagctctgtttcgactctgttttaataatccattctcctccattaaagacacctctcttcaagactctgcagctaacgttgtgatcactagcttctcttcatcttctcaagaagaagaaagccaagagagttttgatcatatacaagatgaacctttatgcgattatacgcaagggaactgggtcagagacgagattggtccactctacaatggttcaacatgtggaacaatcaaggatggtcagaattgtttccgccatggtagacctgattccggttatctttactggaaatggaaaccaaacgaatgcgatataccgagattcgactcgaaccggtttcttgatcttatgagagataagcatctagcttttatcggtgattccatggctagaaatcagcttgagtctcttttatgcttgctctctaccgtctctagccctgatctcgtctatagaaacggagaagacaataaattcagaagatggcgtttcgagtcacacaacgtcactgtctcggtttactggtccccgtttttggtggccggtttagagaaatcgggaaacttggaccacaatgtattgcacatagaccgcgtggatgagagatggggcaatgatttagaacgttttgatacggtcgtagtctctgtgggacattggtttctgcatccagcggtttactacgagtctggttcggttttgggatgtcattcttgtgaaacaagtaactgtaccgaggtagggttttatgatgtatttagaaaagcgataagaacaacgttgagagcggttgctggaagtggtcgtgaggtgatcttgacgacattttcgccatcacattttgaaggacggccttgggacagtctcggcgcatgtaacatgaccaagccgtacgaagggaaggttttagaaggtctggacttggacatgcgcaaaatagaaattgaggaatatacggcggctgcggctgaggtgaggttagaggtgttggacgtgacggctatgtcggtactgagaccagacggacatcctggtccgtacatgtacgcggacccgttcaagaacggtgtaccggagagaattcctaatgattgtttgcattggtgtctacctggtcctgtcgacacgtggaacgagatcatgatcgagatgttgcggcgatggaaggtttaaatgatgaacattgattgttgaagatcctatg

SEQ ID NO: 88626 - protein, 416 aa, Arabidopsis thaliana; identical to SEQ ID NO: 24155
  peptide (1)..(416): Ceres Seq. ID no. 12711203

SEQ ID NO: 88627 - protein, 274 aa, Arabidopsis thaliana; identical to SEQ ID NO: 24156
  peptide (1)..(274): Ceres Seq. ID no. 12711204

SEQ ID NO: 88628 - protein, 262 aa, Arabidopsis thaliana; identical to SEQ ID NO: 24157
  peptide (1)..(262): Ceres Seq. ID no. 12711205

SEQ ID NO: 88629 - DNA, 1083 bp, Arabidopsis thaliana
  misc_feature (1)..(1083): Ceres Seq. ID no. 12711206
  misc_feature (1)..(1083): Ortholog of  Ceres SEQ ID NO 13639645 as cited in SEQ ID NO 57488
atggctataatggaagcatgcacgattgctcttacgataatggcgaaaacggcgttgacgggagggatgagtccttttgtgttcgttgtttacacaaacgcttttggatctattcttcttcttccattttctttcttatttcacaggaatgagagaacagaacaatctatcttctcttggccactcctcgttcgcgttttctttctaggtttcaccgggatatttatgttccaaaacttggcatttgtgggactacgcttcagctcaccaatagtagtatgtgcaatgggattgcaaatcccgtccttctccttcctgctctctattattctcggaaggagcaaattggattggagaaacacgagtacgagggctaaactgatgggaacaatagtctcgttaagcggagcttttgttgaagagttgtacaaaggtccattcataagaccagcttcgtctgcttccccaaatcgttttcttaaatcagtccctaaacttttggtctactacaacctccccgacaattggtttctcggctgtatctttttggccgtcgctgttttttctgtctccctgttcaatgttgttcagacagggacggtaaaaaagtatccacatgtgatgaaagtggcttcgttttacagcatagtcgggacgatccaatgtctactattctcgttatttatggaaagagaccttagtgcatggaagatccaacctaacttcgatctttatctcattatcgccacgggaacattcggaagtgtaatacgaacaagtgtacacgtaaagtgcacccaaatgaaaggaccttattacgtgccattgttcaaaccctttggtatcttttgggcaacactctttggtaccagcttcttcgtcaacagtcttcactacggcagtgtgttaggagcagccatagctggtgtgggatatttcacagtgtcttggggacaattgaaggaaagcgaagaaaaacaaagttcaaatgaagaaagaaaatccatcaaaactattcatcatcgcgatgaagatgaatacaaagttccattacttattaaccaggaagaaagtcctgtatga

SEQ ID NO: 88630 - protein, 360 aa, Arabidopsis thaliana
  peptide (1)..(360): Ceres Seq. ID no. 12711207
MAIMEACTIALTIMAKTALTGGMSPFVFVVYTNAFGSILLLPFSFLFHRNERTEQSIFSWPLLVRVFFLGFTGIFMFQNLAFVGLRFSSPIVVCAMGLQIPSFSFLLSIILGRSKLDWRNTSTRAKLMGTIVSLSGAFVEELYKGPFIRPASSASPNRFLKSVPKLLVYYNLPDNWFLGCIFLAVAVFSVSLFNVVQTGTVKKYPHVMKVASFYSIVGTIQCLLFSLFMERDLSAWKIQPNFDLYLIIATGTFGSVIRTSVHVKCTQMKGPYYVPLFKPFGIFWATLFGTSFFVNSLHYGSVLGAAIAGVGYFTVSWGQLKESEEKQSSNEERKSIKTIHHRDEDEYKVPLLINQEESPV

SEQ ID NO: 88631 - protein, 357 aa, Arabidopsis thaliana
  peptide (1)..(357): Ceres Seq. ID no. 12711208
MEACTIALTIMAKTALTGGMSPFVFVVYTNAFGSILLLPFSFLFHRNERTEQSIFSWPLLVRVFFLGFTGIFMFQNLAFVGLRFSSPIVVCAMGLQIPSFSFLLSIILGRSKLDWRNTSTRAKLMGTIVSLSGAFVEELYKGPFIRPASSASPNRFLKSVPKLLVYYNLPDNWFLGCIFLAVAVFSVSLFNVVQTGTVKKYPHVMKVASFYSIVGTIQCLLFSLFMERDLSAWKIQPNFDLYLIIATGTFGSVIRTSVHVKCTQMKGPYYVPLFKPFGIFWATLFGTSFFVNSLHYGSVLGAAIAGVGYFTVSWGQLKESEEKQSSNEERKSIKTIHHRDEDEYKVPLLINQEESPV

SEQ ID NO: 88632 - protein, 347 aa, Arabidopsis thaliana
  peptide (1)..(347): Ceres Seq. ID no. 12711209
MAKTALTGGMSPFVFVVYTNAFGSILLLPFSFLFHRNERTEQSIFSWPLLVRVFFLGFTGIFMFQNLAFVGLRFSSPIVVCAMGLQIPSFSFLLSIILGRSKLDWRNTSTRAKLMGTIVSLSGAFVEELYKGPFIRPASSASPNRFLKSVPKLLVYYNLPDNWFLGCIFLAVAVFSVSLFNVVQTGTVKKYPHVMKVASFYSIVGTIQCLLFSLFMERDLSAWKIQPNFDLYLIIATGTFGSVIRTSVHVKCTQMKGPYYVPLFKPFGIFWATLFGTSFFVNSLHYGSVLGAAIAGVGYFTVSWGQLKESEEKQSSNEERKSIKTIHHRDEDEYKVPLLINQEESPV

SEQ ID NO: 88633 - DNA, 1815 bp, Arabidopsis thaliana
  misc_feature (1)..(1815): Ceres Seq. ID no. 12711231
  misc_feature (1)..(1815): Ortholog of  Ceres SEQ ID NO 15171224 as cited in SEQ ID NO 52348
atggctggttcatcaacgaaacgatttcctctatatgctaaagattatgagctctttgaagaggtaggagaaggtgttagtgctactgtgtatagagctcgttgcattgctcttaacgagattgtcgctgttaaaatcttggatctcgaaaaatgcaggaatgatttggaaacaatacgcaaggaagttcatataatgagtttgattgatcatccgaatttattgaaagcgcattgttcgtttatcgacagtagtagtttgtggattgtaatgccttatatgtcgggtggttcttgttttcatttaatgaaatctgtatatccggaaggtcttgagcaacctataattgctactttgttgagggaagtgcttaaagctcttgtttatcttcatagacaaggtcacatccatagagatgttaaggctgggaatatattgattcactcaaaaggcgtagttaaacttggagactttggagtttcagcatgtatgtttgatagtggagaaagaatgcaaacaaggaatacattcgttgggactccttgttggatggcacctgaggttatgcagcaactagatggatatgatttcaagtatcttgctcatggtcatgccccattttccaaatatccacctatgaaggtgctactaatgacattacaaaatgcacctcctcgtctagactatgacagagataagaaattctcaaagtcatttagagagttaatcgcagcgtgcttagttaaagatccgaaaaagcgtccaactgcagcaaaacttctgaaacatcctttcttcaaacatgctcggtctacagattatttgtcccgtaaaattcttcatggtctttctccacttggtgaacgttttaaaaagctcaaggaggcagaggctgagttgttcaaaggcataaatggtgacaaagaacagttgtctcagcatgagtatatgagaggaattagtgcttggaactttgatcttgaagcattgagaaggcaggcatcacttgtaattattccaaatgaagaaatctataattcagagatacaggaactgaacagaaatggagatgtaccaaaaggaaaaccagtgatacaaaggtcacagactatgcctttggaatatttctcagaaaaggcaagtgatatggtgagtgagagtagcagtcaattaaccggttcattacttccttcgtttcatcgcaaattcctcccggctcttggcaatgcatgtaactcgagcgatagagcagcagagaagctcgcttttgaagagccacgtcaagtactacacccattagcggatacaaagaaaattagaaaagcaggaagtgatcagcaggagaaaccaaaaaatggttacgcagatagtcctgtgaaccgtgaatcttccacattatcaaaggaaccattagcggatacaaagcaagttagaaaaccaggaaatgagcaggagaaaccaaaaaacggctatatagttagtcatgtgaaccgtgaatcttccacatcagaggaaatcctcccactgttgcagagtctcctggttcagaatgacattcaaagggcgcaagtaatcaggttaattagattttttgatcgaactgcgaaaacggaaaatccaatctcaaaaaccgaaggagtgcagcataaagacccacagatatatccatcaaaggagaaagatctgcaatctcaagttcagtttttggagcaaagtgttgagaagcttgtagaggaagttcagagaagaaaagatataaatagtcagctagagcaacagatcagctctctgattagcagcaacaacatctcttaa

SEQ ID NO: 88634 - protein, 604 aa, Arabidopsis thaliana
  peptide (1)..(604): Ceres Seq. ID no. 12711232
MAGSSTKRFPLYAKDYELFEEVGEGVSATVYRARCIALNEIVAVKILDLEKCRNDLETIRKEVHIMSLIDHPNLLKAHCSFIDSSSLWIVMPYMSGGSCFHLMKSVYPEGLEQPIIATLLREVLKALVYLHRQGHIHRDVKAGNILIHSKGVVKLGDFGVSACMFDSGERMQTRNTFVGTPCWMAPEVMQQLDGYDFKYLAHGHAPFSKYPPMKVLLMTLQNAPPRLDYDRDKKFSKSFRELIAACLVKDPKKRPTAAKLLKHPFFKHARSTDYLSRKILHGLSPLGERFKKLKEAEAELFKGINGDKEQLSQHEYMRGISAWNFDLEALRRQASLVIIPNEEIYNSEIQELNRNGDVPKGKPVIQRSQTMPLEYFSEKASDMVSESSSQLTGSLLPSFHRKFLPALGNACNSSDRAAEKLAFEEPRQVLHPLADTKKIRKAGSDQQEKPKNGYADSPVNRESSTLSKEPLADTKQVRKPGNEQEKPKNGYIVSHVNRESSTSEEILPLLQSLLVQNDIQRAQVIRLIRFFDRTAKTENPISKTEGVQHKDPQIYPSKEKDLQSQVQFLEQSVEKLVEEVQRRKDINSQLEQQISSLISSNNIS

SEQ ID NO: 88635 - protein, 539 aa, Arabidopsis thaliana
  peptide (1)..(539): Ceres Seq. ID no. 12711233
MSLIDHPNLLKAHCSFIDSSSLWIVMPYMSGGSCFHLMKSVYPEGLEQPIIATLLREVLKALVYLHRQGHIHRDVKAGNILIHSKGVVKLGDFGVSACMFDSGERMQTRNTFVGTPCWMAPEVMQQLDGYDFKYLAHGHAPFSKYPPMKVLLMTLQNAPPRLDYDRDKKFSKSFRELIAACLVKDPKKRPTAAKLLKHPFFKHARSTDYLSRKILHGLSPLGERFKKLKEAEAELFKGINGDKEQLSQHEYMRGISAWNFDLEALRRQASLVIIPNEEIYNSEIQELNRNGDVPKGKPVIQRSQTMPLEYFSEKASDMVSESSSQLTGSLLPSFHRKFLPALGNACNSSDRAAEKLAFEEPRQVLHPLADTKKIRKAGSDQQEKPKNGYADSPVNRESSTLSKEPLADTKQVRKPGNEQEKPKNGYIVSHVNRESSTSEEILPLLQSLLVQNDIQRAQVIRLIRFFDRTAKTENPISKTEGVQHKDPQIYPSKEKDLQSQVQFLEQSVEKLVEEVQRRKDINSQLEQQISSLISSNNIS

SEQ ID NO: 88636 - protein, 514 aa, Arabidopsis thaliana
  peptide (1)..(514): Ceres Seq. ID no. 12711234
MPYMSGGSCFHLMKSVYPEGLEQPIIATLLREVLKALVYLHRQGHIHRDVKAGNILIHSKGVVKLGDFGVSACMFDSGERMQTRNTFVGTPCWMAPEVMQQLDGYDFKYLAHGHAPFSKYPPMKVLLMTLQNAPPRLDYDRDKKFSKSFRELIAACLVKDPKKRPTAAKLLKHPFFKHARSTDYLSRKILHGLSPLGERFKKLKEAEAELFKGINGDKEQLSQHEYMRGISAWNFDLEALRRQASLVIIPNEEIYNSEIQELNRNGDVPKGKPVIQRSQTMPLEYFSEKASDMVSESSSQLTGSLLPSFHRKFLPALGNACNSSDRAAEKLAFEEPRQVLHPLADTKKIRKAGSDQQEKPKNGYADSPVNRESSTLSKEPLADTKQVRKPGNEQEKPKNGYIVSHVNRESSTSEEILPLLQSLLVQNDIQRAQVIRLIRFFDRTAKTENPISKTEGVQHKDPQIYPSKEKDLQSQVQFLEQSVEKLVEEVQRRKDINSQLEQQISSLISSNNIS

SEQ ID NO: 88637 - DNA, 2931 bp, Arabidopsis thaliana
  misc_feature (1)..(2931): Ceres Seq. ID no. 12711235
  misc_feature (1)..(2931): Ortholog of  Ceres SEQ ID NO 13654989 as cited in SEQ ID NO 63117
  misc_feature (1)..(2931): Ortholog of  Ceres SEQ ID NO 13584744 as cited in SEQ ID NO 69137
atgtggagattaaagaatcagaagaagaaagaaacggcagattcgccgagttcttctccaacagcaccgtcagtcgattcagcggtgatgggaagtggtcagactcattttacctatgaagagctagaggacataacagaagggttttctaagcaaaacatacttggagaaggaggttttggttgtgtctacaaaggtaaactaaaagatggaaaacttgttgctgttaagcagcttaaggttggtagcggacaaggagaccgtgagtttaaggcggaggttgagattattagccgtgttcatcatcgccatttggtatcgcttgttggatactgcattgcggattcagagagattgcttatctatgagtatgttcctaaccaaacattggagcatcatttgcatgggaagggtaggccagtgcttgaatgggctaggagagtcagaatcgctatagttctgccaaaggtttggcgtatttgcacgaagacttttcaaatagaagctgaatcaaagcgactttatttatcttgttttgcaggtcacccaaaaatcattcacagggacataaagtccgctaacatcttgctggacgatgagtttgaagttcaggttgctgactttggacttgccaaagtcaatgatacaacacaaactcatgtctcaactcgcgttatgggaaccttcgggtacttggcaccagaatatgcacaaagtggacaacttactgatagatcagatgttttctcgtttggagttgttctcttagagcttataactggacgcaaacctgttgaccggaaccagcctttgggagaagagagtttggttggatgggtccaaaacgtccacgcatggttcagaaacaaattcaaacaaggcaaaaaaatgtcggactcgccaacttcttctccaccagcaccatccgctgattccgctccgccgccggatacctcatccgacggatctgctgctcctccacctacggattcagcaccacctcctagtccaccggctgattcatctccgcctccagctcttccatctcttccgccagctgtcttttctcctccgccaactgtctcatcccctcctcctccgccgcttgattcatctcctcctccgccgcctgatttaaccccgccgccaagttctccccctcccccagatgctccgccgccgattcccatcgtgttccctccaccgatagactcaccgccgcccgagtccaccaactcccctccacctccagaggtgtttgaaccaccaccgcctccggccgatgaagacgaaagccctcctgctcctccacctccggaacaattacctcctccagcgtcttcaccgcaaggaggacccaaaaaaccaaaaaaacaccatccaggaccagccacatctcctcctgctccttcagcaccagccacatctcctcctgctcctccaaacgcgccgccacgtaacagttcccacgcactaccacctaagtctaccgctgcaggtggacctctcacctcgccatctcgcggagtccccagcagcggaaactctgtcccgccacctgcaaatagcggtggcggctatcaagggaagactatggccggttttgcaatagccggtttcgcagtcatcgccttgatggccgttgtgttcttagtcagaagaaagaagaagagaaacattgatgcctacagtgactcacaatacttgcctccttcaaacttctccatcaaatcagatggattcttatacggtcaaaatcctacaaagggatactctggtcctggtggttacaattcacaacaacaatcaaattccggaaacagcttcggcagccaacgaggaggaggaggttatacacggtcagggagcgcacctgattcagcagtgatgggaagtggtcaaacacatttcacatatgaagagctaacggacataacagaaggattttctaagcataacatacttggagaaggaggttttggttgtgtgtataaaggtaaattaaatgatggaaaacttgttgctgttaagcagcttaaggttggtagcggacaaggtgaccgtgagtttaaggcggaggttgagattattagccgtgttcatcatcgccatttggtttctcttgttggatactgcattgcggattcagagagattgcttatctatgaatatgttcctaaccaaacattggaacatcatttgcatgggaagggaaggccagtacttgaatgggctaggagagtcagaattgctataggttctgccaaaggtttggcgtatttacacgaagactgtcacccaaaaatcattcacagggacataaagtccgctaacatcttgctggacgatgagtacttggcaccagaatatgcacaaagtggaaagctgactgatagatcagatgttttctcgtttggggttgttctcttagagcttataacaggacgcaaacctgttgaccaataccagcctttgggagaagagagtttggttgaatgggctcgtcctctgcttcacaaagccattgagaccggtgatttcagtgaactagttgatagacggctcgaaaagcattatgtggagaatgaagttttcagaatgattgaaacagctgctgcttgtgttaggcattcaggtccaaaacgtccacgtatggttcaggttgtgagagcattggatagtgaaggggacatgggagatatcagcaatggtaacaaagtgggacaaagcagtgcttatgactctggtcagtataataatgacaccatgaagttcaggaaaatggcatttggttttgacgatagctcggattccgggatgtacagtggagactactctgtccaagactcccggaaaggatccaacggagcttcctctgagttcacaaggaatgaaaccgagaaccgaaacttcaataaccggcgctactga

SEQ ID NO: 88638 - protein, 976 aa, Arabidopsis thaliana
  peptide (1)..(976): Ceres Seq. ID no. 12711236
MWRLKNQKKKETADSPSSSPTAPSVDSAVMGSGQTHFTYEELEDITEGFSKQNILGEGGFGCVYKGKLKDGKLVAVKQLKVGSGQGDREFKAEVEIISRVHHRHLVSLVGYCIADSERLLIYEYVPNQTLEHHLHGKGRPVLEWARRVRIAIVLPKVWRICTKTFQIEAESKRLYLSCFAGHPKIIHRDIKSANILLDDEFEVQVADFGLAKVNDTTQTHVSTRVMGTFGYLAPEYAQSGQLTDRSDVFSFGVVLLELITGRKPVDRNQPLGEESLVGWVQNVHAWFRNKFKQGKKMSDSPTSSPPAPSADSAPPPDTSSDGSAAPPPTDSAPPPSPPADSSPPPALPSLPPAVFSPPPTVSSPPPPPLDSSPPPPPDLTPPPSSPPPPDAPPPIPIVFPPPIDSPPPESTNSPPPPEVFEPPPPPADEDESPPAPPPPEQLPPPASSPQGGPKKPKKHHPGPATSPPAPSAPATSPPAPPNAPPRNSSHALPPKSTAAGGPLTSPSRGVPSSGNSVPPPANSGGGYQGKTMAGFAIAGFAVIALMAVVFLVRRKKKRNIDAYSDSQYLPPSNFSIKSDGFLYGQNPTKGYSGPGGYNSQQQSNSGNSFGSQRGGGGYTRSGSAPDSAVMGSGQTHFTYEELTDITEGFSKHNILGEGGFGCVYKGKLNDGKLVAVKQLKVGSGQGDREFKAEVEIISRVHHRHLVSLVGYCIADSERLLIYEYVPNQTLEHHLHGKGRPVLEWARRVRIAIGSAKGLAYLHEDCHPKIIHRDIKSANILLDDEYLAPEYAQSGKLTDRSDVFSFGVVLLELITGRKPVDQYQPLGEESLVEWARPLLHKAIETGDFSELVDRRLEKHYVENEVFRMIETAAACVRHSGPKRPRMVQVVRALDSEGDMGDISNGNKVGQSSAYDSGQYNNDTMKFRKMAFGFDDSSDSGMYSGDYSVQDSRKGSNGASSEFTRNETENRNFNNRRY

SEQ ID NO: 88639 - protein, 947 aa, Arabidopsis thaliana
  peptide (1)..(947): Ceres Seq. ID no. 12711237
MGSGQTHFTYEELEDITEGFSKQNILGEGGFGCVYKGKLKDGKLVAVKQLKVGSGQGDREFKAEVEIISRVHHRHLVSLVGYCIADSERLLIYEYVPNQTLEHHLHGKGRPVLEWARRVRIAIVLPKVWRICTKTFQIEAESKRLYLSCFAGHPKIIHRDIKSANILLDDEFEVQVADFGLAKVNDTTQTHVSTRVMGTFGYLAPEYAQSGQLTDRSDVFSFGVVLLELITGRKPVDRNQPLGEESLVGWVQNVHAWFRNKFKQGKKMSDSPTSSPPAPSADSAPPPDTSSDGSAAPPPTDSAPPPSPPADSSPPPALPSLPPAVFSPPPTVSSPPPPPLDSSPPPPPDLTPPPSSPPPPDAPPPIPIVFPPPIDSPPPESTNSPPPPEVFEPPPPPADEDESPPAPPPPEQLPPPASSPQGGPKKPKKHHPGPATSPPAPSAPATSPPAPPNAPPRNSSHALPPKSTAAGGPLTSPSRGVPSSGNSVPPPANSGGGYQGKTMAGFAIAGFAVIALMAVVFLVRRKKKRNIDAYSDSQYLPPSNFSIKSDGFLYGQNPTKGYSGPGGYNSQQQSNSGNSFGSQRGGGGYTRSGSAPDSAVMGSGQTHFTYEELTDITEGFSKHNILGEGGFGCVYKGKLNDGKLVAVKQLKVGSGQGDREFKAEVEIISRVHHRHLVSLVGYCIADSERLLIYEYVPNQTLEHHLHGKGRPVLEWARRVRIAIGSAKGLAYLHEDCHPKIIHRDIKSANILLDDEYLAPEYAQSGKLTDRSDVFSFGVVLLELITGRKPVDQYQPLGEESLVEWARPLLHKAIETGDFSELVDRRLEKHYVENEVFRMIETAAACVRHSGPKRPRMVQVVRALDSEGDMGDISNGNKVGQSSAYDSGQYNNDTMKFRKMAFGFDDSSDSGMYSGDYSVQDSRKGSNGASSEFTRNETENRNFNNRRY

SEQ ID NO: 88640 - protein, 751 aa, Arabidopsis thaliana
  peptide (1)..(751): Ceres Seq. ID no. 12711238
MGTFGYLAPEYAQSGQLTDRSDVFSFGVVLLELITGRKPVDRNQPLGEESLVGWVQNVHAWFRNKFKQGKKMSDSPTSSPPAPSADSAPPPDTSSDGSAAPPPTDSAPPPSPPADSSPPPALPSLPPAVFSPPPTVSSPPPPPLDSSPPPPPDLTPPPSSPPPPDAPPPIPIVFPPPIDSPPPESTNSPPPPEVFEPPPPPADEDESPPAPPPPEQLPPPASSPQGGPKKPKKHHPGPATSPPAPSAPATSPPAPPNAPPRNSSHALPPKSTAAGGPLTSPSRGVPSSGNSVPPPANSGGGYQGKTMAGFAIAGFAVIALMAVVFLVRRKKKRNIDAYSDSQYLPPSNFSIKSDGFLYGQNPTKGYSGPGGYNSQQQSNSGNSFGSQRGGGGYTRSGSAPDSAVMGSGQTHFTYEELTDITEGFSKHNILGEGGFGCVYKGKLNDGKLVAVKQLKVGSGQGDREFKAEVEIISRVHHRHLVSLVGYCIADSERLLIYEYVPNQTLEHHLHGKGRPVLEWARRVRIAIGSAKGLAYLHEDCHPKIIHRDIKSANILLDDEYLAPEYAQSGKLTDRSDVFSFGVVLLELITGRKPVDQYQPLGEESLVEWARPLLHKAIETGDFSELVDRRLEKHYVENEVFRMIETAAACVRHSGPKRPRMVQVVRALDSEGDMGDISNGNKVGQSSAYDSGQYNNDTMKFRKMAFGFDDSSDSGMYSGDYSVQDSRKGSNGASSEFTRNETENRNFNNRRY

SEQ ID NO: 88641 - DNA, 2886 bp, Arabidopsis thaliana
  misc_feature (1)..(2886): Ceres Seq. ID no. 12711239
  misc_feature (1)..(2886): Ortholog of  Ceres SEQ ID NO 13654989 as cited in SEQ ID NO 63117
  misc_feature (1)..(2886): Ortholog of  Ceres SEQ ID NO 13584744 as cited in SEQ ID NO 69137
atgtggagattaaagaatcagaagaagaaagaaacggcagattcgccgagttcttctccaacagcaccgtcagtcgattcagcggtgatgggaagtggtcagactcattttacctatgaagagctagaggacataacagaagggttttctaagcaaaacatacttggagaaggaggttttggttgtgtctacaaaggtaaactaaaagatggaaaacttgttgctgttaagcagcttaaggttggtagcggacaaggagaccgtgagtttaaggcggaggttgagattattagccgtgttcatcatcgccatttggtatcgcttgttggatactgcattgcggattcagagagattgcttatctatgagtatgttcctaaccaaacattggagcatcatttgcatgggaagggtaggccagtgcttgaatgggctaggagagtcagaatcgctatagttctgccaaaggtttggcgtatttgcacgaagactgtaagtcacccaaaaatcattcacagggacataaagtccgctaacatcttgctggacgatgagtttgaagttcaggttgctgactttggacttgccaaagtcaatgatacaacacaaactcatgtctcaactcgcgttatgggaaccttcgggtacttggcaccagaatatgcacaaagtggacaacttactgatagatcagatgttttctcgtttggagttgttctcttagagcttataactggacgcaaacctgttgaccggaaccagcctttgggagaagagagtttggttggatgggtccaaaacgtccacgcatggttcagaaacaaattcaaacaaggcaaaaaaatgtcggactcgccaacttcttctccaccagcaccatccgctgattccgctccgccgccggatacctcatccgacggatctgctgctcctccacctacggattcagcaccacctcctagtccaccggctgattcatctccgcctccagctcttccatctcttccgccagctgtcttttctcctccgccaactgtctcatcccctcctcctccgccgcttgattcatctcctcctccgccgcctgatttaaccccgccgccaagttctccccctcccccagatgctccgccgccgattcccatcgtgttccctccaccgatagactcaccgccgcccgagtccaccaactcccctccacctccagaggtgtttgaaccaccaccgcctccggccgatgaagacgaaagccctcctgctcctccacctccggaacaattacctcctccagcgtcttcaccgcaaggaggacccaaaaaaccaaaaaaacaccatccaggaccagccacatctcctcctgctccttcagcaccagccacatctcctcctgctcctccaaacgcgccgccacgtaacagttcccacgcactaccacctaagtctaccgctgcaggtggacctctcacctcgccatctcgcggagtccccagcagcggaaactctgtcccgccacctgcaaatagcggtggcggctatcaagggaagactatggccggttttgcaatagccggtttcgcagtcatcgccttgatggccgttgtgttcttagtcagaagaaagaagaagagaaacattgatgcctacagtgactcacaatacttgcctccttcaaacttctccatcaaatcagatggattcttatacggtcaaaatcctacaaagggatactctggtcctggtggttacaattcacaacaacaatcaaattccggaaacagcttcggcagccaacgaggaggaggaggttatacacggtcagggagcgcacctgattcagcagtgatgggaagtggtcaaacacatttcacatatgaagagctaacggacataacagaaggattttctaagcataacatacttggagaaggaggttttggttgtgtgtataaaggtaaattaaatgatggaaaacttgttgctgttaagcagcttaaggttggtagcggacaaggtgaccgtgagtttaaggcggaggttgagattattagccgtgttcatcatcgccatttggtttctcttgttggatactgcattgcggattcagagagattgcttatctatgaatatgttcctaaccaaacattggaacatcatttgcatgggaagggaaggccagtacttgaatgggctaggagagtcagaattgctataggttctgccaaaggtttggcgtatttacacgaagactgtcacccaaaaatcattcacagggacataaagtccgctaacatcttgctggacgatgagtacttggcaccagaatatgcacaaagtggaaagctgactgatagatcagatgttttctcgtttggggttgttctcttagagcttataacaggacgcaaacctgttgaccaataccagcctttgggagaagagagtttggttgaatgggctcgtcctctgcttcacaaagccattgagaccggtgatttcagtgaactagttgatagacggctcgaaaagcattatgtggagaatgaagttttcagaatgattgaaacagctgctgcttgtgttaggcattcaggtccaaaacgtccacgtatggttcaggttgtgagagcattggatagtgaaggggacatgggagatatcagcaatggtaacaaagtgggacaaagcagtgcttatgactctggtcagtataataatgacaccatgaagttcaggaaaatggcatttggttttgacgatagctcggattccgggatgtacagtggagactactctgtccaagactcccggaaaggatccaacggagcttcctctgagttcacaaggaatgaaaccgagaaccgaaacttcaataaccggcgctactga

SEQ ID NO: 88642 - protein, 961 aa, Arabidopsis thaliana
  peptide (1)..(961): Ceres Seq. ID no. 12711240
MWRLKNQKKKETADSPSSSPTAPSVDSAVMGSGQTHFTYEELEDITEGFSKQNILGEGGFGCVYKGKLKDGKLVAVKQLKVGSGQGDREFKAEVEIISRVHHRHLVSLVGYCIADSERLLIYEYVPNQTLEHHLHGKGRPVLEWARRVRIAIVLPKVWRICTKTVSHPKIIHRDIKSANILLDDEFEVQVADFGLAKVNDTTQTHVSTRVMGTFGYLAPEYAQSGQLTDRSDVFSFGVVLLELITGRKPVDRNQPLGEESLVGWVQNVHAWFRNKFKQGKKMSDSPTSSPPAPSADSAPPPDTSSDGSAAPPPTDSAPPPSPPADSSPPPALPSLPPAVFSPPPTVSSPPPPPLDSSPPPPPDLTPPPSSPPPPDAPPPIPIVFPPPIDSPPPESTNSPPPPEVFEPPPPPADEDESPPAPPPPEQLPPPASSPQGGPKKPKKHHPGPATSPPAPSAPATSPPAPPNAPPRNSSHALPPKSTAAGGPLTSPSRGVPSSGNSVPPPANSGGGYQGKTMAGFAIAGFAVIALMAVVFLVRRKKKRNIDAYSDSQYLPPSNFSIKSDGFLYGQNPTKGYSGPGGYNSQQQSNSGNSFGSQRGGGGYTRSGSAPDSAVMGSGQTHFTYEELTDITEGFSKHNILGEGGFGCVYKGKLNDGKLVAVKQLKVGSGQGDREFKAEVEIISRVHHRHLVSLVGYCIADSERLLIYEYVPNQTLEHHLHGKGRPVLEWARRVRIAIGSAKGLAYLHEDCHPKIIHRDIKSANILLDDEYLAPEYAQSGKLTDRSDVFSFGVVLLELITGRKPVDQYQPLGEESLVEWARPLLHKAIETGDFSELVDRRLEKHYVENEVFRMIETAAACVRHSGPKRPRMVQVVRALDSEGDMGDISNGNKVGQSSAYDSGQYNNDTMKFRKMAFGFDDSSDSGMYSGDYSVQDSRKGSNGASSEFTRNETENRNFNNRRY

SEQ ID NO: 88643 - protein, 932 aa, Arabidopsis thaliana
  peptide (1)..(932): Ceres Seq. ID no. 12711241
MGSGQTHFTYEELEDITEGFSKQNILGEGGFGCVYKGKLKDGKLVAVKQLKVGSGQGDREFKAEVEIISRVHHRHLVSLVGYCIADSERLLIYEYVPNQTLEHHLHGKGRPVLEWARRVRIAIVLPKVWRICTKTVSHPKIIHRDIKSANILLDDEFEVQVADFGLAKVNDTTQTHVSTRVMGTFGYLAPEYAQSGQLTDRSDVFSFGVVLLELITGRKPVDRNQPLGEESLVGWVQNVHAWFRNKFKQGKKMSDSPTSSPPAPSADSAPPPDTSSDGSAAPPPTDSAPPPSPPADSSPPPALPSLPPAVFSPPPTVSSPPPPPLDSSPPPPPDLTPPPSSPPPPDAPPPIPIVFPPPIDSPPPESTNSPPPPEVFEPPPPPADEDESPPAPPPPEQLPPPASSPQGGPKKPKKHHPGPATSPPAPSAPATSPPAPPNAPPRNSSHALPPKSTAAGGPLTSPSRGVPSSGNSVPPPANSGGGYQGKTMAGFAIAGFAVIALMAVVFLVRRKKKRNIDAYSDSQYLPPSNFSIKSDGFLYGQNPTKGYSGPGGYNSQQQSNSGNSFGSQRGGGGYTRSGSAPDSAVMGSGQTHFTYEELTDITEGFSKHNILGEGGFGCVYKGKLNDGKLVAVKQLKVGSGQGDREFKAEVEIISRVHHRHLVSLVGYCIADSERLLIYEYVPNQTLEHHLHGKGRPVLEWARRVRIAIGSAKGLAYLHEDCHPKIIHRDIKSANILLDDEYLAPEYAQSGKLTDRSDVFSFGVVLLELITGRKPVDQYQPLGEESLVEWARPLLHKAIETGDFSELVDRRLEKHYVENEVFRMIETAAACVRHSGPKRPRMVQVVRALDSEGDMGDISNGNKVGQSSAYDSGQYNNDTMKFRKMAFGFDDSSDSGMYSGDYSVQDSRKGSNGASSEFTRNETENRNFNNRRY

SEQ ID NO: 88644 - protein, 751 aa, Arabidopsis thaliana; identical to SEQ ID NO: 88640
  peptide (1)..(751): Ceres Seq. ID no. 12711242

SEQ ID NO: 88645 - DNA, 1201 bp, Arabidopsis thaliana
  misc_feature (1)..(1201): Ceres Seq. ID no. 12711274
  misc_feature (1)..(1201): Ortholog of  Ceres SEQ ID NO 14304170 as cited in SEQ ID NO 53453
  misc_feature (1)..(1201): Ortholog of  Ceres SEQ ID NO 14315911 as cited in SEQ ID NO 56998
  misc_feature (1)..(1201): Ortholog of  Ceres SEQ ID NO 13656028 as cited in SEQ ID NO 64728
aaaaacaaattagaagaagaaaaatcgatggcggggatactagtgaacaatatcctccctcaacctccgattctccgatcgctttcttcttcttcgcgaagaagttcaattcgaaccctagttatggtcaaagcttcttcctctgaaccttccgagtctgtttcagtctccacgaagaccagtgacgacactggagctgttgttgtgttcactgctcctcctggtttcaagccaccggagccaaaacggttcgccgtcaaatccggaaaactcttcgatgtcttgggtgcagcaattggattgtttttccgattcggcactggtgttttcgtttctgggtactctgcatcttttgtgtctaaggaagagattccagctgatcagtatgcgttgcgtttaggcgggatcacggtaaaggaaactgctaaggtcgggcctcgtcctgagaaacccattgagatatatgagtttgaaggctgtcccttctgccggaaggtcagggaaatggttgcagtgttggatcttgatattctctactatccttgtccaagagggagtccaaatttccgcccgaaggttaaacagatgggcgggaaacaacagtttccgtacatggttgatcccaataccggagtgtccatgtatgaatcagatggaatcatcaaatatctatccgagaaatatggagatggaacagttcctttaagtctgtcacttggtgctttaacggctataacagcaggctttgcaatgattggtcgtatgggaaagggtaacttgtacacaccagcgaaactaccacctaagccactcgaattctgggcatatgagggttctccgttttgtaagcttgtacgcgaagttcttgtagaactggagttaccacacattcagcgcagttgtgctcgtggtagccccaaacggcaggtattgcttgagaaagctggtcactttcaggtgccttacctggaagatccaaacactggagtcgcgatgtttgagagtgcagaaattgttgagtatctcaagcaaacttatgctgcctaagtgttcgtcttcctcactttataccgtatagatatatgttaattgttgtgtgtatgttcagcctactttctgttcccccaataaaatgaacgcagttatctgtagaggttttaaatgaagacatgtacttatatataagtaaaggaattgtgac

SEQ ID NO: 88646 - protein, 348 aa, Arabidopsis thaliana; identical to SEQ ID NO: 24112
  peptide (1)..(348): Ceres Seq. ID no. 12711275

SEQ ID NO: 88647 - protein, 339 aa, Arabidopsis thaliana; identical to SEQ ID NO: 24113
  peptide (1)..(339): Ceres Seq. ID no. 12711276

SEQ ID NO: 88648 - protein, 307 aa, Arabidopsis thaliana; identical to SEQ ID NO: 24114
  peptide (1)..(307): Ceres Seq. ID no. 12711277

SEQ ID NO: 88649 - DNA, 4056 bp, Arabidopsis thaliana
  misc_feature (1)..(4056): Ceres Seq. ID no. 12711320
  misc_feature (1)..(4056): Ortholog of  Ceres SEQ ID NO 13597129 as cited in SEQ ID NO 64175
atgggtaatgttgaaattccgaattggcttaaagctttgccattggcacctgtgtttagacctacagacactgaatttgcagatcccattgcttacatatcgaaaatcgaaaaggaagctagtgcctttgggatttgcaagatcattcctcctttacccaagccatcgaaaaagtatgttttctacaacttgaacaagtctcttttgaagtgtcccgaattggtttcagatgttgacatttcgaaggtgtgtaaagaggatagagctgtattcaccactaggcagcaagagttaggccaaactgtgaaaaaaaacaaaggagagaagggtaagagtaattctcaaaggagtggtgttaagcaggtttggcaaagtggaggcgtttatacattggatcagtttgaagctaagtcgaaagctttctacaaaacccaattaggaacggttaaggaactggcaccagttgtcattgaggcattgttctggaaagcggctttagagaagcctatatatatagagtatgctaatgacgtgcctggctctgctttcggtgagccagaggatcatttcaggcatttccggcagaggaagaggaggggcaggggattttatcagaggaagacagaaaataatgatccatcaggtaagaacggtgaaaagtcatcgcctgaggtagaaaaggcaccccttgcttctacaagtttatcatctcaggattcgtccaagcagaagaacatggatattgttgatgaaatggaaggtactgcaggctggaagctctccaacagttcgtggaaccttcagatgattgcacgttcacctggttctgttacacgtttcatgccagatgacattcctggtgttacatctcccatggtttatatcggtatgttgttcagttggtttgcctggcacgttgaggatcatgagcttcacagtatgaattatcttcacactggctcaccaaagacttggtacgctgtcccttgtgattatgcgcttgactttgaagaggttatccgcaaaaattcttatggcaggaacattgaccaactggctgctctcacccaactaggcgaaaagacaactcttgtatcacctgagatgatagttgcatctggcattccctgctgtaggttggtacaaaatcctggtgaatttgttgtgacttttccgaggtcttatcatgtaggattcagccacggttttaactgtggggaagccgctaattttggaaccccacagtggctcaacgtagcaaaggaagctgctgtgcgtcgggcagccatgaattatctacccatgctgtcccatcagcagctgctatatctcttgactatgtcctttgtttcaaggcaggttaccatggtctctttgtcatataacctagtgccacgatcattgctaccaggtggtcgtagctcccgactaagagatcggcagagagaagaaagagagttccttgtgaaaagagcttttgtagaagatatattgaacgaaaacaagaatttatctgttcttcttcgagaaccaggctctcgtttggtgatgtgggaccctgatttacttccgcgtcatagcgcactggctcttgcagctgctggagttgctggtgcttctgctgtttcacctccagcagtggcaaaaaaagaacttgaggagggtcattctgaattgcagaataaagaaaagacttctcttttagaggaattgagcttgttcatggagaagctgaatgatgtatactacgacgatgatgatggtctgcttaacgatttccaagttgatactggaaccttgccatgtgtggcttgtggcgttcttggcttcccctttatgtctgtggtacagccttctgaaaaagcattaaaagatctctcagagagacaaggagagacagatgctcaggaaattatgacactgtcatcagaaaagtctgactgcgaatggaaaacgtcttctagatatataagacctcgcattttctgcctcgaacacactattgaacttcagagactgctgcaatcaagaggtggattgaaattccttgttatttgccataaagactttcaaaaattcaaggcacatgcggctatagtggcagaggaggtcaaagtccctttcagctatgatgatgtcctgttagagagtgcatctcaggaagagttgagtctaattgatcttgcaattgaagatgaagaaaaatacgaacacagtgtagactggacctcagaacttggcatcaatttacggtactgtgtgaaagtgaggaaaaattcccctactaagaaaattcagcatgcactgtcactaggtggcttgttctccgatacaagccagatgctagattttacaactatcagatggctgcagagaaaatcacgctcaaaagctaaacccagttctacctcaagtttcacaccttgtgaacatcttgaagtaaaagcagatggaaaattaagggataatttggattctcagaccggaaaaaaggaagaaaagatcatccagtactcgagaaagaaaaagttgaatccaaagccttcagcagaacaagttcaggagctagctaccctagctaaatcaaaagattttgataagacatgtaaaaattttagcagtaggtcacatctggatagtgcaattcgttctgagatgaacagtgagattggagactctggaagggtcattggggtatcattttccataaatccttgtagctcatctttcactgtgggacatgggcaagaacatcccgagatcactgtcaagtttggttcagatttagatgggaatgtcacaaatagtttgagtatggtgaatggagactctgctgacctaaccttaacctccatatccagagagcagcaccaaggacactctatgaccagcaataataatggctccaactcaggtagtcatgttgtggcaagccagaccatacttgtttctacaggtgataatcatgacggaccaagaaaattgtctggtgattatgtctgcagtgatgtgtctgtacgtggtattcaggaagcggttgaaatgagtgaccaagagtttggagaacctaggtctactgtcactaatattgaggatgaacagcaatcacagattgtgaaaccaacccaaagagaagctgtatttggtgatcacgaacaggtggagggagcagaagctgtgtctaccagagaaaacttgtgctctgaaataattctgcacactgagcattcttcagctcatgtgggtatggaaattcctgacataaacacggccagtgagaacttagttgttgacatgacccatgatggtgaacctttggaaagtagcgatatattaagttcgagcaatggtgatgaagcttcttcaaatggattgcaagttctaaatgatgagcttagcatggagagtgaagtttcaagctcagaaaacaccgaagttattgaggctcccaattctatgggagaagcaaagaagaagcggaaaatagaatcagagtctgagacaaatgataatccagagagtagcattggtttcataaggagtccttgtgaagggttgaggtcaaggggcaagaggaaagcaacatgtgaaacttcattaaagcacactgaaacgagtgatgaagagaagaaacccattgcgaaaaggctgaagaaaacaccaaaggcttgctcagggagtcgtcagcaagaagtccccacgacaactcaccccaaccgttgttacctagagggatgcaagatgacttttgagagtaaagcgaaattacaaactcacaagagaaaccgttgcactcacgaagggtgtggaaagaaattcagggctcacaaatatctggtgcttcatcaacgtgtgcataaggatgaaagacctttcgagtgctcttggaaaggatgttcaatgactttcaaatggcaatgggcgaggacagaacatttgcgtctgcacacgggagagcgaccatacatatgcaaggtcgatggatgtggattgtcgtttaggtttgtatctgactatagtcgccacagacgtaaaaccatgcactatgtcacatag

SEQ ID NO: 88650 - protein, 1351 aa, Arabidopsis thaliana
  peptide (1)..(1351): Ceres Seq. ID no. 12711321
MGNVEIPNWLKALPLAPVFRPTDTEFADPIAYISKIEKEASAFGICKIIPPLPKPSKKYVFYNLNKSLLKCPELVSDVDISKVCKEDRAVFTTRQQELGQTVKKNKGEKGKSNSQRSGVKQVWQSGGVYTLDQFEAKSKAFYKTQLGTVKELAPVVIEALFWKAALEKPIYIEYANDVPGSAFGEPEDHFRHFRQRKRRGRGFYQRKTENNDPSGKNGEKSSPEVEKAPLASTSLSSQDSSKQKNMDIVDEMEGTAGWKLSNSSWNLQMIARSPGSVTRFMPDDIPGVTSPMVYIGMLFSWFAWHVEDHELHSMNYLHTGSPKTWYAVPCDYALDFEEVIRKNSYGRNIDQLAALTQLGEKTTLVSPEMIVASGIPCCRLVQNPGEFVVTFPRSYHVGFSHGFNCGEAANFGTPQWLNVAKEAAVRRAAMNYLPMLSHQQLLYLLTMSFVSRQVTMVSLSYNLVPRSLLPGGRSSRLRDRQREEREFLVKRAFVEDILNENKNLSVLLREPGSRLVMWDPDLLPRHSALALAAAGVAGASAVSPPAVAKKELEEGHSELQNKEKTSLLEELSLFMEKLNDVYYDDDDGLLNDFQVDTGTLPCVACGVLGFPFMSVVQPSEKALKDLSERQGETDAQEIMTLSSEKSDCEWKTSSRYIRPRIFCLEHTIELQRLLQSRGGLKFLVICHKDFQKFKAHAAIVAEEVKVPFSYDDVLLESASQEELSLIDLAIEDEEKYEHSVDWTSELGINLRYCVKVRKNSPTKKIQHALSLGGLFSDTSQMLDFTTIRWLQRKSRSKAKPSSTSSFTPCEHLEVKADGKLRDNLDSQTGKKEEKIIQYSRKKKLNPKPSAEQVQELATLAKSKDFDKTCKNFSSRSHLDSAIRSEMNSEIGDSGRVIGVSFSINPCSSSFTVGHGQEHPEITVKFGSDLDGNVTNSLSMVNGDSADLTLTSISREQHQGHSMTSNNNGSNSGSHVVASQTILVSTGDNHDGPRKLSGDYVCSDVSVRGIQEAVEMSDQEFGEPRSTVTNIEDEQQSQIVKPTQREAVFGDHEQVEGAEAVSTRENLCSEIILHTEHSSAHVGMEIPDINTASENLVVDMTHDGEPLESSDILSSSNGDEASSNGLQVLNDELSMESEVSSSENTEVIEAPNSMGEAKKKRKIESESETNDNPESSIGFIRSPCEGLRSRGKRKATCETSLKHTETSDEEKKPIAKRLKKTPKACSGSRQQEVPTTTHPNRCYLEGCKMTFESKAKLQTHKRNRCTHEGCGKKFRAHKYLVLHQRVHKDERPFECSWKGCSMTFKWQWARTEHLRLHTGERPYICKVDGCGLSFRFVSDYSRHRRKTMHYVT

SEQ ID NO: 88651 - protein, 1106 aa, Arabidopsis thaliana
  peptide (1)..(1106): Ceres Seq. ID no. 12711322
MDIVDEMEGTAGWKLSNSSWNLQMIARSPGSVTRFMPDDIPGVTSPMVYIGMLFSWFAWHVEDHELHSMNYLHTGSPKTWYAVPCDYALDFEEVIRKNSYGRNIDQLAALTQLGEKTTLVSPEMIVASGIPCCRLVQNPGEFVVTFPRSYHVGFSHGFNCGEAANFGTPQWLNVAKEAAVRRAAMNYLPMLSHQQLLYLLTMSFVSRQVTMVSLSYNLVPRSLLPGGRSSRLRDRQREEREFLVKRAFVEDILNENKNLSVLLREPGSRLVMWDPDLLPRHSALALAAAGVAGASAVSPPAVAKKELEEGHSELQNKEKTSLLEELSLFMEKLNDVYYDDDDGLLNDFQVDTGTLPCVACGVLGFPFMSVVQPSEKALKDLSERQGETDAQEIMTLSSEKSDCEWKTSSRYIRPRIFCLEHTIELQRLLQSRGGLKFLVICHKDFQKFKAHAAIVAEEVKVPFSYDDVLLESASQEELSLIDLAIEDEEKYEHSVDWTSELGINLRYCVKVRKNSPTKKIQHALSLGGLFSDTSQMLDFTTIRWLQRKSRSKAKPSSTSSFTPCEHLEVKADGKLRDNLDSQTGKKEEKIIQYSRKKKLNPKPSAEQVQELATLAKSKDFDKTCKNFSSRSHLDSAIRSEMNSEIGDSGRVIGVSFSINPCSSSFTVGHGQEHPEITVKFGSDLDGNVTNSLSMVNGDSADLTLTSISREQHQGHSMTSNNNGSNSGSHVVASQTILVSTGDNHDGPRKLSGDYVCSDVSVRGIQEAVEMSDQEFGEPRSTVTNIEDEQQSQIVKPTQREAVFGDHEQVEGAEAVSTRENLCSEIILHTEHSSAHVGMEIPDINTASENLVVDMTHDGEPLESSDILSSSNGDEASSNGLQVLNDELSMESEVSSSENTEVIEAPNSMGEAKKKRKIESESETNDNPESSIGFIRSPCEGLRSRGKRKATCETSLKHTETSDEEKKPIAKRLKKTPKACSGSRQQEVPTTTHPNRCYLEGCKMTFESKAKLQTHKRNRCTHEGCGKKFRAHKYLVLHQRVHKDERPFECSWKGCSMTFKWQWARTEHLRLHTGERPYICKVDGCGLSFRFVSDYSRHRRKTMHYVT

SEQ ID NO: 88652 - protein, 1100 aa, Arabidopsis thaliana
  peptide (1)..(1100): Ceres Seq. ID no. 12711323
MEGTAGWKLSNSSWNLQMIARSPGSVTRFMPDDIPGVTSPMVYIGMLFSWFAWHVEDHELHSMNYLHTGSPKTWYAVPCDYALDFEEVIRKNSYGRNIDQLAALTQLGEKTTLVSPEMIVASGIPCCRLVQNPGEFVVTFPRSYHVGFSHGFNCGEAANFGTPQWLNVAKEAAVRRAAMNYLPMLSHQQLLYLLTMSFVSRQVTMVSLSYNLVPRSLLPGGRSSRLRDRQREEREFLVKRAFVEDILNENKNLSVLLREPGSRLVMWDPDLLPRHSALALAAAGVAGASAVSPPAVAKKELEEGHSELQNKEKTSLLEELSLFMEKLNDVYYDDDDGLLNDFQVDTGTLPCVACGVLGFPFMSVVQPSEKALKDLSERQGETDAQEIMTLSSEKSDCEWKTSSRYIRPRIFCLEHTIELQRLLQSRGGLKFLVICHKDFQKFKAHAAIVAEEVKVPFSYDDVLLESASQEELSLIDLAIEDEEKYEHSVDWTSELGINLRYCVKVRKNSPTKKIQHALSLGGLFSDTSQMLDFTTIRWLQRKSRSKAKPSSTSSFTPCEHLEVKADGKLRDNLDSQTGKKEEKIIQYSRKKKLNPKPSAEQVQELATLAKSKDFDKTCKNFSSRSHLDSAIRSEMNSEIGDSGRVIGVSFSINPCSSSFTVGHGQEHPEITVKFGSDLDGNVTNSLSMVNGDSADLTLTSISREQHQGHSMTSNNNGSNSGSHVVASQTILVSTGDNHDGPRKLSGDYVCSDVSVRGIQEAVEMSDQEFGEPRSTVTNIEDEQQSQIVKPTQREAVFGDHEQVEGAEAVSTRENLCSEIILHTEHSSAHVGMEIPDINTASENLVVDMTHDGEPLESSDILSSSNGDEASSNGLQVLNDELSMESEVSSSENTEVIEAPNSMGEAKKKRKIESESETNDNPESSIGFIRSPCEGLRSRGKRKATCETSLKHTETSDEEKKPIAKRLKKTPKACSGSRQQEVPTTTHPNRCYLEGCKMTFESKAKLQTHKRNRCTHEGCGKKFRAHKYLVLHQRVHKDERPFECSWKGCSMTFKWQWARTEHLRLHTGERPYICKVDGCGLSFRFVSDYSRHRRKTMHYVT

SEQ ID NO: 88653 - DNA, 1257 bp, Arabidopsis thaliana
  misc_feature (1)..(1257): Ceres Seq. ID no. 12711324
  misc_feature (1)..(1257): Ortholog of  Ceres SEQ ID NO 13598373 as cited in SEQ ID NO 62185
  misc_feature (1)..(1257): Ortholog of  Ceres SEQ ID NO 12584664 as cited in SEQ ID NO 62232
  misc_feature (1)..(1257): Ortholog of  Ceres SEQ ID NO 15169537 as cited in SEQ ID NO 64197
ttttagggtttcttcgtgccattgatattttgagaggcgaaggaaacaatacgattcagagagagacgagtgaaaatggctgcaaaagaaggtagtaggatttttgtcggtggtttatcgccggaagtgacagatagagaccttgaaagagcttttagccgcttcggagacattctcgattgtcagatcatgctggaaagagatactggtcgttcacgtggattcgggtttatcacttttgctgatcgccgcgctatggatgagtccatcagagagatgcatggaagggactttggtgatcgggtcatctcagtgaacagagctgaaccaaaactggggcgagatgatggagaaagtcatggctctagaggtggcagagacagtggctactcgattgctggaaaaggaagctttggtggaggtggaggtggaggtgggcgtgttggtgaagatgaatgcttcaagtgtggacgggttgggcactgggcccgtgattgtccttctgctggtggtggtcgtggaggacctgttggtggtttttcttcacgtgctagtgcgtatggaggatctgatggacgtgttgaccgctatgctgaccgtgaccgctatgtggaccgcgaacgatacatagatgatcgatacgacggtgctgcacgctatggtgctagagacaggtttgacagcagagaagcctacataccccgtgatcgatacgccagtgacaggtatgcagccccggctgatcggtttgcaggtggtgatagatacagccgtggatcagaccgttatcctccagggagctatgacaaagctcggtcctttgagagagacatagccccgagtgcaggcagtgacaggtacggtggtggtagagctggtggtcccatccgtggaggaggagaggagggaagagggtttagaagcagagccggtgctccttatgagagaccgagcagaagtggtggtggtggagcttatccgtcgtcgtccacttttgaccgttattaagacacattaatgaaagaaagtgagaatgatgcttggttagagctctatacactcagtcgtgtgtgttgcttgtggtaatgaatatctctgtaagcgttataggtgtaaaagacttgtcttttttatttatatatgattagtttgcggacctgtttagctttgtattttgatcctttattatttttggtttgttttggaccataacatgacttttgagcttcgtcagtcaatgttaaaccttgcacacat

SEQ ID NO: 88654 - protein, 310 aa, Arabidopsis thaliana; identical to SEQ ID NO: 22430
  peptide (1)..(310): Ceres Seq. ID no. 12711325

SEQ ID NO: 88655 - protein, 272 aa, Arabidopsis thaliana; identical to SEQ ID NO: 22431
  peptide (1)..(272): Ceres Seq. ID no. 12711326

SEQ ID NO: 88656 - protein, 250 aa, Arabidopsis thaliana; identical to SEQ ID NO: 22432
  peptide (1)..(250): Ceres Seq. ID no. 12711327

SEQ ID NO: 88657 - DNA, 2793 bp, Arabidopsis thaliana
  misc_feature (1)..(2793): Ceres Seq. ID no. 12711399
  misc_feature (1)..(2793): Ortholog of  Ceres SEQ ID NO 13657677 as cited in SEQ ID NO 66119
atggagggagcgtgttgtcgctctctgctccacacttcccttactccgccaccattctccgacgtcactctccggtggcttccatatctttctcccttaagcaaccaccaccgcaaccaccagaacctcctgagagtcctcctgacctccgccgcccggagaaatctattgattaatccactcaagggtttaaccaatcgctcttctgtgtctcctcttgttcaatcagaggtttcgagtaaagtttcttcctttggctcctctctagcatccaagctacgtttgtccagcaagctctctcctcctcctcctcctccacctccgcctcctgttgaggaaaccacccaattccgagatgagtttcggagtgacacgaaaccaccggaagaagaaactcgaaacccgcaacaggaattccgacaagaagggaagatattcgttggtaatttaccgacatggataaagaaaccagagtttgaagagttcttccgacagttcggaccgatagagaatgtgattctaatcaaaggacatcacgaggtcgagaaaaacgcgggatttgggttcattatttacgcggcagagaagtctgcaatgaaagctgtggagttcgacggcgttgagtttcacggcaggatattgacggtgaagctagacgacggaaagaggctgaaaacaaaggctgaacagagagtgaggtgggtagaggaaggagaagaagacacgaaaatgtctaataagtcgtcgtggcatcaagagagagaagggtctcgaaagtcactacagaggattttagataccaatggagataactggcaagctgttatttcagctttcgagaagatcagcaagccttcgaggacagagtttggtttgatggtgaagttctatggaagaagaggggatatgcatcgtgcacgtgagacttttgagagaatgcgcgcgaggggtatcacaccaacatcacgtatatacacaagccttattcacgcttatgcagttggtagagacatggacgaagcactgtcttgtgttcgtaaaatgaaggaagaaggaattgagatgagtttggtgacttatagtgtaatcgttggaggattctctaaagcgggacatgccgaagctgcagattactggtttgacgaggccaaacggatacacaaaacccttaatgccagtatatatggaaaaatcatatatgcacactgtcagacgtgcaatatggagcgggcagaggcattggtgagggagatggaagaagaaggtattgatgctcctattgctatctaccacaccatgatggatggttatacaatggtcgctgatgagaagaaaggcttagttgttttcaaaagacttaaggaatgtggatttactccaacagttgttacttatgggtgcctcattaatctttatactaaggttggaaagatttcaaaagccttggaagttagtagagtgatgaaggaagagggcgtaaagcataatttaaagacttattcgatgatgattaacggatttgtaaaactaaaagattgggccaatgcgtttgctgtatttgaagatatggtaaaagaaggcatgaaaccagatgttatactatacaacaacatcatctcagcattctgcgggatgggtaacatggatcgagcgatccagactgttaaggagatgcaaaagctgaggcatagaccaaccacacggacatttatgcctatcatacatggatatgcgaaatccggagacatgaggagatcactagaagtttttgatatgatgagacgatgtgggtgtgttccaaccgttcatactttcaatggtttgattaatggtttagttgagaaacgtcagatggaaaaggcggttgagatattagacgagatgacattggcgggtgtaagtgcaaacgaacatacttacacaaagatcatgcaaggctatgcatcagtcggtgataccggaaaagcctttgagtattttacaaggcttcaaaacgaaggtttggatgttgacattttcacttacgaggcgttacttaaagcttgctgcaaatcaggaagaatgcagagcgcattagctgtcacgaaagaaatgagtgcacggaatatcccgcgcaattccttcgtctataacatattaatcgacggatgggcacgaagaggcgatgtatgggaagccgcggatttgatacagcagatgaaaaaagaaggtgttaaacccgacattcatacttacacatccttcattagcgcttgttctaaggccggcgacatgaatagagctacacaaacaatcgaagaaatggaagcactaggtgtgaaacctaacatcaagacatacacgaccttaataaaaggatgggcgagagcatctcttccagagaaagccttaagttgctacgaggaaatgaaggcgatggggataaaacccgacaaagctgtgtatcattgccttctgacttcgcttctgtcgcgtgcttcaatcgcagaagcttacatttactcaggagtgatgactatctgcaaggaaatggtggaggcaggcttgattgttgatatgggaactgcggttcactggtctaaatgtctgtgtaagattgaagcttcaggtggtgagctcactgagacgttgcagaagactttcccacctgattggagctcgcatcatcatcaccatggcttcttagatcaagtttctgatgttgactccgatgaagatgatgttgatggtgaagatggtgaggacgatgaagatgttaactctgtttcggatttattatcaccttacaagtaa

SEQ ID NO: 88658 - protein, 930 aa, Arabidopsis thaliana
  peptide (1)..(930): Ceres Seq. ID no. 12711400
MEGACCRSLLHTSLTPPPFSDVTLRWLPYLSPLSNHHRNHQNLLRVLLTSAARRNLLINPLKGLTNRSSVSPLVQSEVSSKVSSFGSSLASKLRLSSKLSPPPPPPPPPPVEETTQFRDEFRSDTKPPEEETRNPQQEFRQEGKIFVGNLPTWIKKPEFEEFFRQFGPIENVILIKGHHEVEKNAGFGFIIYAAEKSAMKAVEFDGVEFHGRILTVKLDDGKRLKTKAEQRVRWVEEGEEDTKMSNKSSWHQEREGSRKSLQRILDTNGDNWQAVISAFEKISKPSRTEFGLMVKFYGRRGDMHRARETFERMRARGITPTSRIYTSLIHAYAVGRDMDEALSCVRKMKEEGIEMSLVTYSVIVGGFSKAGHAEAADYWFDEAKRIHKTLNASIYGKIIYAHCQTCNMERAEALVREMEEEGIDAPIAIYHTMMDGYTMVADEKKGLVVFKRLKECGFTPTVVTYGCLINLYTKVGKISKALEVSRVMKEEGVKHNLKTYSMMINGFVKLKDWANAFAVFEDMVKEGMKPDVILYNNIISAFCGMGNMDRAIQTVKEMQKLRHRPTTRTFMPIIHGYAKSGDMRRSLEVFDMMRRCGCVPTVHTFNGLINGLVEKRQMEKAVEILDEMTLAGVSANEHTYTKIMQGYASVGDTGKAFEYFTRLQNEGLDVDIFTYEALLKACCKSGRMQSALAVTKEMSARNIPRNSFVYNILIDGWARRGDVWEAADLIQQMKKEGVKPDIHTYTSFISACSKAGDMNRATQTIEEMEALGVKPNIKTYTTLIKGWARASLPEKALSCYEEMKAMGIKPDKAVYHCLLTSLLSRASIAEAYIYSGVMTICKEMVEAGLIVDMGTAVHWSKCLCKIEASGGELTETLQKTFPPDWSSHHHHHGFLDQVSDVDSDEDDVDGEDGEDDEDVNSVSDLLSPYK

SEQ ID NO: 88659 - protein, 732 aa, Arabidopsis thaliana; identical to SEQ ID NO: 85077
  peptide (1)..(732): Ceres Seq. ID no. 12711401

SEQ ID NO: 88660 - protein, 687 aa, Arabidopsis thaliana; identical to SEQ ID NO: 85078
  peptide (1)..(687): Ceres Seq. ID no. 12711402

SEQ ID NO: 88661 - DNA, 1663 bp, Arabidopsis thaliana
  misc_feature (1)..(1663): Ceres Seq. ID no. 12711421
  misc_feature (1)..(1663): Ortholog of  Ceres SEQ ID NO 15179007 as cited in SEQ ID NO 1038
  misc_feature (1)..(1663): Ortholog of  Ceres SEQ ID NO 15226449 as cited in SEQ ID NO 58879
  misc_feature (1)..(1663): Ortholog of  Ceres SEQ ID NO 13597146 as cited in SEQ ID NO 63311
gtcatcattatctctatctaataaatggcgttacaaaggcaactcctgaagagagctacttccgatatctatcaccgccgtgcgatctctctcctccgtactgatttctctacttctccttcgattgctgatgctccgccgcacattccgccgttcgttcaccagccacggccgtataaaggtccttccgccgatgaggttttacagaaacggaagaagtttctcggaccttctcttttccactactaccagaagcctcttaacatcgttgaagggaagatgcagtacttgtatgatgagagtggtaggcgatatctggatgcctttgctggaatagtcactgtgtcgtgcggtcactgccatccggatattcttaatgcgattacggaacagagcaagctacttcagcacgcgactactatttacctgcatcatgccattggtgattttgctgaagcattggctgccaagatgcccggaaatcttaaggttgtgtactttgtgaattctggctcagaagctaatgagctagcaatgatgatggctaggctttacactggtagccttgagatgatttccttgagaaatgcttatcatggtggaagttccaatactattggactaactgctcttaacacatggaagtacccattacctcagggggaaatccatcacgtagtaaatccagatccataccgtggagtttttggctctgatggttctctttatgctaaagatgttcatgaccacatcgagtatggtacctctggaaaagtagctggatttatcgcagagaccatccagggggtcggaggagctgtagaattggctcctggttacttaaagtcggtttatgaaattgttcgcaacgctggtggtgtatgcattgctgatgaagtccaaactggatttgggcgaacaggaagccactattggggtttccagactcaagatgtggttcctgacatagtcacaatggcaaagggaattggaaatggattgccattaggagctgtggtgactacaccagaaatcgcaagtgttttagctagcaagattctgttcaacacttttggtgggaacccggtttgttcagctggtggacttgcggttctaaacgttattgataaggagaaacgccaagaacattgtgctgaagttggttcacaccttatacaacgtttgaaagatgtgcagaaaagacatgatatcattggagacgtgagaggaagagggttaatggttgggattgagcttgtgagtgaccggaaagacaagacaccagccaaggctgaaacatctgtcttgtttgagcaacttagagaacttggcattctcgtcggaaaaggaggacttcatgggaacgttttcaggataaagccaccaatgtgtttcactaaagatgatgcagatttcttggtagatgcattggactattccatctccaggttgtgaacaaggatgaaacaaagccaacgagagtttttaaccatatgaaccgttttaatgtttccgcgtctttgtaacgaaaaccaagccaagtctcatctcctttgatttcagaataaataaataaaatttatttatttctcagtgttgctatgacataatacaaatacattagaaaagcccaattatttttgttttctttgttaaaattccc

SEQ ID NO: 88662 - protein, 476 aa, Arabidopsis thaliana
  peptide (1)..(476): Ceres Seq. ID no. 12711422
MALQRQLLKRATSDIYHRRAISLLRTDFSTSPSIADAPPHIPPFVHQPRPYKGPSADEVLQKRKKFLGPSLFHYYQKPLNIVEGKMQYLYDESGRRYLDAFAGIVTVSCGHCHPDILNAITEQSKLLQHATTIYLHHAIGDFAEALAAKMPGNLKVVYFVNSGSEANELAMMMARLYTGSLEMISLRNAYHGGSSNTIGLTALNTWKYPLPQGEIHHVVNPDPYRGVFGSDGSLYAKDVHDHIEYGTSGKVAGFIAETIQGVGGAVELAPGYLKSVYEIVRNAGGVCIADEVQTGFGRTGSHYWGFQTQDVVPDIVTMAKGIGNGLPLGAVVTTPEIASVLASKILFNTFGGNPVCSAGGLAVLNVIDKEKRQEHCAEVGSHLIQRLKDVQKRHDIIGDVRGRGLMVGIELVSDRKDKTPAKAETSVLFEQLRELGILVGKGGLHGNVFRIKPPMCFTKDDADFLVDALDYSISRL

SEQ ID NO: 88663 - protein, 391 aa, Arabidopsis thaliana
  peptide (1)..(391): Ceres Seq. ID no. 12711423
MQYLYDESGRRYLDAFAGIVTVSCGHCHPDILNAITEQSKLLQHATTIYLHHAIGDFAEALAAKMPGNLKVVYFVNSGSEANELAMMMARLYTGSLEMISLRNAYHGGSSNTIGLTALNTWKYPLPQGEIHHVVNPDPYRGVFGSDGSLYAKDVHDHIEYGTSGKVAGFIAETIQGVGGAVELAPGYLKSVYEIVRNAGGVCIADEVQTGFGRTGSHYWGFQTQDVVPDIVTMAKGIGNGLPLGAVVTTPEIASVLASKILFNTFGGNPVCSAGGLAVLNVIDKEKRQEHCAEVGSHLIQRLKDVQKRHDIIGDVRGRGLMVGIELVSDRKDKTPAKAETSVLFEQLRELGILVGKGGLHGNVFRIKPPMCFTKDDADFLVDALDYSISRL

SEQ ID NO: 88664 - protein, 327 aa, Arabidopsis thaliana
  peptide (1)..(327): Ceres Seq. ID no. 12711424
MPGNLKVVYFVNSGSEANELAMMMARLYTGSLEMISLRNAYHGGSSNTIGLTALNTWKYPLPQGEIHHVVNPDPYRGVFGSDGSLYAKDVHDHIEYGTSGKVAGFIAETIQGVGGAVELAPGYLKSVYEIVRNAGGVCIADEVQTGFGRTGSHYWGFQTQDVVPDIVTMAKGIGNGLPLGAVVTTPEIASVLASKILFNTFGGNPVCSAGGLAVLNVIDKEKRQEHCAEVGSHLIQRLKDVQKRHDIIGDVRGRGLMVGIELVSDRKDKTPAKAETSVLFEQLRELGILVGKGGLHGNVFRIKPPMCFTKDDADFLVDALDYSISRL

SEQ ID NO: 88665 - DNA, 1944 bp, Arabidopsis thaliana
  misc_feature (1)..(1944): Ceres Seq. ID no. 12711432
  misc_feature (1)..(1944): Ortholog of  Ceres SEQ ID NO 13600301 as cited in SEQ ID NO 1010
atgggtcattcgatattggagaaaatgggatgttcaaactcgaaagcatcgatgaataagaagaacgagccgcttcatctatgcaaagaaaggaagagatttgtcaaacaagctatggattccagatgtgctttagccgctgcacacgtgtcttacatccgttcactccgtaacatcggagcttgtcttcgtcaatacgcggaggcggagactgctcatgaatcatctccgtcgttaaccgccactgagcctgagaaatctccttctcataactcctcttaccctgacgattcggttgactcgccactgagtcataactcgaatccaaaccctaaccctaaaccccttttcaatctaagttacatgaagacggagacggctagttctactgtgactttcactattaaccctctgagcgacggtgatgacgatctggaagtgacaatgccggcgttttctcctcctcctccgccgcgtcctcgccggccagagacgtcttcttgggactatttcgacacttgtgacgattttgatagctttagatttgtagggctaagtgaacaaaccgagattgatagtgaatgtgatgcagcagttataggattagagaagattactagtcaagggaatgtagcaaaatctggttcagagacattgcaagactcgagttttaaaacaaagcagaggaaacagagttgtgaagataatgatgaaagagaagatccatcggagtttatcacacatagagccaaagactttgtgtcgagtatgaaagatatagaacataagttctttagagcttctgaatctggaagagaagtttcaagaatgcttgaagttaacaaaatcagagtcggattcgccgatatgacagctttgaagcgagcttgttgtagagggaaaagttattcaccagtttctcaagagccattgagtcatcaagttactaaagtcattgtgtggaagagaacatcgtcgtcaagatcctccacttctagaaatccgttgatccagacatcaaaagaagatcacgatgatgaaagtggaagtgatttcatcgaagagttttgtatgatctcaggaagtcactcttcttcgcttgatcggttatacgcttgggagagaaaactctatgatgaagtcaaggcgagtgagatgattaggaaagagtatgatcgaaaatgcgagcagctaaggaaccaattcgcaaaggatcacagtgctaaatcgatggataaaacaagagcagctgctaaagatcttcattcaagaatcagagtcgcgattcaatctgttgaatcgatttcaaagcggattgagagaatcagagacgatgagctccacccacagctcttagagtttcttcaagggttgataagaatgtggaaagcgatgcttgaatgtcatcatacacagtacattaccatttcattggcttaccattgtcgacattcctccaaaacagcacacgaaagtgtccttaagaggcggattttggcggagcttctagaagaaacagagtgttttggtctaagctttgtagatttggttcacagtatggcttcttatgtggaagctctgaatggttggcttcacaactgtgtcttgctccctcaagaacgttctacaagaaaccgaagaccatggtccccacgtcgtgtcctggctccaccgatattcgtgctgtgtcgggactggtctgcagggatcaaaacactgccgtctgatgaacttagcgggtcaatcaaggggttttccttggatatggagatgttgggggaagaaaaaggcggttcactgttggtttcggatttgtcgagtgtgcattcgagtttggcgaagcttctagagagattaaaaaagttttcggaagcttctttaaaaatgtatgaagatgtaaaggtgaaaagtgaagcagctagagttgcttacactaataaataa

SEQ ID NO: 88666 - protein, 647 aa, Arabidopsis thaliana
  peptide (1)..(647): Ceres Seq. ID no. 12711433
MGHSILEKMGCSNSKASMNKKNEPLHLCKERKRFVKQAMDSRCALAAAHVSYIRSLRNIGACLRQYAEAETAHESSPSLTATEPEKSPSHNSSYPDDSVDSPLSHNSNPNPNPKPLFNLSYMKTETASSTVTFTINPLSDGDDDLEVTMPAFSPPPPPRPRRPETSSWDYFDTCDDFDSFRFVGLSEQTEIDSECDAAVIGLEKITSQGNVAKSGSETLQDSSFKTKQRKQSCEDNDEREDPSEFITHRAKDFVSSMKDIEHKFFRASESGREVSRMLEVNKIRVGFADMTALKRACCRGKSYSPVSQEPLSHQVTKVIVWKRTSSSRSSTSRNPLIQTSKEDHDDESGSDFIEEFCMISGSHSSSLDRLYAWERKLYDEVKASEMIRKEYDRKCEQLRNQFAKDHSAKSMDKTRAAAKDLHSRIRVAIQSVESISKRIERIRDDELHPQLLEFLQGLIRMWKAMLECHHTQYITISLAYHCRHSSKTAHESVLKRRILAELLEETECFGLSFVDLVHSMASYVEALNGWLHNCVLLPQERSTRNRRPWSPRRVLAPPIFVLCRDWSAGIKTLPSDELSGSIKGFSLDMEMLGEEKGGSLLVSDLSSVHSSLAKLLERLKKFSEASLKMYEDVKVKSEAARVAYTNK

SEQ ID NO: 88667 - protein, 639 aa, Arabidopsis thaliana
  peptide (1)..(639): Ceres Seq. ID no. 12711434
MGCSNSKASMNKKNEPLHLCKERKRFVKQAMDSRCALAAAHVSYIRSLRNIGACLRQYAEAETAHESSPSLTATEPEKSPSHNSSYPDDSVDSPLSHNSNPNPNPKPLFNLSYMKTETASSTVTFTINPLSDGDDDLEVTMPAFSPPPPPRPRRPETSSWDYFDTCDDFDSFRFVGLSEQTEIDSECDAAVIGLEKITSQGNVAKSGSETLQDSSFKTKQRKQSCEDNDEREDPSEFITHRAKDFVSSMKDIEHKFFRASESGREVSRMLEVNKIRVGFADMTALKRACCRGKSYSPVSQEPLSHQVTKVIVWKRTSSSRSSTSRNPLIQTSKEDHDDESGSDFIEEFCMISGSHSSSLDRLYAWERKLYDEVKASEMIRKEYDRKCEQLRNQFAKDHSAKSMDKTRAAAKDLHSRIRVAIQSVESISKRIERIRDDELHPQLLEFLQGLIRMWKAMLECHHTQYITISLAYHCRHSSKTAHESVLKRRILAELLEETECFGLSFVDLVHSMASYVEALNGWLHNCVLLPQERSTRNRRPWSPRRVLAPPIFVLCRDWSAGIKTLPSDELSGSIKGFSLDMEMLGEEKGGSLLVSDLSSVHSSLAKLLERLKKFSEASLKMYEDVKVKSEAARVAYTNK

SEQ ID NO: 88668 - protein, 630 aa, Arabidopsis thaliana
  peptide (1)..(630): Ceres Seq. ID no. 12711435
MNKKNEPLHLCKERKRFVKQAMDSRCALAAAHVSYIRSLRNIGACLRQYAEAETAHESSPSLTATEPEKSPSHNSSYPDDSVDSPLSHNSNPNPNPKPLFNLSYMKTETASSTVTFTINPLSDGDDDLEVTMPAFSPPPPPRPRRPETSSWDYFDTCDDFDSFRFVGLSEQTEIDSECDAAVIGLEKITSQGNVAKSGSETLQDSSFKTKQRKQSCEDNDEREDPSEFITHRAKDFVSSMKDIEHKFFRASESGREVSRMLEVNKIRVGFADMTALKRACCRGKSYSPVSQEPLSHQVTKVIVWKRTSSSRSSTSRNPLIQTSKEDHDDESGSDFIEEFCMISGSHSSSLDRLYAWERKLYDEVKASEMIRKEYDRKCEQLRNQFAKDHSAKSMDKTRAAAKDLHSRIRVAIQSVESISKRIERIRDDELHPQLLEFLQGLIRMWKAMLECHHTQYITISLAYHCRHSSKTAHESVLKRRILAELLEETECFGLSFVDLVHSMASYVEALNGWLHNCVLLPQERSTRNRRPWSPRRVLAPPIFVLCRDWSAGIKTLPSDELSGSIKGFSLDMEMLGEEKGGSLLVSDLSSVHSSLAKLLERLKKFSEASLKMYEDVKVKSEAARVAYTNK

SEQ ID NO: 88669 - DNA, 1913 bp, Arabidopsis thaliana
  misc_feature (1)..(1913): Ceres Seq. ID no. 12711436
  misc_feature (1)..(1913): Ortholog of  Ceres SEQ ID NO 15177304 as cited in SEQ ID NO 52668
acaaaactcacaccccaaaaccgatccaaattccgagaaagacaaccaaattttccttttcctctgcaaaaatgtttattgagagcttcaaagttgagagcccgaacgtgaagtacacagagaatgagattcactctgtgtacgattacgagacgacggaggttgttcatgagaagaccgtcaatggcacttaccaatggattgtgaagccaaagactgtcaaatacgatttcaaaaccgatattcgtgtccccaaattaggggttatgcttgtgggtttgggaggaaacaatggatcaactctcaccgctggtgtgattgcgaacaaagaaggaatctcgtgggcaacgaaggacaaagtgcaacaagcgaattacttcgggtcactaactcaagcttcatcgattcgtgtcggatcttttaacggtgaagagatctatgctcctttcaagagtctccttccaatggtgaatccggatgatgttgtgtttggaggatgggatataagtgacatgaacttagcagatgccatggctagagccagggttcttgatatcgacttgcagaaacagctcaggccttacatggagaacattgtgccactccctgggatcttcgatcctgatttcatagctgctaatcaagggtcacgtgctaaccacgtgatcaaaggtaccaagaaggaacaagtcgaccacatcatcaaggacatgagggagtttaaggagaagaataaggtggataaggttgtggttctctggacggctaacacagagcgttatagcaatgtggtcgttgggatgaacgatacaatggagaatctcatggagtctgtggatagggatgaggctgagatctctccttcaacactttatgcgattgcttgtgttcttgagggaatcccgttcatcaatggaagccctcaaaacacctttgttccaggtctaattgatatggcgatcaggaacaatgttttgatcggtggagatgatttcaagagtggtcaaaccaagatgaaatctgtcttggttgatttcctagttggcgcaggaatcaagcctacttcaattgtgagctacaatcacttgggaaacaacgatggaatgaatctctcagctccacagactttcagatctaaggagatctccaaaagcaatgtcgtggacgatatggttgctagcaatggtatcctctttgagcctggggaacacccggaccatgttgttgtcatcaagtatgtaccgtatgttgcggatagtaagcgagccatggacgagtacacatcagagatattcatgggagggaagaacacaattgtgatgcacaatacctgcgaggactctctcttagctgctccaatcatcttggatcttgttctcctcgcggagctcagcaccaggatccagttcaaatccgagggagagggaaagtttcactctttccatcctgtggccaccatactcagctacctcaccaaggcaccacttgtaccgccgggaactccggtgattaacgcactgtcgaagcagcgggctatgctggagaatattatgagggcgtgcgttggactggctccggagaacaacatgatcatggaattcaagtgaacatgaagaagcatgaatctaagacctttaattagctcataatttaagagtctttaatttgtgtcgttgtttggtttttatataatgtttttaaattatgaaagcttgtgtttctgagagaccaaagagcttttagtttggtctctgtagggtgtgaagtaacttgtatttgtagtaatccggatgggttggtatattttgcaagtgtgtctaggttggaccataatttcaatatctcttatgattttgtttcatatgtttgtaaaacagcttatcttttgagatatataatcatggttttggttc

SEQ ID NO: 88670 - protein, 534 aa, Arabidopsis thaliana; identical to SEQ ID NO: 26151
  peptide (1)..(534): Ceres Seq. ID no. 12711437

SEQ ID NO: 88671 - protein, 511 aa, Arabidopsis thaliana; identical to SEQ ID NO: 26152
  peptide (1)..(511): Ceres Seq. ID no. 12711438

SEQ ID NO: 88672 - protein, 446 aa, Arabidopsis thaliana; identical to SEQ ID NO: 26153
  peptide (1)..(446): Ceres Seq. ID no. 12711439

SEQ ID NO: 88673 - DNA, 2328 bp, Arabidopsis thaliana
  misc_feature (1)..(2328): Ceres Seq. ID no. 12711463
  misc_feature (1)..(2328): Ortholog of  Ceres SEQ ID NO 12586556 as cited in SEQ ID NO 64667
  misc_feature (1)..(2328): Ortholog of  Ceres SEQ ID NO 13660894 as cited in SEQ ID NO 67475
atgttgcgtcgtctcttgaaacccaatcttgttgttactctacgcaaactctcttcttcttccgcaagctacgtcgatcgtcatattagtgtgattctctgcgatcagagcttgagcttagagtctctgcgcaaacacaacgctcttatcatcaccggaggactctcggaaaacatcttcgtcgcatcgaagctaatttcatcttacgcttcttacgggaaacccaatttgtcttccagagtcttccatttggttactcgaagagatatctttctttggaattctattatcaaagcacatttctccaatggggattatgctcgatccttgtgtttcttcttctcaatgctcttgtctggccaatcccctgatcatttcactgctcccatggttgtttctgcttgtgcggagcttttgtggtttcatgttgggactttcgttcacgggcttgttttgaaacatggaggttttgatagaaacactgctgtgggagcttcctttgtgtatttctactcaaagtgtgggtttttacaagatgcgtgtcttgtgttcgacgaaatgcctgacagagatgttgttgcttggactgccattatatctgggcatgtgcagaacggcgagagcgagggaggtttgggttatctttgcaagatgcatagtgctggttctgatgttgataagccgaatcccagaacattggaatgcggattccaagcttgttctaatctgggagctttgaaagaaggaagatgtcttcatggatttgcggtgaaaaatggtttagcttcttccaagtttgtccagtcttccatgttttcattctattcgaaatctgggaatccatccgaggcttatctttctttccgtgaacttggggatgaagatatgttttcatggacttcgattatagcgtcactggcgagatcaggtgacatggaggaaagttttgatatgttctgggaaatgcagaacaagggaatgcacccagatggggttgtcattagctgtttgattaatgaactaggtaagatgatgcttgtccctcagggtaaagcctttcacgggttcgtcataagacattgtttctctttagacagtacagtttgcaattccttgttatcgatgtactgcaaattcgagcttctgtctgtggctgagaagcttttctgtaggataagcgaagaaggaaacaaagaagcttggaatacaatgcttaaaggctatggtaaaatgaaatgtcacgtaaagtgtatcgagttatttagaaaaattcagaatcttggaattgaaatcgactctgccagcgcaacctctgtcatatcttcttgttcccacataggagcggtgctactagggaagtcgttgcattgctatgttgtcaaaactagcctggatcttaccatctcagtggtcaattccctcattgatttgtatggaaaaatgggagacttgactgtagcttggaggatgttttgtgaagcagatactaacgttatcacttggaacgcaatgattgcgtcttatgttcactgtgagcaatccgaaaaagccattgcattgttcgatagaatggtttctgagaatttcaaacccagctcaataactttggtgactctgcttatggcttgtgtcaatactggctctctggagagaggacagatgattcatcggtacatcactgaaacagagcacgagatgaatctttctctttcagctgctctcattgacatgtacgcgaaatgtggccaccttgaaaagtcacgagaactgtttgatgctggaaatcagaaggatgccgtttgttggaatgtgatgatatcaggttatggaatgcacggagatgttgaatcggccatagcactttttgatcaaatggaagagtctgatgttaaaccaaccggacctacatttcttgcgcttctatcggcttgcacgcacgctggtttagtagaacaagggaaaaaactatttctcaagatgcatcagtacgatgtgaaacccaacttaaagcattactcttgtcttgtggatcttctttccaggtctggtaatttggaggaagctgaaagcacagtcatgtctatgccattctcaccagacggggtcatatggggaacattgttgagctcatgcatgacccatggggagtttgagatgggaattcgaatggcagaacgtgcggttgctagtgatccgcagaacgatgggtattatataatgcttgcgaacatgtacagtgctgcaggtaagtgggaagaagcggaaagggcacgagagatgatgagggaaagcggagttggtaagagagctggtcatagtgtagtctaa

SEQ ID NO: 88674 - protein, 775 aa, Arabidopsis thaliana
  peptide (1)..(775): Ceres Seq. ID no. 12711464
MLRRLLKPNLVVTLRKLSSSSASYVDRHISVILCDQSLSLESLRKHNALIITGGLSENIFVASKLISSYASYGKPNLSSRVFHLVTRRDIFLWNSIIKAHFSNGDYARSLCFFFSMLLSGQSPDHFTAPMVVSACAELLWFHVGTFVHGLVLKHGGFDRNTAVGASFVYFYSKCGFLQDACLVFDEMPDRDVVAWTAIISGHVQNGESEGGLGYLCKMHSAGSDVDKPNPRTLECGFQACSNLGALKEGRCLHGFAVKNGLASSKFVQSSMFSFYSKSGNPSEAYLSFRELGDEDMFSWTSIIASLARSGDMEESFDMFWEMQNKGMHPDGVVISCLINELGKMMLVPQGKAFHGFVIRHCFSLDSTVCNSLLSMYCKFELLSVAEKLFCRISEEGNKEAWNTMLKGYGKMKCHVKCIELFRKIQNLGIEIDSASATSVISSCSHIGAVLLGKSLHCYVVKTSLDLTISVVNSLIDLYGKMGDLTVAWRMFCEADTNVITWNAMIASYVHCEQSEKAIALFDRMVSENFKPSSITLVTLLMACVNTGSLERGQMIHRYITETEHEMNLSLSAALIDMYAKCGHLEKSRELFDAGNQKDAVCWNVMISGYGMHGDVESAIALFDQMEESDVKPTGPTFLALLSACTHAGLVEQGKKLFLKMHQYDVKPNLKHYSCLVDLLSRSGNLEEAESTVMSMPFSPDGVIWGTLLSSCMTHGEFEMGIRMAERAVASDPQNDGYYIMLANMYSAAGKWEEAERAREMMRESGVGKRAGHSVV

SEQ ID NO: 88675 - protein, 660 aa, Arabidopsis thaliana
  peptide (1)..(660): Ceres Seq. ID no. 12711465
MLLSGQSPDHFTAPMVVSACAELLWFHVGTFVHGLVLKHGGFDRNTAVGASFVYFYSKCGFLQDACLVFDEMPDRDVVAWTAIISGHVQNGESEGGLGYLCKMHSAGSDVDKPNPRTLECGFQACSNLGALKEGRCLHGFAVKNGLASSKFVQSSMFSFYSKSGNPSEAYLSFRELGDEDMFSWTSIIASLARSGDMEESFDMFWEMQNKGMHPDGVVISCLINELGKMMLVPQGKAFHGFVIRHCFSLDSTVCNSLLSMYCKFELLSVAEKLFCRISEEGNKEAWNTMLKGYGKMKCHVKCIELFRKIQNLGIEIDSASATSVISSCSHIGAVLLGKSLHCYVVKTSLDLTISVVNSLIDLYGKMGDLTVAWRMFCEADTNVITWNAMIASYVHCEQSEKAIALFDRMVSENFKPSSITLVTLLMACVNTGSLERGQMIHRYITETEHEMNLSLSAALIDMYAKCGHLEKSRELFDAGNQKDAVCWNVMISGYGMHGDVESAIALFDQMEESDVKPTGPTFLALLSACTHAGLVEQGKKLFLKMHQYDVKPNLKHYSCLVDLLSRSGNLEEAESTVMSMPFSPDGVIWGTLLSSCMTHGEFEMGIRMAERAVASDPQNDGYYIMLANMYSAAGKWEEAERAREMMRESGVGKRAGHSVV

SEQ ID NO: 88676 - protein, 646 aa, Arabidopsis thaliana
  peptide (1)..(646): Ceres Seq. ID no. 12711466
MVVSACAELLWFHVGTFVHGLVLKHGGFDRNTAVGASFVYFYSKCGFLQDACLVFDEMPDRDVVAWTAIISGHVQNGESEGGLGYLCKMHSAGSDVDKPNPRTLECGFQACSNLGALKEGRCLHGFAVKNGLASSKFVQSSMFSFYSKSGNPSEAYLSFRELGDEDMFSWTSIIASLARSGDMEESFDMFWEMQNKGMHPDGVVISCLINELGKMMLVPQGKAFHGFVIRHCFSLDSTVCNSLLSMYCKFELLSVAEKLFCRISEEGNKEAWNTMLKGYGKMKCHVKCIELFRKIQNLGIEIDSASATSVISSCSHIGAVLLGKSLHCYVVKTSLDLTISVVNSLIDLYGKMGDLTVAWRMFCEADTNVITWNAMIASYVHCEQSEKAIALFDRMVSENFKPSSITLVTLLMACVNTGSLERGQMIHRYITETEHEMNLSLSAALIDMYAKCGHLEKSRELFDAGNQKDAVCWNVMISGYGMHGDVESAIALFDQMEESDVKPTGPTFLALLSACTHAGLVEQGKKLFLKMHQYDVKPNLKHYSCLVDLLSRSGNLEEAESTVMSMPFSPDGVIWGTLLSSCMTHGEFEMGIRMAERAVASDPQNDGYYIMLANMYSAAGKWEEAERAREMMRESGVGKRAGHSVV

SEQ ID NO: 88677 - DNA, 1064 bp, Arabidopsis thaliana
  misc_feature (1)..(1064): Ceres Seq. ID no. 12711515
  misc_feature (1)..(1064): Ortholog of  Ceres SEQ ID NO 14304791 as cited in SEQ ID NO 53562
  misc_feature (1)..(1064): Ortholog of  Ceres SEQ ID NO 13594298 as cited in SEQ ID NO 57803
  misc_feature (1)..(1064): Ortholog of  Ceres SEQ ID NO 14301894 as cited in SEQ ID NO 61677
  misc_feature (1)..(1064): Ortholog of  Ceres SEQ ID NO 13503476 as cited in SEQ ID NO 61978
  misc_feature (1)..(1064): Ortholog of  Ceres SEQ ID NO 12578438 as cited in SEQ ID NO 62201
  misc_feature (1)..(1064): Ortholog of  Ceres SEQ ID NO 12617675 as cited in SEQ ID NO 64656
atctcacaccaaaacacaaagctctcatcttcttttagtttccaaactcacccccacaactttcatttctatcaaccaaacccaaatgggtccaagttcgagcctcaccaccatcgtggcgactgttcttcttgtgacattgttcggttcggcctacgcaagcaacttcttcgacgagtttgacctcacttggggtgaccacagaggcaaaatcttcaacggaggaaatatgctgtctttgtcgctggaccaggtttccgggtcaggtttcaaatccaaaaaagagtatttggtcggtcggatcgatatgcagctcaaacttgtcgccggaaactcggccggcaccgtcactgcttactacttgtcttcacaaggagcaacacatgacgagatagactttgagtttctaggtaacgagacagggaagccttatgttcttcacaccaatgtctttgctcaagggaaaggagacagagagcaacagttttatctctggttcgacccaaccaagaacttccacacttactccattgtctggagaccccaacacatcatattcttggtggacaatttacccattagagtgttcaacaatgcagagaagctcggcgttcctttcccaaagagtcaacccatgaggatctactctagcctgtggaatgcagacgattgggccacgagaggtggtctagtcaagactgactggtccaaggctcctttcacagcttactacagaggattcaacgctgcggcttgcacagcctcttcaggatgtgaccctaaattcaagagttcttttggtgatggtaaattgcaagtggcaaccgagctcaatgcttatggcaggaggagactcagatgggttcagaaatacttcatgatctataattattgctctgatctcaaaaggttccctcgtggattccctccagaatgcaagaagtccagagtctgatgaacacatattacctcatatttctctgcttgtttgatgcaattcttaaattcctctgttattccattgtacattgtcaagatcaataaagcattcctggtttcaaaat

SEQ ID NO: 88678 - protein, 317 aa, Arabidopsis thaliana
  peptide (1)..(317): Ceres Seq. ID no. 12711516
SHTKTQSSHLLLVSKLTPTTFISINQTQMGPSSSLTTIVATVLLVTLFGSAYASNFFDEFDLTWGDHRGKIFNGGNMLSLSLDQVSGSGFKSKKEYLVGRIDMQLKLVAGNSAGTVTAYYLSSQGATHDEIDFEFLGNETGKPYVLHTNVFAQGKGDREQQFYLWFDPTKNFHTYSIVWRPQHIIFLVDNLPIRVFNNAEKLGVPFPKSQPMRIYSSLWNADDWATRGGLVKTDWSKAPFTAYYRGFNAAACTASSGCDPKFKSSFGDGKLQVATELNAYGRRRLRWVQKYFMIYNYCSDLKRFPRGFPPECKKSRV

SEQ ID NO: 88679 - protein, 289 aa, Arabidopsis thaliana
  peptide (1)..(289): Ceres Seq. ID no. 12711517
MGPSSSLTTIVATVLLVTLFGSAYASNFFDEFDLTWGDHRGKIFNGGNMLSLSLDQVSGSGFKSKKEYLVGRIDMQLKLVAGNSAGTVTAYYLSSQGATHDEIDFEFLGNETGKPYVLHTNVFAQGKGDREQQFYLWFDPTKNFHTYSIVWRPQHIIFLVDNLPIRVFNNAEKLGVPFPKSQPMRIYSSLWNADDWATRGGLVKTDWSKAPFTAYYRGFNAAACTASSGCDPKFKSSFGDGKLQVATELNAYGRRRLRWVQKYFMIYNYCSDLKRFPRGFPPECKKSRV

SEQ ID NO: 88680 - protein, 241 aa, Arabidopsis thaliana
  peptide (1)..(241): Ceres Seq. ID no. 12711518
MLSLSLDQVSGSGFKSKKEYLVGRIDMQLKLVAGNSAGTVTAYYLSSQGATHDEIDFEFLGNETGKPYVLHTNVFAQGKGDREQQFYLWFDPTKNFHTYSIVWRPQHIIFLVDNLPIRVFNNAEKLGVPFPKSQPMRIYSSLWNADDWATRGGLVKTDWSKAPFTAYYRGFNAAACTASSGCDPKFKSSFGDGKLQVATELNAYGRRRLRWVQKYFMIYNYCSDLKRFPRGFPPECKKSRV

SEQ ID NO: 88681 - DNA, 1434 bp, Arabidopsis thaliana
  misc_feature (1)..(1434): Ceres Seq. ID no. 12711531
  misc_feature (1)..(1434): Ortholog of  Ceres SEQ ID NO 12586556 as cited in SEQ ID NO 64667
  misc_feature (1)..(1434): Ortholog of  Ceres SEQ ID NO 13660894 as cited in SEQ ID NO 67475
atgcacttaccatcttcctcttccttgtactcgtctcctacgaagagtctattcgcaatgttcttgaaagctcgagctttatcagtaactacacagaatcctcctgatctcttctcgcttctacatcattctccaaacgctaaacatctacgccatctccacgctcaccttcttcgtacatttctctattccaacgttgtgctcagctccaagctcgtcctcgcttattccaagctgaaccatctctttcctacttcgctttctgtcttctggcacatgccttatcgcaacattttctcttggaatataatcatcggtgagttctctagatcgggttttgcttccaagtcaattgatttgtttcttcgtatgtggcgagagtcttgtgttagaccggatgattttacgcttcctcttattctacgagcttgctctgcgtctagggaagcgaaatctggagatttgattcatgttctgtgtttgaaacttgggtttagctcaagtttgtttgttagttcggctttagtgataatgtatgtagatatggggaaacttttacatgcacgtaagttgttcgacgatatgcctgtgagagactctgttctttatacagctatgtttggtgggtatgttcagcaaggagaagctatgttgggtttagccatgttcagagaaatggggtattctggatttgcgctggattcagtggtgatggtgagtttacttatggcttgtggacaacttggagcgttgaagcacgggaagagcgtccatggatggtgtatcaggagatgctcctgcttgggcttgaatctcggcaatgctataacagatatgtatgtaaagtgctcgatactggactatgcgcacactgtatttgtaaatatgtcgagacgagatgtgatctcttggagctcgcttattttggggtatggtttggatggagacgtggtaatgtcttttaaactctttgatgagatgcttaaggaaggaattgaacccaatgctgtcacttttcttggtgtcttatcagcctgtgcccatggcggtcttgtggaaaaatcttggctgtatttcagactaatgcaggaatataatatagttcctgaactgaaacactatgctagtgtggcggattgtatgtctcgagcaggtcttctggaggaagcagagaagtttctggaagatatgcccgtgaaacctgatgaggctgttatgggtgcggtgttgagtgggtgcaaggtgtatggaaatgtagaagttggggaaagagtggcgagggagctgattcaacttaagccgagaaaagctagctactatgtaacgttggccggtctatattcagctgcaggtcggtttgatgaagctgagagtctgaggcagtggatgaaggagaaacagatttctaaggttcccgggtgtagctcaatatga

SEQ ID NO: 88682 - protein, 477 aa, Arabidopsis thaliana
  peptide (1)..(477): Ceres Seq. ID no. 12711532
MHLPSSSSLYSSPTKSLFAMFLKARALSVTTQNPPDLFSLLHHSPNAKHLRHLHAHLLRTFLYSNVVLSSKLVLAYSKLNHLFPTSLSVFWHMPYRNIFSWNIIIGEFSRSGFASKSIDLFLRMWRESCVRPDDFTLPLILRACSASREAKSGDLIHVLCLKLGFSSSLFVSSALVIMYVDMGKLLHARKLFDDMPVRDSVLYTAMFGGYVQQGEAMLGLAMFREMGYSGFALDSVVMVSLLMACGQLGALKHGKSVHGWCIRRCSCLGLNLGNAITDMYVKCSILDYAHTVFVNMSRRDVISWSSLILGYGLDGDVVMSFKLFDEMLKEGIEPNAVTFLGVLSACAHGGLVEKSWLYFRLMQEYNIVPELKHYASVADCMSRAGLLEEAEKFLEDMPVKPDEAVMGAVLSGCKVYGNVEVGERVARELIQLKPRKASYYVTLAGLYSAAGRFDEAESLRQWMKEKQISKVPGCSSI

SEQ ID NO: 88683 - protein, 458 aa, Arabidopsis thaliana
  peptide (1)..(458): Ceres Seq. ID no. 12711533
MFLKARALSVTTQNPPDLFSLLHHSPNAKHLRHLHAHLLRTFLYSNVVLSSKLVLAYSKLNHLFPTSLSVFWHMPYRNIFSWNIIIGEFSRSGFASKSIDLFLRMWRESCVRPDDFTLPLILRACSASREAKSGDLIHVLCLKLGFSSSLFVSSALVIMYVDMGKLLHARKLFDDMPVRDSVLYTAMFGGYVQQGEAMLGLAMFREMGYSGFALDSVVMVSLLMACGQLGALKHGKSVHGWCIRRCSCLGLNLGNAITDMYVKCSILDYAHTVFVNMSRRDVISWSSLILGYGLDGDVVMSFKLFDEMLKEGIEPNAVTFLGVLSACAHGGLVEKSWLYFRLMQEYNIVPELKHYASVADCMSRAGLLEEAEKFLEDMPVKPDEAVMGAVLSGCKVYGNVEVGERVARELIQLKPRKASYYVTLAGLYSAAGRFDEAESLRQWMKEKQISKVPGCSSI

SEQ ID NO: 88684 - protein, 385 aa, Arabidopsis thaliana
  peptide (1)..(385): Ceres Seq. ID no. 12711534
MPYRNIFSWNIIIGEFSRSGFASKSIDLFLRMWRESCVRPDDFTLPLILRACSASREAKSGDLIHVLCLKLGFSSSLFVSSALVIMYVDMGKLLHARKLFDDMPVRDSVLYTAMFGGYVQQGEAMLGLAMFREMGYSGFALDSVVMVSLLMACGQLGALKHGKSVHGWCIRRCSCLGLNLGNAITDMYVKCSILDYAHTVFVNMSRRDVISWSSLILGYGLDGDVVMSFKLFDEMLKEGIEPNAVTFLGVLSACAHGGLVEKSWLYFRLMQEYNIVPELKHYASVADCMSRAGLLEEAEKFLEDMPVKPDEAVMGAVLSGCKVYGNVEVGERVARELIQLKPRKASYYVTLAGLYSAAGRFDEAESLRQWMKEKQISKVPGCSSI

SEQ ID NO: 88685 - DNA, 687 bp, Arabidopsis thaliana
  misc_feature (1)..(687): Ceres Seq. ID no. 12711546
  misc_feature (1)..(687): Ortholog of  Ceres SEQ ID NO 13599232 as cited in SEQ ID NO 991
gagactcgctctaagacccagtttgactcgttgatcaacgaaagtgtgagtttgaggtgaaagatgacggcgacgatagatcggaggttatcaacgctgaatccaaacgcgccggtgtttgatccggtggaatttcgtgaggtggaggatttttcaccgaaatggtgggatctagtaacgacttcgaaatggttccgtgacttttggctcagtgctaactctgagaatgagttcctcggcggcgacgatttctcagttatggaagaagagttcgaggagatgatcgcatcgtctgatggtggatccatggctgatacagttacagaagcagatgtggctagttatttgaagatgcttttgaacatagcggagtctacgaaagagaagatttatagatcgaaggtttcgtcttgttcaccaaagtataatcagaagaagtacatgaatccgaactttaattgtcgccggaatcatcatatctatcagccacggtgaagcttctagaaggaacaaagctcttcttcttcttctttcgagatgataatcagagtcgtgtctgtgtttatggctgaatctgatcttttctgctttcttgttttttgtaattctgtgaatattcctactttctataataacatcactttatgttatgagcataaccaaattgaaatcgaaccaggtcgaatc

SEQ ID NO: 88686 - protein, 143 aa, Arabidopsis thaliana; identical to SEQ ID NO: 21510
  peptide (1)..(143): Ceres Seq. ID no. 12711547

SEQ ID NO: 88687 - protein, 78 aa, Arabidopsis thaliana; identical to SEQ ID NO: 21511
  peptide (1)..(78): Ceres Seq. ID no. 12711548

SEQ ID NO: 88688 - protein, 71 aa, Arabidopsis thaliana; identical to SEQ ID NO: 21512
  peptide (1)..(71): Ceres Seq. ID no. 12711549

SEQ ID NO: 88689 - DNA, 558 bp, Arabidopsis thaliana
  misc_feature (1)..(558): Ceres Seq. ID no. 12711560
  misc_feature (1)..(558): Ortholog of  Ceres SEQ ID NO 14309599 as cited in SEQ ID NO 52625
  misc_feature (1)..(558): Ortholog of  Ceres SEQ ID NO 13661426 as cited in SEQ ID NO 61254
atgtcggatcttgctaaagacgcatggcgaaagtatctgattcagcttcaagctcatcctttacgaaccaaggcgatcactgcaggggttttagctggatgtagtgatgctatagctcagaagatctctggagttaaacggattcagttccggagattgcttctccttatgttgtatggctttgcttatggaggaccatttggtcactttttccacaaattgatggataccattttcaaagggaagaagggtaattcaactgttgccaaaaaggttttgttggagcaacttacatcatctccttggaacaattttcttttcatgtcttactatggtttagtagttgaaggaaggccatggaagctagtgaagcacaaacttggaaaagattaccctactatccagttaaccgcatggaagttctggcctatcgtgggatgggttaattatcagtatgtgcctctccaattccgtgttttgttcagcagcttcgtcgcctcttgctggagcatatttctgaacttgaaagcgcgatctccggtgatcaaaaacgcgtag

SEQ ID NO: 88690 - protein, 185 aa, Arabidopsis thaliana
  peptide (1)..(185): Ceres Seq. ID no. 12711561
MSDLAKDAWRKYLIQLQAHPLRTKAITAGVLAGCSDAIAQKISGVKRIQFRRLLLLMLYGFAYGGPFGHFFHKLMDTIFKGKKGNSTVAKKVLLEQLTSSPWNNFLFMSYYGLVVEGRPWKLVKHKLGKDYPTIQLTAWKFWPIVGWVNYQYVPLQFRVLFSSFVASCWSIFLNLKARSPVIKNA

SEQ ID NO: 88691 - protein, 129 aa, Arabidopsis thaliana
  peptide (1)..(129): Ceres Seq. ID no. 12711562
MLYGFAYGGPFGHFFHKLMDTIFKGKKGNSTVAKKVLLEQLTSSPWNNFLFMSYYGLVVEGRPWKLVKHKLGKDYPTIQLTAWKFWPIVGWVNYQYVPLQFRVLFSSFVASCWSIFLNLKARSPVIKNA

SEQ ID NO: 88692 - protein, 111 aa, Arabidopsis thaliana
  peptide (1)..(111): Ceres Seq. ID no. 12711563
MDTIFKGKKGNSTVAKKVLLEQLTSSPWNNFLFMSYYGLVVEGRPWKLVKHKLGKDYPTIQLTAWKFWPIVGWVNYQYVPLQFRVLFSSFVASCWSIFLNLKARSPVIKNA

SEQ ID NO: 88693 - DNA, 2130 bp, Arabidopsis thaliana
  misc_feature (1)..(2130): Ceres Seq. ID no. 12711630
  misc_feature (1)..(2130): Ortholog of  Ceres SEQ ID NO 15171224 as cited in SEQ ID NO 52348
atggcgagtactagtagtggtggtggtggtggtggtgataagaagaagaagaaaggtttctctgtaaaccctaaagattataaacttatggaagaagttggatatggtgctagtgctgttgttcatcgtgctatttatcttcctactaatgaagttgttgctatcaagtctttggatctcgatcgctgcaatagtaatctggatgatataaggagggaggctcagactatgactttgatagaccatccgaatgttataaagtcgttttgttcgtttgctgttgatcatcatctatgggtcgttatgccatttatggctcagggttcgtgtttgcatctaatgaaagcagcgtatccagatggatttgaagaggcggctatatgttctatgctgaaagaaacacttaaagctcttgattatcttcatagacaagggcatatccatcgagatgttaaggctggaaacatacttcttgatgacactggcgagattaagttaggtgattttggtgtctctgcatgtttgtttgacaatggcgataggcaacgtgcaagaaatacatttgttggtactccatgctggatggcaccggaagtcttgcagccagggagtggatacaattcaaaggctgatatatggtcttttggaataacggcgctggagttggctcacggtcatgcacctttctcaaaatatccccctatgaaggtactcttaatgactatccaaaatgcaccacctggccttgattatgaccgtgataagaagttttcaaagaagatgtccagctgcgctcagtcctttaaagaattggtagcattgtgtctggtgaaagatcaaacaaaaaggccaactgctgaaaaattgttgaaacactcatttttcaagaatgtgaagcctccagagatctgtgtaaaaaaattatttgtcgatttaccacctctttggactcgcgtaaaagctcttcaggccaaggatgctgcacagcttgctttgaaaggaatggcctctgctgaccaggatgctatatcacagagtgaataccaaagaggagtaagtgcttggaacttcaatatcgaagatttgaaagaacaagcatctttgctagatgatgatgacattctaacagagagtagggaagaagaagaatcttttggcgaacagttgcataataaggtgaatgacagagggcaagtatctggtagtcaattgctatctgaaaacatgaatggaaaggaaaaagcttcagatactgaggtggtagaacctatctgtgaagagaaatccactctcaattcaaccacttcttctgtggaacaaccggcatcaagttcagaacaagacgttccacaggccaagggtaagccagtgagactccagactcatagtggaccactttcatccggtgtcgtgttaatcaattcagactcagagaaggttcatggttatgaaaggtctgagagtgaacggcaactgaaatcatcagtccggagggcacccagctttagtggtcctttgaatcttccaaatcgtgcttcagcaaacagtctttcagctcctatcaaatcttctggagatgacaagtcgaaggctaatgtggttcaaatcaaaggaagattttcagtaacatcagaaaacttggatcttgcaagggcatcccctttgagaaaatctgccagtgttgggaattggatacttgattctaaaatgccaacgggccaggccatcaaggagtcaagtagtcatctctcattcattatacctcagcttcaaaatctgttccagcaaaattcaatgcagcaggatcttattatgaatctagtgaataccttacaacaagctgctgaaacaacagatggttctcaaaatggaaagttgccgcctttgcctcgaggatctgacagcaatggaaccgttgtagaacttacagcagctgagcgagagaggttactacttaccaagataaccgagcttcgagctaggttgttcctcttcttcaatcaatcacacctttcttataggagatcaatgtggatgaaagagttgacggaagaacttgaagtagaaaaatcaaaacagacccaactgcagcagaaattgaaatcagtcaccggtcgcgagcaattgtaa

SEQ ID NO: 88694 - protein, 709 aa, Arabidopsis thaliana
  peptide (1)..(709): Ceres Seq. ID no. 12711631
MASTSSGGGGGGDKKKKKGFSVNPKDYKLMEEVGYGASAVVHRAIYLPTNEVVAIKSLDLDRCNSNLDDIRREAQTMTLIDHPNVIKSFCSFAVDHHLWVVMPFMAQGSCLHLMKAAYPDGFEEAAICSMLKETLKALDYLHRQGHIHRDVKAGNILLDDTGEIKLGDFGVSACLFDNGDRQRARNTFVGTPCWMAPEVLQPGSGYNSKADIWSFGITALELAHGHAPFSKYPPMKVLLMTIQNAPPGLDYDRDKKFSKKMSSCAQSFKELVALCLVKDQTKRPTAEKLLKHSFFKNVKPPEICVKKLFVDLPPLWTRVKALQAKDAAQLALKGMASADQDAISQSEYQRGVSAWNFNIEDLKEQASLLDDDDILTESREEEESFGEQLHNKVNDRGQVSGSQLLSENMNGKEKASDTEVVEPICEEKSTLNSTTSSVEQPASSSEQDVPQAKGKPVRLQTHSGPLSSGVVLINSDSEKVHGYERSESERQLKSSVRRAPSFSGPLNLPNRASANSLSAPIKSSGDDKSKANVVQIKGRFSVTSENLDLARASPLRKSASVGNWILDSKMPTGQAIKESSSHLSFIIPQLQNLFQQNSMQQDLIMNLVNTLQQAAETTDGSQNGKLPPLPRGSDSNGTVVELTAAERERLLLTKITELRARLFLFFNQSHLSYRRSMWMKELTEELEVEKSKQTQLQQKLKSVTGREQL

SEQ ID NO: 88695 - protein, 680 aa, Arabidopsis thaliana
  peptide (1)..(680): Ceres Seq. ID no. 12711632
MEEVGYGASAVVHRAIYLPTNEVVAIKSLDLDRCNSNLDDIRREAQTMTLIDHPNVIKSFCSFAVDHHLWVVMPFMAQGSCLHLMKAAYPDGFEEAAICSMLKETLKALDYLHRQGHIHRDVKAGNILLDDTGEIKLGDFGVSACLFDNGDRQRARNTFVGTPCWMAPEVLQPGSGYNSKADIWSFGITALELAHGHAPFSKYPPMKVLLMTIQNAPPGLDYDRDKKFSKKMSSCAQSFKELVALCLVKDQTKRPTAEKLLKHSFFKNVKPPEICVKKLFVDLPPLWTRVKALQAKDAAQLALKGMASADQDAISQSEYQRGVSAWNFNIEDLKEQASLLDDDDILTESREEEESFGEQLHNKVNDRGQVSGSQLLSENMNGKEKASDTEVVEPICEEKSTLNSTTSSVEQPASSSEQDVPQAKGKPVRLQTHSGPLSSGVVLINSDSEKVHGYERSESERQLKSSVRRAPSFSGPLNLPNRASANSLSAPIKSSGDDKSKANVVQIKGRFSVTSENLDLARASPLRKSASVGNWILDSKMPTGQAIKESSSHLSFIIPQLQNLFQQNSMQQDLIMNLVNTLQQAAETTDGSQNGKLPPLPRGSDSNGTVVELTAAERERLLLTKITELRARLFLFFNQSHLSYRRSMWMKELTEELEVEKSKQTQLQQKLKSVTGREQL

SEQ ID NO: 88696 - protein, 633 aa, Arabidopsis thaliana
  peptide (1)..(633): Ceres Seq. ID no. 12711633
MTLIDHPNVIKSFCSFAVDHHLWVVMPFMAQGSCLHLMKAAYPDGFEEAAICSMLKETLKALDYLHRQGHIHRDVKAGNILLDDTGEIKLGDFGVSACLFDNGDRQRARNTFVGTPCWMAPEVLQPGSGYNSKADIWSFGITALELAHGHAPFSKYPPMKVLLMTIQNAPPGLDYDRDKKFSKKMSSCAQSFKELVALCLVKDQTKRPTAEKLLKHSFFKNVKPPEICVKKLFVDLPPLWTRVKALQAKDAAQLALKGMASADQDAISQSEYQRGVSAWNFNIEDLKEQASLLDDDDILTESREEEESFGEQLHNKVNDRGQVSGSQLLSENMNGKEKASDTEVVEPICEEKSTLNSTTSSVEQPASSSEQDVPQAKGKPVRLQTHSGPLSSGVVLINSDSEKVHGYERSESERQLKSSVRRAPSFSGPLNLPNRASANSLSAPIKSSGDDKSKANVVQIKGRFSVTSENLDLARASPLRKSASVGNWILDSKMPTGQAIKESSSHLSFIIPQLQNLFQQNSMQQDLIMNLVNTLQQAAETTDGSQNGKLPPLPRGSDSNGTVVELTAAERERLLLTKITELRARLFLFFNQSHLSYRRSMWMKELTEELEVEKSKQTQLQQKLKSVTGREQL

SEQ ID NO: 88697 - DNA, 2117 bp, Arabidopsis thaliana
  misc_feature (1)..(2117): Ceres Seq. ID no. 12711647
  misc_feature (1)..(2117): Ortholog of  Ceres SEQ ID NO 14302419 as cited in SEQ ID NO 66752
aaaaccaaatccgccataactctctctctctctcccacttcccacagagagacacattcatgccagcaatgccaggtctcgtctcagtcaaaactccttccgatacaccgccgctacgtgtagccgtaccagacacgcaacctctctcaaacccgccgcgaactccgatgaagaaaaccccttcctctacaccatctcgatccaaaccatcaccaaatagatccaccggcaaaaaagattccccaaccgtatcctcctccaccgcagccgtaatcgacgtcgacgatccatctctagataatccagatctcggtcctttccttctaaaattagctcgtgacgctattgcttctggtgaaggtcctaacaaagcattagattacgcgatccgagcaactaagtcctttgagagatgttgcgccgccgttgctccgcctattcccggtggtagcgatggtggacctgttcttgatctcgctatgagccttcatgttctcgctgctatttactgtagtctcggccgatttgatgaagctgtaccacctcttgaacgagctattcaagtccctgatccgactcgtggccctgaccactctctcgctgcgttttctggtcatatgcaacttggtgatacgttgtctatgcttggtcagattgatagatctattgcttgttatgaagaaggtcttaagatccagatccagactttgggtgatactgatccacgagttggtgaaacttgcaggtacttagcagaagcatatgttcaagcaatgcagttcaataaagcggaagagttatgcaagaagactctagagattcaccgagcgcatagtgaacctgcttcactggaggaagcagctgataggagattgatggcaattatctgcgaggctaaaggagattatgaaaacgctcttgagcatcttgttcttgctagtatggctatgattgcgagtggacaagaatctgaggttgcatcgattgatgttagtattgggaatatttacatgtcgctgtgccggtttgatgaagctgtgttttcatatcagaaggctcttactgtgtttaaggcttctaaaggagagactcatccgacggttgcgtcagtgtttgttagattggctgagctttaccatagaacagggaaacttcgtgagtctaagtcttactgtgagaatgcgttgaggatatacaataagccggtgcctgggacaactgtggaggagattgctggtggattaactgagatttctgctatttatgagtctgtagatgaacctgaggaagcattgaagctacttcagaagtctatgaaattgcttgaggataagccaggacagcagagcgccattgcagggttagaggcacggatgggagttatgtattacacagtggggaggtacgaggacgcaagaaacgcgtttgagagcgctgtgacaaagctacgggcagcaggtgagaaatctgccttcttcggtgttgtattaaaccagatgggactagcctgcgttcagcttttcaagattgatgaagcgggtgagctgtttgaagaagcaagaggtattcttgaacaagaacgtggaccgtgcgatcaggacactctcggtgtttatagcaatctagctgctacctatgacgctatgggaaggatagaggatgcgattgagatattagagcaggttctgaagctgagagaggaaaagctcgggactgcgaatccggattttgaagacgagaagaaacgtttggccgagcttttgaaggaagctgggcggtcgcggaactacaaagccaagtcgctccagaatctgattgatccaaatgcaagacctccgaagaaagagtcttctgctaagaaatggcccagcctcggtttcaagttctgaggaaaaaattatcatataaaataaatcatccacatatatattcaatattttattttattgttattgttatattttttatctgatctattttctgtatcataatctgaggttgatgaattaatttcatgtatagtgtttttatttgagtttggtgaaatactgccaagatggtgagctgtttgtttgagtttgaaatttctttaattcaatcacttttttcttcttctg

SEQ ID NO: 88698 - protein, 628 aa, Arabidopsis thaliana
  peptide (1)..(628): Ceres Seq. ID no. 12711648
NQIRHNSLSLSHFPQRDTFMPAMPGLVSVKTPSDTPPLRVAVPDTQPLSNPPRTPMKKTPSSTPSRSKPSPNRSTGKKDSPTVSSSTAAVIDVDDPSLDNPDLGPFLLKLARDAIASGEGPNKALDYAIRATKSFERCCAAVAPPIPGGSDGGPVLDLAMSLHVLAAIYCSLGRFDEAVPPLERAIQVPDPTRGPDHSLAAFSGHMQLGDTLSMLGQIDRSIACYEEGLKIQIQTLGDTDPRVGETCRYLAEAYVQAMQFNKAEELCKKTLEIHRAHSEPASLEEAADRRLMAIICEAKGDYENALEHLVLASMAMIASGQESEVASIDVSIGNIYMSLCRFDEAVFSYQKALTVFKASKGETHPTVASVFVRLAELYHRTGKLRESKSYCENALRIYNKPVPGTTVEEIAGGLTEISAIYESVDEPEEALKLLQKSMKLLEDKPGQQSAIAGLEARMGVMYYTVGRYEDARNAFESAVTKLRAAGEKSAFFGVVLNQMGLACVQLFKIDEAGELFEEARGILEQERGPCDQDTLGVYSNLAATYDAMGRIEDAIEILEQVLKLREEKLGTANPDFEDEKKRLAELLKEAGRSRNYKAKSLQNLIDPNARPPKKESSAKKWPSLGFKF

SEQ ID NO: 88699 - protein, 609 aa, Arabidopsis thaliana; identical to SEQ ID NO: 26334
  peptide (1)..(609): Ceres Seq. ID no. 12711649

SEQ ID NO: 88700 - protein, 606 aa, Arabidopsis thaliana; identical to SEQ ID NO: 26335
  peptide (1)..(606): Ceres Seq. ID no. 12711650

SEQ ID NO: 88701 - DNA, 1053 bp, Arabidopsis thaliana
  misc_feature (1)..(1053): Ceres Seq. ID no. 12711675
  misc_feature (1)..(1053): Ortholog of  Ceres SEQ ID NO 14312844 as cited in SEQ ID NO 55601
  misc_feature (1)..(1053): Ortholog of  Ceres SEQ ID NO 14312866 as cited in SEQ ID NO 55630
  misc_feature (1)..(1053): Ortholog of  Ceres SEQ ID NO 13597376 as cited in SEQ ID NO 64002
  misc_feature (1)..(1053): Ortholog of  Ceres SEQ ID NO 13503573 as cited in SEQ ID NO 65402
  misc_feature (1)..(1053): Ortholog of  Ceres SEQ ID NO 13659615 as cited in SEQ ID NO 67248
atggctagaaacgttctagtaagcggtggtgctggatacatcggtagtcacacggtgcttcaacttcttctcggtggttactccgtcgtagttgttgataatctcgataattcctccgccgtctctcttcaacgtgtgaagaaactcgcggctgaacacggagaacgcctctccttccaccaggtggatcttcgagacaggtctgctcttgagaagatattctcagaaacaaagtttgatgcagtgatacattttgctggacttaaagcagttggtgagagtgtagagaagcctttgctttattataataataatcttgttggtactattactcttttggaagttatggctcaacatggctgcaaaaatcttgtgttttcatcatcagcaactgtgtatggctctccaaaagaagttccttgtacagaggagtttccaatttctgctttgaacccatatggacgaacaaagctattcattgaggaaatctgccgcgatgtatacggttctgacccggaatggaagattatattgcttaggtatttcaatcctgttggtgcacatcctagtggtgacattggtgaagaccctcgtggtattccaaacaatctcatgccctttgtacaacaagtggctgttggtaggagacctcatctcactgtctttggaaatgattacaatacaaaagatggaacaggggttcgagattacattcatgttattgatttagctgatggacacatagcggctctacgtaagctagaagattgcaagatcggttgtgaagtgtacaatctcggaacaggaaatggaacatcagttcttgaaatggttgatgcttttgaaaaagcatccggaaagaaaatccctctggtgatcgcgggacgtcgaccgggagatgctgaagttgtatacgcctcgacggaaagagcagaaagtgaattgaattggaaggccaaatatgggattgaggagatgtgtagagatttgtggaactgggctagtaataatccttatggatatgattcctcttctgaagacaactctcattaa

SEQ ID NO: 88702 - protein, 350 aa, Arabidopsis thaliana; identical to SEQ ID NO: 29867
  peptide (1)..(350): Ceres Seq. ID no. 12711676

SEQ ID NO: 88703 - protein, 235 aa, Arabidopsis thaliana
  peptide (1)..(235): Ceres Seq. ID no. 12711677
MAQHGCKNLVFSSSATVYGSPKEVPCTEEFPISALNPYGRTKLFIEEICRDVYGSDPEWKIILLRYFNPVGAHPSGDIGEDPRGIPNNLMPFVQQVAVGRRPHLTVFGNDYNTKDGTGVRDYIHVIDLADGHIAALRKLEDCKIGCEVYNLGTGNGTSVLEMVDAFEKASGKKIPLVIAGRRPGDAEVVYASTERAESELNWKAKYGIEEMCRDLWNWASNNPYGYDSSSEDNSH

SEQ ID NO: 88704 - DNA, 693 bp, Arabidopsis thaliana
  misc_feature (1)..(693): Ceres Seq. ID no. 12711694
  misc_feature (1)..(693): Ortholog of  Ceres SEQ ID NO 15179607 as cited in SEQ ID NO 0
atgaactcactcgccattagagtctccaaggttctcagatcctcttcaatatctcctttagcaataagtgctgagagaggctctaagtcgtggttctctactggtcctatcgatgaaggtgtagaagaagattttgaagaaaatgttacagaaaggcctgagcttcaacctcatggagttgatcctcgtaaaggttggggatttcgcggtgttcatagggcgattatttgtgggaaagtagggcaagcaccgttacagaagatcttaaggaacgggcggacagtaacgatctttacagtaggaacaggtgggatgtttgatcagaggcttgtaggagctactaatcagccaaaaccagctcagtggcatagaatcgctgtgcacaacgaagtgcttggctcttacgctgtccaaaaactcgctaaaaactcgtcggtttatgtggaaggtgatattgagactagagtgtataatgatagcatcagcagtgaagtgaagagtatccctgagatttgcgttcgtcgtgatggtaagattcggatgatcaaatatggtgaaagcattagcaaaatctcttttgatgagctaactaatattcgcaaagaaaaaagagatagttgcttgtgttttaatatttgtttcacatttggcagaagaaggattgatttagtcggagcaagaatattccggtga

SEQ ID NO: 88705 - protein, 230 aa, Arabidopsis thaliana
  peptide (1)..(230): Ceres Seq. ID no. 12711695
MNSLAIRVSKVLRSSSISPLAISAERGSKSWFSTGPIDEGVEEDFEENVTERPELQPHGVDPRKGWGFRGVHRAIICGKVGQAPLQKILRNGRTVTIFTVGTGGMFDQRLVGATNQPKPAQWHRIAVHNEVLGSYAVQKLAKNSSVYVEGDIETRVYNDSISSEVKSIPEICVRRDGKIRMIKYGESISKISFDELTNIRKEKRDSCLCFNICFTFGRRRIDLVGARIFR

SEQ ID NO: 88706 - protein, 126 aa, Arabidopsis thaliana
  peptide (1)..(126): Ceres Seq. ID no. 12711696
MFDQRLVGATNQPKPAQWHRIAVHNEVLGSYAVQKLAKNSSVYVEGDIETRVYNDSISSEVKSIPEICVRRDGKIRMIKYGESISKISFDELTNIRKEKRDSCLCFNICFTFGRRRIDLVGARIFR

SEQ ID NO: 88707 - DNA, 2790 bp, Arabidopsis thaliana
  misc_feature (1)..(2790): Ceres Seq. ID no. 12711701
  misc_feature (1)..(2790): Ortholog of  Ceres SEQ ID NO 15224874 as cited in SEQ ID NO 55015
atggatgagggatcagtaggggatgtgagtaggattgatgaagctgatgttgctcaccttcaattcaagaatagtgagcagtcgtttaaaccggagaacattgaagtccgggaagtaaaagaagtgcaggttcagagagaagctggttctcctgattgttcttatggtgtaatagcagattttttagatggtaagaatggtggtgaccatgtggagcttatagggaatgaaccatgttctagccggcagaatacaaatgatgagggggatgttgtcgaggagttgactgttaaaacttgtgagggatcgagtatggctatagttggtagaccaagtagtagagctagattagagatgaatcgcagtcagtttctgcatcgttttccgctagacggtgatttaccgggtagtagttctatgagtaagaaggtaattgacaggggaacagtaagtatcttgagaaatgctgggaaaatgtctttgcctgagacttcaaatggacaactggctattattgctgttaatggagaagctaatgaacatttgacaaatgttgaacgaaatcctgtacctgtagaggcattgtctcatgaaggcatcaagacaaagatgttatcgcagtctgggttttctcagttttttgttagaaaaacattgaaagggaagggagttactttcagaggcccgccaaacaatagatctaaagcgaggaatatggatcagcaaactgtagctagttctggtagcgctttagtaatagctaatacttcagcaaagatttctagcagcatccctttggcggcttatgatggttctcaacgagagtcttttgacagcaacatgaacaaagagactttaagtcaactcgaaaaccctctggttagaagacggttaggagatacttctagtctctctatccctgcaaagaagcagaaatcaagtggaccaagctctagacagtggcctatgtttcaacgagctggtggcgtcaatatccaaactgaaaataatgatggcgcgatacaggagtttcatttcagatctagtcaacctcattgtagtacagttgcctgcccttttacttcagtgagtgagcagttggaagagaaatggtatgcgagccctgaggagctcaggggtgacatgcgttcagcctcttcaaacatctatagtttgggtattcttctttatgagttgctgagccaatttcagtgtgaaagagctcgtgaggctgcaatgtctgatatccgacaccgcattcttcctcccaaatttctgtcggagaatccaaaggaagctgggttttgtctttggttacttcatccagaatcttcatgccgaccatcaaccaggcaatgcttatctttatccattgaacaagaggacacagagtctgaactcttgcagcatttccttttcttgtcccaagagaaaaggcagaagcatgctggaaatttgatggaagaaattgcgtccgtagaagcagatatcgaggaaattgtcaagagacgttgtgccatagggcctccgtccctggaagaagcttctagctcatctcctgcttctagtgtacctgaaatgagactgatcaggaacattaatcagcttgaaagcgcttatttcgctgcaaggatagacgcacatctccctgaagcacgttataggttacgcccagatagagatctgctaagaaatagtgataatactgtagcagaagtagaaaacagtgagacttggagctcagatgatcgtgttggagcgttctttgatgggttatgcaaatatgctcgatatagtaagtttgaaactcggggtgtgctgaggaccagtgagttgaacaacacttcaaatgtgatttgttctctgggttttgatcgggacgaggattattttgccacagctggtgtgtcgaaaaaaattaagatatatgagttcaattcccttttcaacgaatctgttgacattcattatccagccatagaaatgccaaatagatcaaagcttagcggcgtttgctggaacaactacattaggaactacctagcttcctctgattatgatggtattgtcaagttatgggatgtgacaacaggacaggccatttcacatttcatagagcatgagaagagggcttggtctgttgacttctctgaagcttgtccgacaaaattagccagtggaagcgatgattgttctgtgaagctatggaacatcaatgagaggaactgcttaggaacaatcaggaacattgcaaacgtttgttgtgtgcaattttctccacagtcctctcacttgctagcctttggatcatcagacttcagaacctactgctatgatctaaggaatttaagaactccttggtgcatactgtcaggacacaacaaagcagttagctatgcgaagttcttggataatgaaactcttgtaacagcatcaactgataacacgttaaagctttgggatcttaagaaaaccactcacggtggcctctcaacaaatgcttgcagcttaacttttggcggccatacaaatgagaagaactttgttggtttgtctacttctgatggatatatagcttgtggctctgagacaaatgaggtttatgcctatcaccggtctcttcccatgccaattacctcgtacaagtttggttctattgatccaatatcaggtaaggagatagaggaggacaacaacctgttcgtttcaagcgtttgctggagaaaaagatcgaatatggttgtttcagctagctcaaatgggtcaatcaaagttctacagttggtctga

SEQ ID NO: 88708 - protein, 929 aa, Arabidopsis thaliana
  peptide (1)..(929): Ceres Seq. ID no. 12711702
MDEGSVGDVSRIDEADVAHLQFKNSEQSFKPENIEVREVKEVQVQREAGSPDCSYGVIADFLDGKNGGDHVELIGNEPCSSRQNTNDEGDVVEELTVKTCEGSSMAIVGRPSSRARLEMNRSQFLHRFPLDGDLPGSSSMSKKVIDRGTVSILRNAGKMSLPETSNGQLAIIAVNGEANEHLTNVERNPVPVEALSHEGIKTKMLSQSGFSQFFVRKTLKGKGVTFRGPPNNRSKARNMDQQTVASSGSALVIANTSAKISSSIPLAAYDGSQRESFDSNMNKETLSQLENPLVRRRLGDTSSLSIPAKKQKSSGPSSRQWPMFQRAGGVNIQTENNDGAIQEFHFRSSQPHCSTVACPFTSVSEQLEEKWYASPEELRGDMRSASSNIYSLGILLYELLSQFQCERAREAAMSDIRHRILPPKFLSENPKEAGFCLWLLHPESSCRPSTRQCLSLSIEQEDTESELLQHFLFLSQEKRQKHAGNLMEEIASVEADIEEIVKRRCAIGPPSLEEASSSSPASSVPEMRLIRNINQLESAYFAARIDAHLPEARYRLRPDRDLLRNSDNTVAEVENSETWSSDDRVGAFFDGLCKYARYSKFETRGVLRTSELNNTSNVICSLGFDRDEDYFATAGVSKKIKIYEFNSLFNESVDIHYPAIEMPNRSKLSGVCWNNYIRNYLASSDYDGIVKLWDVTTGQAISHFIEHEKRAWSVDFSEACPTKLASGSDDCSVKLWNINERNCLGTIRNIANVCCVQFSPQSSHLLAFGSSDFRTYCYDLRNLRTPWCILSGHNKAVSYAKFLDNETLVTASTDNTLKLWDLKKTTHGGLSTNACSLTFGGHTNEKNFVGLSTSDGYIACGSETNEVYAYHRSLPMPITSYKFGSIDPISGKEIEEDNNLFVSSVCWRKRSNMVVSASSNGSIKVLQLV

SEQ ID NO: 88709 - protein, 825 aa, Arabidopsis thaliana
  peptide (1)..(825): Ceres Seq. ID no. 12711703
MAIVGRPSSRARLEMNRSQFLHRFPLDGDLPGSSSMSKKVIDRGTVSILRNAGKMSLPETSNGQLAIIAVNGEANEHLTNVERNPVPVEALSHEGIKTKMLSQSGFSQFFVRKTLKGKGVTFRGPPNNRSKARNMDQQTVASSGSALVIANTSAKISSSIPLAAYDGSQRESFDSNMNKETLSQLENPLVRRRLGDTSSLSIPAKKQKSSGPSSRQWPMFQRAGGVNIQTENNDGAIQEFHFRSSQPHCSTVACPFTSVSEQLEEKWYASPEELRGDMRSASSNIYSLGILLYELLSQFQCERAREAAMSDIRHRILPPKFLSENPKEAGFCLWLLHPESSCRPSTRQCLSLSIEQEDTESELLQHFLFLSQEKRQKHAGNLMEEIASVEADIEEIVKRRCAIGPPSLEEASSSSPASSVPEMRLIRNINQLESAYFAARIDAHLPEARYRLRPDRDLLRNSDNTVAEVENSETWSSDDRVGAFFDGLCKYARYSKFETRGVLRTSELNNTSNVICSLGFDRDEDYFATAGVSKKIKIYEFNSLFNESVDIHYPAIEMPNRSKLSGVCWNNYIRNYLASSDYDGIVKLWDVTTGQAISHFIEHEKRAWSVDFSEACPTKLASGSDDCSVKLWNINERNCLGTIRNIANVCCVQFSPQSSHLLAFGSSDFRTYCYDLRNLRTPWCILSGHNKAVSYAKFLDNETLVTASTDNTLKLWDLKKTTHGGLSTNACSLTFGGHTNEKNFVGLSTSDGYIACGSETNEVYAYHRSLPMPITSYKFGSIDPISGKEIEEDNNLFVSSVCWRKRSNMVVSASSNGSIKVLQLV

SEQ ID NO: 88710 - protein, 811 aa, Arabidopsis thaliana
  peptide (1)..(811): Ceres Seq. ID no. 12711704
MNRSQFLHRFPLDGDLPGSSSMSKKVIDRGTVSILRNAGKMSLPETSNGQLAIIAVNGEANEHLTNVERNPVPVEALSHEGIKTKMLSQSGFSQFFVRKTLKGKGVTFRGPPNNRSKARNMDQQTVASSGSALVIANTSAKISSSIPLAAYDGSQRESFDSNMNKETLSQLENPLVRRRLGDTSSLSIPAKKQKSSGPSSRQWPMFQRAGGVNIQTENNDGAIQEFHFRSSQPHCSTVACPFTSVSEQLEEKWYASPEELRGDMRSASSNIYSLGILLYELLSQFQCERAREAAMSDIRHRILPPKFLSENPKEAGFCLWLLHPESSCRPSTRQCLSLSIEQEDTESELLQHFLFLSQEKRQKHAGNLMEEIASVEADIEEIVKRRCAIGPPSLEEASSSSPASSVPEMRLIRNINQLESAYFAARIDAHLPEARYRLRPDRDLLRNSDNTVAEVENSETWSSDDRVGAFFDGLCKYARYSKFETRGVLRTSELNNTSNVICSLGFDRDEDYFATAGVSKKIKIYEFNSLFNESVDIHYPAIEMPNRSKLSGVCWNNYIRNYLASSDYDGIVKLWDVTTGQAISHFIEHEKRAWSVDFSEACPTKLASGSDDCSVKLWNINERNCLGTIRNIANVCCVQFSPQSSHLLAFGSSDFRTYCYDLRNLRTPWCILSGHNKAVSYAKFLDNETLVTASTDNTLKLWDLKKTTHGGLSTNACSLTFGGHTNEKNFVGLSTSDGYIACGSETNEVYAYHRSLPMPITSYKFGSIDPISGKEIEEDNNLFVSSVCWRKRSNMVVSASSNGSIKVLQLV

SEQ ID NO: 88711 - DNA, 2829 bp, Arabidopsis thaliana
  misc_feature (1)..(2829): Ceres Seq. ID no. 12711713
  misc_feature (1)..(2829): Ortholog of  Ceres SEQ ID NO 14309727 as cited in SEQ ID NO 1030
  misc_feature (1)..(2829): Ortholog of  Ceres SEQ ID NO 13581686 as cited in SEQ ID NO 57695
atgtcaatgtcattttccggcgggactcacaacgatcgttggggctccgatttagcttccgccggagaattcacccaaagctttccatccttaccagcaacatactcaccctcaccctcctcctcctcctcctccggcgaagagctcctagaagtaacaatcgaattcccaagcggcgtaataataaacatcgactccgttaccggaaccggcaccgatatttcaggtaccgatctagagatcacctcttgctcggattccggttcaggatcaaggtcgcttagcttaggatggagcgcgtcgtcggagagactgacggcggggacgaactcaaagcagcagatccagaagatctcacggcgtggttacggttattcgtctcggtctgcaccggaaccggtggttccacacagaggcgaaattaccgattcggttaatctccctcgagctttatctcagcgaccaactagacctaatcgggatggatcgggtacagagagagcgattcatggtttgaaattcataagcagcaaagaaaatggaatcgttgattggaacgatgttcaaaacaatttcgctcatctttctaaagatggttatcttttcaaaagtgattttgctcattgcataggtttggagaatgaaaattccaaagagtttgcagacgagttgttcgacgcattgtgtaggagaagaagaataatggttgataagatcaatcttcaagaattatacgagttttggtaccaaattacagacgaaagcttcgattctcgtcttcaaatcttcttcaacatggttaaaaatggagatggtagaatcacagagaatgaagtaaaagagattattatactaagtgcatcggcaaataatctatcgaggttgcgagaacgagcagaggaatatgccgcactgatcatggaagaacttgcaccagatggactctattctcagtacatagaggtgttaaaggacctagagatactgctactagagaaggacatatctcatagttacagcctaccgttcagccagacgagccgagccttaagccagaacctaaaggatagaagatggagaatgagcagaaacttgctttactctttgcaagataattggaagaggatttgggttttgacattgtggtttgtgatcatggcctggttatttatgtggaaatgctatcagtacaaacacaaagacgcattccatgtaatgggttactgccttgtcatggcaaaaggcgcagctgagacactgaaattcaacatggctcttattcttttgccggtctgtagaaataccatcacctatctcagatccaccgctttgtcccactcagtgcctttcgatgactgcattaattttcacaagacgatctctgtagcaatcattagtgcaatgcttcttcatgcaaccagccacctcgcctgtgacttcccaaggattctagcatctactgatacagattacaaaagatacttggttaagtactttggtgtgaccagacccacatactttggtttggtgaatactcctgtgggaatcactggaattataatggttgcttttatgttaattgcattcacattagccagtagaagatgcaggcggaacttaactaagttgccgaagccatttgacaaactaaccggatataatgccttctggtattcacatcacttacttctaactgtttacgtccttttagtcatccacggtgtttccctctatctcgagcataaatggtaccgcaaaacggtatggatgtatcttgctgtaccagttttactctatgttggtgagaggatctttagatttttccgttccaggctttacacagtcgaaatctgtaaggttgtaatttatcccggaaacgttgttgtgctacgcatgtctaagcctacatcatttgattacaagagtggacaatatgtatttgttcagtgtccatcagtatcaaaatttgagtggcatccattttctattacttcttcccctggagatgattatctcagcattcacattcgtcagcgcggtgattggacagaagggattaagaaggcattctcagtggtatgtcatgcccctgaagctggaaaaagcggacttctcagagcagatgtaccaaaccaaagaagttttccagagctgttgatagatggaccttatggcgctccagcgcaagaccattggaagtatgatgtggtattactggttggccttggaatcggcgcaacacctttcgttagcattttgagagatctactcaataacattattaagcaacaggaacaagctgaatgcatctcaggtagttgtagtaacagcaacatctcgtcggatcacagtttcagttgcttaaactcagaagctgcgagtcggattccgcaaactcaacggaagacgctgaataccaagaatgcttacttttactgggtaacacgagaacaaggctcgttcgattggttcaaagaaatcatgaacgagattgctgattcagatagaaagggtgttattgagatgcacaactacttgactagcgtctacgaagaaggagatactcgatccaatcttctcactatgatccaaacgttaaaccatgccaaaaatggcgtcgacattttttcaggaaccaaggtaaggacacattttgggaggccaaaatggaagaaagttttatcaaagattagcaccaaacataggaacgcaagaattggagtgttctattgtggagttccaagtttggggaaggaactttcaacactctgccatgaatttaaccagacgggaattaccaggttcgatttccacaaagaacagttctaa

SEQ ID NO: 88712 - protein, 942 aa, Arabidopsis thaliana
  peptide (1)..(942): Ceres Seq. ID no. 12711714
MSMSFSGGTHNDRWGSDLASAGEFTQSFPSLPATYSPSPSSSSSSGEELLEVTIEFPSGVIINIDSVTGTGTDISGTDLEITSCSDSGSGSRSLSLGWSASSERLTAGTNSKQQIQKISRRGYGYSSRSAPEPVVPHRGEITDSVNLPRALSQRPTRPNRDGSGTERAIHGLKFISSKENGIVDWNDVQNNFAHLSKDGYLFKSDFAHCIGLENENSKEFADELFDALCRRRRIMVDKINLQELYEFWYQITDESFDSRLQIFFNMVKNGDGRITENEVKEIIILSASANNLSRLRERAEEYAALIMEELAPDGLYSQYIEVLKDLEILLLEKDISHSYSLPFSQTSRALSQNLKDRRWRMSRNLLYSLQDNWKRIWVLTLWFVIMAWLFMWKCYQYKHKDAFHVMGYCLVMAKGAAETLKFNMALILLPVCRNTITYLRSTALSHSVPFDDCINFHKTISVAIISAMLLHATSHLACDFPRILASTDTDYKRYLVKYFGVTRPTYFGLVNTPVGITGIIMVAFMLIAFTLASRRCRRNLTKLPKPFDKLTGYNAFWYSHHLLLTVYVLLVIHGVSLYLEHKWYRKTVWMYLAVPVLLYVGERIFRFFRSRLYTVEICKVVIYPGNVVVLRMSKPTSFDYKSGQYVFVQCPSVSKFEWHPFSITSSPGDDYLSIHIRQRGDWTEGIKKAFSVVCHAPEAGKSGLLRADVPNQRSFPELLIDGPYGAPAQDHWKYDVVLLVGLGIGATPFVSILRDLLNNIIKQQEQAECISGSCSNSNISSDHSFSCLNSEAASRIPQTQRKTLNTKNAYFYWVTREQGSFDWFKEIMNEIADSDRKGVIEMHNYLTSVYEEGDTRSNLLTMIQTLNHAKNGVDIFSGTKVRTHFGRPKWKKVLSKISTKHRNARIGVFYCGVPSLGKELSTLCHEFNQTGITRFDFHKEQF

SEQ ID NO: 88713 - protein, 940 aa, Arabidopsis thaliana
  peptide (1)..(940): Ceres Seq. ID no. 12711715
MSFSGGTHNDRWGSDLASAGEFTQSFPSLPATYSPSPSSSSSSGEELLEVTIEFPSGVIINIDSVTGTGTDISGTDLEITSCSDSGSGSRSLSLGWSASSERLTAGTNSKQQIQKISRRGYGYSSRSAPEPVVPHRGEITDSVNLPRALSQRPTRPNRDGSGTERAIHGLKFISSKENGIVDWNDVQNNFAHLSKDGYLFKSDFAHCIGLENENSKEFADELFDALCRRRRIMVDKINLQELYEFWYQITDESFDSRLQIFFNMVKNGDGRITENEVKEIIILSASANNLSRLRERAEEYAALIMEELAPDGLYSQYIEVLKDLEILLLEKDISHSYSLPFSQTSRALSQNLKDRRWRMSRNLLYSLQDNWKRIWVLTLWFVIMAWLFMWKCYQYKHKDAFHVMGYCLVMAKGAAETLKFNMALILLPVCRNTITYLRSTALSHSVPFDDCINFHKTISVAIISAMLLHATSHLACDFPRILASTDTDYKRYLVKYFGVTRPTYFGLVNTPVGITGIIMVAFMLIAFTLASRRCRRNLTKLPKPFDKLTGYNAFWYSHHLLLTVYVLLVIHGVSLYLEHKWYRKTVWMYLAVPVLLYVGERIFRFFRSRLYTVEICKVVIYPGNVVVLRMSKPTSFDYKSGQYVFVQCPSVSKFEWHPFSITSSPGDDYLSIHIRQRGDWTEGIKKAFSVVCHAPEAGKSGLLRADVPNQRSFPELLIDGPYGAPAQDHWKYDVVLLVGLGIGATPFVSILRDLLNNIIKQQEQAECISGSCSNSNISSDHSFSCLNSEAASRIPQTQRKTLNTKNAYFYWVTREQGSFDWFKEIMNEIADSDRKGVIEMHNYLTSVYEEGDTRSNLLTMIQTLNHAKNGVDIFSGTKVRTHFGRPKWKKVLSKISTKHRNARIGVFYCGVPSLGKELSTLCHEFNQTGITRFDFHKEQF

SEQ ID NO: 88714 - protein, 708 aa, Arabidopsis thaliana
  peptide (1)..(708): Ceres Seq. ID no. 12711716
MVDKINLQELYEFWYQITDESFDSRLQIFFNMVKNGDGRITENEVKEIIILSASANNLSRLRERAEEYAALIMEELAPDGLYSQYIEVLKDLEILLLEKDISHSYSLPFSQTSRALSQNLKDRRWRMSRNLLYSLQDNWKRIWVLTLWFVIMAWLFMWKCYQYKHKDAFHVMGYCLVMAKGAAETLKFNMALILLPVCRNTITYLRSTALSHSVPFDDCINFHKTISVAIISAMLLHATSHLACDFPRILASTDTDYKRYLVKYFGVTRPTYFGLVNTPVGITGIIMVAFMLIAFTLASRRCRRNLTKLPKPFDKLTGYNAFWYSHHLLLTVYVLLVIHGVSLYLEHKWYRKTVWMYLAVPVLLYVGERIFRFFRSRLYTVEICKVVIYPGNVVVLRMSKPTSFDYKSGQYVFVQCPSVSKFEWHPFSITSSPGDDYLSIHIRQRGDWTEGIKKAFSVVCHAPEAGKSGLLRADVPNQRSFPELLIDGPYGAPAQDHWKYDVVLLVGLGIGATPFVSILRDLLNNIIKQQEQAECISGSCSNSNISSDHSFSCLNSEAASRIPQTQRKTLNTKNAYFYWVTREQGSFDWFKEIMNEIADSDRKGVIEMHNYLTSVYEEGDTRSNLLTMIQTLNHAKNGVDIFSGTKVRTHFGRPKWKKVLSKISTKHRNARIGVFYCGVPSLGKELSTLCHEFNQTGITRFDFHKEQF

SEQ ID NO: 88715 - DNA, 954 bp, Arabidopsis thaliana
  misc_feature (1)..(954): Ceres Seq. ID no. 12711753
  misc_feature (1)..(954): Ortholog of  Ceres SEQ ID NO 15169372 as cited in SEQ ID NO 58778
atgtggcctttttggtggaaaggagcatctgggttctctgctcgttccacagctgaagaagtcactcatggaatcgatggtactggtctcactgctatcgtcacaggagcatcaagtggtattggggaagagactactcgtgttcttgctcttcgtggtgttcatgttgtaatggcggtaaggaatacagattctggtaatcaagtcagagataagatacttaaggaaatacctcaggctaagattgatgtaatgaagttggatcttagctctatggcttctgtcaggagctttgcatcagagtatcagtctttggaccttcccttgaatcttctcatcaataatgcggggattatggcatgtcccttcttgctttctagcgacaacattgaattacagtttgcaaccaatcatttgggtcattttctgttgacaaaccttcttttggagaggatgaagaaaacagctagtgaaagcaatagagaaggaagaattgttattgtctcatcagaaggtcatcgatttgcttaccgggaaggtgttcagtttgacaaaataaatgatgaagcaaggtacaatactttgcaagcatatggtcagtcaaagctcggtaacatcttgcacgctactgagctcgctaggctattcaaggaacaaggtgtgaatatcactgctaattcacttcatcctggatccattatgaccaatcttttacgctaccacagcttcataaatacaattggtaatgcggtggggaagtatgtgctgaagagcattccacagggagcggcaactacctgttatgctgcgcttcatcctcaggcaaaaggagtgagtggagaatacttgatggacaacaacatatctgaccctaattctcagggtaaagacaaagatctggccaaaaaactatgggagtttagcttgaggctaactggtgaagaagaatcatag

SEQ ID NO: 88716 - protein, 317 aa, Arabidopsis thaliana
  peptide (1)..(317): Ceres Seq. ID no. 12711754
MWPFWWKGASGFSARSTAEEVTHGIDGTGLTAIVTGASSGIGEETTRVLALRGVHVVMAVRNTDSGNQVRDKILKEIPQAKIDVMKLDLSSMASVRSFASEYQSLDLPLNLLINNAGIMACPFLLSSDNIELQFATNHLGHFLLTNLLLERMKKTASESNREGRIVIVSSEGHRFAYREGVQFDKINDEARYNTLQAYGQSKLGNILHATELARLFKEQGVNITANSLHPGSIMTNLLRYHSFINTIGNAVGKYVLKSIPQGAATTCYAALHPQAKGVSGEYLMDNNISDPNSQGKDKDLAKKLWEFSLRLTGEEES

SEQ ID NO: 88717 - protein, 260 aa, Arabidopsis thaliana
  peptide (1)..(260): Ceres Seq. ID no. 12711755
MAVRNTDSGNQVRDKILKEIPQAKIDVMKLDLSSMASVRSFASEYQSLDLPLNLLINNAGIMACPFLLSSDNIELQFATNHLGHFLLTNLLLERMKKTASESNREGRIVIVSSEGHRFAYREGVQFDKINDEARYNTLQAYGQSKLGNILHATELARLFKEQGVNITANSLHPGSIMTNLLRYHSFINTIGNAVGKYVLKSIPQGAATTCYAALHPQAKGVSGEYLMDNNISDPNSQGKDKDLAKKLWEFSLRLTGEEES

SEQ ID NO: 88718 - protein, 233 aa, Arabidopsis thaliana
  peptide (1)..(233): Ceres Seq. ID no. 12711756
MKLDLSSMASVRSFASEYQSLDLPLNLLINNAGIMACPFLLSSDNIELQFATNHLGHFLLTNLLLERMKKTASESNREGRIVIVSSEGHRFAYREGVQFDKINDEARYNTLQAYGQSKLGNILHATELARLFKEQGVNITANSLHPGSIMTNLLRYHSFINTIGNAVGKYVLKSIPQGAATTCYAALHPQAKGVSGEYLMDNNISDPNSQGKDKDLAKKLWEFSLRLTGEEES

SEQ ID NO: 88719 - DNA, 2094 bp, Arabidopsis thaliana
  misc_feature (1)..(2094): Ceres Seq. ID no. 12711764
  misc_feature (1)..(2094): Ortholog of  Ceres SEQ ID NO 13655640 as cited in SEQ ID NO 63844
atgcgtcaaaataatctcttctcattgatcttctggcttgtccctgtgagcttaattattgttgtctctgcacagttatgctcggagaagtttggaacttttacaccaggtggtacatttgacaagaaccgccgaatcattctctcatctcttccatctgaagtcacagctcaagatggcttctacaacgcttcgattggaacagatcctgaccaactctacgcaatggggatgtgcatcccaggtgctaaacaaaagctttgtagggattgtatcatggacgtcacaagacagttaatacagacatgtcccaaccagacagcagcaattcactggtcaggtggagggaaaactgtatgtatggcacgttactataaccagccgtcttctagaccattggatttggaatcagtttctattggttataacgttggaaatctcagcacaaacttaacagattttgatagattatgggagcgattgatagctcatatggtgactaaagcttcatcagcatcaataaaatatttatcatttgataacagtagattctatgcagctgatgaaacaaacttgacaaattctcaaatggtctacgctttgatgcaatgcacgccagacgtctctccttccaactgtaacacttgtttaaaacaaagtgttgatgactatgttggttgttgtcatgggaagcaaggcggctatgtgtatcggcctagttgcattttccggtgggatctataccctttcaatggcgcctttgatcttcttacgctagcgcctccaccctcatctcagctgcaatccccacctccagtgaccaacaaagatgaaaaaacgattcatacaggaactatcattgggattgtcattgtcgttgcaatggtcataatcatggctctgcttgctctaggggtttctgtttgcaggagtagaaaaaaatatcaagcttttgcctcagaaactgccgatgatattacaacagttggatatctccagtttgatattaaagacattgaagctgcaacaagtaactttttggcgagtaacaagattggtcaaggtggtttcggcgaagtttacaagggtacgttatcaaatggaactgaagttgcagtcaagaggctgtcaagaacttcagatcaaggtgaattggagttcaagaacgaggtgcttcttgtagcaaaacttcagcaccggaatctcgttaggcttctcggttttgctctgcaaggagaagaaaagatactcgtctttgagtttgttcccaacaagagcctcgattatttcctcttcgacccaacaaaaaagggtcagctggactggacaagacggtacaacatcattggagggattacacgagggcttctctatcttcatcaagactctaggctcaccatcatacaccgtgacatcaaagcgagtaacattcttttagatgctgatatgaacccgaaaatagcggatttcgggatggctaggaatttcagagatcatcaaactgaagacagtacaggaagagtcgttggaaccttcggttacatgcctccagaatatgttgcgcatggccaattctctaccaaatccgatgtctatagcttcggagtattgattctagagattgttagtggcaggaagaatagcagcttctatcagatggatggttctgtttgcaacttggtcacatatgtttggagactttggaacactgattcatctttagagctcgtagatccggcgattagcggaagctatgagaaagatgaagtcactagatgcatccatatcggacttttatgcgttcaagaaaatcctgtgaatcgaccagcattgtctacaatattccaaatgctcactaatagctccattactctaaatgtccctcaaccacctggatttttcttcaggaacagacctgagtcagacacattacgccgtggattggagccagaccaatataacaatgaatctgttacttgttctatcgacaatgcaacaatcactacactcctcggtaaaactcttgcttctgcactctgttgtattacctcaactctattttcaaagtcaatgtatagaaacactgaggattga

SEQ ID NO: 88720 - protein, 697 aa, Arabidopsis thaliana
  peptide (1)..(697): Ceres Seq. ID no. 12711765
MRQNNLFSLIFWLVPVSLIIVVSAQLCSEKFGTFTPGGTFDKNRRIILSSLPSEVTAQDGFYNASIGTDPDQLYAMGMCIPGAKQKLCRDCIMDVTRQLIQTCPNQTAAIHWSGGGKTVCMARYYNQPSSRPLDLESVSIGYNVGNLSTNLTDFDRLWERLIAHMVTKASSASIKYLSFDNSRFYAADETNLTNSQMVYALMQCTPDVSPSNCNTCLKQSVDDYVGCCHGKQGGYVYRPSCIFRWDLYPFNGAFDLLTLAPPPSSQLQSPPPVTNKDEKTIHTGTIIGIVIVVAMVIIMALLALGVSVCRSRKKYQAFASETADDITTVGYLQFDIKDIEAATSNFLASNKIGQGGFGEVYKGTLSNGTEVAVKRLSRTSDQGELEFKNEVLLVAKLQHRNLVRLLGFALQGEEKILVFEFVPNKSLDYFLFDPTKKGQLDWTRRYNIIGGITRGLLYLHQDSRLTIIHRDIKASNILLDADMNPKIADFGMARNFRDHQTEDSTGRVVGTFGYMPPEYVAHGQFSTKSDVYSFGVLILEIVSGRKNSSFYQMDGSVCNLVTYVWRLWNTDSSLELVDPAISGSYEKDEVTRCIHIGLLCVQENPVNRPALSTIFQMLTNSSITLNVPQPPGFFFRNRPESDTLRRGLEPDQYNNESVTCSIDNATITTLLGKTLASALCCITSTLFSKSMYRNTED

SEQ ID NO: 88721 - protein, 622 aa, Arabidopsis thaliana
  peptide (1)..(622): Ceres Seq. ID no. 12711766
MGMCIPGAKQKLCRDCIMDVTRQLIQTCPNQTAAIHWSGGGKTVCMARYYNQPSSRPLDLESVSIGYNVGNLSTNLTDFDRLWERLIAHMVTKASSASIKYLSFDNSRFYAADETNLTNSQMVYALMQCTPDVSPSNCNTCLKQSVDDYVGCCHGKQGGYVYRPSCIFRWDLYPFNGAFDLLTLAPPPSSQLQSPPPVTNKDEKTIHTGTIIGIVIVVAMVIIMALLALGVSVCRSRKKYQAFASETADDITTVGYLQFDIKDIEAATSNFLASNKIGQGGFGEVYKGTLSNGTEVAVKRLSRTSDQGELEFKNEVLLVAKLQHRNLVRLLGFALQGEEKILVFEFVPNKSLDYFLFDPTKKGQLDWTRRYNIIGGITRGLLYLHQDSRLTIIHRDIKASNILLDADMNPKIADFGMARNFRDHQTEDSTGRVVGTFGYMPPEYVAHGQFSTKSDVYSFGVLILEIVSGRKNSSFYQMDGSVCNLVTYVWRLWNTDSSLELVDPAISGSYEKDEVTRCIHIGLLCVQENPVNRPALSTIFQMLTNSSITLNVPQPPGFFFRNRPESDTLRRGLEPDQYNNESVTCSIDNATITTLLGKTLASALCCITSTLFSKSMYRNTED

SEQ ID NO: 88722 - protein, 620 aa, Arabidopsis thaliana
  peptide (1)..(620): Ceres Seq. ID no. 12711767
MCIPGAKQKLCRDCIMDVTRQLIQTCPNQTAAIHWSGGGKTVCMARYYNQPSSRPLDLESVSIGYNVGNLSTNLTDFDRLWERLIAHMVTKASSASIKYLSFDNSRFYAADETNLTNSQMVYALMQCTPDVSPSNCNTCLKQSVDDYVGCCHGKQGGYVYRPSCIFRWDLYPFNGAFDLLTLAPPPSSQLQSPPPVTNKDEKTIHTGTIIGIVIVVAMVIIMALLALGVSVCRSRKKYQAFASETADDITTVGYLQFDIKDIEAATSNFLASNKIGQGGFGEVYKGTLSNGTEVAVKRLSRTSDQGELEFKNEVLLVAKLQHRNLVRLLGFALQGEEKILVFEFVPNKSLDYFLFDPTKKGQLDWTRRYNIIGGITRGLLYLHQDSRLTIIHRDIKASNILLDADMNPKIADFGMARNFRDHQTEDSTGRVVGTFGYMPPEYVAHGQFSTKSDVYSFGVLILEIVSGRKNSSFYQMDGSVCNLVTYVWRLWNTDSSLELVDPAISGSYEKDEVTRCIHIGLLCVQENPVNRPALSTIFQMLTNSSITLNVPQPPGFFFRNRPESDTLRRGLEPDQYNNESVTCSIDNATITTLLGKTLASALCCITSTLFSKSMYRNTED

SEQ ID NO: 88723 - DNA, 2007 bp, Arabidopsis thaliana
  misc_feature (1)..(2007): Ceres Seq. ID no. 12711778
  misc_feature (1)..(2007): Ortholog of  Ceres SEQ ID NO 13655640 as cited in SEQ ID NO 63844
  misc_feature (1)..(2007): Ortholog of  Ceres SEQ ID NO 15180683 as cited in SEQ ID NO 0
atgtctttgtcttcttgttatctttaccagcttataaggcatgaagctaaagatttcgtttttaccaacttcttgatttttctcataagcttagattctgttactgctcaagaaatctgtttcagtggattctttaaacccaatagtacatacgatttaaaccgtcgtcaaatcctctctactctttcttctaatgtcacaagtcacaacggctttttcaactccaagtttggtcaagctcccaatagagtcttcatcaatggcatgtgcatccctgggactaaaccagagacttgttcagattgtattaaaggtgcatcagacaagatatcagagagttgtcctaacaaaacagatgcttatacatggcctgattgttgtatggtacgttattccaacgtttctttctctggttcactcgttatggaaccttctgaaactctctatcatacgggagatatcgaagatacaggcactaatttaacagtgtttgatagaatttgggaagagttaatgctccgtacaataactgcagcttcattgactgaggttgcttcattgactactttccaaaccatgtatgcgatgatgcaatgtacgccggatgtttcttcgaaagattgtgagttttgtttgaagacaagtgttggtgattatgagtcatgttgccgtggtaaacaaggtggtgcggtgataagaccaagttgctttgtccggtgggatttgtatccttatgctggagcttttgaaaatgttacatttccaccgcctccaccgcagtctttacctcagccaccggtttctttgattcctcctccagttagcgatagggcaaatacaaccatcaaagggattattgtggctattgttgttcctatcattgttatcttggtttcacttgttgtactactcgtggtttgcagaagaaagaagtcatataaaacaactgaggttcaagctactgatgagatcacaacaacacactcactgcagtttagttttaagacaattgaagctgcaactgacaagttttcggacagtaacatgatcgggcgaggtggatttggtgaagtttacaggggaaagctttcaagtggacctgaagtagcagtgaagagactgtcgaaaacatcaggacaaggcgcggaagagttcaagaatgaggctgttcttgtgtcgaagcttcaacataagaatctggtcaggcttcttggattttgtttggaaggagaagaaaagatactcgtctatgagtttgtacccaacaaaagccttgactattttctctttgaccctgcaaaacaaggtgaactagattggacaagacggtacaatatcattggggggattgctcgaggaattctatatcttcatcaagattcacggcttacaatcatacaccgtgatctcaaagcgagtaacattctcttagatgctgatatgaaccccaaaattgcagattttggcatggcgaggatttttggagttgatcaaagtcaagccaacacaagaagaatcgccggaacatttggttatatgtctccagaatatgcaatgcgtggccatttctccatgaagtctgatgtctatagctttggagtattggtactagagattataagtggcaaaaagaatagcagtttctacaacattgatgattctggtagcaatttggtaacacacgcttggagactttggagaaatgggtcaccgttagaactggtggatccaaccataggagaaagttatcagagtagcgaggctactagatgcatccatatcgcactattatgtgttcaagaagatcctgcagatcgtccattgttaccagcgatcatcatgatgcttactagtagcacaaccactttacatgtgcctcgagcgcccggattttgcctaagcgggcgtgatctggaacaggatggtgtagagtataccgaatccacaagcaggtctattcctggttctatcaatgatgcatcgattacagagttctatcctcgttga

SEQ ID NO: 88724 - protein, 668 aa, Arabidopsis thaliana
  peptide (1)..(668): Ceres Seq. ID no. 12711779
MSLSSCYLYQLIRHEAKDFVFTNFLIFLISLDSVTAQEICFSGFFKPNSTYDLNRRQILSTLSSNVTSHNGFFNSKFGQAPNRVFINGMCIPGTKPETCSDCIKGASDKISESCPNKTDAYTWPDCCMVRYSNVSFSGSLVMEPSETLYHTGDIEDTGTNLTVFDRIWEELMLRTITAASLTEVASLTTFQTMYAMMQCTPDVSSKDCEFCLKTSVGDYESCCRGKQGGAVIRPSCFVRWDLYPYAGAFENVTFPPPPPQSLPQPPVSLIPPPVSDRANTTIKGIIVAIVVPIIVILVSLVVLLVVCRRKKSYKTTEVQATDEITTTHSLQFSFKTIEAATDKFSDSNMIGRGGFGEVYRGKLSSGPEVAVKRLSKTSGQGAEEFKNEAVLVSKLQHKNLVRLLGFCLEGEEKILVYEFVPNKSLDYFLFDPAKQGELDWTRRYNIIGGIARGILYLHQDSRLTIIHRDLKASNILLDADMNPKIADFGMARIFGVDQSQANTRRIAGTFGYMSPEYAMRGHFSMKSDVYSFGVLVLEIISGKKNSSFYNIDDSGSNLVTHAWRLWRNGSPLELVDPTIGESYQSSEATRCIHIALLCVQEDPADRPLLPAIIMMLTSSTTTLHVPRAPGFCLSGRDLEQDGVEYTESTSRSIPGSINDASITEFYPR

SEQ ID NO: 88725 - protein, 580 aa, Arabidopsis thaliana
  peptide (1)..(580): Ceres Seq. ID no. 12711780
MCIPGTKPETCSDCIKGASDKISESCPNKTDAYTWPDCCMVRYSNVSFSGSLVMEPSETLYHTGDIEDTGTNLTVFDRIWEELMLRTITAASLTEVASLTTFQTMYAMMQCTPDVSSKDCEFCLKTSVGDYESCCRGKQGGAVIRPSCFVRWDLYPYAGAFENVTFPPPPPQSLPQPPVSLIPPPVSDRANTTIKGIIVAIVVPIIVILVSLVVLLVVCRRKKSYKTTEVQATDEITTTHSLQFSFKTIEAATDKFSDSNMIGRGGFGEVYRGKLSSGPEVAVKRLSKTSGQGAEEFKNEAVLVSKLQHKNLVRLLGFCLEGEEKILVYEFVPNKSLDYFLFDPAKQGELDWTRRYNIIGGIARGILYLHQDSRLTIIHRDLKASNILLDADMNPKIADFGMARIFGVDQSQANTRRIAGTFGYMSPEYAMRGHFSMKSDVYSFGVLVLEIISGKKNSSFYNIDDSGSNLVTHAWRLWRNGSPLELVDPTIGESYQSSEATRCIHIALLCVQEDPADRPLLPAIIMMLTSSTTTLHVPRAPGFCLSGRDLEQDGVEYTESTSRSIPGSINDASITEFYPR

SEQ ID NO: 88726 - protein, 541 aa, Arabidopsis thaliana
  peptide (1)..(541): Ceres Seq. ID no. 12711781
MVRYSNVSFSGSLVMEPSETLYHTGDIEDTGTNLTVFDRIWEELMLRTITAASLTEVASLTTFQTMYAMMQCTPDVSSKDCEFCLKTSVGDYESCCRGKQGGAVIRPSCFVRWDLYPYAGAFENVTFPPPPPQSLPQPPVSLIPPPVSDRANTTIKGIIVAIVVPIIVILVSLVVLLVVCRRKKSYKTTEVQATDEITTTHSLQFSFKTIEAATDKFSDSNMIGRGGFGEVYRGKLSSGPEVAVKRLSKTSGQGAEEFKNEAVLVSKLQHKNLVRLLGFCLEGEEKILVYEFVPNKSLDYFLFDPAKQGELDWTRRYNIIGGIARGILYLHQDSRLTIIHRDLKASNILLDADMNPKIADFGMARIFGVDQSQANTRRIAGTFGYMSPEYAMRGHFSMKSDVYSFGVLVLEIISGKKNSSFYNIDDSGSNLVTHAWRLWRNGSPLELVDPTIGESYQSSEATRCIHIALLCVQEDPADRPLLPAIIMMLTSSTTTLHVPRAPGFCLSGRDLEQDGVEYTESTSRSIPGSINDASITEFYPR

SEQ ID NO: 88727 - DNA, 624 bp, Arabidopsis thaliana
  misc_feature (1)..(624): Ceres Seq. ID no. 12711851
  misc_feature (1)..(624): Ortholog of  Ceres SEQ ID NO 12609803 as cited in SEQ ID NO 51959
atgtacgggagaaaagggtatcagcttatcaaagattttgccaccggagagaagggtcagctcaaacctttcaacagcaaactctttgatgaaacaatcgaagagtgtgaccagaatcaccatcttatccagtccttgataaggaaaatgcaacaagaaggtttggatgttcagaacaacagaaacgctgaccactatggagcactaattcaccaccttgctttgatccggaacaagcgctgcctcatggcttatgtgtacaaccgagcagaaattgtgcgtgatttggcatggagagtagggcttgaacttctcgaccttccctctgaaatccaagagaagctcactacactagagaaggaatacttcaaaaaccattcggttgctctaaaatcatacatgggaaaagtaggaatcgagttgaatgtcgatatggtccctcctaaagatccttatatcaaggtcagaattttggatgatattgatgaaggaatcgtgctgagtgacaaaacaacaaattttgcccgtcattctatgcatttcctcaaacgtactgatgcggaaccatacattgctcgggtcagtctttttcgttattccttccctaaaactagaatgatctaa

SEQ ID NO: 88728 - protein, 207 aa, Arabidopsis thaliana
  peptide (1)..(207): Ceres Seq. ID no. 12711852
MYGRKGYQLIKDFATGEKGQLKPFNSKLFDETIEECDQNHHLIQSLIRKMQQEGLDVQNNRNADHYGALIHHLALIRNKRCLMAYVYNRAEIVRDLAWRVGLELLDLPSEIQEKLTTLEKEYFKNHSVALKSYMGKVGIELNVDMVPPKDPYIKVRILDDIDEGIVLSDKTTNFARHSMHFLKRTDAEPYIARVSLFRYSFPKTRMI

SEQ ID NO: 88729 - protein, 158 aa, Arabidopsis thaliana
  peptide (1)..(158): Ceres Seq. ID no. 12711853
MQQEGLDVQNNRNADHYGALIHHLALIRNKRCLMAYVYNRAEIVRDLAWRVGLELLDLPSEIQEKLTTLEKEYFKNHSVALKSYMGKVGIELNVDMVPPKDPYIKVRILDDIDEGIVLSDKTTNFARHSMHFLKRTDAEPYIARVSLFRYSFPKTRMI

SEQ ID NO: 88730 - protein, 125 aa, Arabidopsis thaliana
  peptide (1)..(125): Ceres Seq. ID no. 12711854
MAYVYNRAEIVRDLAWRVGLELLDLPSEIQEKLTTLEKEYFKNHSVALKSYMGKVGIELNVDMVPPKDPYIKVRILDDIDEGIVLSDKTTNFARHSMHFLKRTDAEPYIARVSLFRYSFPKTRMI

SEQ ID NO: 88731 - DNA, 1153 bp, Arabidopsis thaliana
  misc_feature (1)..(1153): Ceres Seq. ID no. 12711908
  misc_feature (1)..(1153): Ortholog of  Ceres SEQ ID NO 14312262 as cited in SEQ ID NO 57108
acagagatatcttcctctctactttttcgccaccatctctcccatctctcctctctctctttgagttgcgactatgtccggcgaaaactggattcgagtggccatgtctgacgattccatggtggcggaggcgcttcttcggctccgccactccgaaccgaagaatagagtcgacgcgtcccctctcaagctgaaatggagcgtgcgtcaacggagatcgaagaaaggagaccagacgcgagcaagccccaccacaccgctttcctggagcggtgccacgtctcttagcggcggaggcggcagcggtggaagcggcgccggtgctaccaccatggaaggcctcgaggagtctagcgccgccgtaaaaccctctgagccatttagatctaagatttctcaaacgagtgcaataacaacaacaacaacaacaacccttttcaagagatcaagaaagaagaagactttggctgagcttaaagaggaagagatcatgctcttgaaggaaagtaacggcctgaaaaatgaattggcaaatatgcgcgatttgctcgagcaacaaagagcaagaaacactgctctaaagaagatgaaggctgaatcacaatctgccttatcgtgcaaactcactttcgaacaaggttcttccttcttgctccctgacctaaacatgcctctagataacgacccgagccctgaagttgtctgctgaacgggcgagccacaagcatatcattcttttgtttttcccattacacaacactataccactatacctcctccgtccacaaacatgttttttgaactgtaactatatgaatatgaagaacgtagattaatcctatatatccttcacccatatcccggtggaagctgaagaagattcgcctgaaggtgaagtggttcgagactatggttaagtgtgttaacaatatcttctagtttagctggtagtaagatttttgttctgccaatctcctaaatgattcttatctttctcccattttattaggatgagatgtaattatctacttagataatagatgtacacctttttttttttgtttgttctttcttattatctctggtaagatgtattacatcgacatttataatcagtgtaacacgttccaaacattttactatattttgtatt

SEQ ID NO: 88732 - protein, 211 aa, Arabidopsis thaliana; identical to SEQ ID NO: 43692
  peptide (1)..(211): Ceres Seq. ID no. 12711909

SEQ ID NO: 88733 - protein, 201 aa, Arabidopsis thaliana; identical to SEQ ID NO: 43693
  peptide (1)..(201): Ceres Seq. ID no. 12711910

SEQ ID NO: 88734 - protein, 196 aa, Arabidopsis thaliana; identical to SEQ ID NO: 43694
  peptide (1)..(196): Ceres Seq. ID no. 12711911

SEQ ID NO: 88735 - DNA, 918 bp, Arabidopsis thaliana
  misc_feature (1)..(918): Ceres Seq. ID no. 12711931
  misc_feature (1)..(918): Ortholog of  Ceres SEQ ID NO 13594193 as cited in SEQ ID NO 58558
atggatcatgaggaaattccatccacgccctcaacgccggcgacaaccccggggactccaggagcgccgctctttggaggattcgaagggaagaggaatggacacaatggtagatacacaccaaagtcacttctcaaaagctgcaaatgtttcagtgttgacaatgaatgggctcttgaagatggaagactccctccggtcacttgctctctccctccccctaacgtttccctctaccgcaagttgggagcagagtttgttgggacattgatcctgatattcgccggaacagcgacggcgatcgtgaaccagaagacagatggagctgagacgcttattggttgcgccgcctcggctggtttggcggttatgatcgttatattatcgaccggtcacatctccggggcacatctcaatccggctgtaaccattgcctttgctgctctcaaacacttcccttggaaacacgtgccggtgtatatcggagctcaggtgatggcctccgtgagtgcggcgtttgcactgaaagcagtgtttgaaccaacgatgagcggtggcgtgacggtgccgacggtgggtctcagccaagctttcgccttggaattcattatcagcttcaacctcatgttcgttgtcacagccgtagccaccgacacgagagctgtgggagagttggcgggaattgccgtaggagcaacggtcatgcttaacatacttatagctggacctgcaacttctgcttcgatgaaccctgtaagaacactgggtccagccattgcagcaaacaattacagagctatttgggtttacctcactgcccccattcttggagcgttaatcggagcaggtacatacacaattgtcaagttgccagaggaagatgaagcacccaaagagaggaggagcttcagaagatga

SEQ ID NO: 88736 - protein, 305 aa, Arabidopsis thaliana
  peptide (1)..(305): Ceres Seq. ID no. 12711932
MDHEEIPSTPSTPATTPGTPGAPLFGGFEGKRNGHNGRYTPKSLLKSCKCFSVDNEWALEDGRLPPVTCSLPPPNVSLYRKLGAEFVGTLILIFAGTATAIVNQKTDGAETLIGCAASAGLAVMIVILSTGHISGAHLNPAVTIAFAALKHFPWKHVPVYIGAQVMASVSAAFALKAVFEPTMSGGVTVPTVGLSQAFALEFIISFNLMFVVTAVATDTRAVGELAGIAVGATVMLNILIAGPATSASMNPVRTLGPAIAANNYRAIWVYLTAPILGALIGAGTYTIVKLPEEDEAPKERRSFRR

SEQ ID NO: 88737 - protein, 182 aa, Arabidopsis thaliana
  peptide (1)..(182): Ceres Seq. ID no. 12711933
MIVILSTGHISGAHLNPAVTIAFAALKHFPWKHVPVYIGAQVMASVSAAFALKAVFEPTMSGGVTVPTVGLSQAFALEFIISFNLMFVVTAVATDTRAVGELAGIAVGATVMLNILIAGPATSASMNPVRTLGPAIAANNYRAIWVYLTAPILGALIGAGTYTIVKLPEEDEAPKERRSFRR

SEQ ID NO: 88738 - DNA, 1734 bp, Arabidopsis thaliana
  misc_feature (1)..(1734): Ceres Seq. ID no. 12712097
  misc_feature (1)..(1734): Ortholog of  Ceres SEQ ID NO 15170885 as cited in SEQ ID NO 54326
  misc_feature (1)..(1734): Ortholog of  Ceres SEQ ID NO 14311609 as cited in SEQ ID NO 58341
atgctagcgaagaatcggctgccgggaagcggccacactactccgtctcctccggcatctcctcgccgttctcctcgttatcgtcacggtcggtctaaagccgccgccggtagtagatttcctacggttcaaccaagtcggaccctcgctcatcgcctctcgtggatcctcttatcggttcttctccgtcgtcaggggattttcttattcgctcctctaatctatatctcttgtatgctgctttacatgggaaccgtctccttcgacgttgttccaatcattcagcgtcgacctcctccaggatccgtttacaaaagccctcaggtttacgccaagctccgtcctgagatggacgccgataattccaccgctgatgccataacaaccatctggaaacattcctataaaggtggtgaatggaagccgtacgtgaacaagtctactggagacttgcctgagtcaaacggttacatatatgttgaggcaaatggaggcttgaatcagcagcggacatcgatatgcaatgcggttgctgtggcaggatatcttaatgcaactctagtaattcccaactttcactatcacagcatatggagagatccaagattgctttctgacagaggtttttctttcagtaaatttggggacatctacgatgaagagttctttgtcagtaccttatcaaatgatgtgcgggtggttgatacaattcctgaatatctaatggagcgttttgaccataacatgacaaatgtctataacttcagagttaaagcatggtcacctattcaatattatcgagactcgatcttgccgaaacttcttgaggagaagattatacgaatatctccatttgcaaatagactttcttttgatgctcctcaagctgtccagagacttagatgtttggcgaattacgaagccctgaagttttcgaaaaccatactaaccctaggagaaacactggtgaagagaatgaaagagcaaagtgcaaaccacggtgcaaaatacgtgtctgtacatctgcgttttgaagaggacatggtagctttctcctgttgcatatttgatggtgggaaccaagaaaaacaagatatgattgcagcaagagaacgaggatggaaaggaaagttcacaaaaccaggccgtgttatacgacctggtgctatcaggcaaaacggaaaatgccctttaactcctttagaggtgggtttaatgcttagaggaatggggttcaacaaaagcacatatattttcctcgcgtctggtgaaatatatgatgcgaatcgaactatggccccgctactagagatgttcccaaatttacaaactaaggagatgcttgcatcagaggaggaacttgctccatataagaatttctcttccagaatggctgcaatagattacacggtctgtctccacagtgaggtatttgtgaccacgcaaggtggaaactttcctcatttcctcatgggtcatcggagatatatgtttggaggacattccaagaccattagaccagacaagcgaaagttagcaatcctctttgacaatccaaacatcggatggcggagttttaaacgtcagatgctaaacatgaggtctcatagtgactcaaaggggtttgagctaaaacgacctaatgactccatttacacattcccttgccctgactgcatgtcccgtaggaacaaaacaacaaccccagaatcgagaccacctcctgccacctga

SEQ ID NO: 88739 - protein, 577 aa, Arabidopsis thaliana
  peptide (1)..(577): Ceres Seq. ID no. 12712098
MLAKNRLPGSGHTTPSPPASPRRSPRYRHGRSKAAAGSRFPTVQPSRTLAHRLSWILLSVLLRRQGIFLFAPLIYISCMLLYMGTVSFDVVPIIQRRPPPGSVYKSPQVYAKLRPEMDADNSTADAITTIWKHSYKGGEWKPYVNKSTGDLPESNGYIYVEANGGLNQQRTSICNAVAVAGYLNATLVIPNFHYHSIWRDPRLLSDRGFSFSKFGDIYDEEFFVSTLSNDVRVVDTIPEYLMERFDHNMTNVYNFRVKAWSPIQYYRDSILPKLLEEKIIRISPFANRLSFDAPQAVQRLRCLANYEALKFSKTILTLGETLVKRMKEQSANHGAKYVSVHLRFEEDMVAFSCCIFDGGNQEKQDMIAARERGWKGKFTKPGRVIRPGAIRQNGKCPLTPLEVGLMLRGMGFNKSTYIFLASGEIYDANRTMAPLLEMFPNLQTKEMLASEEELAPYKNFSSRMAAIDYTVCLHSEVFVTTQGGNFPHFLMGHRRYMFGGHSKTIRPDKRKLAILFDNPNIGWRSFKRQMLNMRSHSDSKGFELKRPNDSIYTFPCPDCMSRRNKTTTPESRPPPAT

SEQ ID NO: 88740 - protein, 499 aa, Arabidopsis thaliana
  peptide (1)..(499): Ceres Seq. ID no. 12712099
MLLYMGTVSFDVVPIIQRRPPPGSVYKSPQVYAKLRPEMDADNSTADAITTIWKHSYKGGEWKPYVNKSTGDLPESNGYIYVEANGGLNQQRTSICNAVAVAGYLNATLVIPNFHYHSIWRDPRLLSDRGFSFSKFGDIYDEEFFVSTLSNDVRVVDTIPEYLMERFDHNMTNVYNFRVKAWSPIQYYRDSILPKLLEEKIIRISPFANRLSFDAPQAVQRLRCLANYEALKFSKTILTLGETLVKRMKEQSANHGAKYVSVHLRFEEDMVAFSCCIFDGGNQEKQDMIAARERGWKGKFTKPGRVIRPGAIRQNGKCPLTPLEVGLMLRGMGFNKSTYIFLASGEIYDANRTMAPLLEMFPNLQTKEMLASEEELAPYKNFSSRMAAIDYTVCLHSEVFVTTQGGNFPHFLMGHRRYMFGGHSKTIRPDKRKLAILFDNPNIGWRSFKRQMLNMRSHSDSKGFELKRPNDSIYTFPCPDCMSRRNKTTTPESRPPPAT

SEQ ID NO: 88741 - protein, 495 aa, Arabidopsis thaliana
  peptide (1)..(495): Ceres Seq. ID no. 12712100
MGTVSFDVVPIIQRRPPPGSVYKSPQVYAKLRPEMDADNSTADAITTIWKHSYKGGEWKPYVNKSTGDLPESNGYIYVEANGGLNQQRTSICNAVAVAGYLNATLVIPNFHYHSIWRDPRLLSDRGFSFSKFGDIYDEEFFVSTLSNDVRVVDTIPEYLMERFDHNMTNVYNFRVKAWSPIQYYRDSILPKLLEEKIIRISPFANRLSFDAPQAVQRLRCLANYEALKFSKTILTLGETLVKRMKEQSANHGAKYVSVHLRFEEDMVAFSCCIFDGGNQEKQDMIAARERGWKGKFTKPGRVIRPGAIRQNGKCPLTPLEVGLMLRGMGFNKSTYIFLASGEIYDANRTMAPLLEMFPNLQTKEMLASEEELAPYKNFSSRMAAIDYTVCLHSEVFVTTQGGNFPHFLMGHRRYMFGGHSKTIRPDKRKLAILFDNPNIGWRSFKRQMLNMRSHSDSKGFELKRPNDSIYTFPCPDCMSRRNKTTTPESRPPPAT

SEQ ID NO: 88742 - DNA, 1202 bp, Arabidopsis thaliana
  misc_feature (1)..(1202): Ceres Seq. ID no. 12712124
  misc_feature (1)..(1202): Ortholog of  Ceres SEQ ID NO 12609041 as cited in SEQ ID NO 51310
  misc_feature (1)..(1202): Ortholog of  Ceres SEQ ID NO 13594966 as cited in SEQ ID NO 56152
  misc_feature (1)..(1202): Ortholog of  Ceres SEQ ID NO 12582457 as cited in SEQ ID NO 57530
  misc_feature (1)..(1202): Ortholog of  Ceres SEQ ID NO 13655804 as cited in SEQ ID NO 64881
acaacgctttttgtctcatctccttcttcttctccttctcaaatcttttttttcaggcgtaacgaatcgaatcataaacacttacgcagaaacaaaaactaaactttggatcttttaaccgaccatagagattcgtgggttcttcttagtttcgacagattcttgatccgttttagttgttacgctcatctttgcttttatacatcagacccttctcttctcttccttctttatctaagaaacattagggttctttgaaatcttgctaaaaaaaatgggtgttgagaaaatggtgtgtttagcttctcgtacgggtcgtcagtttcagagatacaacaaaggtcgtcgtcaagtcgttggatgtgttccttacagattcaagctatctaatgatggtaaaataagtgatgaagtagaagttcttgttatctcttcccaaaaaggccacgccttaatgttccccaagggtggttgggagcttgatgaatctgtagaagaagctgcatcaagagaatgtcttgaagaagctggagttcttggcaacgttgagcaccaacttggaaaatgggattttttaagcaaaagcagaggaacatactatgaaggactaatgttccctatgcttgttacagaacaacttgagctttggcctgaacaacatgttaggcaaagaatctggatgaatgtaaccgaagcaagagaagcttgtagagattggtggatgaaagaagcattagatgttttggttgagagactttcatcaccaatgaatcaaccaaaggaagagaagactatgtcaatctctattgaaacaatgtgttgatgatgaagctgatgattgctaaattgctgattgttgatgggagtttttatgagctaatatggatctctgtaggtattaaatagatgggtctcaattagttattgagacggctaaaaaaatctatttcgaaaagccgatgcagagagcatggacaaagaaaaagatggtagagttttaagttttggatcagaaagattaacatcatgtgatttaagaagtcttgtgtttgtgtttataatgtttctgcaagaacttcttaagatatgattaagagggaagatgataaacttagagtgcaagcaaaacctgtataattgtgtttccctctgtttatttttcctctctctttgaatttgcaatggagacatttgatttcatc

SEQ ID NO: 88743 - protein, 182 aa, Arabidopsis thaliana; identical to SEQ ID NO: 28006
  peptide (1)..(182): Ceres Seq. ID no. 12712125

SEQ ID NO: 88744 - protein, 177 aa, Arabidopsis thaliana; identical to SEQ ID NO: 28007
  peptide (1)..(177): Ceres Seq. ID no. 12712126

SEQ ID NO: 88745 - protein, 122 aa, Arabidopsis thaliana; identical to SEQ ID NO: 28008
  peptide (1)..(122): Ceres Seq. ID no. 12712127

SEQ ID NO: 88746 - DNA, 1491 bp, Arabidopsis thaliana
  misc_feature (1)..(1491): Ceres Seq. ID no. 12712203
  misc_feature (1)..(1491): Ortholog of  Ceres SEQ ID NO 12581802 as cited in SEQ ID NO 54880
atggatccgatcgaatctgtcgagtacaatggcttcgagacctctaacggtaacgtcgaccatggttggaagaaagtcgtgtacccgaaacgtcaccggaagcaaaaacaagcggatcaagcgacggcaaatggtggcaaaactgttgcttcaaatggaaccgtagctaacggcggagataacgttttccgttcgttggaagagcaagctgaggatcgtcgacgacggatcttagcggcgaagatgactgctattgattcagatgatgatggtgttgttagatctaaacatcgatctaatggttacggtgatgatgggtatgattttgatggtagtgatgatgagatcgcaacgctgaaggttgaggaagttaagaagccaaagcctaagaaggagaagaagcctaaagtttctttgcctgaagctgcatcaaagatcgatcctttaaatctcgaagcttttctcgttgaagcatcggttccgttagctcatattccggaaccagtgtataagacatcagttgattggatcaaccatcgtccaattgaggcacttggagcctttgtgttgtgggcttttgattgtattctcacagatttagcagcacaacaaggtggtgctaaaggtgggaagaagggtggtcaacaaactacttccaaatctcaggtggcaatatttgttgcattagcgatggtattgcgtaggaagcctgatgctttgactaatgtattgccaactctgagggagaatcctaagtatcagggtcaggataagcttccggttacagtttggatgatggctcaggcctcccaaggtgatatagctgtaggcttgtattcatgggctcacaacttgttacctgttgtcggtaataagaactgtaaccctcagtcaagggatctcatcctgcagttggttgagaaaattttgacgaatccaaaggctcgtaccatacttgtaaatggagctgttaggaagggagagcgtttgattccacctccttcatttgagatcttgttgcggcttacattccctgcatcatctgcaagagtaaagcactgggacaatctctacaaggagaatctggaagctagtgttgctgttcttaaaaagcttgttgaagaatggaaagagcattcggtcaaactatcatcatcaccgaatgatgctctcactctcaaccgaactatgaaaagcttcaggctaaagaacgaggaggtcatcactgagggaggagccaatgcttctctttacaaagaagctgacaagtcttgcaaaacgatctcggggagactctcccgtggaagtggctgcctcaaaggaacagccattactttagtgtttctagctgctgcaggagccgctgctgcagctgttctatcttccaacccggaggttacaaacgagctgaagaacctggtggactcattggagctgcatgaatacatcaacaaatacactgaggttatctccacagctttgaagaagtaa

SEQ ID NO: 88747 - protein, 496 aa, Arabidopsis thaliana
  peptide (1)..(496): Ceres Seq. ID no. 12712204
MDPIESVEYNGFETSNGNVDHGWKKVVYPKRHRKQKQADQATANGGKTVASNGTVANGGDNVFRSLEEQAEDRRRRILAAKMTAIDSDDDGVVRSKHRSNGYGDDGYDFDGSDDEIATLKVEEVKKPKPKKEKKPKVSLPEAASKIDPLNLEAFLVEASVPLAHIPEPVYKTSVDWINHRPIEALGAFVLWAFDCILTDLAAQQGGAKGGKKGGQQTTSKSQVAIFVALAMVLRRKPDALTNVLPTLRENPKYQGQDKLPVTVWMMAQASQGDIAVGLYSWAHNLLPVVGNKNCNPQSRDLILQLVEKILTNPKARTILVNGAVRKGERLIPPPSFEILLRLTFPASSARVKHWDNLYKENLEASVAVLKKLVEEWKEHSVKLSSSPNDALTLNRTMKSFRLKNEEVITEGGANASLYKEADKSCKTISGRLSRGSGCLKGTAITLVFLAAAGAAAAAVLSSNPEVTNELKNLVDSLELHEYINKYTEVISTALKK

SEQ ID NO: 88748 - protein, 415 aa, Arabidopsis thaliana
  peptide (1)..(415): Ceres Seq. ID no. 12712205
MTAIDSDDDGVVRSKHRSNGYGDDGYDFDGSDDEIATLKVEEVKKPKPKKEKKPKVSLPEAASKIDPLNLEAFLVEASVPLAHIPEPVYKTSVDWINHRPIEALGAFVLWAFDCILTDLAAQQGGAKGGKKGGQQTTSKSQVAIFVALAMVLRRKPDALTNVLPTLRENPKYQGQDKLPVTVWMMAQASQGDIAVGLYSWAHNLLPVVGNKNCNPQSRDLILQLVEKILTNPKARTILVNGAVRKGERLIPPPSFEILLRLTFPASSARVKHWDNLYKENLEASVAVLKKLVEEWKEHSVKLSSSPNDALTLNRTMKSFRLKNEEVITEGGANASLYKEADKSCKTISGRLSRGSGCLKGTAITLVFLAAAGAAAAAVLSSNPEVTNELKNLVDSLELHEYINKYTEVISTALKK

SEQ ID NO: 88749 - protein, 266 aa, Arabidopsis thaliana
  peptide (1)..(266): Ceres Seq. ID no. 12712206
MVLRRKPDALTNVLPTLRENPKYQGQDKLPVTVWMMAQASQGDIAVGLYSWAHNLLPVVGNKNCNPQSRDLILQLVEKILTNPKARTILVNGAVRKGERLIPPPSFEILLRLTFPASSARVKHWDNLYKENLEASVAVLKKLVEEWKEHSVKLSSSPNDALTLNRTMKSFRLKNEEVITEGGANASLYKEADKSCKTISGRLSRGSGCLKGTAITLVFLAAAGAAAAAVLSSNPEVTNELKNLVDSLELHEYINKYTEVISTALKK

SEQ ID NO: 88750 - DNA, 941 bp, Arabidopsis thaliana
  misc_feature (1)..(941): Ceres Seq. ID no. 12712232
  misc_feature (1)..(941): Ortholog of  Ceres SEQ ID NO 14301423 as cited in SEQ ID NO 52204
  misc_feature (1)..(941): Ortholog of  Ceres SEQ ID NO 12621037 as cited in SEQ ID NO 66448
  misc_feature (1)..(941): Ortholog of  Ceres SEQ ID NO 12635639 as cited in SEQ ID NO 0
  misc_feature (1)..(941): Ortholog of  Ceres SEQ ID NO 14305144 as cited in SEQ ID NO 0
aaatcacaaagcaagtcgcgtacaatgggttctgcattcgatccccttgtcacggccactgaggatctcgccgccgtcaactcggcgccgccactctcaaacctcacgcaagaagaactcaagaaaatcgccgcttataaagccgtcgaattcgtcgaatctggaatggttatcggtctcggcactggctccaccgcgaaacacgccgtggctcgtatcagcgagcttctccgagaaggaaaactcaaggatataatcggaatccctacttcaaccacaacgcatgagcaagcggtgtctctagggataccattatccgatctagattcgcatccggtggtggatctatcaatcgatggcgccgacgaagtcgatccggctcttaatctggtgaaaggacgcggcggatcgttattgagagagaagatgattgaaggagcatctaagaagttcgttgtgattgttgatgaatcgaagcttgtcaagtatatcggaggaagcggactcgctgttccggtggaggttgttccgttctgctgcgatttcacaagggggaaactggaagagctatttagagattcgggatgtgttgcgaagctgaggatgaaaatcggatctaacggcgaagaggcggcgccggctgtgacggataataggaattatgtggtggatttgtatttggagagagatattggagatttagaggtggcgagtgaggcgatattgaggtttcctggagtagtggagcatgggatgtttctgggaatggcgactacgttgatcgtcgccggcaaatttggtgttaccgtcaaggataggtttggataaaagtgtcatttgaaaaccattagggtttatggtttgattttgattttcgatggattctctctggttctgtaaaccctttcctcctattggtttaaaactttgacttatttttt

SEQ ID NO: 88751 - protein, 275 aa, Arabidopsis thaliana; identical to SEQ ID NO: 26595
  peptide (1)..(275): Ceres Seq. ID no. 12712233

SEQ ID NO: 88752 - protein, 267 aa, Arabidopsis thaliana; identical to SEQ ID NO: 26596
  peptide (1)..(267): Ceres Seq. ID no. 12712234

SEQ ID NO: 88753 - protein, 220 aa, Arabidopsis thaliana; identical to SEQ ID NO: 26597
  peptide (1)..(220): Ceres Seq. ID no. 12712235

SEQ ID NO: 88754 - DNA, 1143 bp, Arabidopsis thaliana
  misc_feature (1)..(1143): Ceres Seq. ID no. 12712236
  misc_feature (1)..(1143): Ortholog of  Ceres SEQ ID NO 13593963 as cited in SEQ ID NO 59580
atggcgaaaccaaacatagacgaattgaatcaaatccttactagttatcaaaacaccatcaacgatactctccaggttttttatttcaccatttcgtgtttttgtgtgttggtgatggatttgattactgatttagagacagggtttggtgaatttttgcagttgttcgagcaagttccgtctccgacacaagacaaattatattggaacgatgtccttcagatttctgatcatctctccaaacaagctactatagtgggaatgctatggatcactggagaacctccaaaagctgaagcaatgaaggagactatggaagcatacttcaacgctcttcaaggatttttgctgcattgtcatggaagcatggttggtgctgggactacactctcttcgaccatacacgcttctgtgaagcaaattgttgattccagcttcagattgttgcagggttctgtttccttatacgagggatcatatgagaaaggaaggaagcccacgattccgcagcttgcaggagcagtgtgggaagcatgttctaatttaaagaacgtgcctgaaacaaacatcaaagcgattggaagagcgatggcacatgtagctgtttctatgaaggatgtgcttagggagatgaaagaactgaagcctgcttcttcttcacctgatcataatgtttcgacaaactcggatgacgatgatttaggcgatgaactgtctcctgaagaatttgaagttgctaaaatggtagcagatattgtgtctgagacgctcgttgttataaaagagcttatccgtgctatcacatgcatgatcaagctggagaatccaaaggataatagtgagtttgtggattcgtttgagaagttactgaagttgtgtcaaggaattggtgtacagattgatgagcttggagcttgtgtttacccgccgcaagagtttggtctcatgaaacaaacagtggagaacatgagggaaagtattggtgagattgagtctgatgttaagagttccaagaattcttcatcagaagctttatcaggatcatgcagaaggctgcagagtttgattgaacatatggtaaccgagttggacacaagaatcgaagctgaagtagtttacaaaatgcagaatgttactctttag

SEQ ID NO: 88755 - protein, 380 aa, Arabidopsis thaliana
  peptide (1)..(380): Ceres Seq. ID no. 12712237
MAKPNIDELNQILTSYQNTINDTLQVFYFTISCFCVLVMDLITDLETGFGEFLQLFEQVPSPTQDKLYWNDVLQISDHLSKQATIVGMLWITGEPPKAEAMKETMEAYFNALQGFLLHCHGSMVGAGTTLSSTIHASVKQIVDSSFRLLQGSVSLYEGSYEKGRKPTIPQLAGAVWEACSNLKNVPETNIKAIGRAMAHVAVSMKDVLREMKELKPASSSPDHNVSTNSDDDDLGDELSPEEFEVAKMVADIVSETLVVIKELIRAITCMIKLENPKDNSEFVDSFEKLLKLCQGIGVQIDELGACVYPPQEFGLMKQTVENMRESIGEIESDVKSSKNSSSEALSGSCRRLQSLIEHMVTELDTRIEAEVVYKMQNVTL

SEQ ID NO: 88756 - protein, 342 aa, Arabidopsis thaliana
  peptide (1)..(342): Ceres Seq. ID no. 12712238
MDLITDLETGFGEFLQLFEQVPSPTQDKLYWNDVLQISDHLSKQATIVGMLWITGEPPKAEAMKETMEAYFNALQGFLLHCHGSMVGAGTTLSSTIHASVKQIVDSSFRLLQGSVSLYEGSYEKGRKPTIPQLAGAVWEACSNLKNVPETNIKAIGRAMAHVAVSMKDVLREMKELKPASSSPDHNVSTNSDDDDLGDELSPEEFEVAKMVADIVSETLVVIKELIRAITCMIKLENPKDNSEFVDSFEKLLKLCQGIGVQIDELGACVYPPQEFGLMKQTVENMRESIGEIESDVKSSKNSSSEALSGSCRRLQSLIEHMVTELDTRIEAEVVYKMQNVTL

SEQ ID NO: 88757 - protein, 293 aa, Arabidopsis thaliana
  peptide (1)..(293): Ceres Seq. ID no. 12712239
MLWITGEPPKAEAMKETMEAYFNALQGFLLHCHGSMVGAGTTLSSTIHASVKQIVDSSFRLLQGSVSLYEGSYEKGRKPTIPQLAGAVWEACSNLKNVPETNIKAIGRAMAHVAVSMKDVLREMKELKPASSSPDHNVSTNSDDDDLGDELSPEEFEVAKMVADIVSETLVVIKELIRAITCMIKLENPKDNSEFVDSFEKLLKLCQGIGVQIDELGACVYPPQEFGLMKQTVENMRESIGEIESDVKSSKNSSSEALSGSCRRLQSLIEHMVTELDTRIEAEVVYKMQNVTL

SEQ ID NO: 88758 - DNA, 894 bp, Arabidopsis thaliana
  misc_feature (1)..(894): Ceres Seq. ID no. 12712240
  misc_feature (1)..(894): Ortholog of  Ceres SEQ ID NO 13594482 as cited in SEQ ID NO 51285
  misc_feature (1)..(894): Ortholog of  Ceres SEQ ID NO 13655381 as cited in SEQ ID NO 63359
atggagactccatatccgaaactcatcgatccttcaaagactcgaataggatggattggcatcgggataatgggatcggccatggtttctcatattatcgccgcaggctattctgtcacagtttacgctcgcgacctccggaaaacaaaagatctgcaaaccaaaggagctcgcatagccaatagccccaaagagttagcggagatgagcgacgttgtgttcacgattgttggaaacttcaacgatgtccgatcattgcttctcggtgacgatggtgtactctctggtcttacgcccggtggagtaacagtggacatgactagtagcaaaccaggattggcgcgtgaaatacacgcagaagcgaggcgtaggaattgttgggcggtggatgcgccggtatcaggtggagacgctggagcacgagaggggacgttagggattttcgccggcggagattcagagattgtggagtggttgtccccggtgatgaagaatatagggactgttacttatatgggagaagcagggagtgggcaaagctgcaagatagggaatcagattgctggtgcgagcaacctggttggacttgctgaagggatagtgttcgctgagaaagcgggtttagatacagtgaaatggctcgaggcggtgaaggatggtgcagctggatcggcggttatgcggctgtttggggagatgattgtgaagagggattatagggcgactggctttgcggagtatatggtgaaagatttgggaatggctgcagaggcggcgatgcctggtgctgctctgagcaagcagttgttcactggaatggtggctaatggagatggcaagttaggtattcaaggcgtcgtctctgttattagaagacttaacggcatatcctga

SEQ ID NO: 88759 - protein, 297 aa, Arabidopsis thaliana; identical to SEQ ID NO: 77114
  peptide (1)..(297): Ceres Seq. ID no. 12712241

SEQ ID NO: 88760 - protein, 274 aa, Arabidopsis thaliana; identical to SEQ ID NO: 77115
  peptide (1)..(274): Ceres Seq. ID no. 12712242

SEQ ID NO: 88761 - protein, 270 aa, Arabidopsis thaliana
  peptide (1)..(270): Ceres Seq. ID no. 12712243
MVSHIIAAGYSVTVYARDLRKTKDLQTKGARIANSPKELAEMSDVVFTIVGNFNDVRSLLLGDDGVLSGLTPGGVTVDMTSSKPGLAREIHAEARRRNCWAVDAPVSGGDAGAREGTLGIFAGGDSEIVEWLSPVMKNIGTVTYMGEAGSGQSCKIGNQIAGASNLVGLAEGIVFAEKAGLDTVKWLEAVKDGAAGSAVMRLFGEMIVKRDYRATGFAEYMVKDLGMAAEAAMPGAALSKQLFTGMVANGDGKLGIQGVVSVIRRLNGIS

SEQ ID NO: 88762 - DNA, 1061 bp, Arabidopsis thaliana
  misc_feature (1)..(1061): Ceres Seq. ID no. 12712255
  misc_feature (1)..(1061): Ortholog of  Ceres SEQ ID NO 13594482 as cited in SEQ ID NO 51285
  misc_feature (1)..(1061): Ortholog of  Ceres SEQ ID NO 13655381 as cited in SEQ ID NO 63359
atggagactcagtatccgaaactaatcgaaccatccaagacccgaattggatggattgggatcgggataatgggatcagcgatggtttctcatatcctcgccgcaggctattcagtcaccgtttatgctcgcgatcttcgtaaaacaaaggatctgcaaaccaaaggaggtcgtaccgccaatagccccaaagagttaggggagatgagcgacgttgtgttcacgatcgttggaaactctaacgatgttagatcgttgcttcttggggatgatggtgtactctctggtcttaaacccggtggagtaacagtggacatgactagtagcaagccaggattggcgcgtgagatatacgcggaggcgaggcggagggattgctgggcggtggatgcgcctgtatcgggtggagacgctggagcacgtgaggggaagctaacgatattcgccggcggagattccgagattgtggagtggttggctccggtgatgaaaacgatgggaattgtgaggtttatgggaggagctgggagtggacagagctgtaaaattgggaatcagatttgtgttggaagcaacatgattggattagctgaagggattgtgtttgctgagaaggcgggtttagatccggtgaaatggcttgaggcggttaaggacggtgcagctggatcggcggttatgcggcttttcggggagatgatggcggtgagggactataaggcgacggggtttgcggagtatatggtgaaagatttgggaatggcggcggaggcggcaatggcgatgcctggaactgctttgaacaagcagttgttcactgtaatggtggcaaatggagatgggaagttaggatttcaaggcgtcgtcgatgttattaggagacttaacggcttatcctgataaaactagtgttaactaggcaagcttgttttccatttggttagaagttgctaataagaacatggagtctcaccaatctcgagaactatagttacaagagtgtgtaacattagtttccaattggattatcaacttctacctcctataactatttctctgtt

SEQ ID NO: 88763 - protein, 299 aa, Arabidopsis thaliana
  peptide (1)..(299): Ceres Seq. ID no. 12712256
METQYPKLIEPSKTRIGWIGIGIMGSAMVSHILAAGYSVTVYARDLRKTKDLQTKGGRTANSPKELGEMSDVVFTIVGNSNDVRSLLLGDDGVLSGLKPGGVTVDMTSSKPGLAREIYAEARRRDCWAVDAPVSGGDAGAREGKLTIFAGGDSEIVEWLAPVMKTMGIVRFMGGAGSGQSCKIGNQICVGSNMIGLAEGIVFAEKAGLDPVKWLEAVKDGAAGSAVMRLFGEMMAVRDYKATGFAEYMVKDLGMAAEAAMAMPGTALNKQLFTVMVANGDGKLGFQGVVDVIRRLNGLS

SEQ ID NO: 88764 - protein, 276 aa, Arabidopsis thaliana
  peptide (1)..(276): Ceres Seq. ID no. 12712257
MGSAMVSHILAAGYSVTVYARDLRKTKDLQTKGGRTANSPKELGEMSDVVFTIVGNSNDVRSLLLGDDGVLSGLKPGGVTVDMTSSKPGLAREIYAEARRRDCWAVDAPVSGGDAGAREGKLTIFAGGDSEIVEWLAPVMKTMGIVRFMGGAGSGQSCKIGNQICVGSNMIGLAEGIVFAEKAGLDPVKWLEAVKDGAAGSAVMRLFGEMMAVRDYKATGFAEYMVKDLGMAAEAAMAMPGTALNKQLFTVMVANGDGKLGFQGVVDVIRRLNGLS

SEQ ID NO: 88765 - protein, 272 aa, Arabidopsis thaliana
  peptide (1)..(272): Ceres Seq. ID no. 12712258
MVSHILAAGYSVTVYARDLRKTKDLQTKGGRTANSPKELGEMSDVVFTIVGNSNDVRSLLLGDDGVLSGLKPGGVTVDMTSSKPGLAREIYAEARRRDCWAVDAPVSGGDAGAREGKLTIFAGGDSEIVEWLAPVMKTMGIVRFMGGAGSGQSCKIGNQICVGSNMIGLAEGIVFAEKAGLDPVKWLEAVKDGAAGSAVMRLFGEMMAVRDYKATGFAEYMVKDLGMAAEAAMAMPGTALNKQLFTVMVANGDGKLGFQGVVDVIRRLNGLS

SEQ ID NO: 88766 - DNA, 2169 bp, Arabidopsis thaliana
  misc_feature (1)..(2169): Ceres Seq. ID no. 12712287
  misc_feature (1)..(2169): Ortholog of  Ceres SEQ ID NO 12586556 as cited in SEQ ID NO 64667
  misc_feature (1)..(2169): Ortholog of  Ceres SEQ ID NO 13660894 as cited in SEQ ID NO 67475
atgattacaagcttatctcaaatctcttttgggacattgaggcgctttggctcttctgttttaccttctgcactgaaacgcgaatttgttgaaggattgcgtacgttagtaaggtctggtgatatccgtcgagctgtttccttattctattctgcgccggtcgagcttcagtctcaacaggcttacgcagctctgttccaagcatgtgcagagcaacgcaatctcctcgatggaatcaacttgcaccaccacatgctctcacatccctattgttattcacagaacgttatacttgctaatttcctcattaatatgtatgccaaatgtgggaatatcttatacgcacgacaggtgtttgatacaatgcctgagaggaatgttgtttcatggactgcattgatcacaggctatgtacaggctgggaatgagcaagagggattctgtcttttctcgtctatgttatcccattgtttccctaacgagtttacgctgtcaagcgtgttaacttcatgtcgatatgagcctggaaagcaggtacatggacttgctctgaaacttggtttacattgttcgatctatgtggcgaatgcagttatctctatgtacggtaggtgtcatgatggtgccgcagcatatgaagcttggactgtgtttgaagccataaagtttaagaatttggttacttggaactcaatgattgctgcttttcagtgctgcaatcttgggaaaaaggccattggcgtttttatgcggatgcatagtgatggagtgggatttgatcgtgccacgttgcttaatatatgttcttccttgtacaaaagctctgacttagttcctaatgaggtttcaaagtgttgtcttcaactgcattctctgactgtaaaatccgggttggtgactcagactgaagtggctactgcattgattaaagtttattcagaaatgttagaagactatactgactgctacaagctttttatggaaatgagtcactgcagggacattgttgcttggaatgggattataacagcgtttgcagtgtatgatccggagagagctattcatctctttggacttgtcactgctcgccatgctttgtctatacacgctcaagtgatcaagggtggttttttggctgacacggtgctgaacaactcattaatccatgcgtatgccaagtgtggctctcttgacttgtgtatgcgtgtatttgacgatatggattcgcgggatgttgtttcctggaactcaatgctcaaggcttactcattacatggccaagtagactcaattctaccagtctttcagaaaatggacatcaaccccgattcagcgactttcatagcccttctctcggcttgcagccacgcaggacgagtagaagaaggattgagaatattcagatccatgtttgagaaacctgaaactcttcctcagctaaatcactacgcttgtgtgatcgatatgctaagccgagctgagcgttttgctgaggcagaagaggttatcaagcagatgccaatggacccagatgctgtagtttggattgcattattgggatcatgtagaaagcacggtaacacccggttgggtaagttagcggcagataaacttaaagagctagtcgaacccacaaactcaatgagttacatccagatgtcaaacatatacaacgcagaaggtagctttaacgaagccaatcttagcataaaggagatggaaacatggagagtacggaaagaaccagacttaagctggacagagataggaaacaaggttcacgaattcgcatcgggaggaagacaccgtccggacaaggaagccgtatacagagaattgaagagactgattagttggttaaaggagatgggttacgttccagaaatgaggtcagcttcacaagatatagaagacgaagaacaggaggaagataatttattacatcacagcgagaaacttgcgttagcgtttgcggttatggagggaagaaaatcgagtgattgtggtgtgaatttgatacagattatgaagaacacaaggatctgtattgattgccataacttcatgaaattagcttctaagcttttgggaaaagagattcttatgagagactcgaatcggtttcaccatttcaaagattcttcttgctcctgtaatgactactggtaa

SEQ ID NO: 88767 - protein, 722 aa, Arabidopsis thaliana
  peptide (1)..(722): Ceres Seq. ID no. 12712288
MITSLSQISFGTLRRFGSSVLPSALKREFVEGLRTLVRSGDIRRAVSLFYSAPVELQSQQAYAALFQACAEQRNLLDGINLHHHMLSHPYCYSQNVILANFLINMYAKCGNILYARQVFDTMPERNVVSWTALITGYVQAGNEQEGFCLFSSMLSHCFPNEFTLSSVLTSCRYEPGKQVHGLALKLGLHCSIYVANAVISMYGRCHDGAAAYEAWTVFEAIKFKNLVTWNSMIAAFQCCNLGKKAIGVFMRMHSDGVGFDRATLLNICSSLYKSSDLVPNEVSKCCLQLHSLTVKSGLVTQTEVATALIKVYSEMLEDYTDCYKLFMEMSHCRDIVAWNGIITAFAVYDPERAIHLFGLVTARHALSIHAQVIKGGFLADTVLNNSLIHAYAKCGSLDLCMRVFDDMDSRDVVSWNSMLKAYSLHGQVDSILPVFQKMDINPDSATFIALLSACSHAGRVEEGLRIFRSMFEKPETLPQLNHYACVIDMLSRAERFAEAEEVIKQMPMDPDAVVWIALLGSCRKHGNTRLGKLAADKLKELVEPTNSMSYIQMSNIYNAEGSFNEANLSIKEMETWRVRKEPDLSWTEIGNKVHEFASGGRHRPDKEAVYRELKRLISWLKEMGYVPEMRSASQDIEDEEQEEDNLLHHSEKLALAFAVMEGRKSSDCGVNLIQIMKNTRICIDCHNFMKLASKLLGKEILMRDSNRFHHFKDSSCSCNDYW

SEQ ID NO: 88768 - protein, 638 aa, Arabidopsis thaliana
  peptide (1)..(638): Ceres Seq. ID no. 12712289
MLSHPYCYSQNVILANFLINMYAKCGNILYARQVFDTMPERNVVSWTALITGYVQAGNEQEGFCLFSSMLSHCFPNEFTLSSVLTSCRYEPGKQVHGLALKLGLHCSIYVANAVISMYGRCHDGAAAYEAWTVFEAIKFKNLVTWNSMIAAFQCCNLGKKAIGVFMRMHSDGVGFDRATLLNICSSLYKSSDLVPNEVSKCCLQLHSLTVKSGLVTQTEVATALIKVYSEMLEDYTDCYKLFMEMSHCRDIVAWNGIITAFAVYDPERAIHLFGLVTARHALSIHAQVIKGGFLADTVLNNSLIHAYAKCGSLDLCMRVFDDMDSRDVVSWNSMLKAYSLHGQVDSILPVFQKMDINPDSATFIALLSACSHAGRVEEGLRIFRSMFEKPETLPQLNHYACVIDMLSRAERFAEAEEVIKQMPMDPDAVVWIALLGSCRKHGNTRLGKLAADKLKELVEPTNSMSYIQMSNIYNAEGSFNEANLSIKEMETWRVRKEPDLSWTEIGNKVHEFASGGRHRPDKEAVYRELKRLISWLKEMGYVPEMRSASQDIEDEEQEEDNLLHHSEKLALAFAVMEGRKSSDCGVNLIQIMKNTRICIDCHNFMKLASKLLGKEILMRDSNRFHHFKDSSCSCNDYW

SEQ ID NO: 88769 - protein, 618 aa, Arabidopsis thaliana
  peptide (1)..(618): Ceres Seq. ID no. 12712290
MYAKCGNILYARQVFDTMPERNVVSWTALITGYVQAGNEQEGFCLFSSMLSHCFPNEFTLSSVLTSCRYEPGKQVHGLALKLGLHCSIYVANAVISMYGRCHDGAAAYEAWTVFEAIKFKNLVTWNSMIAAFQCCNLGKKAIGVFMRMHSDGVGFDRATLLNICSSLYKSSDLVPNEVSKCCLQLHSLTVKSGLVTQTEVATALIKVYSEMLEDYTDCYKLFMEMSHCRDIVAWNGIITAFAVYDPERAIHLFGLVTARHALSIHAQVIKGGFLADTVLNNSLIHAYAKCGSLDLCMRVFDDMDSRDVVSWNSMLKAYSLHGQVDSILPVFQKMDINPDSATFIALLSACSHAGRVEEGLRIFRSMFEKPETLPQLNHYACVIDMLSRAERFAEAEEVIKQMPMDPDAVVWIALLGSCRKHGNTRLGKLAADKLKELVEPTNSMSYIQMSNIYNAEGSFNEANLSIKEMETWRVRKEPDLSWTEIGNKVHEFASGGRHRPDKEAVYRELKRLISWLKEMGYVPEMRSASQDIEDEEQEEDNLLHHSEKLALAFAVMEGRKSSDCGVNLIQIMKNTRICIDCHNFMKLASKLLGKEILMRDSNRFHHFKDSSCSCNDYW

SEQ ID NO: 88770 - DNA, 1908 bp, Arabidopsis thaliana
  misc_feature (1)..(1908): Ceres Seq. ID no. 12712302
  misc_feature (1)..(1908): Ortholog of  Ceres SEQ ID NO 12586556 as cited in SEQ ID NO 64667
  misc_feature (1)..(1908): Ortholog of  Ceres SEQ ID NO 13660894 as cited in SEQ ID NO 67475
atgctgagtgagagtcttttcaaatctcttggacatttggccagccacggtcatttgcacgacgctttcaaaacgttttctcttcttcgtcttcaatcttcttctgcagtttcagatgacctcgttttgcattccgcggcttcccttttatccgcttgcgttgatgttcgtgcatttttagcaggggtgcaagttcacgctcactgtatttcgtcgggtgtcgaatatcactctgtgttagtcccaaagctggttaccttttactctgctttcaatctccacaatgaagctcaatcgattattgagaactctgacattttgcatcccttaccttggaatgtgctcattgcttcgtatgccaagaacgagctttttgaggaggttattgctgcttacaagagaatggtgagcaagggaatccgacccgatgccttcacttatccgtctgttcttaaggcttgtggtgaaacacttgacgttgcctttggaagggtggttcatggttccatcgaggttagctcttacaagtccagcttgtatgtttgtaatgcattgatctctatgtataaaaggtttagaaatatgggtattgctcggaggttgtttgatcgaatgtttgaaagggatgctgtctcatggaatgcagtgataaactgttatgcttcggaaggcatgtggagtgaagcgtttgagcttttcgataaaatgtggttttcaggtgttgaggcttgctctctcataggagcaatacgattgggaaaagagattcacggtcttgctattcacagttcttatgatgggattgacaatgttcgaaacacgttgatcacaatgtactcaaaatgcaaagaccttaggcacgccttaatagtgtttcgacagactgaagaaaatagtttgtgtacttggaactctatcatttccggttatgcgcagctgaacaaatcagaagaagcctctcacctgctgagggagatgttggttgctggctttcagccaaattccattacactagcaagcattctccctctttgtgctcggattgcaaacctgcaacatggaaaagagtttcattgctacatcctgaggcgcaagtgcttcaaggactatacaatgctgtggaactcccttgttgatgtttatgcaaaatcgggaaagattgtagctgcaaagcaagtatctgatttgatgagcaaaagagacgaagtaacatacacttccttgatagatggatacggaaatcaaggtgaagggggagtagccttggccctgttcaaggagatgaccagatctggtattaaacctgaccatgtaaccgtggttgcagttctatcagcctgcagtcattccaagttagtccatgaaggtgaaaggctgtttatgaagatgcagtgtgagtatggtatacgtccttgtcttcaacatttttcttgtatggttgatctctatggcagagcaggtttcctagcaaaagccaaagacataattcacaatatgccatataagccatccggtgccacgtgggctaccctactgaacgcgtgtcacatccatgggaacacacagattggtaaatgggcagcagaaaagctcctggagatgaagccagagaacccgggatactacgtgttaattgcaaatatgtatgcagctgctggttcttggagcaagcttgctgaagtgaggactataatgagggacttgggtgtgaaaaaggatcctggctgtgcttggatcgacacagattctggattttcactgttttcggtgggggacacatcaagccctgaagcatgtaatacttatcctctattagatggactgaatcagctgatgaaagacaatgctggttatgccatcaataaggtgcaaagttcagatgaagaacttcttcaagaaatgggatga

SEQ ID NO: 88771 - protein, 635 aa, Arabidopsis thaliana
  peptide (1)..(635): Ceres Seq. ID no. 12712303
MLSESLFKSLGHLASHGHLHDAFKTFSLLRLQSSSAVSDDLVLHSAASLLSACVDVRAFLAGVQVHAHCISSGVEYHSVLVPKLVTFYSAFNLHNEAQSIIENSDILHPLPWNVLIASYAKNELFEEVIAAYKRMVSKGIRPDAFTYPSVLKACGETLDVAFGRVVHGSIEVSSYKSSLYVCNALISMYKRFRNMGIARRLFDRMFERDAVSWNAVINCYASEGMWSEAFELFDKMWFSGVEACSLIGAIRLGKEIHGLAIHSSYDGIDNVRNTLITMYSKCKDLRHALIVFRQTEENSLCTWNSIISGYAQLNKSEEASHLLREMLVAGFQPNSITLASILPLCARIANLQHGKEFHCYILRRKCFKDYTMLWNSLVDVYAKSGKIVAAKQVSDLMSKRDEVTYTSLIDGYGNQGEGGVALALFKEMTRSGIKPDHVTVVAVLSACSHSKLVHEGERLFMKMQCEYGIRPCLQHFSCMVDLYGRAGFLAKAKDIIHNMPYKPSGATWATLLNACHIHGNTQIGKWAAEKLLEMKPENPGYYVLIANMYAAAGSWSKLAEVRTIMRDLGVKKDPGCAWIDTDSGFSLFSVGDTSSPEACNTYPLLDGLNQLMKDNAGYAINKVQSSDEELLQEMG

SEQ ID NO: 88772 - protein, 501 aa, Arabidopsis thaliana
  peptide (1)..(501): Ceres Seq. ID no. 12712304
MVSKGIRPDAFTYPSVLKACGETLDVAFGRVVHGSIEVSSYKSSLYVCNALISMYKRFRNMGIARRLFDRMFERDAVSWNAVINCYASEGMWSEAFELFDKMWFSGVEACSLIGAIRLGKEIHGLAIHSSYDGIDNVRNTLITMYSKCKDLRHALIVFRQTEENSLCTWNSIISGYAQLNKSEEASHLLREMLVAGFQPNSITLASILPLCARIANLQHGKEFHCYILRRKCFKDYTMLWNSLVDVYAKSGKIVAAKQVSDLMSKRDEVTYTSLIDGYGNQGEGGVALALFKEMTRSGIKPDHVTVVAVLSACSHSKLVHEGERLFMKMQCEYGIRPCLQHFSCMVDLYGRAGFLAKAKDIIHNMPYKPSGATWATLLNACHIHGNTQIGKWAAEKLLEMKPENPGYYVLIANMYAAAGSWSKLAEVRTIMRDLGVKKDPGCAWIDTDSGFSLFSVGDTSSPEACNTYPLLDGLNQLMKDNAGYAINKVQSSDEELLQEMG

SEQ ID NO: 88773 - protein, 448 aa, Arabidopsis thaliana
  peptide (1)..(448): Ceres Seq. ID no. 12712305
MYKRFRNMGIARRLFDRMFERDAVSWNAVINCYASEGMWSEAFELFDKMWFSGVEACSLIGAIRLGKEIHGLAIHSSYDGIDNVRNTLITMYSKCKDLRHALIVFRQTEENSLCTWNSIISGYAQLNKSEEASHLLREMLVAGFQPNSITLASILPLCARIANLQHGKEFHCYILRRKCFKDYTMLWNSLVDVYAKSGKIVAAKQVSDLMSKRDEVTYTSLIDGYGNQGEGGVALALFKEMTRSGIKPDHVTVVAVLSACSHSKLVHEGERLFMKMQCEYGIRPCLQHFSCMVDLYGRAGFLAKAKDIIHNMPYKPSGATWATLLNACHIHGNTQIGKWAAEKLLEMKPENPGYYVLIANMYAAAGSWSKLAEVRTIMRDLGVKKDPGCAWIDTDSGFSLFSVGDTSSPEACNTYPLLDGLNQLMKDNAGYAINKVQSSDEELLQEMG

SEQ ID NO: 88774 - DNA, 1932 bp, Arabidopsis thaliana
  misc_feature (1)..(1932): Ceres Seq. ID no. 12712309
  misc_feature (1)..(1932): Ortholog of  Ceres SEQ ID NO 13598532 as cited in SEQ ID NO 65204
  misc_feature (1)..(1932): Ortholog of  Ceres SEQ ID NO 13656849 as cited in SEQ ID NO 65764
  misc_feature (1)..(1932): Ortholog of  Ceres SEQ ID NO 13656501 as cited in SEQ ID NO 69206
atgggttgtatttgtgccaccgcccgttcaccaagcgccgccgttaccgataaagatctattagattccagcaaatccatccttcaacttctccctcatcatcccccgtcgtcttcgtcttcatccaagaaggaaggatctttcacacgtacgacttcttcagcttctatcaccattgtggctaatggttatcctgtggcacgccgtccttccacttcatctgatcgaaacagcaccaaaccggtcgttgttgtgggagctccgaccagaaatccaacaagaagagtcaccgctataccggttgcacagccggcacagcagcagccagcacaatggccgtcttggctggcttctgttgctggggaggccattaaaggatgggttcctcgctgcgcagagtcctttgagaagttagacaaaattggacaggggacttacagcagcgtgtacaaagctagagaccttgaaacggggaagattgtggcgatgaagaaagttcggtttgtgaacatggatccagagagtgttcggtttatggccagggagattctcattcttcgtaagcttgatcaccccaatgttatgaagctagaaggtctagttacctctagactctcaggtagcctctaccttgtctttgagtacatggaacacgatctcgcaggtctagctgcaactcctggaatcaaattctctgaacctcagatcaagtgctatatgcagcaattgttccgtgggcttgaacattgccacagacgaggaattcttcaccgtgatattaaaggctcaaatctcttaatcaataatgaaggtgtcttgaagattggtgatttcggattggcgaatttttaccgaggtgatggagatctgcagctgaccagtcgtgttgtgaccttatggtacagagcacctgagctgttgctcggtgccactgagtatggaccagccattgacctgtggagcgccggctgcattctcactgagctcttcgccggaaaacctattatgccaggacgcacagaagtggagcagatgcacaagatctttaagctctgtggttcaccctcggaagattactggagaagagcaacactgccactagcaacaagctttaaacccagtcatccttacaagcctgttcttgctgaaacctttaaccatttcccttcatcagctctgatgctcatcaataagctactggcaatagaacctgaaaaacggggatcggctgcttctaccttgaggagcgaattcttcaccacggagccactccctgcgaatccatcaaacttacctagatatccaccaagcaaggaacttgatgccaagcttcgcaacgaagaagcaagaaaactaagggcagaaggtaacaagagaagagggggagaaactgtgacaagaggacggccaaaggatcttaaaacagcccagacaccagagtttatggctgcaggacagtccaaagtcacatgcataagccacaaattcaaaacagacgaggaaggtggcaccgggtttaggatagaaccaccaagaagagggatccagcagaatggtaaagctcatgcttcttcaatggttcacccaacagtggctgatacagaatggaacggaggtggaagcatcaaaagacaaactaatgcagagatgaagtctaggacatctcaaacaggagacttgtctggtgaatcttataggagagatcccaacagagattactcaaccggcaatgcaccaaggaaaaacagaatcaattactcaggaccattgatgcctcctggtggaaatcttgaagatttgcttaaagagcatgagaagcagatccaacaagctgtccgcaaagcacgtgtagaaaagtctgcatcaagaaaaaaccaagctttaacaggacaacaacagcagcaacgttacacaggaagaaatgctcggtag

SEQ ID NO: 88775 - protein, 643 aa, Arabidopsis thaliana
  peptide (1)..(643): Ceres Seq. ID no. 12712310
MGCICATARSPSAAVTDKDLLDSSKSILQLLPHHPPSSSSSSKKEGSFTRTTSSASITIVANGYPVARRPSTSSDRNSTKPVVVVGAPTRNPTRRVTAIPVAQPAQQQPAQWPSWLASVAGEAIKGWVPRCAESFEKLDKIGQGTYSSVYKARDLETGKIVAMKKVRFVNMDPESVRFMAREILILRKLDHPNVMKLEGLVTSRLSGSLYLVFEYMEHDLAGLAATPGIKFSEPQIKCYMQQLFRGLEHCHRRGILHRDIKGSNLLINNEGVLKIGDFGLANFYRGDGDLQLTSRVVTLWYRAPELLLGATEYGPAIDLWSAGCILTELFAGKPIMPGRTEVEQMHKIFKLCGSPSEDYWRRATLPLATSFKPSHPYKPVLAETFNHFPSSALMLINKLLAIEPEKRGSAASTLRSEFFTTEPLPANPSNLPRYPPSKELDAKLRNEEARKLRAEGNKRRGGETVTRGRPKDLKTAQTPEFMAAGQSKVTCISHKFKTDEEGGTGFRIEPPRRGIQQNGKAHASSMVHPTVADTEWNGGGSIKRQTNAEMKSRTSQTGDLSGESYRRDPNRDYSTGNAPRKNRINYSGPLMPPGGNLEDLLKEHEKQIQQAVRKARVEKSASRKNQALTGQQQQQRYTGRNAR

SEQ ID NO: 88776 - protein, 481 aa, Arabidopsis thaliana; identical to SEQ ID NO: 70663
  peptide (1)..(481): Ceres Seq. ID no. 12712311

SEQ ID NO: 88777 - protein, 473 aa, Arabidopsis thaliana; identical to SEQ ID NO: 70664
  peptide (1)..(473): Ceres Seq. ID no. 12712312

SEQ ID NO: 88778 - DNA, 1248 bp, Arabidopsis thaliana
  misc_feature (1)..(1248): Ceres Seq. ID no. 12712313
  misc_feature (1)..(1248): Ortholog of  Ceres SEQ ID NO 13594727 as cited in SEQ ID NO 52169
  misc_feature (1)..(1248): Ortholog of  Ceres SEQ ID NO 14301430 as cited in SEQ ID NO 56553
  misc_feature (1)..(1248): Ortholog of  Ceres SEQ ID NO 13596474 as cited in SEQ ID NO 62169
  misc_feature (1)..(1248): Ortholog of  Ceres SEQ ID NO 13596969 as cited in SEQ ID NO 63375
  misc_feature (1)..(1248): Ortholog of  Ceres SEQ ID NO 14302240 as cited in SEQ ID NO 64162
  misc_feature (1)..(1248): Ortholog of  Ceres SEQ ID NO 13584480 as cited in SEQ ID NO 64751
  misc_feature (1)..(1248): Ortholog of  Ceres SEQ ID NO 13597519 as cited in SEQ ID NO 64759
  misc_feature (1)..(1248): Ortholog of  Ceres SEQ ID NO 15170183 as cited in SEQ ID NO 65667
  misc_feature (1)..(1248): Ortholog of  Ceres SEQ ID NO 13595926 as cited in SEQ ID NO 67778
  misc_feature (1)..(1248): Ortholog of  Ceres SEQ ID NO 13596362 as cited in SEQ ID NO 67877
aacaagaaaaggcagagaagagagaggctctgataaaaaaaaaaacaaaaaaaaatgacaaaggcttattcaacacgtgtcctcacgtttctgatattgatctcgctaatggcggtgacactgaacctttttcccacggtagaggcaaagaagcggagtagagatgctcctatagtgaaaggtctctcatggaacttttaccagaaagcatgtccgaaagtcgaaaacatcatcagaaaagagctcaagaaagtcttcaagcgagatattggtttagccgctgccatccttcgtatacatttccatgattgcttcgttcagggatgtgaagcatcagtgctgctagctggatcagccagtggaccaggagaacaatcatcaatcccaaatctgacactacgacaacaagcctttgtcgtcattaataaccttcgtgccctcgtccaaaagaagtgcggtcaagtcgtctcttgctcagatatcctcgctctcgccgctcgcgattccgtcgtcctatcaggagggccagactatgctgtcccacttggccgacgtgactctctagcgttcgcgagccaggaaacgacgttaaataacttaccaccaccgttcttcaacgcgagtcagctcatcgccgacttcgccaacagaaacctcaacatcaccgacttagtagcactttccggtggtcacaccatcggaatcgcgcattgtccgtctttcacagaccgactctacccgaaccaagacccaaccatgaaccagttcttcgccaacagcctcaaacgcacttgtcccaccgcaaactcgagcaacacgcaagtgaatgacataaggagtcctgacgtgttcgacaacaagtactacgttgatctcatgaaccgacaagggctattcacttctgaccaggatctcttcgtggataagaggacacgtggcattgtggaaagctttgcgatcgaccagcagctgttttttgattattttactgtggcgatgatcaagatgggtcagatgagtgtcttaactggaacacaaggagagattcgttccaattgttcagccagaaacacccaaagtttcatgtccgttttggaagaaggcatagaggaagctatttccatgatctaaataaccataaatctcgacctttcctttgtcaactctgtttttatttagttcatgcacttgtggttgggttgtcgaatgcgtaaaactatctgataaataagaacgtcgcttcatctt

SEQ ID NO: 88779 - protein, 358 aa, Arabidopsis thaliana; identical to SEQ ID NO: 25159
  peptide (1)..(358): Ceres Seq. ID no. 12712314

SEQ ID NO: 88780 - protein, 340 aa, Arabidopsis thaliana; identical to SEQ ID NO: 25160
  peptide (1)..(340): Ceres Seq. ID no. 12712315

SEQ ID NO: 88781 - DNA, 1497 bp, Arabidopsis thaliana
  misc_feature (1)..(1497): Ceres Seq. ID no. 12712335
  misc_feature (1)..(1497): Ortholog of  Ceres SEQ ID NO 14302875 as cited in SEQ ID NO 66242
  misc_feature (1)..(1497): Ortholog of  Ceres SEQ ID NO 13660287 as cited in SEQ ID NO 67316
atggaagacaaaatccagtcagatgatttcacttcccataaaaacccaactcttcctcaagtcattgaagagctaaaagagctctgggctatggttttaccaatcacagcaatgaactgtcttgtctacgtgcgcgccgtcgtgtctgttctcttcctcggccgtctcggtagcctcgagttagccggaggagctctctccatcggattcaccaacatcacaggatactctgttatggttggactcgcctcgggtctcgagccagtgtgtagccaagcctacggtagcaaaaactgggatctcctcacgctctctcttcaccgtatggtcgtgattctcttaatggcctctctgcccataagcctcctttggatcaaccttggacccatcatgcttttcatgggtcaaaacccggagataaccgctacagcggctgaatattgtctctacgcgcttcctgatcttttgaccaatactctccttcagccgttacgtgtttatctaaggtcgcagcgagtgacgaaaccgatgatgtggtgtacgctagcagcagtggcgttccatgtgccattgaattattggcttgtgatggtgaagcattggggtgttcctggtgtggctattgcgtctgttgtgacgaatttgatcatggttgtgcttttggttggttatgtttgggttagtgggatgttgcagaagagagtgagtggtgatggtgatggtgggtctactacgatggtggcggtggtggctcagtcgtcgtctgtgatggagttggttggagggttgggaccgttgatgagagtggcggttccgagttgtttggggatatgtttggaatggtggtggtatgagattgtgattgtgatgggtggttacttggagaatcctaagcttgctgtggctgccactgggattttgattcagactactagtcttatgtatacggttgggaacgagctcggtgcaggtagaccttacaaggccagactagccgcgaacgtggctctagcttgcgcgtttgtagtaggagcattgaatgtggcttggacggttattctaaaagagcgttgggctggactattcactggctatgagccactcaaggtcttggttgcttcggttatgccaattgtcgggctatgcgagctagggaattgtccacagaccacgggctgcgggattcttagagggacaggtcggcctgcggttggggcacatgtgaatctcgggtcgttttatttcgttgggactcccgtggcagttggactagcgttttggttgaaaattgggtttagtgggttgtggtttgggttgctttcagctcaagcggcttgcgtggtttcgatattgtatgcggttttggcgaggacggattgggaaggggaagccgtgaaggcaatgagactgacgagtttggagatgaggaaagttggacaagatgaagagtcttcattgttattgttggatgatgagaagttgggtgatgttttgtaa

SEQ ID NO: 88782 - protein, 498 aa, Arabidopsis thaliana
  peptide (1)..(498): Ceres Seq. ID no. 12712336
MEDKIQSDDFTSHKNPTLPQVIEELKELWAMVLPITAMNCLVYVRAVVSVLFLGRLGSLELAGGALSIGFTNITGYSVMVGLASGLEPVCSQAYGSKNWDLLTLSLHRMVVILLMASLPISLLWINLGPIMLFMGQNPEITATAAEYCLYALPDLLTNTLLQPLRVYLRSQRVTKPMMWCTLAAVAFHVPLNYWLVMVKHWGVPGVAIASVVTNLIMVVLLVGYVWVSGMLQKRVSGDGDGGSTTMVAVVAQSSSVMELVGGLGPLMRVAVPSCLGICLEWWWYEIVIVMGGYLENPKLAVAATGILIQTTSLMYTVGNELGAGRPYKARLAANVALACAFVVGALNVAWTVILKERWAGLFTGYEPLKVLVASVMPIVGLCELGNCPQTTGCGILRGTGRPAVGAHVNLGSFYFVGTPVAVGLAFWLKIGFSGLWFGLLSAQAACVVSILYAVLARTDWEGEAVKAMRLTSLEMRKVGQDEESSLLLLDDEKLGDVL

SEQ ID NO: 88783 - protein, 468 aa, Arabidopsis thaliana
  peptide (1)..(468): Ceres Seq. ID no. 12712337
MVLPITAMNCLVYVRAVVSVLFLGRLGSLELAGGALSIGFTNITGYSVMVGLASGLEPVCSQAYGSKNWDLLTLSLHRMVVILLMASLPISLLWINLGPIMLFMGQNPEITATAAEYCLYALPDLLTNTLLQPLRVYLRSQRVTKPMMWCTLAAVAFHVPLNYWLVMVKHWGVPGVAIASVVTNLIMVVLLVGYVWVSGMLQKRVSGDGDGGSTTMVAVVAQSSSVMELVGGLGPLMRVAVPSCLGICLEWWWYEIVIVMGGYLENPKLAVAATGILIQTTSLMYTVGNELGAGRPYKARLAANVALACAFVVGALNVAWTVILKERWAGLFTGYEPLKVLVASVMPIVGLCELGNCPQTTGCGILRGTGRPAVGAHVNLGSFYFVGTPVAVGLAFWLKIGFSGLWFGLLSAQAACVVSILYAVLARTDWEGEAVKAMRLTSLEMRKVGQDEESSLLLLDDEKLGDVL

SEQ ID NO: 88784 - protein, 461 aa, Arabidopsis thaliana
  peptide (1)..(461): Ceres Seq. ID no. 12712338
MNCLVYVRAVVSVLFLGRLGSLELAGGALSIGFTNITGYSVMVGLASGLEPVCSQAYGSKNWDLLTLSLHRMVVILLMASLPISLLWINLGPIMLFMGQNPEITATAAEYCLYALPDLLTNTLLQPLRVYLRSQRVTKPMMWCTLAAVAFHVPLNYWLVMVKHWGVPGVAIASVVTNLIMVVLLVGYVWVSGMLQKRVSGDGDGGSTTMVAVVAQSSSVMELVGGLGPLMRVAVPSCLGICLEWWWYEIVIVMGGYLENPKLAVAATGILIQTTSLMYTVGNELGAGRPYKARLAANVALACAFVVGALNVAWTVILKERWAGLFTGYEPLKVLVASVMPIVGLCELGNCPQTTGCGILRGTGRPAVGAHVNLGSFYFVGTPVAVGLAFWLKIGFSGLWFGLLSAQAACVVSILYAVLARTDWEGEAVKAMRLTSLEMRKVGQDEESSLLLLDDEKLGDVL

SEQ ID NO: 88785 - DNA, 1477 bp, Arabidopsis thaliana
  misc_feature (1)..(1477): Ceres Seq. ID no. 12712446
  misc_feature (1)..(1477): Ortholog of  Ceres SEQ ID NO 13659033 as cited in SEQ ID NO 66372
  misc_feature (1)..(1477): Ortholog of  Ceres SEQ ID NO 12625899 as cited in SEQ ID NO 69079
ataattcctaatttcgacacgttctttacataaattaccagatttgccactatgagcttcttgattcctaatagaggagtaggaggaaccaagattcctctctccatcatcgttctcgttctttgtggtttcatgttcttcattctcttatacactgaaagaatcagcttgttgtcttcttcttcctcttcgtcttcatctttcttcaagctaaagtcttgtccgaggaaagatgttagctcgaaacctaaggagaaaattcgaaaggaaagatcagagatattggaagtgcttgacgacaggttcgaattcgatcccgaagagtgtaacgttgcagcagggaaatgggtttacaatagctcaattgaaccactctacaccgatagatcatgtccatacatcgatcgtcaattctcttgtatgaaaaacggacagccagaaactgattatcttcggtgggaatggcagcctgatgactgtacaattccacgatttagtccgaagttagcaatgaacaaactcagaggaaaaagactactttttgtgggagattcgttgcaacgaagccaatgggaatcgttcgtgtgtttggtggaatcaataatacccgaaggagaaaaatcaatgaagcgtagccaaaaatactttgtatttaaagcaaaggaatacaatgcgactatagagttctattgggcaccgtatatcgtcgaatcaaacacagatatacctgtgatttcggatccaaagaaacggatagtgaaagtggactcagtgaaagatcgagctaagttttgggaaggagctgatattttggttttcaacacttatgtttggtggatgagtggtctccgcatgaaagctctgtggggttctttcggaaatggagagagtggtgcagaggcactagacacacaagtggcttacaggctaggactcaagacatgggctaattgggtagactccaccgttgaccctaataagaccagagtcttcttcaccaccatgtctcctactcatactagaagtgcggattggggaaagccaaacggcacgaagtgtttcaacgagacgaaaccgataaaagataagaagttttggggaacaggctctaacaagcagatgatgaaagtagtgtcaagcgtgataaagcacatgactacgcatgtgacagtcatcaacatcacgcagctctctgagtatcgcatcgacgctcacacatcagtttacaccgagacaggtggcaagatcctaaccgctgagcagagggctgatccaatgcatcacgctgattgtatacattggtgtttacctggactacccgatacatggaatcggatcctattggctcatttgtaaatcaagctaggaggaagctgagggttaaacgggaaaaacccaaatcctctgtttttctcctcttgtgttgtcggagatttgtttgtttcagtgtattgtgattgtcgtcaattttcataag

SEQ ID NO: 88786 - protein, 434 aa, Arabidopsis thaliana; identical to SEQ ID NO: 42955
  peptide (1)..(434): Ceres Seq. ID no. 12712447

SEQ ID NO: 88787 - protein, 407 aa, Arabidopsis thaliana; identical to SEQ ID NO: 42956
  peptide (1)..(407): Ceres Seq. ID no. 12712448

SEQ ID NO: 88788 - protein, 311 aa, Arabidopsis thaliana; identical to SEQ ID NO: 42957
  peptide (1)..(311): Ceres Seq. ID no. 12712449

SEQ ID NO: 88789 - DNA, 1065 bp, Arabidopsis thaliana
  misc_feature (1)..(1065): Ceres Seq. ID no. 12712466
  misc_feature (1)..(1065): Ortholog of  Ceres SEQ ID NO 13581701 as cited in SEQ ID NO 51151
  misc_feature (1)..(1065): Ortholog of  Ceres SEQ ID NO 14315491 as cited in SEQ ID NO 57026
atgaagtcatcgagaatgaagtttgcaaagaagttgaaatcaattagagccggagaatatctgaatcaggatcgaattctccaggttctttctgctgcagatgagtttcttccaaagatatctaaccacattcctcagattacatccgccgcttctatctggagaacccctcaaaagtctgaaaatcaaattgcaaatgtaacggaacttttggaaaacgtgagacaaggagaagaagaagcttctggaaattttgtcggcgacgaggagaacgtacggcctccggtgaatcagattccgagagttccgtgtgatcggaaagagagtaaactggcagtttcatgcggatctgatacaggaatcggaagaaagagtttcggatctggatttagaagacctgatttgaattcgaccacacttttcgatccgaaactgttagaagcatttgaattagctgcgttatgctttaggaagattaaggatttttccagagaagccagagtcaatgatgaagacgacatcgtctttcccgaggaagaggaaatcagaaaagacgggaataacggaaatacccttatggatccgttgttggaattcgaggaacggtgtcctccgggaggagaggaatccgttgttttctacacaacgactcttcgaggaatcagaaaaacgttcgacgattgcaacatgatccgatttctgctggatagttttaaggttaagtactacgagagagatgtgtcgatgcatagagagtatagagaagagctccgacgaatctcagcggcggaaacagaggtgttgcctccggttctgttcgtaaaaggaaggtgtatcggtggagctcagagagtgttgggactgcacgagcaagggaagtttaagattctctttgagggcattccaatcaccggagatgaacgttgccggcggtgcgatggttttaggtttttgatgtgtgatggatgcagaggtagtcgccggattatctctggtgatggatcaagaattcagtgtttgatatgtaatgagaatgggttaattgtgtgcgttggttgctcctaa

SEQ ID NO: 88790 - protein, 354 aa, Arabidopsis thaliana
  peptide (1)..(354): Ceres Seq. ID no. 12712467
MKSSRMKFAKKLKSIRAGEYLNQDRILQVLSAADEFLPKISNHIPQITSAASIWRTPQKSENQIANVTELLENVRQGEEEASGNFVGDEENVRPPVNQIPRVPCDRKESKLAVSCGSDTGIGRKSFGSGFRRPDLNSTTLFDPKLLEAFELAALCFRKIKDFSREARVNDEDDIVFPEEEEIRKDGNNGNTLMDPLLEFEERCPPGGEESVVFYTTTLRGIRKTFDDCNMIRFLLDSFKVKYYERDVSMHREYREELRRISAAETEVLPPVLFVKGRCIGGAQRVLGLHEQGKFKILFEGIPITGDERCRRCDGFRFLMCDGCRGSRRIISGDGSRIQCLICNENGLIVCVGCS

SEQ ID NO: 88791 - protein, 349 aa, Arabidopsis thaliana
  peptide (1)..(349): Ceres Seq. ID no. 12712468
MKFAKKLKSIRAGEYLNQDRILQVLSAADEFLPKISNHIPQITSAASIWRTPQKSENQIANVTELLENVRQGEEEASGNFVGDEENVRPPVNQIPRVPCDRKESKLAVSCGSDTGIGRKSFGSGFRRPDLNSTTLFDPKLLEAFELAALCFRKIKDFSREARVNDEDDIVFPEEEEIRKDGNNGNTLMDPLLEFEERCPPGGEESVVFYTTTLRGIRKTFDDCNMIRFLLDSFKVKYYERDVSMHREYREELRRISAAETEVLPPVLFVKGRCIGGAQRVLGLHEQGKFKILFEGIPITGDERCRRCDGFRFLMCDGCRGSRRIISGDGSRIQCLICNENGLIVCVGCS

SEQ ID NO: 88792 - DNA, 1125 bp, Arabidopsis thaliana
  misc_feature (1)..(1125): Ceres Seq. ID no. 12712511
  misc_feature (1)..(1125): Ortholog of  Ceres SEQ ID NO 12474685 as cited in SEQ ID NO 88
  misc_feature (1)..(1125): Ortholog of  Ceres SEQ ID NO 13638574 as cited in SEQ ID NO 51223
  misc_feature (1)..(1125): Ortholog of  Ceres SEQ ID NO 12610790 as cited in SEQ ID NO 56123
  misc_feature (1)..(1125): Ortholog of  Ceres SEQ ID NO 13655636 as cited in SEQ ID NO 63519
  misc_feature (1)..(1125): Ortholog of  Ceres SEQ ID NO 13655896 as cited in SEQ ID NO 64970
atgaagctagaggtgtgtgggagaatgggttggcacacacgggtcacagtttcacagacacgcggctcctcgatggttgtcttccgccgacagccgccgcgtacgagacgagacgcgattcaccggagagtcaaagaggcaaggaggagaaagccaatggcacatgccacgtttacgtcggaagggcagaatatggagtcgtttcgactcttgagtggccacaaaatcccagccgttggactcggcacgtggcgatctgggtctcaagccgcccacgccgttgtcactgcaatcgtcgagggtggctataggcacatagatacagcttgggagtatggtgatcagagagaggtcggtcaaggaataaagagggcgatgcacgctggccttgaaaggagggacctctttgtgacctcgaagctttggtgcactgagttatctcctgagagagtgcgtcctgctctgcaaaacacccttaaagagcttcaattagagtaccttgatctctacttgattcactggcctatccggctaagagaaggagccagtaagccaccaaaggcaggggacgttcttgactttgacatggaaggagtttggagagaaatggagaatctttccaaggacagtctcgtcaggaatatcggtgtctgtaactttacagtcactaagctcaataagctgctaggatttgctgaactgatccctgccgtttgccagatggaaatgcatcctggttggagaaacgataggatactcgaattctgcaagaagaatgagatccatgttactgcctattctccattgggatctcaagaaggcgggagagatctgatacacgatcagacggtggataggatagcgaagaagctgaataagacaccgggacagattctagtgaaatggggtttgcagagaggaacaagtgtcatccctaagtcattgaatccagagaggatcaaagagaacatcaaagtgtttgattgggtgatccctgaacaagacttccaagctctcaacagcatcactgaccagaaacgagtgatagacggtgaggatcttttcgtcaacaagaccgaaggtccattccgtagtgtggctgatctatgggaccatgaagactaa

SEQ ID NO: 88793 - protein, 374 aa, Arabidopsis thaliana
  peptide (1)..(374): Ceres Seq. ID no. 12712512
MKLEVCGRMGWHTRVTVSQTRGSSMVVFRRQPPRTRRDAIHRRVKEARRRKPMAHATFTSEGQNMESFRLLSGHKIPAVGLGTWRSGSQAAHAVVTAIVEGGYRHIDTAWEYGDQREVGQGIKRAMHAGLERRDLFVTSKLWCTELSPERVRPALQNTLKELQLEYLDLYLIHWPIRLREGASKPPKAGDVLDFDMEGVWREMENLSKDSLVRNIGVCNFTVTKLNKLLGFAELIPAVCQMEMHPGWRNDRILEFCKKNEIHVTAYSPLGSQEGGRDLIHDQTVDRIAKKLNKTPGQILVKWGLQRGTSVIPKSLNPERIKENIKVFDWVIPEQDFQALNSITDQKRVIDGEDLFVNKTEGPFRSVADLWDHED

SEQ ID NO: 88794 - protein, 366 aa, Arabidopsis thaliana
  peptide (1)..(366): Ceres Seq. ID no. 12712513
MGWHTRVTVSQTRGSSMVVFRRQPPRTRRDAIHRRVKEARRRKPMAHATFTSEGQNMESFRLLSGHKIPAVGLGTWRSGSQAAHAVVTAIVEGGYRHIDTAWEYGDQREVGQGIKRAMHAGLERRDLFVTSKLWCTELSPERVRPALQNTLKELQLEYLDLYLIHWPIRLREGASKPPKAGDVLDFDMEGVWREMENLSKDSLVRNIGVCNFTVTKLNKLLGFAELIPAVCQMEMHPGWRNDRILEFCKKNEIHVTAYSPLGSQEGGRDLIHDQTVDRIAKKLNKTPGQILVKWGLQRGTSVIPKSLNPERIKENIKVFDWVIPEQDFQALNSITDQKRVIDGEDLFVNKTEGPFRSVADLWDHED

SEQ ID NO: 88795 - protein, 350 aa, Arabidopsis thaliana
  peptide (1)..(350): Ceres Seq. ID no. 12712514
MVVFRRQPPRTRRDAIHRRVKEARRRKPMAHATFTSEGQNMESFRLLSGHKIPAVGLGTWRSGSQAAHAVVTAIVEGGYRHIDTAWEYGDQREVGQGIKRAMHAGLERRDLFVTSKLWCTELSPERVRPALQNTLKELQLEYLDLYLIHWPIRLREGASKPPKAGDVLDFDMEGVWREMENLSKDSLVRNIGVCNFTVTKLNKLLGFAELIPAVCQMEMHPGWRNDRILEFCKKNEIHVTAYSPLGSQEGGRDLIHDQTVDRIAKKLNKTPGQILVKWGLQRGTSVIPKSLNPERIKENIKVFDWVIPEQDFQALNSITDQKRVIDGEDLFVNKTEGPFRSVADLWDHED

SEQ ID NO: 88796 - DNA, 777 bp, Arabidopsis thaliana
  misc_feature (1)..(777): Ceres Seq. ID no. 12712591
  misc_feature (1)..(777): Ortholog of  Ceres SEQ ID NO 13656783 as cited in SEQ ID NO 69218
atggaggagattctagagaatcttaatgagttcatcaaactgaattcatcgtcacaaggcaagatcatagctgttgattatatacggggaaggaggattgtatgtgtgacttcagggggaacaacggttccattggagcaacgatgtgttaggtatatcgataatttcagctccggaaacagaggtgctgcttctactgagagttcatactcacatttggaagctgtgaaaatggctgttatggatcagcaaactgcagtagcagaaggcagcttactaaaactcccattctcaaccatatatgagtatcttcagatgttgcggttgattgcagaggcattgaaagatgttggtccatgttcaatgttttatcttgctgctgctgtatctgacttctatgtgccatggaagagcatgacagagcacaaaatagaatcaggatctggtcctttagacataagactagctcaagtccctaaaatgctatcagtcttgagatcaaattgggctccaaaggccttctgcatatcattcaagcttgagacagactcaaagattctgatggagaaggctacaaaggctctaagaaaatacaaagtgcacgcagttgtagccaatgagctatcaacccgtaaggaagaagttgtggttgtttcaagcagcggtaatgttgtggttagacgcgaatgcgataagcctgaatcttttgttgaagataatctcattcgtctcatcgtagatcgacattcaacatacatcaaagaatctcacaactga

SEQ ID NO: 88797 - protein, 258 aa, Arabidopsis thaliana
  peptide (1)..(258): Ceres Seq. ID no. 12712592
MEEILENLNEFIKLNSSSQGKIIAVDYIRGRRIVCVTSGGTTVPLEQRCVRYIDNFSSGNRGAASTESSYSHLEAVKMAVMDQQTAVAEGSLLKLPFSTIYEYLQMLRLIAEALKDVGPCSMFYLAAAVSDFYVPWKSMTEHKIESGSGPLDIRLAQVPKMLSVLRSNWAPKAFCISFKLETDSKILMEKATKALRKYKVHAVVANELSTRKEEVVVVSSSGNVVVRRECDKPESFVEDNLIRLIVDRHSTYIKESHN

SEQ ID NO: 88798 - protein, 181 aa, Arabidopsis thaliana
  peptide (1)..(181): Ceres Seq. ID no. 12712593
MAVMDQQTAVAEGSLLKLPFSTIYEYLQMLRLIAEALKDVGPCSMFYLAAAVSDFYVPWKSMTEHKIESGSGPLDIRLAQVPKMLSVLRSNWAPKAFCISFKLETDSKILMEKATKALRKYKVHAVVANELSTRKEEVVVVSSSGNVVVRRECDKPESFVEDNLIRLIVDRHSTYIKESHN

SEQ ID NO: 88799 - protein, 178 aa, Arabidopsis thaliana
  peptide (1)..(178): Ceres Seq. ID no. 12712594
MDQQTAVAEGSLLKLPFSTIYEYLQMLRLIAEALKDVGPCSMFYLAAAVSDFYVPWKSMTEHKIESGSGPLDIRLAQVPKMLSVLRSNWAPKAFCISFKLETDSKILMEKATKALRKYKVHAVVANELSTRKEEVVVVSSSGNVVVRRECDKPESFVEDNLIRLIVDRHSTYIKESHN

SEQ ID NO: 88800 - DNA, 897 bp, Arabidopsis thaliana
  misc_feature (1)..(897): Ceres Seq. ID no. 12712605
  misc_feature (1)..(897): Ortholog of  Ceres SEQ ID NO 14304838 as cited in SEQ ID NO 59750
atggtttttgaggaggatcgaaaatggtttgcagaagctatgcaatcacaaacggtagatgtagtcaagcggttgaaggagattacacaggtattgcagacacctcaacaagttttggaggctcatgaagtgacccctcaagatattgaaggtttgttggatgagttgcaggaacatgttgaatcgattgatatggctaatgatcttcattccgttggaggcttggtacctcttcttggctacctcaaaaactccaatgctaatatccgggctaagtctgcagatgttgtaagcacaatagttgagaacaatcctcggagtcaagaatcagttatggaagccaatggtttagagtccttgcttttaaggtttacttcagacaccgatatgcattctcgaacacaggctctcggtgcaatatcatctttgattcgcaataataaacctgggatcacaggtttccggattgcaaatggttactctggtttaaaagatgctttggaaactgatagtgtgagatttcaaaggaaagctttaaacttgttgcattatcttctacaagagaatgactcagactccgatattgctatagaattcgggcttcaccatttgatgatgcacctcgtgtctagcttcgatgctgatgtaagagaagctgctcttcgaggattgcttgagctcgtgaaagctagaaaagactgtagtacttgtggttctagcatagtgaaaggcgatgagagactcagacagattctaaaagatcggatcaaagcaatcagccgggtcaaagcaatgagcttgtttatgtcacaagaagatctatcagccgctaaagaggagaggcagctcttagattcactatggaccacaatcttcaacgaaccttcttctctttag

SEQ ID NO: 88801 - protein, 298 aa, Arabidopsis thaliana
  peptide (1)..(298): Ceres Seq. ID no. 12712606
MVFEEDRKWFAEAMQSQTVDVVKRLKEITQVLQTPQQVLEAHEVTPQDIEGLLDELQEHVESIDMANDLHSVGGLVPLLGYLKNSNANIRAKSADVVSTIVENNPRSQESVMEANGLESLLLRFTSDTDMHSRTQALGAISSLIRNNKPGITGFRIANGYSGLKDALETDSVRFQRKALNLLHYLLQENDSDSDIAIEFGLHHLMMHLVSSFDADVREAALRGLLELVKARKDCSTCGSSIVKGDERLRQILKDRIKAISRVKAMSLFMSQEDLSAAKEERQLLDSLWTTIFNEPSSL

SEQ ID NO: 88802 - protein, 285 aa, Arabidopsis thaliana
  peptide (1)..(285): Ceres Seq. ID no. 12712607
MQSQTVDVVKRLKEITQVLQTPQQVLEAHEVTPQDIEGLLDELQEHVESIDMANDLHSVGGLVPLLGYLKNSNANIRAKSADVVSTIVENNPRSQESVMEANGLESLLLRFTSDTDMHSRTQALGAISSLIRNNKPGITGFRIANGYSGLKDALETDSVRFQRKALNLLHYLLQENDSDSDIAIEFGLHHLMMHLVSSFDADVREAALRGLLELVKARKDCSTCGSSIVKGDERLRQILKDRIKAISRVKAMSLFMSQEDLSAAKEERQLLDSLWTTIFNEPSSL

SEQ ID NO: 88803 - protein, 234 aa, Arabidopsis thaliana
  peptide (1)..(234): Ceres Seq. ID no. 12712608
MANDLHSVGGLVPLLGYLKNSNANIRAKSADVVSTIVENNPRSQESVMEANGLESLLLRFTSDTDMHSRTQALGAISSLIRNNKPGITGFRIANGYSGLKDALETDSVRFQRKALNLLHYLLQENDSDSDIAIEFGLHHLMMHLVSSFDADVREAALRGLLELVKARKDCSTCGSSIVKGDERLRQILKDRIKAISRVKAMSLFMSQEDLSAAKEERQLLDSLWTTIFNEPSSL

SEQ ID NO: 88804 - DNA, 1230 bp, Arabidopsis thaliana
  misc_feature (1)..(1230): Ceres Seq. ID no. 12712635
  misc_feature (1)..(1230): Ortholog of  Ceres SEQ ID NO 14310616 as cited in SEQ ID NO 55699
  misc_feature (1)..(1230): Ortholog of  Ceres SEQ ID NO 15173907 as cited in SEQ ID NO 62356
  misc_feature (1)..(1230): Ortholog of  Ceres SEQ ID NO 13596519 as cited in SEQ ID NO 62572
  misc_feature (1)..(1230): Ortholog of  Ceres SEQ ID NO 12625108 as cited in SEQ ID NO 68102
acattcctctcttctctctctcttttcccaaaaaccaaaaccttttttccgtaccaaggtcaacaaatggcggcgaaagtaattacatttatggcggttatggtggttactgcctttacggccaacgccaaaatccccggagtttacaccggtggtccttggatcaatgctcacgccaccttctacggtgaagctgacgcttccggcactatgggtggtgcgtgtgggtacgggaatttgtatagccaaggttacggagtgaacacggcggctttaagcactgccttattcaacaatggtttgagttgtggctcttgctttgagcttaagtgtatcaatgatccaggatggtgtcttcctggaaacccatcaattcttatcaccgccactaatttctgccctcctaactttaatcaagctagcgacaatggtggttggtgtaatcctcctcgtgagcactttgatctcgctatgcctatgtttctttccatcgctaagtataaggctggtatcgtccccgtctcttaccgcaggatcccatgtaggaagaagggaggaatcagattcacaatcaatggattcaagtacttcaacttggtgctggtcactaacgtagccggagctggagacgtcattaaggtgagtgtgaaaggatccaacacacaatggttagatctgagccggaactggggacaaaactggcaatccaacgcacttcttgtcggccaatctctttctttccgagtcaaaacctctgatggccgaagctccacctccaacaacattgctcccagtaactggcaatttggccagacctactccggcaagaacttccgcgtctgatttctagaatatgaaaaagagtcgtgtggcggaagatactaaagcttttttttatatcaaatatatatatttacgtgtctttgatttagtttacgatttggaattggggttttaccatttttcccttattttctcagggaaagtattgggattgcttggtttgcaagttagggtttactttaaagattagggctatattgttttttttgttttttttggtgtgttgtgtcttgtttggtatgtagtcttgtagagaggctgaagcggctgcagaaagaaagggttgggataaagattcatgtagcccgcagctctcttttacgttatgattgtattaaagtatatatatatcatgaagaaattaaacatggtttcttcgatttatat

SEQ ID NO: 88805 - protein, 280 aa, Arabidopsis thaliana; identical to SEQ ID NO: 34928
  peptide (1)..(280): Ceres Seq. ID no. 12712636

SEQ ID NO: 88806 - protein, 258 aa, Arabidopsis thaliana; identical to SEQ ID NO: 34929
  peptide (1)..(258): Ceres Seq. ID no. 12712637

SEQ ID NO: 88807 - protein, 250 aa, Arabidopsis thaliana; identical to SEQ ID NO: 34930
  peptide (1)..(250): Ceres Seq. ID no. 12712638

SEQ ID NO: 88808 - DNA, 2255 bp, Arabidopsis thaliana
  misc_feature (1)..(2255): Ceres Seq. ID no. 12712671
  misc_feature (1)..(2255): Ortholog of  Ceres SEQ ID NO 14303276 as cited in SEQ ID NO 1264
  misc_feature (1)..(2255): Ortholog of  Ceres SEQ ID NO 15170536 as cited in SEQ ID NO 52791
  misc_feature (1)..(2255): Ortholog of  Ceres SEQ ID NO 15171813 as cited in SEQ ID NO 57309
  misc_feature (1)..(2255): Ortholog of  Ceres SEQ ID NO 14314378 as cited in SEQ ID NO 57601
  misc_feature (1)..(2255): Ortholog of  Ceres SEQ ID NO 12465083 as cited in SEQ ID NO 68239
accaaatacaaaccctagccgccttattcgtcttcttcgttctctagttttttcctcagtctctgttcttagatcccttgtagtttccaaatcttccgataaaaatgtcgggtaaaggagaaggaccagctatcggtatcgatcttggtaccacttactcttgcgtcggagtatggcaacacgaccgtgttgagatcattgctaatgatcaaggaaacagaaccacgccatcttacgttgctttcaccgactccgagaggttgatcggtgacgcagctaagaatcaggtcgccatgaaccccgttaacaccgttttcgacgctaagaggttgatcggtcgtcgtttctctgacagctctgttcagagtgacatgaaattgtggccattcaagattcaagccggacctgccgataagccaatgatctacgtcgaatacaagggtgaagagaaagagttcgcagctgaggagatttcttccatggttcttattaagatgcgtgagattgctgaggcttaccttggtgtcacaatcaagaacgccgttgttaccgttccagcttacttcaacgactctcagcgtcaggctacaaaggatgctggtgtcatcgctggtttgaacgttatgcgaatcatcaacgagcctacagccgccgctattgcctacggtcttgacaaaaaggctaccagcgttggagagaagaatgttcttatcttcgatcttggtggtggcacttttgatgtctctcttcttaccattgaagagggtatctttgaggtgaaggcaactgctggtgacacccatcttggtggggaagattttgacaacagaatggttaaccactttgtccaagagttcaagaggaagagtaagaaggatatcaccggtaacccaagagctcttaggaggttgagaacttcctgtgagagagcgaagaggactctttcttccactgctcagaccaccatcgagattgactctctatacgagggtatcgacttctactccaccatcacccgtgctagatttgaggagctcaacatggatctcttcaggaagtgtatggagccagttgagaagtgtcttcgtgatgctaagatggacaagagcactgttcatgatgttgtccttgttggtggttctacccgtatccctaaggttcagcaattgctccaggacttcttcaacggcaaagagctttgcaagtctattaaccctgatgaggctgttgcctacggtgctgctgtccagggagctattctcagcggtgaaggaaacgagaaggttcaagatcttctattgctcgatgtcactcctctctcccttggtttggaaactgccggtggtgtcatgaccactttgatcccaaggaacacaaccatcccaaccaagaaggaacaagtcttctccacctactcagacaaccaacccggtgtgttgatccaggtgtacgaaggagagagagccagaaccaaggacaacaaccttcttggtaaatttgagctctccggaattcctccagctcctcgtggtgtcccccagatcacagtctgctttgacattgatgccaatggtatcctcaatgtctctgctgaggacaagaccaccggacagaagaacaagatcaccatcaccaatgacaagggtcgtctctccaaggatgagattgagaagatggttcaagaggctgagaagtacaagtccgaagacgaggagcacaagaagaaggttgaagccaagaacgctctcgagaactacgcttacaacatgaggaacaccatccaagacgagaagattggtgagaagctcccggctgcagacaagaagaagatcgaggattctattgagcaggcgattcaatggctcgagggtaaccagttggctgaggctgatgagttcgaagacaagatgaaggaattggagagcatctgcaacccaatcattgccaagatgtaccaaggagctggtggtgaagccggtggtccaggtgcctctggtatggacgatgatgctccccctgcttcaggcggtgctggacctaagatcgaggaggtcgactaatttgttggacattgacctctctctttctcctatctctatctcttttacttgcttttttttgatctgttaagactttttatgttgggcttttttaaagaagcccattttgtggtgttttttggttagtactattttgaacaatggttggttctataccagtttagctacgatgacggataaaattaaaagtttgcc

SEQ ID NO: 88809 - protein, 651 aa, Arabidopsis thaliana; identical to SEQ ID NO: 22039
  peptide (1)..(651): Ceres Seq. ID no. 12712672

SEQ ID NO: 88810 - protein, 588 aa, Arabidopsis thaliana; identical to SEQ ID NO: 22040
  peptide (1)..(588): Ceres Seq. ID no. 12712673

SEQ ID NO: 88811 - protein, 562 aa, Arabidopsis thaliana; identical to SEQ ID NO: 22041
  peptide (1)..(562): Ceres Seq. ID no. 12712674

SEQ ID NO: 88812 - DNA, 1278 bp, Arabidopsis thaliana
  misc_feature (1)..(1278): Ceres Seq. ID no. 12712683
  misc_feature (1)..(1278): Ortholog of  Ceres SEQ ID NO 15169372 as cited in SEQ ID NO 58778
ctcccaaacctatcttcttcttcctctcttgtctctctcgctctctctcttctacattgtttcttgaggtcaatctattaaaaatgggattatattcactaatcacaggaagaagaggaccaagtggatttggttcagcttcaacagctgaagaggttactcaagggattgatgcaactaatctcactgcaattatcacaggagggacaggaggaatagggatggagacagcgagagtgctgtcgaagagaggtgctcatgtggtgatcggtgcccgaaacatgggagctgcagaaaacgccaaaacagagattctcagacaaaacgcaaacgcacgtgtcactcttcttcaattagatctctcttccatcaaatccatcaaagcctttgttcgtgaatttcatgccctccatcttcctctcaatctcctcataaacaatgcaggagtaatgttctgtccataccaactctctgaagatggaatcgaattgcagtttgctacaaatcacattggtcactttctgttgacaaacttgctcttggacacaatgaagaacacagctaaaaccagtggtgttgaaggaagaattttgaatgtatcatctgtagctcatatctatacttaccaagaaggaatccaattcgacagcatcaatgacatttgcagttactcggataagcgagcttacggacaatcgaaactagccaatatattgcatgctaatgagctctcccgtcagcttcaggaagaaggagtaaacataacagcaaattcagttcaccctggtcttattctcaccaatctcttccaacacactgctcttttaatgaggttcctgaagttcttcagcttctacttgtggaaaaatatacctcagggagcagcaacaacatgttatgttgctctgcatccaagtgtgaagggagtaacaggaaagtactttgctgattgcaacgaagtcactccaagcaaacttgctagagatgagactttggcacagaaactctgggatttcagtgttaagctcattaactcggtttctaaaaagaactacctcggtttcgatgacaccacttgaatctctacggtgttcttgttgaatgttacctaaagagtgaaaaaaaagtaagaacaagtagagattgtgatgtttctttccacattatcgtatggtaactcatgagatgcattgttgtatgcttaaatattttatcgagtgaatatgtaaccgcgtcaatcttttcatagtatggacaataaaaagaagggttgttcat

SEQ ID NO: 88813 - protein, 358 aa, Arabidopsis thaliana
  peptide (1)..(358): Ceres Seq. ID no. 12712684
PKPIFFFLSCLSRSLSSTLFLEVNLLKMGLYSLITGRRGPSGFGSASTAEEVTQGIDATNLTAIITGGTGGIGMETARVLSKRGAHVVIGARNMGAAENAKTEILRQNANARVTLLQLDLSSIKSIKAFVREFHALHLPLNLLINNAGVMFCPYQLSEDGIELQFATNHIGHFLLTNLLLDTMKNTAKTSGVEGRILNVSSVAHIYTYQEGIQFDSINDICSYSDKRAYGQSKLANILHANELSRQLQEEGVNITANSVHPGLILTNLFQHTALLMRFLKFFSFYLWKNIPQGAATTCYVALHPSVKGVTGKYFADCNEVTPSKLARDETLAQKLWDFSVKLINSVSKKNYLGFDDTT

SEQ ID NO: 88814 - protein, 331 aa, Arabidopsis thaliana
  peptide (1)..(331): Ceres Seq. ID no. 12712685
MGLYSLITGRRGPSGFGSASTAEEVTQGIDATNLTAIITGGTGGIGMETARVLSKRGAHVVIGARNMGAAENAKTEILRQNANARVTLLQLDLSSIKSIKAFVREFHALHLPLNLLINNAGVMFCPYQLSEDGIELQFATNHIGHFLLTNLLLDTMKNTAKTSGVEGRILNVSSVAHIYTYQEGIQFDSINDICSYSDKRAYGQSKLANILHANELSRQLQEEGVNITANSVHPGLILTNLFQHTALLMRFLKFFSFYLWKNIPQGAATTCYVALHPSVKGVTGKYFADCNEVTPSKLARDETLAQKLWDFSVKLINSVSKKNYLGFDDTT

SEQ ID NO: 88815 - protein, 285 aa, Arabidopsis thaliana; identical to SEQ ID NO: 36159
  peptide (1)..(285): Ceres Seq. ID no. 12712686

SEQ ID NO: 88816 - DNA, 1659 bp, Arabidopsis thaliana
  misc_feature (1)..(1659): Ceres Seq. ID no. 12712705
  misc_feature (1)..(1659): Ortholog of  Ceres SEQ ID NO 13581273 as cited in SEQ ID NO 54551
  misc_feature (1)..(1659): Ortholog of  Ceres SEQ ID NO 13594209 as cited in SEQ ID NO 59089
  misc_feature (1)..(1659): Ortholog of  Ceres SEQ ID NO 15169611 as cited in SEQ ID NO 65939
  misc_feature (1)..(1659): Ortholog of  Ceres SEQ ID NO 13502874 as cited in SEQ ID NO 66298
  misc_feature (1)..(1659): Ortholog of  Ceres SEQ ID NO 12614124 as cited in SEQ ID NO 68392
aaatcctcgcacaagtagaaaaaaacacaaacatcctgaaactagaagagagagacaaaatgttatacttcatccttctccctcttctatttcttgtaataagttacaaatttctctactccaaaacgcaacgtttcaaccttcctccaggaccaccgtcacgacccttcgtcggccatctccacctcatgaaaccgccgatccaccgtctcctccaacgctactccaaccaatacggcccaatcttttccctccgtttcggctcccgacgcgtcgtggtcataacatccccttctctcgcccaagaatccttcaccggccaaaacgacatcgttctctccagccggccgctccaactcaccgccaaatacgtcgcatacaaccacacaaccgttggtacagctccttacggcgaccactggcgtaacctccgccgcatttgctcccaagagattctctcctctcaccgtctcatcaacttccaacacatccgcaaagacgagatcttacggatgctcacacgcctctcacgttacacacaaacctccaacgaaagcaacgatttcactcacatcgagctagaaccgctcttatctgatctaacattcaacaacatagtaagaatggttacagggaagagatattacggcgacgacgtcaacaacaaagaagaagcagagctattcaagaagctagtctacgatatcgccatgtatagcggcgctaatcattccgctgattacttaccaatactaaaactattcggaaacaaattcgagaaagaagttaaagctataggcaaatcaatggatgatattttgcagcgtttgttagatgaatgtagaagagataaagaaggtaacacaatggtcaatcatttgatctctctacaacaacaacaacctgagtattacactgacgttatcatcaaaggccttatgatgtcgatgatgctcgccggaactgagacctccgctgtgacattagagtgggcgatggcgaatctactgagaaatccagaagtactggagaaggcgagatcggagatcgatgagaagatcggaaaagatcgactaatcgacgaatcagacatcgcagtgcttccttacctccaaaacgtcgtctccgaaacattccggctatttccggtggcgccgtttctaatccctcgatcaccgacggacgacatgaaaatcggaggttacgacgtcccgcgagatacgatagtgatggttaacgcttgggctatacatagagatccagagatttgggaggagccagagaagtttaatccagatcgatataatgacggatgcggaagcgattactatgtttacaagctgatgccgtttgggaatggccggagaacttgtcccggcgccggattaggtcagaggattgtgacattggcgcttggatcgttgattcaatgctttgaatgggagaatgtgaaaggggaagagatggatatgtctgagagtactgggttgggtatgcgtaagatggatcctttacgggccatgtgtaggcctaggcccattatgtcaaagcttttactctaataagatgagtagaggttaaaaaagaaaaaataacttattggatgtaactggtaattatctttaagataaagatgaataaaatgaatctttgcctcat

SEQ ID NO: 88817 - protein, 519 aa, Arabidopsis thaliana; identical to SEQ ID NO: 22364
  peptide (1)..(519): Ceres Seq. ID no. 12712706

SEQ ID NO: 88818 - protein, 500 aa, Arabidopsis thaliana; identical to SEQ ID NO: 22365
  peptide (1)..(500): Ceres Seq. ID no. 12712707

SEQ ID NO: 88819 - protein, 457 aa, Arabidopsis thaliana; identical to SEQ ID NO: 22366
  peptide (1)..(457): Ceres Seq. ID no. 12712708

SEQ ID NO: 88820 - DNA, 1065 bp, Arabidopsis thaliana
  misc_feature (1)..(1065): Ceres Seq. ID no. 12712778
  misc_feature (1)..(1065): Ortholog of  Ceres SEQ ID NO 13655640 as cited in SEQ ID NO 63844
  misc_feature (1)..(1065): Ortholog of  Ceres SEQ ID NO 13584744 as cited in SEQ ID NO 69137
atggccgttacttcgcttctcgataccgttttccgacgtagaaagaagaagtctactgagtttataagctatacagcagttttcgaattcgacttggacaccattaaagctgcaacaaatgatttctcagaactggttggtcgtggcggatttggttttgtttacaagggtaggcttcaaaatggacaagaaatagcagtcaagattttgtctacaagttcaattagaactgagagacagtttcataacgaacttattattttgtctaagcttaaacacaagaatctgatcaatcttcttggtttctgcactaaacgagaccaacatggtcttgtttacgagttcatgcctaactcaagcctcgattgttttatactcgacccacacagagctgctcagctaaattgggagatgtgccgaaacattattgatggcatagctcgagggctacgttaccttcatgaagaatccgggttatgggtcgttcaccgcgacattaaacctggaaacattctattggattcagatttgaaaccgaaaatagtgggatttgaattggcgaggacgatgcaacaaggtgaaaacgcagctgaaacaactgaaattgtcggtaccgtagggtatttagatccggagtacatacgaagcggacgtgtttccgtcaaatctgacgtttatgcctttggagttacaatcttgacgatcattagcagaaggaaggcttggagtgtggacggagactctctaatcaaatatgttaggagatgctggaacagaggagaagccatagatgtgatccatgaagtgatgagggaagaagaaagagaatattcgataagcgaaatcttgagatacattcacattgctttgctatgtgtggatgagaatgctgagagaaggccgaatattgataaagttctgcattggtttagttgtttctctactcctttacctgatccaacatttggtaatagatttcttgtagaggaagaaacaaattggccctggtcgccatctttatctcctggtcacagctctgtcacgtcacccatatcttcacgttaa

SEQ ID NO: 88821 - protein, 354 aa, Arabidopsis thaliana
  peptide (1)..(354): Ceres Seq. ID no. 12712779
MAVTSLLDTVFRRRKKKSTEFISYTAVFEFDLDTIKAATNDFSELVGRGGFGFVYKGRLQNGQEIAVKILSTSSIRTERQFHNELIILSKLKHKNLINLLGFCTKRDQHGLVYEFMPNSSLDCFILDPHRAAQLNWEMCRNIIDGIARGLRYLHEESGLWVVHRDIKPGNILLDSDLKPKIVGFELARTMQQGENAAETTEIVGTVGYLDPEYIRSGRVSVKSDVYAFGVTILTIISRRKAWSVDGDSLIKYVRRCWNRGEAIDVIHEVMREEEREYSISEILRYIHIALLCVDENAERRPNIDKVLHWFSCFSTPLPDPTFGNRFLVEEETNWPWSPSLSPGHSSVTSPISSR

SEQ ID NO: 88822 - protein, 239 aa, Arabidopsis thaliana; identical to SEQ ID NO: 69755
  peptide (1)..(239): Ceres Seq. ID no. 12712780

SEQ ID NO: 88823 - protein, 217 aa, Arabidopsis thaliana; identical to SEQ ID NO: 69756
  peptide (1)..(217): Ceres Seq. ID no. 12712781

SEQ ID NO: 88824 - DNA, 5487 bp, Arabidopsis thaliana
  misc_feature (1)..(5487): Ceres Seq. ID no. 12712790
  misc_feature (1)..(5487): Ortholog of  Ceres SEQ ID NO 13596198 as cited in SEQ ID NO 68488
atggcagcaacaccaccaataagctcaggttccggtttatctcagcagcttaataattcttctagttccaagttatgtcaagtggaaggatgtcaaaaaggagcaagagatgcatctggtcgttgcatttcccatggcggtggacgtagatgccagaaacctgattgccagaagggagctgaaggtaaaacagtgtactgtaaagcccacggaggtggtcgcagatgtgaatatcttggatgcaccaaaggcgcagaaggcagtactgatttttgtatagctcatggaggtggtcgaagatgcaaccatgaagattgcacacgatctgcttggggaagaacagaattctgtgtcaagcacggtggaggagcgagatgcaaaacatacggctgcggaaaaagcgctagtggtcctttgccattctgccgagcccatggtggtggtaaaaaatgcagccatgaagattgcacaggatttgctaggggaagatcaggactctgtctcatgcacggtgggggaaagagatgccaaagagagaactgcactaaaagcgctgaaggtctttcgggactctgcatatcccatggtggtggtcggcgatgtcaatctattggatgcacaaaaggagcgaaagggagcaaaatgttctgcaaagcatgcataactaaaaggcctctaacgattgatggaggaggaaatatgggaggggtaacaacaggtgatgccttgaactatctcaaagctgtgaaggacaagtttgaagacagtgagaaatatgacactttccttgaagtcttgaatgactgtaaacatcagggagttgacactagtggcgtcatagccagattaaaagatttgttcaagggccatgacgacttacttttgggttttaatacctacttgtcaaaggagtaccaaataaccattctgcccgaggatgatttccctatcgattttcttgacaaggttgagggaccttatgaaatgacatatcagcaagctcaaacagttcaagccaatgccaatatgcaacctcaaactgagtacccttcttcctctgcggttcaatcattttcatcgggtcaacctcagatccccacctcagctccggattcttcactactagctaaaagtaatacctcaggtataactatcatcgagcacatgtcacaacagcctctaaatgttgacaaacaagttaatgatggctataactggcaaaagtatgggcaaaagaaagttaaaggcagcaagtttcctctaagctattacaagtgcacatatctaggatgtccttccaagaggaaggttgagagatctcttgatggacaagtagcagaaatcgtctacaaagatcgacacaatcacgaacctcctaaccaaggaaaagatggtagcaccacatatctaagtgggagttcgacacacatcaattgcatgagctctgaattgacagcatcacagtttagctccaacaagactaagatagagcaacaggaagcagcaagtctagctacgacaatagagtacatgtctgaggcaagtgacaatgaagaagacagtaatggagaaactagtgagggagagaaagatgaagacgagcctgaaccaaagagaagaattacagaagttcaggtttcggaactagctgatgcttcagatagaaccgtgagagagcctagggttattttccaaacaacgagtgaagttgataatttagatgatggatataggtggcggaaatatggacagaaagttgttaaagggaatccttatccaaggttttcctcctctaaagattatgatgtcgtaatcagatacggaagagcagatataagcaatgaggatttcattagccatcttcgtgcttccctctgccggagagggatttctgtctatgaaaaatttaatgaagtggatgcacttccaaaatgtagggttttgattatagtattaacaagcacatatgtcccttcgaacctcttaaacattcttgaacaccaacatacagaggatcgagtggtttatccaattttctacagactatcaccatatgattttgtctgtaacagcaagaattatgagagattttatctccaagatgagccaaaaaaatggcaagctgctttgaaggaaataactcagatgcctggctacacattgacagataagtctgaatctgaacttatagatgagattgtaagagatgctttaaaggtgctatgttctgctgataaggtgaacatgattgggatggatatgcaagtagaggagattttgtcactgctatgcattgagtcccttgatgttcgcagcattggtatatggggtacagttggtataggaaaaacaaccattgctgaagagatctttcgcaaaatctctgtccaatatgagacctgtgtcgtccttaaggacctccacaaagaagttgaggtaaaaggtcacgatgctgtgagagagaattttctgtctgaagttttagaggtagaacctcatgttatccggatatctgacattaaaacaagcttcttgagaagtcggcttcagcgtaaaaggatccttgttattcttgacgatgtgaatgattacagagatgttgacacctttttggggacgcttaactattttggtccaggaagcagaataatcatgacctctagaaatagacgtgttttcgtactatgtaaaatcgatcatgtctatgaggttaagccattagatattcctaagtctctactacttcttgatcgtgggacatgtcaaattgttttgtcacctgaggtttacaagacattgtcacttgagctggtcaaattttcaaatggaaatccccaggttcttcagttcttgagcagtattgacagagaatggaataagttatcacaagaagttaagacaacatctcccatttacatcccaggtatatttgaaaagagctgttgtgggcttgatgacaacgagaggggtatatttttggacattgcatgtttctttaataggattgataaagacaatgtcgcaatgttgctggatggttgtggtttctctgcacatgtcggatttagaggccttgttgacaaatcactgttgacaatatcacaacacaacttggtggacatgctcagttttatccaggcaactggtcgagaaattgttcgccaagaatcagctgacagaccaggagaccgcagcaggttgtggaatgccgactatatcagacacgtattcataaatgacactggcacatcagctattgagggcattttcctagacatgttgaatcttaaatttgatgcaaatcccaacgtgttcgagaaaatgtgtaaccttagactgttgaaattgtattgctccaaagcggaagagaagcatggagtatcttttccacaaggtcttgaatatttgccgagcaagctaaggcttctccattgggaatattatcctctaagttctttgccgaaaagttttaatccagagaaccttgtcgagcttaacttgccaagtagctgtgcaaagaaactttggaaaggaaaaaaggcaaggttttgtacaaccaattcaagtctggaaaagcttaaaaagatgagacttagctactccgaccagttaactaaaatcccaagactttcaagcgcaacaaatcttgagcatattgatcttgaaggttgcaacagtttgttgagccttagccagtccatttcttatcttaagaagcttgtttttctgaatttaaagggctgctcgaagctggagaatattccatctatggttgatttagaatcgcttgaggttctaaatctttcgggttgttcaaagctagggaacttcccggagatctcaccaaatgtgaaagaactgtacatgggtgggactatgatacaagaaatcccgtcatcgattaagaacttggtattgcttgagaaactggacctggaaaacagtagacatctcaagaatcttccaacaagcatctacaagttgaagcatcttgaaactctaaatctttcaggctgcataagcctggagcgatttccagactcgtcgagaaggatgaaatgcttaaggtttttggatttaagcaggacagacattaaagagctgccctcttccatatcgtatctgactgctcttgacgaactattattcgtagactccaggagaaactcgccagttgtaaccaatcccaatgccaattcaactgagttgatgccttctgagtcaagtaagcttgagatcttaggtactccggcagataacgaagtagttgttggtggtacggtagagaaaacccgtggtattgaacgaacgccgactattttggtgaagtcgagagagtatctaattcccgatgatgttgtggcggttggtggtgatattaaggggctaagaccaccagtacttcagctccaaccagcaatgaaactatctcatattcctcgaggatcaacttgggatttcgttacgcatttcgctccacctgaaacagttgcgccgccgagttcctcttcagaagccagggaagaggaagtggaaacggaagagacgggagctatgtttatcccattgggggataaggagacatgctcattcactgtaaacaagggtgactcctcaaggacaatatctaatacgtcgccgatttatgcctccgaaggatctttcatcacgtgttggcagaagggtcaacttctgggacgaggatcattagggtccgtatatgaaggcatttcagcagacggggacttctttgctttcaaggaagtttcactacttgatcagggaagtcaggcacatgaatggatacaacaagtcgagggggggattgcgctacttagtcagcttcagcatcagaatatcgtgcgatatcgtggcacaactaaggacgagtcgaatttgtacatttttcttgaacttgtaacccaagggtcccttcgaaaactctaccaaagaaaccagcttggggactctgtagtctccttatacacaagacagattcttgatggattgaaatatctccacgataaaggttttatacacaggaacattaaatgtgcaaatgtattggtggacgctaatggaacagttaaacttgcagattttggattggctaaggtaatgtccctctggcgaactccgtattggaattggatggctccagaggttattcttaacccgaaggattatgatggttatggaactccagctgatatatggagccttgggtgtactgtgctagaaatgttgactggtcagattccctactccgatctggaaatcggtacagccttgtataacattggaacgggtaagcttccgaaaatacctgatattctatcgctagacgcccgggatttcatacttacgtgtctcaaagtgaacccggaagagcggccaactgcagctgagctgcttaaccatccatttgtgaatatgccattaccatcctcgggctcaggttcagtatcttcgctcctccgtggatga

SEQ ID NO: 88825 - protein, 1828 aa, Arabidopsis thaliana
  peptide (1)..(1828): Ceres Seq. ID no. 12712791
MAATPPISSGSGLSQQLNNSSSSKLCQVEGCQKGARDASGRCISHGGGRRCQKPDCQKGAEGKTVYCKAHGGGRRCEYLGCTKGAEGSTDFCIAHGGGRRCNHEDCTRSAWGRTEFCVKHGGGARCKTYGCGKSASGPLPFCRAHGGGKKCSHEDCTGFARGRSGLCLMHGGGKRCQRENCTKSAEGLSGLCISHGGGRRCQSIGCTKGAKGSKMFCKACITKRPLTIDGGGNMGGVTTGDALNYLKAVKDKFEDSEKYDTFLEVLNDCKHQGVDTSGVIARLKDLFKGHDDLLLGFNTYLSKEYQITILPEDDFPIDFLDKVEGPYEMTYQQAQTVQANANMQPQTEYPSSSAVQSFSSGQPQIPTSAPDSSLLAKSNTSGITIIEHMSQQPLNVDKQVNDGYNWQKYGQKKVKGSKFPLSYYKCTYLGCPSKRKVERSLDGQVAEIVYKDRHNHEPPNQGKDGSTTYLSGSSTHINCMSSELTASQFSSNKTKIEQQEAASLATTIEYMSEASDNEEDSNGETSEGEKDEDEPEPKRRITEVQVSELADASDRTVREPRVIFQTTSEVDNLDDGYRWRKYGQKVVKGNPYPRFSSSKDYDVVIRYGRADISNEDFISHLRASLCRRGISVYEKFNEVDALPKCRVLIIVLTSTYVPSNLLNILEHQHTEDRVVYPIFYRLSPYDFVCNSKNYERFYLQDEPKKWQAALKEITQMPGYTLTDKSESELIDEIVRDALKVLCSADKVNMIGMDMQVEEILSLLCIESLDVRSIGIWGTVGIGKTTIAEEIFRKISVQYETCVVLKDLHKEVEVKGHDAVRENFLSEVLEVEPHVIRISDIKTSFLRSRLQRKRILVILDDVNDYRDVDTFLGTLNYFGPGSRIIMTSRNRRVFVLCKIDHVYEVKPLDIPKSLLLLDRGTCQIVLSPEVYKTLSLELVKFSNGNPQVLQFLSSIDREWNKLSQEVKTTSPIYIPGIFEKSCCGLDDNERGIFLDIACFFNRIDKDNVAMLLDGCGFSAHVGFRGLVDKSLLTISQHNLVDMLSFIQATGREIVRQESADRPGDRSRLWNADYIRHVFINDTGTSAIEGIFLDMLNLKFDANPNVFEKMCNLRLLKLYCSKAEEKHGVSFPQGLEYLPSKLRLLHWEYYPLSSLPKSFNPENLVELNLPSSCAKKLWKGKKARFCTTNSSLEKLKKMRLSYSDQLTKIPRLSSATNLEHIDLEGCNSLLSLSQSISYLKKLVFLNLKGCSKLENIPSMVDLESLEVLNLSGCSKLGNFPEISPNVKELYMGGTMIQEIPSSIKNLVLLEKLDLENSRHLKNLPTSIYKLKHLETLNLSGCISLERFPDSSRRMKCLRFLDLSRTDIKELPSSISYLTALDELLFVDSRRNSPVVTNPNANSTELMPSESSKLEILGTPADNEVVVGGTVEKTRGIERTPTILVKSREYLIPDDVVAVGGDIKGLRPPVLQLQPAMKLSHIPRGSTWDFVTHFAPPETVAPPSSSSEAREEEVETEETGAMFIPLGDKETCSFTVNKGDSSRTISNTSPIYASEGSFITCWQKGQLLGRGSLGSVYEGISADGDFFAFKEVSLLDQGSQAHEWIQQVEGGIALLSQLQHQNIVRYRGTTKDESNLYIFLELVTQGSLRKLYQRNQLGDSVVSLYTRQILDGLKYLHDKGFIHRNIKCANVLVDANGTVKLADFGLAKVMSLWRTPYWNWMAPEVILNPKDYDGYGTPADIWSLGCTVLEMLTGQIPYSDLEIGTALYNIGTGKLPKIPDILSLDARDFILTCLKVNPEERPTAAELLNHPFVNMPLPSSGSGSVSSLLRG

SEQ ID NO: 88826 - protein, 1660 aa, Arabidopsis thaliana
  peptide (1)..(1660): Ceres Seq. ID no. 12712792
MHGGGKRCQRENCTKSAEGLSGLCISHGGGRRCQSIGCTKGAKGSKMFCKACITKRPLTIDGGGNMGGVTTGDALNYLKAVKDKFEDSEKYDTFLEVLNDCKHQGVDTSGVIARLKDLFKGHDDLLLGFNTYLSKEYQITILPEDDFPIDFLDKVEGPYEMTYQQAQTVQANANMQPQTEYPSSSAVQSFSSGQPQIPTSAPDSSLLAKSNTSGITIIEHMSQQPLNVDKQVNDGYNWQKYGQKKVKGSKFPLSYYKCTYLGCPSKRKVERSLDGQVAEIVYKDRHNHEPPNQGKDGSTTYLSGSSTHINCMSSELTASQFSSNKTKIEQQEAASLATTIEYMSEASDNEEDSNGETSEGEKDEDEPEPKRRITEVQVSELADASDRTVREPRVIFQTTSEVDNLDDGYRWRKYGQKVVKGNPYPRFSSSKDYDVVIRYGRADISNEDFISHLRASLCRRGISVYEKFNEVDALPKCRVLIIVLTSTYVPSNLLNILEHQHTEDRVVYPIFYRLSPYDFVCNSKNYERFYLQDEPKKWQAALKEITQMPGYTLTDKSESELIDEIVRDALKVLCSADKVNMIGMDMQVEEILSLLCIESLDVRSIGIWGTVGIGKTTIAEEIFRKISVQYETCVVLKDLHKEVEVKGHDAVRENFLSEVLEVEPHVIRISDIKTSFLRSRLQRKRILVILDDVNDYRDVDTFLGTLNYFGPGSRIIMTSRNRRVFVLCKIDHVYEVKPLDIPKSLLLLDRGTCQIVLSPEVYKTLSLELVKFSNGNPQVLQFLSSIDREWNKLSQEVKTTSPIYIPGIFEKSCCGLDDNERGIFLDIACFFNRIDKDNVAMLLDGCGFSAHVGFRGLVDKSLLTISQHNLVDMLSFIQATGREIVRQESADRPGDRSRLWNADYIRHVFINDTGTSAIEGIFLDMLNLKFDANPNVFEKMCNLRLLKLYCSKAEEKHGVSFPQGLEYLPSKLRLLHWEYYPLSSLPKSFNPENLVELNLPSSCAKKLWKGKKARFCTTNSSLEKLKKMRLSYSDQLTKIPRLSSATNLEHIDLEGCNSLLSLSQSISYLKKLVFLNLKGCSKLENIPSMVDLESLEVLNLSGCSKLGNFPEISPNVKELYMGGTMIQEIPSSIKNLVLLEKLDLENSRHLKNLPTSIYKLKHLETLNLSGCISLERFPDSSRRMKCLRFLDLSRTDIKELPSSISYLTALDELLFVDSRRNSPVVTNPNANSTELMPSESSKLEILGTPADNEVVVGGTVEKTRGIERTPTILVKSREYLIPDDVVAVGGDIKGLRPPVLQLQPAMKLSHIPRGSTWDFVTHFAPPETVAPPSSSSEAREEEVETEETGAMFIPLGDKETCSFTVNKGDSSRTISNTSPIYASEGSFITCWQKGQLLGRGSLGSVYEGISADGDFFAFKEVSLLDQGSQAHEWIQQVEGGIALLSQLQHQNIVRYRGTTKDESNLYIFLELVTQGSLRKLYQRNQLGDSVVSLYTRQILDGLKYLHDKGFIHRNIKCANVLVDANGTVKLADFGLAKVMSLWRTPYWNWMAPEVILNPKDYDGYGTPADIWSLGCTVLEMLTGQIPYSDLEIGTALYNIGTGKLPKIPDILSLDARDFILTCLKVNPEERPTAAELLNHPFVNMPLPSSGSGSVSSLLRG

SEQ ID NO: 88827 - protein, 1614 aa, Arabidopsis thaliana
  peptide (1)..(1614): Ceres Seq. ID no. 12712793
MFCKACITKRPLTIDGGGNMGGVTTGDALNYLKAVKDKFEDSEKYDTFLEVLNDCKHQGVDTSGVIARLKDLFKGHDDLLLGFNTYLSKEYQITILPEDDFPIDFLDKVEGPYEMTYQQAQTVQANANMQPQTEYPSSSAVQSFSSGQPQIPTSAPDSSLLAKSNTSGITIIEHMSQQPLNVDKQVNDGYNWQKYGQKKVKGSKFPLSYYKCTYLGCPSKRKVERSLDGQVAEIVYKDRHNHEPPNQGKDGSTTYLSGSSTHINCMSSELTASQFSSNKTKIEQQEAASLATTIEYMSEASDNEEDSNGETSEGEKDEDEPEPKRRITEVQVSELADASDRTVREPRVIFQTTSEVDNLDDGYRWRKYGQKVVKGNPYPRFSSSKDYDVVIRYGRADISNEDFISHLRASLCRRGISVYEKFNEVDALPKCRVLIIVLTSTYVPSNLLNILEHQHTEDRVVYPIFYRLSPYDFVCNSKNYERFYLQDEPKKWQAALKEITQMPGYTLTDKSESELIDEIVRDALKVLCSADKVNMIGMDMQVEEILSLLCIESLDVRSIGIWGTVGIGKTTIAEEIFRKISVQYETCVVLKDLHKEVEVKGHDAVRENFLSEVLEVEPHVIRISDIKTSFLRSRLQRKRILVILDDVNDYRDVDTFLGTLNYFGPGSRIIMTSRNRRVFVLCKIDHVYEVKPLDIPKSLLLLDRGTCQIVLSPEVYKTLSLELVKFSNGNPQVLQFLSSIDREWNKLSQEVKTTSPIYIPGIFEKSCCGLDDNERGIFLDIACFFNRIDKDNVAMLLDGCGFSAHVGFRGLVDKSLLTISQHNLVDMLSFIQATGREIVRQESADRPGDRSRLWNADYIRHVFINDTGTSAIEGIFLDMLNLKFDANPNVFEKMCNLRLLKLYCSKAEEKHGVSFPQGLEYLPSKLRLLHWEYYPLSSLPKSFNPENLVELNLPSSCAKKLWKGKKARFCTTNSSLEKLKKMRLSYSDQLTKIPRLSSATNLEHIDLEGCNSLLSLSQSISYLKKLVFLNLKGCSKLENIPSMVDLESLEVLNLSGCSKLGNFPEISPNVKELYMGGTMIQEIPSSIKNLVLLEKLDLENSRHLKNLPTSIYKLKHLETLNLSGCISLERFPDSSRRMKCLRFLDLSRTDIKELPSSISYLTALDELLFVDSRRNSPVVTNPNANSTELMPSESSKLEILGTPADNEVVVGGTVEKTRGIERTPTILVKSREYLIPDDVVAVGGDIKGLRPPVLQLQPAMKLSHIPRGSTWDFVTHFAPPETVAPPSSSSEAREEEVETEETGAMFIPLGDKETCSFTVNKGDSSRTISNTSPIYASEGSFITCWQKGQLLGRGSLGSVYEGISADGDFFAFKEVSLLDQGSQAHEWIQQVEGGIALLSQLQHQNIVRYRGTTKDESNLYIFLELVTQGSLRKLYQRNQLGDSVVSLYTRQILDGLKYLHDKGFIHRNIKCANVLVDANGTVKLADFGLAKVMSLWRTPYWNWMAPEVILNPKDYDGYGTPADIWSLGCTVLEMLTGQIPYSDLEIGTALYNIGTGKLPKIPDILSLDARDFILTCLKVNPEERPTAAELLNHPFVNMPLPSSGSGSVSSLLRG

SEQ ID NO: 88828 - DNA, 390 bp, Arabidopsis thaliana
  misc_feature (1)..(390): Ceres Seq. ID no. 12712862
  misc_feature (1)..(390): Ortholog of  Ceres SEQ ID NO 13598157 as cited in SEQ ID NO 61570
atggcttcaaaaatttcagcctctcttgtcattttcctcacattcaacattctttttttcactttaaccaccgcatgtggcggtggctgcagttccacccctaaacccaaacctaagcccaagtccaccggaagctgccctaaagacactctcaagctcggcgtttgcgccaatgttctcaaggatcttctcaaaattcagttgggaacaccaccagtgaagccttgttgttcgctcctcaatggtttagttgatcttgaggctgccgcttgtctctgcaccgccctaaaggctaaagttttaggcattaatcttaatgttcccgtctctctcagccttcttctcaatgtttgtggcaagaaggttccttccggcttcgtatgtgcttga

SEQ ID NO: 88829 - protein, 129 aa, Arabidopsis thaliana; identical to SEQ ID NO: 83969
  peptide (1)..(129): Ceres Seq. ID no. 12712863

SEQ ID NO: 88830 - DNA, 1728 bp, Arabidopsis thaliana
  misc_feature (1)..(1728): Ceres Seq. ID no. 12712883
  misc_feature (1)..(1728): Ortholog of  Ceres SEQ ID NO 14303201 as cited in SEQ ID NO 67304
atggaagttcccaaaggattctttgagaaactgtggagttttgtctcttttcttccttacttcttcctcttgctgctccttggcgtcaccaaggccctgattattggtccaatatcatctgctataattttggttggcaattcatgtgtcatcattggcctttggccagcacatttcatttggacctactactgtttggcaagaaccaagagaatagggctggttttgaagaccttggcattggtattatttccactgcctttgctcctctggccagttgctggtatagtaggaagtctcttcggtggaatcgcctacgggtttttcacgcctcttatggctacattcgaggctgtaggagagtctgttactagcaaatgctaccattgctttgttgatggttcgttctccactattaaagggagttgtactgtggttacagacttcacagatttctgcttccattcttacttctcctacatggatgagttaagagaaatggtttcggccgatgttgaacccttagagataaagttgtctcggctacctagttgtctccttgctagtctcataggtgtgatggtagatgttcttctaataacagctgtcgctgtttacaaaagcccatacatgttactcaaaggatggaagaggctattggaagaccttgttggtagagagggcccattcctagagagtgtctgtgttccatttgcaggtcttgccatattgctatggccactggctgtcgcgggagctgtaatagcttcagttttatccagcttctttcttggactgtacagtggagtcatcgttcatcaggaggactctttcagaatgggacttaactatataattgctgcggtctcactgtttgacgaatatgtaaatgatttactctatttgagagaaggaactagcctgccgaggccttgctataggacgaaaacagagactgttcatgggaaaagaatattaggagagagtaagaacgttgatctcaagagcaaaagaagcagctccctgggttcaaagcttgtttcagaacagtcgaggacactgaaaaaagcaattacactatataaaccagttcaggtatgggaatggttgtttaagtcgtgtgaggtgaatgggaggatacttcttcgcgatggcttgatagatgtgaaggatgtagaggagtgtcttgtcaagggtaattctaagaagctctatatcaaactacccgcgtggacggtgttacagtgtctccttgcatcggctaaatcgaactcatctgggttggtgatcactgatggcgtggagcttacagaactaaacagcccaagagataaagtatttgtgtggctagttggacccttactgataatgaaggagcagataaaaaacctgaagcttactgaggatgaagagttttgtctgaggaaattggtaatggtatgcaaaaatgaaagaaccgaggactgggacaacaccgggttcccgtcaagtgatacagtaagaaaagcacaattgcaagccataatcagaaggctgcaaggaatggtagcatcaatgtctagaataccaacgtttcgacgcagattcatgaacttggttaaagtgttgtacatagaagctcttgaaatgggtgcatcaggtaatcgagctggtgggatactcaaacccaacagcgaccaaacaggaaatctggatcggactgaaacaccggacatggatgttgtctaa

SEQ ID NO: 88831 - protein, 575 aa, Arabidopsis thaliana
  peptide (1)..(575): Ceres Seq. ID no. 12712884
MEVPKGFFEKLWSFVSFLPYFFLLLLLGVTKALIIGPISSAIILVGNSCVIIGLWPAHFIWTYYCLARTKRIGLVLKTLALVLFPLPLLLWPVAGIVGSLFGGIAYGFFTPLMATFEAVGESVTSKCYHCFVDGSFSTIKGSCTVVTDFTDFCFHSYFSYMDELREMVSADVEPLEIKLSRLPSCLLASLIGVMVDVLLITAVAVYKSPYMLLKGWKRLLEDLVGREGPFLESVCVPFAGLAILLWPLAVAGAVIASVLSSFFLGLYSGVIVHQEDSFRMGLNYIIAAVSLFDEYVNDLLYLREGTSLPRPCYRTKTETVHGKRILGESKNVDLKSKRSSSLGSKLVSEQSRTLKKAITLYKPVQVWEWLFKSCEVNGRILLRDGLIDVKDVEECLVKGNSKKLYIKLPAWTVLQCLLASAKSNSSGLVITDGVELTELNSPRDKVFVWLVGPLLIMKEQIKNLKLTEDEEFCLRKLVMVCKNERTEDWDNTGFPSSDTVRKAQLQAIIRRLQGMVASMSRIPTFRRRFMNLVKVLYIEALEMGASGNRAGGILKPNSDQTGNLDRTETPDMDVV

SEQ ID NO: 88832 - protein, 463 aa, Arabidopsis thaliana
  peptide (1)..(463): Ceres Seq. ID no. 12712885
MATFEAVGESVTSKCYHCFVDGSFSTIKGSCTVVTDFTDFCFHSYFSYMDELREMVSADVEPLEIKLSRLPSCLLASLIGVMVDVLLITAVAVYKSPYMLLKGWKRLLEDLVGREGPFLESVCVPFAGLAILLWPLAVAGAVIASVLSSFFLGLYSGVIVHQEDSFRMGLNYIIAAVSLFDEYVNDLLYLREGTSLPRPCYRTKTETVHGKRILGESKNVDLKSKRSSSLGSKLVSEQSRTLKKAITLYKPVQVWEWLFKSCEVNGRILLRDGLIDVKDVEECLVKGNSKKLYIKLPAWTVLQCLLASAKSNSSGLVITDGVELTELNSPRDKVFVWLVGPLLIMKEQIKNLKLTEDEEFCLRKLVMVCKNERTEDWDNTGFPSSDTVRKAQLQAIIRRLQGMVASMSRIPTFRRRFMNLVKVLYIEALEMGASGNRAGGILKPNSDQTGNLDRTETPDMDVV

SEQ ID NO: 88833 - protein, 415 aa, Arabidopsis thaliana; identical to SEQ ID NO: 84462
  peptide (1)..(415): Ceres Seq. ID no. 12712886

SEQ ID NO: 88834 - DNA, 1133 bp, Arabidopsis thaliana
  misc_feature (1)..(1133): Ceres Seq. ID no. 12712887
  misc_feature (1)..(1133): Ortholog of  Ceres SEQ ID NO 14315989 as cited in SEQ ID NO 57571
atgtttcttctccttctatcttctccctccctctcaaattttaatctccagttttttttttttttttttgactcagagatcaacaaaacctagtttttgaatttgtttcaatttttctcaaattactctgtttttgagatctctgttttcgttaaattatgtctttgaggtcagaatcttcaacggcagagaagataacagaggatccggtgacgtataagacagcacaaagcagcgtgacgtgcatctaccaagcacatatggttggattctggagaaacgttagggttctatggtctaaaaatctcatgaaccattccttaaccgtgatggtcactagcgtacaaggcgatatgaattactgttgcaaggttgatcttaagccatggcacttttggtacaagaaaggttacaaatcgtttgaggtcgaaggaaaccaagtagatgtctattgggattttaggtctgcgaaattcaacggcgggcctgagccgagctccgatttttacgtggcgcttgtatccgaggaagaggttgttttgttgttgggtgatcacaagaagaaagcttttaagaggactaaatctagaccttccttggttgacgctgccttgttctacaagaaagagaatgtgtttgggaagaagattttttcgactagggctaagttccatgataggaagagagagcatgagatcgtagtggagagctctaccggggcgaaagaaccagagatgtggattagcgtagatgggatcgttttggttcaggtgagaaatctgcagtggaaatttagagggaaccagactgttttggttgataaagaacctgttcaagtgttttgggatgtgtatgattggttgttcagcacccccggtacggggcacggcttgttcatctttaaaccggagagcggtgaaagcgaaacgagcaacgaaaccaagaattgcagtgcttcttcttcttcttcttcgtcggagttttgtctctttctttatgcttggaaattggagtaagtctaaatgttttcaatccaaaagcttgcattgatttttttgcctgactgtaaattcacattcaaaaatcaatcttagcgtgtgaccgactcttgataattttgagttgtcaaattc

SEQ ID NO: 88835 - protein, 285 aa, Arabidopsis thaliana; identical to SEQ ID NO: 29057
  peptide (1)..(285): Ceres Seq. ID no. 12712888

SEQ ID NO: 88836 - protein, 251 aa, Arabidopsis thaliana; identical to SEQ ID NO: 29058
  peptide (1)..(251): Ceres Seq. ID no. 12712889

SEQ ID NO: 88837 - protein, 235 aa, Arabidopsis thaliana; identical to SEQ ID NO: 29059
  peptide (1)..(235): Ceres Seq. ID no. 12712890

SEQ ID NO: 88838 - DNA, 1041 bp, Arabidopsis thaliana
  misc_feature (1)..(1041): Ceres Seq. ID no. 12712903
  misc_feature (1)..(1041): Ortholog of  Ceres SEQ ID NO 14309755 as cited in SEQ ID NO 20741
  misc_feature (1)..(1041): Ortholog of  Ceres SEQ ID NO 13594727 as cited in SEQ ID NO 52169
  misc_feature (1)..(1041): Ortholog of  Ceres SEQ ID NO 13596474 as cited in SEQ ID NO 62169
  misc_feature (1)..(1041): Ortholog of  Ceres SEQ ID NO 13598714 as cited in SEQ ID NO 62656
  misc_feature (1)..(1041): Ortholog of  Ceres SEQ ID NO 13596969 as cited in SEQ ID NO 63375
  misc_feature (1)..(1041): Ortholog of  Ceres SEQ ID NO 13597519 as cited in SEQ ID NO 64759
  misc_feature (1)..(1041): Ortholog of  Ceres SEQ ID NO 13587054 as cited in SEQ ID NO 0
atgcattcctctttgataaaattgggatttcttcttctccttcttcaggtctcattgtctcatgctcaactaagcccttccttttacgataaaacatgtccgcaagtctttgatattgtaaccaataccattgtcaatgcgctgagatcagaccctcgcatcgctgcaagcatccttcgtcttcatttccacgactgctttgttaatggatgtgatgcatcgatattgttagacaacacaacatcgtttaggacggagaaagatgcgtttgggaacgctaattcagctcgaggtttcgatgtaatcgacaaaatgaaggctgccatcgagaaagcatgtcctagaaccgtttcatgtgctgatatgctcgccatcgcagctaaagaatctatcgttttggcgggaggtccttcatggatggttccaaatggaagaagagacagcttaagaggttttatggatcttgctaatgataaccttccaggtccatcttctacacttaaacaacttaaggatagattcaaaaatgtcggactcgaccgttcttctgatctagttgctctttccggtggtcacacttttggcaaaagccaatgtcagttcataatggatcgtctttacaacttcggtgaaaccggtttacccgacccaacccttgataaatcttacctagccacactaagaaaacaatgtccacgtaatggaaaccagagtgtcttggtagattttgatttacgtacaccaacactctttgacaacaaatactatgtgaatctcaaggagaacaaaggacttatccaaagtgaccaagagttgttctctagccctgatgctgcagacactctccctttagttcgagcatacgctgatggtcaagggacatttttcgatgcgttcgtgaaagcaataataaggatgagtagtctttcacctttaacagggaaacaaggagaaataagattgaactgtagagtggtgaattcgaaatctaaaatcatggatgtggtagatgatgctcttgaatttgccagctttatgtga

SEQ ID NO: 88839 - protein, 346 aa, Arabidopsis thaliana
  peptide (1)..(346): Ceres Seq. ID no. 12712904
MHSSLIKLGFLLLLLQVSLSHAQLSPSFYDKTCPQVFDIVTNTIVNALRSDPRIAASILRLHFHDCFVNGCDASILLDNTTSFRTEKDAFGNANSARGFDVIDKMKAAIEKACPRTVSCADMLAIAAKESIVLAGGPSWMVPNGRRDSLRGFMDLANDNLPGPSSTLKQLKDRFKNVGLDRSSDLVALSGGHTFGKSQCQFIMDRLYNFGETGLPDPTLDKSYLATLRKQCPRNGNQSVLVDFDLRTPTLFDNKYYVNLKENKGLIQSDQELFSSPDAADTLPLVRAYADGQGTFFDAFVKAIIRMSSLSPLTGKQGEIRLNCRVVNSKSKIMDVVDDALEFASFM

SEQ ID NO: 88840 - protein, 242 aa, Arabidopsis thaliana
  peptide (1)..(242): Ceres Seq. ID no. 12712905
MKAAIEKACPRTVSCADMLAIAAKESIVLAGGPSWMVPNGRRDSLRGFMDLANDNLPGPSSTLKQLKDRFKNVGLDRSSDLVALSGGHTFGKSQCQFIMDRLYNFGETGLPDPTLDKSYLATLRKQCPRNGNQSVLVDFDLRTPTLFDNKYYVNLKENKGLIQSDQELFSSPDAADTLPLVRAYADGQGTFFDAFVKAIIRMSSLSPLTGKQGEIRLNCRVVNSKSKIMDVVDDALEFASFM

SEQ ID NO: 88841 - protein, 225 aa, Arabidopsis thaliana
  peptide (1)..(225): Ceres Seq. ID no. 12712906
MLAIAAKESIVLAGGPSWMVPNGRRDSLRGFMDLANDNLPGPSSTLKQLKDRFKNVGLDRSSDLVALSGGHTFGKSQCQFIMDRLYNFGETGLPDPTLDKSYLATLRKQCPRNGNQSVLVDFDLRTPTLFDNKYYVNLKENKGLIQSDQELFSSPDAADTLPLVRAYADGQGTFFDAFVKAIIRMSSLSPLTGKQGEIRLNCRVVNSKSKIMDVVDDALEFASFM

SEQ ID NO: 88842 - DNA, 3249 bp, Arabidopsis thaliana
  misc_feature (1)..(3249): Ceres Seq. ID no. 12713004
  misc_feature (1)..(3249): Ortholog of  Ceres SEQ ID NO 15224539 as cited in SEQ ID NO 0
atgacggaaccagaaagattaggaggaatctccctgagttttccggtgaatgaagaagatacggtaacgacaacatcaccaaagactcttccacggaggctccgtcgtcgtcttctcgaaccgaagagtcctgtctccgccgcagagatcgattccaaactcagagaagctgatctccgtcgtcagcaatattatgaatcactatcgagtaaggcacgacctaagatgagaagtccgagatcaggaagtatagaggagcttagtcagagacttgaatcaaagcttaatgctgctgaacaaaagaggttaagtattttggagaaggagctggctcgtttggctaagatggatgaagctagacaagctgcgaagaatggacttgagcaacgagttgagaaagagcgtgatgagttagagagtaaggttgaagaaagggttttgaaggctgagaagaataggatgcttttgtttaaagctatggctcaacgaagagcggcgaagaggcagcgtgctgcgcagagtttgatgaagaaagctattcaggagacgaggtataaggagagtgtgcgtgctgcgatttatcagaagagagcagctgcagagagtaagcggatggggattttggaagcggaaaggagaagagcgaatgcgagattgactcgggtgtttggtgctgctagttctgtgcggagtcaaaaggaagctgagagaaggaaaatgaaggaccgtttagaagagcggcttcaaagggcaaagaagctgaaagcgcaatatatgaggcgaaggagaggtatggatagttgttcatcttcaagatcagaaacaatgcgaaagaaccaagtgcatcttgttaggatgttagtaagatgctggaggagatttgctaaatacaagaaatctacttttgtcttggctagagcatatcatgagttggggatcaatgaaaaatccattgagtcagtaccatttgagcagtttgccattcaaatgaactcagtttctgtaattcaaacggtcaaagcattgcttgatcgcttggagatccgactcactctatctaaggcatccaatgtggagaacattaatcatcttcttaagcacatctttccgcctgttcgaagagggaaatcacccagtcccatgagtaaaggcgagcaaaattcacccaattccaagatgggatatcaaaaacttaaaaagattgcgagatatccagctagaatttttctttgtgcctacatgatcaagcaacatcccggtgcaatttttagaggaagaggtgaacatgagattgcgcttgtggaatctgcaacttgtcttattcgggagtttgaactgctggtgaaagttatattggaaggaccagaatctaccctcccgggcaatgtatctttcgtagctcaacgtccaaaaaaattcagatctcagctagaagcatttgataaagcttggtgctcttaccttgagggttttgtagtctggaaaattaatgatgctaagcttctagaaaaagatttagccagaactcaagagtctgagctgtctgaggtatcaaaacatacttcctctcccaaaataatagacagtggcttgaatcagaagacggtaaaggcatcttctccaactaatcgggctttattctctgaaactgatggagcacgagaatcaaaagcacctgcagattcgcatcttccatcttcatcttcaccttcaccgggctcatcgaatttgtcaccctctttgaactctgggagcgaggccatttctactccaaacgtggtagctaatagctttgatgcagcgttggctagtgagaacgaagtaattgtaaatgaaattgtccatgacaatagcagtagttttgtgagggttaaggagacaatggaaaaggctttctgggatggtgtcatggaatccatgaaacagtcgcagccagacttcagctgggttattaaactcatgaaagaagtcagggatgaactctgtgagatatctcccaaagactggagacaagagattgttcaaactatcgatacggatgtgctgtcacagttactggcttctggtaatgtcgacatgggttatcttggaaatattcttgagttttcccttggcattttgctgaaactctctgctccagctaatgaagaggaaatcagggttactcaccataaactaatgacagaacttggagagatagttccaactgatggccattcgaattcgtcatatgcagtcttaatggttaaggggctacgctttgttttgcagcagattcagattctaaagaaggaaatcagcaaatctcgtttgaaactcttggagccacttcttaagggacctgctggtctggaatatctgaagaagtcattttccagtcggcatggttccccagaccaagcgtcttcctcgctaccattgacaaaacgttggcttttaagtgttcgaggagaagcagagagggagtggaaagaacacaaagatgctctttctgctgtcataaataaccactctggatcatcaggcctcccttcgaccaccatgcgaactggtggcaatgtctcctctgtttcaaaagtcaataccccttcatctccatttccaggaatcgaactgtcagagtgcaagggagaaactgtggatcttcttgttcgcattggcctgttaaaaatggtgagcgaaatcggtggtcttactttagaaactgtccctgaaacatttcaacttaacctatctaggctgagagatgttcaatcccaaatccagaaaatcactcttgtctccatcagtgttttgatcctccagcaaacactagtaagcgaaaactcatcctcgattgacatggaggctattacacggacttgcataaaccgtctttacgagatgctagacgcaaaacctgatgcaggtctttcagaaatcatggaaacactctccgagcttcttgattctaacgatgcagagacaaagaaacaagtaatcgcaaacatgcttgtgaaaagcttacaagcaggagacgcagtgttcacacatgtatcacagaccatatacctagccattagagccgcggttttggccggaaacaacacgaagagaaagcagttggtggaaacaatgctaagaaagatcggagcagcttctctctcggacaaggtcatagaggtttcagacattcttgttcttgtggcaacagtgtcacgttctgttcatggattgtggtatgaagaattgctaaagaaaccgaattaa

SEQ ID NO: 88843 - protein, 1082 aa, Arabidopsis thaliana
  peptide (1)..(1082): Ceres Seq. ID no. 12713005
MTEPERLGGISLSFPVNEEDTVTTTSPKTLPRRLRRRLLEPKSPVSAAEIDSKLREADLRRQQYYESLSSKARPKMRSPRSGSIEELSQRLESKLNAAEQKRLSILEKELARLAKMDEARQAAKNGLEQRVEKERDELESKVEERVLKAEKNRMLLFKAMAQRRAAKRQRAAQSLMKKAIQETRYKESVRAAIYQKRAAAESKRMGILEAERRRANARLTRVFGAASSVRSQKEAERRKMKDRLEERLQRAKKLKAQYMRRRRGMDSCSSSRSETMRKNQVHLVRMLVRCWRRFAKYKKSTFVLARAYHELGINEKSIESVPFEQFAIQMNSVSVIQTVKALLDRLEIRLTLSKASNVENINHLLKHIFPPVRRGKSPSPMSKGEQNSPNSKMGYQKLKKIARYPARIFLCAYMIKQHPGAIFRGRGEHEIALVESATCLIREFELLVKVILEGPESTLPGNVSFVAQRPKKFRSQLEAFDKAWCSYLEGFVVWKINDAKLLEKDLARTQESELSEVSKHTSSPKIIDSGLNQKTVKASSPTNRALFSETDGARESKAPADSHLPSSSSPSPGSSNLSPSLNSGSEAISTPNVVANSFDAALASENEVIVNEIVHDNSSSFVRVKETMEKAFWDGVMESMKQSQPDFSWVIKLMKEVRDELCEISPKDWRQEIVQTIDTDVLSQLLASGNVDMGYLGNILEFSLGILLKLSAPANEEEIRVTHHKLMTELGEIVPTDGHSNSSYAVLMVKGLRFVLQQIQILKKEISKSRLKLLEPLLKGPAGLEYLKKSFSSRHGSPDQASSSLPLTKRWLLSVRGEAEREWKEHKDALSAVINNHSGSSGLPSTTMRTGGNVSSVSKVNTPSSPFPGIELSECKGETVDLLVRIGLLKMVSEIGGLTLETVPETFQLNLSRLRDVQSQIQKITLVSISVLILQQTLVSENSSSIDMEAITRTCINRLYEMLDAKPDAGLSEIMETLSELLDSNDAETKKQVIANMLVKSLQAGDAVFTHVSQTIYLAIRAAVLAGNNTKRKQLVETMLRKIGAASLSDKVIEVSDILVLVATVSRSVHGLWYEELLKKPN

SEQ ID NO: 88844 - protein, 1007 aa, Arabidopsis thaliana
  peptide (1)..(1007): Ceres Seq. ID no. 12713006
MRSPRSGSIEELSQRLESKLNAAEQKRLSILEKELARLAKMDEARQAAKNGLEQRVEKERDELESKVEERVLKAEKNRMLLFKAMAQRRAAKRQRAAQSLMKKAIQETRYKESVRAAIYQKRAAAESKRMGILEAERRRANARLTRVFGAASSVRSQKEAERRKMKDRLEERLQRAKKLKAQYMRRRRGMDSCSSSRSETMRKNQVHLVRMLVRCWRRFAKYKKSTFVLARAYHELGINEKSIESVPFEQFAIQMNSVSVIQTVKALLDRLEIRLTLSKASNVENINHLLKHIFPPVRRGKSPSPMSKGEQNSPNSKMGYQKLKKIARYPARIFLCAYMIKQHPGAIFRGRGEHEIALVESATCLIREFELLVKVILEGPESTLPGNVSFVAQRPKKFRSQLEAFDKAWCSYLEGFVVWKINDAKLLEKDLARTQESELSEVSKHTSSPKIIDSGLNQKTVKASSPTNRALFSETDGARESKAPADSHLPSSSSPSPGSSNLSPSLNSGSEAISTPNVVANSFDAALASENEVIVNEIVHDNSSSFVRVKETMEKAFWDGVMESMKQSQPDFSWVIKLMKEVRDELCEISPKDWRQEIVQTIDTDVLSQLLASGNVDMGYLGNILEFSLGILLKLSAPANEEEIRVTHHKLMTELGEIVPTDGHSNSSYAVLMVKGLRFVLQQIQILKKEISKSRLKLLEPLLKGPAGLEYLKKSFSSRHGSPDQASSSLPLTKRWLLSVRGEAEREWKEHKDALSAVINNHSGSSGLPSTTMRTGGNVSSVSKVNTPSSPFPGIELSECKGETVDLLVRIGLLKMVSEIGGLTLETVPETFQLNLSRLRDVQSQIQKITLVSISVLILQQTLVSENSSSIDMEAITRTCINRLYEMLDAKPDAGLSEIMETLSELLDSNDAETKKQVIANMLVKSLQAGDAVFTHVSQTIYLAIRAAVLAGNNTKRKQLVETMLRKIGAASLSDKVIEVSDILVLVATVSRSVHGLWYEELLKKPN

SEQ ID NO: 88845 - protein, 967 aa, Arabidopsis thaliana
  peptide (1)..(967): Ceres Seq. ID no. 12713007
MDEARQAAKNGLEQRVEKERDELESKVEERVLKAEKNRMLLFKAMAQRRAAKRQRAAQSLMKKAIQETRYKESVRAAIYQKRAAAESKRMGILEAERRRANARLTRVFGAASSVRSQKEAERRKMKDRLEERLQRAKKLKAQYMRRRRGMDSCSSSRSETMRKNQVHLVRMLVRCWRRFAKYKKSTFVLARAYHELGINEKSIESVPFEQFAIQMNSVSVIQTVKALLDRLEIRLTLSKASNVENINHLLKHIFPPVRRGKSPSPMSKGEQNSPNSKMGYQKLKKIARYPARIFLCAYMIKQHPGAIFRGRGEHEIALVESATCLIREFELLVKVILEGPESTLPGNVSFVAQRPKKFRSQLEAFDKAWCSYLEGFVVWKINDAKLLEKDLARTQESELSEVSKHTSSPKIIDSGLNQKTVKASSPTNRALFSETDGARESKAPADSHLPSSSSPSPGSSNLSPSLNSGSEAISTPNVVANSFDAALASENEVIVNEIVHDNSSSFVRVKETMEKAFWDGVMESMKQSQPDFSWVIKLMKEVRDELCEISPKDWRQEIVQTIDTDVLSQLLASGNVDMGYLGNILEFSLGILLKLSAPANEEEIRVTHHKLMTELGEIVPTDGHSNSSYAVLMVKGLRFVLQQIQILKKEISKSRLKLLEPLLKGPAGLEYLKKSFSSRHGSPDQASSSLPLTKRWLLSVRGEAEREWKEHKDALSAVINNHSGSSGLPSTTMRTGGNVSSVSKVNTPSSPFPGIELSECKGETVDLLVRIGLLKMVSEIGGLTLETVPETFQLNLSRLRDVQSQIQKITLVSISVLILQQTLVSENSSSIDMEAITRTCINRLYEMLDAKPDAGLSEIMETLSELLDSNDAETKKQVIANMLVKSLQAGDAVFTHVSQTIYLAIRAAVLAGNNTKRKQLVETMLRKIGAASLSDKVIEVSDILVLVATVSRSVHGLWYEELLKKPN

SEQ ID NO: 88846 - DNA, 690 bp, Arabidopsis thaliana
  misc_feature (1)..(690): Ceres Seq. ID no. 12713044
  misc_feature (1)..(690): Ortholog of  Ceres SEQ ID NO 13658400 as cited in SEQ ID NO 66403
atgaatttgttacttcaggaaactccgaagatcgtagtaacgagtgaagattgggaatcgaagctaagtgatgtggaaattttgatagaagacatgaacagactcgtgatgaatcttcttgtggctgaaggatatagagaagctgctgagaaattcaaagaggagtctataactatgccagaggaagatcttgctagcatgaatgagcgattggaggtgataaaagctatcgaatcccgaaatctcgaggatgcaattgagaagttgaatgcactaaaccctgagattatcaaaacaagttttcacctccaccagcaaatgttgatcgagttgatccgtgagaagaagaccgaggaggctgttgcgtttgcacaggaaaaactcgcgccactagctgaggagaatgaggccttacaaagagaactggaaaaaacagtgtgtatactcgttactgaaggtctccctaactgcccgtccagggagcttttccacaactcgcagtggattaggactgctagccacgtaaacgaagcaatccatacaagccagactggagaaaaaggtcctgaattggagcgcttgttgaaggagctgatttggactcagaatcaactggatgaaaaaacagtctatgtgtatccacgcatgaatgatttttccactggccagctcatataccgaccagaatga

SEQ ID NO: 88847 - protein, 229 aa, Arabidopsis thaliana
  peptide (1)..(229): Ceres Seq. ID no. 12713045
MNLLLQETPKIVVTSEDWESKLSDVEILIEDMNRLVMNLLVAEGYREAAEKFKEESITMPEEDLASMNERLEVIKAIESRNLEDAIEKLNALNPEIIKTSFHLHQQMLIELIREKKTEEAVAFAQEKLAPLAEENEALQRELEKTVCILVTEGLPNCPSRELFHNSQWIRTASHVNEAIHTSQTGEKGPELERLLKELIWTQNQLDEKTVYVYPRMNDFSTGQLIYRPE

SEQ ID NO: 88848 - protein, 198 aa, Arabidopsis thaliana
  peptide (1)..(198): Ceres Seq. ID no. 12713046
MNRLVMNLLVAEGYREAAEKFKEESITMPEEDLASMNERLEVIKAIESRNLEDAIEKLNALNPEIIKTSFHLHQQMLIELIREKKTEEAVAFAQEKLAPLAEENEALQRELEKTVCILVTEGLPNCPSRELFHNSQWIRTASHVNEAIHTSQTGEKGPELERLLKELIWTQNQLDEKTVYVYPRMNDFSTGQLIYRPE

SEQ ID NO: 88849 - protein, 193 aa, Arabidopsis thaliana
  peptide (1)..(193): Ceres Seq. ID no. 12713047
MNLLVAEGYREAAEKFKEESITMPEEDLASMNERLEVIKAIESRNLEDAIEKLNALNPEIIKTSFHLHQQMLIELIREKKTEEAVAFAQEKLAPLAEENEALQRELEKTVCILVTEGLPNCPSRELFHNSQWIRTASHVNEAIHTSQTGEKGPELERLLKELIWTQNQLDEKTVYVYPRMNDFSTGQLIYRPE

SEQ ID NO: 88850 - DNA, 450 bp, Arabidopsis thaliana
  misc_feature (1)..(450): Ceres Seq. ID no. 12713059
  misc_feature (1)..(450): Ortholog of  Ceres SEQ ID NO 14310057 as cited in SEQ ID NO 225
  misc_feature (1)..(450): Ortholog of  Ceres SEQ ID NO 15225572 as cited in SEQ ID NO 61651
atggagcaaacttttattatgatcaagcctgacggcgtccagagaggactcatcggtgaagtcatctgcaggtttgagaagaagggtttcactttgaaaggtctgaagttgatcagtgtagagagatcttttgctgagaagcactacgaagacttatcttcaaagtctttcttcagtggactcgttgactacattgtatccggccctgttgttgctatgatctgggaaggaaagaatgttgtcttgaccggaagaaagatcattggagctaccaacccagcagcttctgagcctggaactatccgtggggactttgctattgacattggcaggaacgtgatccatggtagtgactctgtcgagagtgcaagaaaggagattgctttgtggttccctgatggacctgtcaactggcagagcagcgttcacccttgggtctatgaaacttga

SEQ ID NO: 88851 - protein, 149 aa, Arabidopsis thaliana; identical to SEQ ID NO: 21514
  peptide (1)..(149): Ceres Seq. ID no. 12713060

SEQ ID NO: 88852 - protein, 143 aa, Arabidopsis thaliana; identical to SEQ ID NO: 21515
  peptide (1)..(143): Ceres Seq. ID no. 12713061

SEQ ID NO: 88853 - protein, 77 aa, Arabidopsis thaliana; identical to SEQ ID NO: 21516
  peptide (1)..(77): Ceres Seq. ID no. 12713062

SEQ ID NO: 88854 - DNA, 1227 bp, Arabidopsis thaliana
  misc_feature (1)..(1227): Ceres Seq. ID no. 12713115
  misc_feature (1)..(1227): Ortholog of  Ceres SEQ ID NO 14313893 as cited in SEQ ID NO 54646
  misc_feature (1)..(1227): Ortholog of  Ceres SEQ ID NO 13656797 as cited in SEQ ID NO 65756
  misc_feature (1)..(1227): Ortholog of  Ceres SEQ ID NO 13658498 as cited in SEQ ID NO 66557
  misc_feature (1)..(1227): Ortholog of  Ceres SEQ ID NO 15227053 as cited in SEQ ID NO 0
atgaatctatcgaaccgttttggctccaattccaagacggcgatactcaacgattcttactccgacgagaatcattcttcctccgccgccgccgccgtaacttccgtcgtaatcccaccgtgctccggcaatgtactccgagccgttctcttgctcttcttcatctgcttctgcttctccctctacagaacttctggttatctccgaatcgtctctgactcttcctccaccctctctcgcattttcccctctgtcaacgattcttcttcgtctccgtctccatctccgtctctgtctccggaggaaattgaggaacctaagctagaagaagtattgcgtagagcagcaactaaagatggtacagtgattttgacaactttgaatgaagcttgggcggctccaggatctgtgattgatcttttctttgagagttttagaattggtaaaggaacaagaaggctattgaaacacttggtgatcattgctttggatgctaaagcttattcacgttgtcaagaactgcataagcattgcttcagacttgaaacagaaggtgttgatttctctggtggtgaagcttatttcatgactccttcttacttgacaatgatgtggagacgaatctctttccttcgctctgttcttgaaaagggttacaactttgttttcacggatgctgatgtgatgtggttcaggaacccttttcgacggttttacgaagacggtgatttccagattgcttgtgaccattacataggaaggccgaatgattttaggaatagaccaaatggaggatttacctttgtgagagccaataaccgaagtataggcttctacaagttctggtatgattcaaggaccaagtaccccaaaaaccacgaccaggatgttctaaacttcatcaagacagatcctttcctttggaaactaaggattaggattaggttcttgaacacagtgtattttggtggattctgtgaaccaagcaaagatttgaatcttgtttgtacaatgcatgcgaattgctgctttggtttggatagtaagcttcatgatcttagaatcatgcttcaagactggagagatttcaagtctttaccacttcatagtaaccaatcctctggtttcacctggagcgtcccacagaattgcagtcttgattcacttaggcctgttgattctaaggatgaagaagagagtgaaccaccaggagaatctacacagtga

SEQ ID NO: 88855 - protein, 408 aa, Arabidopsis thaliana
  peptide (1)..(408): Ceres Seq. ID no. 12713116
MNLSNRFGSNSKTAILNDSYSDENHSSSAAAAVTSVVIPPCSGNVLRAVLLLFFICFCFSLYRTSGYLRIVSDSSSTLSRIFPSVNDSSSSPSPSPSLSPEEIEEPKLEEVLRRAATKDGTVILTTLNEAWAAPGSVIDLFFESFRIGKGTRRLLKHLVIIALDAKAYSRCQELHKHCFRLETEGVDFSGGEAYFMTPSYLTMMWRRISFLRSVLEKGYNFVFTDADVMWFRNPFRRFYEDGDFQIACDHYIGRPNDFRNRPNGGFTFVRANNRSIGFYKFWYDSRTKYPKNHDQDVLNFIKTDPFLWKLRIRIRFLNTVYFGGFCEPSKDLNLVCTMHANCCFGLDSKLHDLRIMLQDWRDFKSLPLHSNQSSGFTWSVPQNCSLDSLRPVDSKDEEESEPPGESTQ

SEQ ID NO: 88856 - protein, 213 aa, Arabidopsis thaliana
  peptide (1)..(213): Ceres Seq. ID no. 12713117
MTPSYLTMMWRRISFLRSVLEKGYNFVFTDADVMWFRNPFRRFYEDGDFQIACDHYIGRPNDFRNRPNGGFTFVRANNRSIGFYKFWYDSRTKYPKNHDQDVLNFIKTDPFLWKLRIRIRFLNTVYFGGFCEPSKDLNLVCTMHANCCFGLDSKLHDLRIMLQDWRDFKSLPLHSNQSSGFTWSVPQNCSLDSLRPVDSKDEEESEPPGESTQ

SEQ ID NO: 88857 - protein, 206 aa, Arabidopsis thaliana
  peptide (1)..(206): Ceres Seq. ID no. 12713118
MMWRRISFLRSVLEKGYNFVFTDADVMWFRNPFRRFYEDGDFQIACDHYIGRPNDFRNRPNGGFTFVRANNRSIGFYKFWYDSRTKYPKNHDQDVLNFIKTDPFLWKLRIRIRFLNTVYFGGFCEPSKDLNLVCTMHANCCFGLDSKLHDLRIMLQDWRDFKSLPLHSNQSSGFTWSVPQNCSLDSLRPVDSKDEEESEPPGESTQ

SEQ ID NO: 88858 - DNA, 496 bp, Arabidopsis thaliana
  misc_feature (1)..(496): Ceres Seq. ID no. 12713134
  misc_feature (1)..(496): Ortholog of  Ceres SEQ ID NO 12476115 as cited in SEQ ID NO 107
acagtctgcacacttatcacttctttcgaaatctctctctatccctctcaaaaatgaagctctctgtgcgttttatctccgctgctcttctcttgttcatggtattcattgccacagggatgggtccagtcaccgtggaggcacgcacgtgtgagtcaaaaagccataggttcaagggtccatgtgtgagcacacacaactgtgcaaacgtgtgccacaacgaaggcttcggcggaggtaaatgccgtggattccgtcgtcgttgctactgcacaagacactgctgatccatccattctcatgactcaaatcttcgatccatcgtcagtgtgttacttctttcttatctaaatcttccgtacggtaccatgtcgtaccgtacatgagtgttttctcgaataagtcattggtttgtgtgtttccggttttaatgtaatgttaaatcaattaatggcttttaatatattgtattatggatctcaatctaaaagttttt

SEQ ID NO: 88859 - protein, 94 aa, Arabidopsis thaliana
  peptide (1)..(94): Ceres Seq. ID no. 12713135
SLHTYHFFRNLSLSLSKMKLSVRFISAALLLFMVFIATGMGPVTVEARTCESKSHRFKGPCVSTHNCANVCHNEGFGGGKCRGFRRRCYCTRHC

SEQ ID NO: 88860 - protein, 77 aa, Arabidopsis thaliana; identical to SEQ ID NO: 25733
  peptide (1)..(77): Ceres Seq. ID no. 12713136

SEQ ID NO: 88861 - protein, 62 aa, Arabidopsis thaliana; identical to SEQ ID NO: 25734
  peptide (1)..(62): Ceres Seq. ID no. 12713137

SEQ ID NO: 88862 - protein, 50 aa, Arabidopsis thaliana
  peptide (1)..(50): Ceres Seq. ID no. 12713138
QSAHLSLLSKSLSIPLKNEALCAFYLRCSSLVHGIHCHRDGSSHRGGTHV

SEQ ID NO: 88863 - DNA, 2016 bp, Arabidopsis thaliana
  misc_feature (1)..(2016): Ceres Seq. ID no. 12713178
  misc_feature (1)..(2016): Ortholog of  Ceres SEQ ID NO 14310639 as cited in SEQ ID NO 53858
  misc_feature (1)..(2016): Ortholog of  Ceres SEQ ID NO 14312851 as cited in SEQ ID NO 58364
atgattccactctcgtttgcagcattaggagacatagttgataagaagcttgatgaggattatgtaaaggaagaagttgaaatgatgatacaagtatctctgctatccacacaagcagcaccgggagaacgaccaacgatgtcggaagttgaaatttttagaaactcctgcttgtgctacataaactggttttgcaacatcatctccataatatattctaacagtttgcttttgaggattgattcaggatcatcatctatatctgttgtcttcttagtttttactctgtctcggatggagcaacgacggatgttaacggcggctagaccacgtttgtcctcgacgatccgtacgattacgtctcacgtggcgttctcagcaagccgtctcttgaaaccttatgttgcatatcggcttggattggaggacgcgaatcagaggaaaacagagaacgaatccaccggtggagataaagaaatcgccaattcgctcctccactgtcttaaatttcactatcttcttcttcattttccttccttctcacttcaaatccataatcgctctacttctctctctctctctagattcgaaaaaatggcgaaactggtgatgttgttggttctctgtatcttaccggcgatagccatggcggcaaggaggggaaatattggaaagaatacaatggtggttcaaggtagcacctactgtgacatttgcaaattcggcttcgagactcctgaatcctcctacttcatccccggtgcaacggtgaagctatcatgcaaagacaggaagacaatggaagaggtttacacagacaaagctgtatcagacaaagaaggaaagtataagttcattgtccacgacgatcacagagaccagatgtgcgatgttttgcttgtgaaaagctcggataaaacctgctctaaaatctccgttggacgtgagaagtctcgtgtgatcttgaaccattacagtggcattgcctcgcagatcagacatgctaacaacatgggatttgagaaagaagtgagaatggctacttctacgactatgtctcatcaagcgattgggtctgttgtctctcaaagaccattcaaagcttctcagtttctaaaggagcctttgaataatgtaccaatgaaattcagacaaaaaagattcaagattgaagcaactgcttctcagatatctgtcgttgacaacactttcttgtctccgtctccttccaagaacaaaccacatgaatctaagaagaaatcaaatgaagcagctttgatattgattaggcatggagaatcgttatggaatgagaagaatttgttcacgggttgtgttgatgtgccattgactcagaaaggtgttggagaagctattgaagctgggaagaagattagtaacattcctgtagatttgattttcacttcttctttaatccgtgctcagatgactgcaatgcttgccatgactcagcatcgtcgcaagaaggttccaatcatcttgcacaacgagagtgtaaaggcgaaaacttggagtcatgttttcagcgaagaaactagaaaacaatctatcccggttatagcggcttggtatggagagttgcagggtttgaacaagaaagaaacagcggaaagatacgggacacaacaagttcacgaatggcgcaggagttacgaaattcctcctccgaaaggcgagagcttggagatgtgtgctgagagagcagtggcttattttgaagacaatatcaaaccagagcttgcatctggaaacaatgtaatgattgctgctcacgggaactcattgagatctatcattatgtatcttgacgatttaacttctcaggaggttacaactctagacctgtccacaggtgtaccattgctctacatcttcaaagaaggcaagttcatgaaacgaggaagccccgtcggttctactgaagctggtgtctatgcttatacaaagagattggcacaatacagagagaagcttgatgcggcggcgaccatttaa

SEQ ID NO: 88864 - protein, 671 aa, Arabidopsis thaliana
  peptide (1)..(671): Ceres Seq. ID no. 12713179
MIPLSFAALGDIVDKKLDEDYVKEEVEMMIQVSLLSTQAAPGERPTMSEVEIFRNSCLCYINWFCNIISIIYSNSLLLRIDSGSSSISVVFLVFTLSRMEQRRMLTAARPRLSSTIRTITSHVAFSASRLLKPYVAYRLGLEDANQRKTENESTGGDKEIANSLLHCLKFHYLLLHFPSFSLQIHNRSTSLSLSRFEKMAKLVMLLVLCILPAIAMAARRGNIGKNTMVVQGSTYCDICKFGFETPESSYFIPGATVKLSCKDRKTMEEVYTDKAVSDKEGKYKFIVHDDHRDQMCDVLLVKSSDKTCSKISVGREKSRVILNHYSGIASQIRHANNMGFEKEVRMATSTTMSHQAIGSVVSQRPFKASQFLKEPLNNVPMKFRQKRFKIEATASQISVVDNTFLSPSPSKNKPHESKKKSNEAALILIRHGESLWNEKNLFTGCVDVPLTQKGVGEAIEAGKKISNIPVDLIFTSSLIRAQMTAMLAMTQHRRKKVPIILHNESVKAKTWSHVFSEETRKQSIPVIAAWYGELQGLNKKETAERYGTQQVHEWRRSYEIPPPKGESLEMCAERAVAYFEDNIKPELASGNNVMIAAHGNSLRSIIMYLDDLTSQEVTTLDLSTGVPLLYIFKEGKFMKRGSPVGSTEAGVYAYTKRLAQYREKLDAAATI

SEQ ID NO: 88865 - protein, 644 aa, Arabidopsis thaliana
  peptide (1)..(644): Ceres Seq. ID no. 12713180
MMIQVSLLSTQAAPGERPTMSEVEIFRNSCLCYINWFCNIISIIYSNSLLLRIDSGSSSISVVFLVFTLSRMEQRRMLTAARPRLSSTIRTITSHVAFSASRLLKPYVAYRLGLEDANQRKTENESTGGDKEIANSLLHCLKFHYLLLHFPSFSLQIHNRSTSLSLSRFEKMAKLVMLLVLCILPAIAMAARRGNIGKNTMVVQGSTYCDICKFGFETPESSYFIPGATVKLSCKDRKTMEEVYTDKAVSDKEGKYKFIVHDDHRDQMCDVLLVKSSDKTCSKISVGREKSRVILNHYSGIASQIRHANNMGFEKEVRMATSTTMSHQAIGSVVSQRPFKASQFLKEPLNNVPMKFRQKRFKIEATASQISVVDNTFLSPSPSKNKPHESKKKSNEAALILIRHGESLWNEKNLFTGCVDVPLTQKGVGEAIEAGKKISNIPVDLIFTSSLIRAQMTAMLAMTQHRRKKVPIILHNESVKAKTWSHVFSEETRKQSIPVIAAWYGELQGLNKKETAERYGTQQVHEWRRSYEIPPPKGESLEMCAERAVAYFEDNIKPELASGNNVMIAAHGNSLRSIIMYLDDLTSQEVTTLDLSTGVPLLYIFKEGKFMKRGSPVGSTEAGVYAYTKRLAQYREKLDAAATI

SEQ ID NO: 88866 - protein, 643 aa, Arabidopsis thaliana
  peptide (1)..(643): Ceres Seq. ID no. 12713181
MIQVSLLSTQAAPGERPTMSEVEIFRNSCLCYINWFCNIISIIYSNSLLLRIDSGSSSISVVFLVFTLSRMEQRRMLTAARPRLSSTIRTITSHVAFSASRLLKPYVAYRLGLEDANQRKTENESTGGDKEIANSLLHCLKFHYLLLHFPSFSLQIHNRSTSLSLSRFEKMAKLVMLLVLCILPAIAMAARRGNIGKNTMVVQGSTYCDICKFGFETPESSYFIPGATVKLSCKDRKTMEEVYTDKAVSDKEGKYKFIVHDDHRDQMCDVLLVKSSDKTCSKISVGREKSRVILNHYSGIASQIRHANNMGFEKEVRMATSTTMSHQAIGSVVSQRPFKASQFLKEPLNNVPMKFRQKRFKIEATASQISVVDNTFLSPSPSKNKPHESKKKSNEAALILIRHGESLWNEKNLFTGCVDVPLTQKGVGEAIEAGKKISNIPVDLIFTSSLIRAQMTAMLAMTQHRRKKVPIILHNESVKAKTWSHVFSEETRKQSIPVIAAWYGELQGLNKKETAERYGTQQVHEWRRSYEIPPPKGESLEMCAERAVAYFEDNIKPELASGNNVMIAAHGNSLRSIIMYLDDLTSQEVTTLDLSTGVPLLYIFKEGKFMKRGSPVGSTEAGVYAYTKRLAQYREKLDAAATI

SEQ ID NO: 88867 - DNA, 890 bp, Arabidopsis thaliana
  misc_feature (1)..(890): Ceres Seq. ID no. 12713249
  misc_feature (1)..(890): Ortholog of  Ceres SEQ ID NO 13638931 as cited in SEQ ID NO 52200
  misc_feature (1)..(890): Ortholog of  Ceres SEQ ID NO 14304209 as cited in SEQ ID NO 56460
  misc_feature (1)..(890): Ortholog of  Ceres SEQ ID NO 12615635 as cited in SEQ ID NO 63133
  misc_feature (1)..(890): Ortholog of  Ceres SEQ ID NO 12586351 as cited in SEQ ID NO 64028
  misc_feature (1)..(890): Ortholog of  Ceres SEQ ID NO 14301603 as cited in SEQ ID NO 67721
  misc_feature (1)..(890): Ortholog of  Ceres SEQ ID NO 15177482 as cited in SEQ ID NO 0
tataacacacactcgcttgttcacgcacaacaaaaagcaagaatatataccactttgtgaacttcagagatcctatagcaatggcgaacctaccgattcttttggattactggccaagtatgttcgggatgagggctagagttgcgttgcgagagaaaggtgttgagtttgaatacagagaggaagatttctcgaacaagagccctttactcctccagagtaatcccattcacaagaaaatcccggttctggtccacaacggtaaaccggtatgtgaatctcttaacgttgtccagtacgtcgacgaggcttggcccgagaagaacccgttcttcccttccgatccttacgggagagctcaggctcgattctgggctgatttcgtggacaagaagttcaccgacgcccaattcaaggtatgggggaagaaaggtgaggaacaagaagcaggcaagaaggaatttattgaggcagtgaagattcttgaatctgagctaggagataaaccttactttggtggagatagctttgggtatgtagacatttccttgattacattctcgagttggttccaagcctatgagaagtttggtaactttagcatcgagtcagagagtccgaaactgatcgcttgggcaaagcggtgcatggagaaagagagtgtgtctaagtctctccctgactctgagaagattgttgcatatgctgctgagtataggaagaacaatctctgatttgaataatcttgttgttctcttgttgctaagctgtgttctgtttttgtctttgtttttttttttcccctaataatgcgagagagccttagtgaatgtgtgttgtggtttttatgcatcctaagtatggaatttaaataaaatttgtttcgactt

SEQ ID NO: 88868 - protein, 217 aa, Arabidopsis thaliana; identical to SEQ ID NO: 21617
  peptide (1)..(217): Ceres Seq. ID no. 12713250

SEQ ID NO: 88869 - protein, 204 aa, Arabidopsis thaliana; identical to SEQ ID NO: 21618
  peptide (1)..(204): Ceres Seq. ID no. 12713251

SEQ ID NO: 88870 - protein, 201 aa, Arabidopsis thaliana; identical to SEQ ID NO: 21619
  peptide (1)..(201): Ceres Seq. ID no. 12713252

SEQ ID NO: 88871 - DNA, 981 bp, Arabidopsis thaliana
  misc_feature (1)..(981): Ceres Seq. ID no. 12713253
  misc_feature (1)..(981): Ortholog of  Ceres SEQ ID NO 14304209 as cited in SEQ ID NO 56460
  misc_feature (1)..(981): Ortholog of  Ceres SEQ ID NO 12586351 as cited in SEQ ID NO 64028
  misc_feature (1)..(981): Ortholog of  Ceres SEQ ID NO 15177482 as cited in SEQ ID NO 0
cttacaggtagtgtcccaaccaaacaaatcgagaaagacgaacacttacaaaaaaaaatctctttgtgagctttagcgatcgtaacaatggcgaacgaggtgattcttcttgatttctggccgagtatgttcgggatgaggacaaggatcgcattgagggagaaaggtgttgaatttgagtacagagaagaagatctaaggaacaagagtcctttgcttctccagatgaatccgattcacaagaagattcctgttctcatccacaatggtaaaccggttaacgaatctatcatccaggttcagtacattgacgaggtctggtctcacaagaaccctattcttccttctgatccttacctgagagctcaagctaggttctgggctgatttcattgacaagaagctgtatgatgctcagaggaaggtgtgggcgacaaagggtgaggaacaagaggcagggaagaaggatttcattgagatactcaagactcttgaatctgagcttggagacaaaccttactttagtggcgatgactttggctatgtagacattgcgttgattggattctacacatggtttccagcatacgagaagtttgctaacttcagtatcgaatctgaggttccgaaactgattgcttgggttaagaagtgtttgcagagggagagcgtggctaagtccttgcctgatcctgagaaggttactgaattcgtctctgagctcaggaagaaatttgtacctgagtaaatatgtttctcttgtcatatggttcggacttaagatgctctctgttttactttcgtgtgttgtctttcttaaataatgcagagcatctgtgaggtggtttgagtgtagagaatgtatgtctttgctgtagcagattcctgtgttttctggatttaatggcttgtcctagtttttatgcattgtaactatgagtttaattaatgatcgttaatctataatgattattaatttgtt

SEQ ID NO: 88872 - protein, 219 aa, Arabidopsis thaliana; identical to SEQ ID NO: 21639
  peptide (1)..(219): Ceres Seq. ID no. 12713254

SEQ ID NO: 88873 - protein, 206 aa, Arabidopsis thaliana; identical to SEQ ID NO: 21640
  peptide (1)..(206): Ceres Seq. ID no. 12713255

SEQ ID NO: 88874 - protein, 203 aa, Arabidopsis thaliana; identical to SEQ ID NO: 21641
  peptide (1)..(203): Ceres Seq. ID no. 12713256

SEQ ID NO: 88875 - DNA, 1003 bp, Arabidopsis thaliana
  misc_feature (1)..(1003): Ceres Seq. ID no. 12713341
  misc_feature (1)..(1003): Ortholog of  Ceres SEQ ID NO 13595187 as cited in SEQ ID NO 56052
  misc_feature (1)..(1003): Ortholog of  Ceres SEQ ID NO 13662053 as cited in SEQ ID NO 61547
  misc_feature (1)..(1003): Ortholog of  Ceres SEQ ID NO 13624283 as cited in SEQ ID NO 0
aagaccaaaagaaaaaaaaaaactttttcttttctgatgaatcgtatctattagctatgagcctgaggtgatgatcatgtcaacataaccatcaacgttctaccatggctagtcatagcaacaaaggcaaaggcatagcagaaggatcgtctcaaccgcaatcgcaaccgcaaccacaaccacaccaaccgcaatcacctcctaacccgccagcgttaagccggtacgagtcacagaaacgacgagactggaacacgttttgtcaatacctgcgtaaccaacagccaccggttcacatctcgcagtgtggatcaaaccacatcctcgatttcctccaatatctcgaccagtttgggaagacaaaggttcatatccatggatgcgttttcttcggacaggttgagccagcgggacagtgtaactgtcctttaaaacaagcgtgggggagtttagatgctttgatcggacggctaagagcggctttcgaggagaacggaggattgccggagagaaacccttttgccggcggcggaattagggtttttctgagggaagtgagagattcacaggcgaaggcaagaggagttccgtacaagaaaagaaaaaagaggaagaagaggaatcctatgaagagtcatgatggtgaagatggtactacgggaactagtagtagctccaacttggcttcttagcggaagcaaacaaaaaatctataataaaacaaagtggaattagttaatggtaagcatttaatactctccataatctctattaattttcagtactttaatcctattttgtgatctatttacaattttacatatagagtgaaaagaaacaattctacattcgtttcttgatagtcagctcttaatgcatagttgaattttatacgtatcatacccaaactataagattaatcttgatcttagatcatatacatatatcatcatggtgtgtaccctaagtttcataatcatttttcttaactatttatgtggat

SEQ ID NO: 88876 - protein, 195 aa, Arabidopsis thaliana
  peptide (1)..(195): Ceres Seq. ID no. 12713342
MASHSNKGKGIAEGSSQPQSQPQPQPHQPQSPPNPPALSRYESQKRRDWNTFCQYLRNQQPPVHISQCGSNHILDFLQYLDQFGKTKVHIHGCVFFGQVEPAGQCNCPLKQAWGSLDALIGRLRAAFEENGGLPERNPFAGGGIRVFLREVRDSQAKARGVPYKKRKKRKKRNPMKSHDGEDGTTGTSSSSNLAS

SEQ ID NO: 88877 - DNA, 450 bp, Arabidopsis thaliana
  misc_feature (1)..(450): Ceres Seq. ID no. 12713370
  misc_feature (1)..(450): Ortholog of  Ceres SEQ ID NO 14308991 as cited in SEQ ID NO 0
atggctgcttcagtgatgctatcttcggtgacattgaaaccagctggtttcacggtggagaagacggcggctagaggattaccgtcgctcacaagagctcgtccctccttcaaaattgtcgccagtggcgtcaagaagatcaagaccgacaagcccttcggaattaacggcagcatggacttgagggacggcgtcgacgcctccggcagaaagggcaagggatacggtgtttacaagtacgtcgacaagtatggagctaacgtcgatggatacagtcctatttacaacgagaacgagtggtcagcgagtgggaggagtcaccggattggcaatttgggcggtaactctcgccggaattcttgccggaggtgctcttcttgtgtacaacacaagtgctttggctcagtaaatcttaaagttgttagcgcatgtgtaatcatgtttctataa

SEQ ID NO: 88878 - protein, 149 aa, Arabidopsis thaliana
  peptide (1)..(149): Ceres Seq. ID no. 12713371
MAASVMLSSVTLKPAGFTVEKTAARGLPSLTRARPSFKIVASGVKKIKTDKPFGINGSMDLRDGVDASGRKGKGYGVYKYVDKYGANVDGYSPIYNENEWSASGRSHRIGNLGGNSRRNSCRRCSSCVQHKCFGSVNLKVVSACVIMFL

SEQ ID NO: 88879 - protein, 144 aa, Arabidopsis thaliana
  peptide (1)..(144): Ceres Seq. ID no. 12713372
MLSSVTLKPAGFTVEKTAARGLPSLTRARPSFKIVASGVKKIKTDKPFGINGSMDLRDGVDASGRKGKGYGVYKYVDKYGANVDGYSPIYNENEWSASGRSHRIGNLGGNSRRNSCRRCSSCVQHKCFGSVNLKVVSACVIMFL

SEQ ID NO: 88880 - protein, 91 aa, Arabidopsis thaliana
  peptide (1)..(91): Ceres Seq. ID no. 12713373
MDLRDGVDASGRKGKGYGVYKYVDKYGANVDGYSPIYNENEWSASGRSHRIGNLGGNSRRNSCRRCSSCVQHKCFGSVNLKVVSACVIMFL

SEQ ID NO: 88881 - DNA, 1092 bp, Arabidopsis thaliana
  misc_feature (1)..(1092): Ceres Seq. ID no. 12713449
  misc_feature (1)..(1092): Ortholog of  Ceres SEQ ID NO 15169114 as cited in SEQ ID NO 58596
atgtcttctccactactctctctcacctcattgccactaattctcctcacctcatcatcccttttgtctccattagaggtcaatcttttaaaactcaaagatttcgcttttgtctttatatcttacttttgtgagattcaaagggatgatctttgttgtgttgagttaacagagaggttgaaagagaagatagaggaaacatttgggtgtgagtatgagctttttattgaattcacaggtttgattagttggtgcaaaggagctagcattggttggcatagtgatgataacagatcatatctaaaacaaagagattttgcgagtggtgaaccagtaaccgttgctccatcggctggtgatgttatcatgtacacagctgatgaccggaatattcactcagttgatgaggtaacagatggagaaagattgactcttgcactctggtttagccgggactcatcacatgacgaagattccaagcttctttctcgtctttcacaatgtacatcacatgaagtgtgcctccctttgcctgcatccactaacatgtactggttctgtcctcatcaagatggttctaatcaaaacataggttttgatgtttgcgttgcgaggttgcatcttcttggttttgatgtacatagcttacaaggcgaagatcattctacggatgcctctgaacaacttatgggaccactacaattagctaaaggaggaaagttactcacccgaaaatttgccaacattcttcatgctcttcaggttgttcagttctaccattggaaagcttctgaactcgtaacttctaatgtcgaaaatgacacattagaagaggtgaaagctatgtcccactctcagttggaaactatcaatgccctgaaatcagttttcctgctagatgagaacctcgtagccacaacttttggatattcgtgctctggtgaggatcgaaaggattcactcgacttgacgggtatagctctcgcggttacctcttgggaagagtatagctgtaagttactcaaggagctattatcatccttgcctcaatggaaaacttatcaaactatacacaaagtggaatctgattag

SEQ ID NO: 88882 - protein, 363 aa, Arabidopsis thaliana
  peptide (1)..(363): Ceres Seq. ID no. 12713450
MSSPLLSLTSLPLILLTSSSLLSPLEVNLLKLKDFAFVFISYFCEIQRDDLCCVELTERLKEKIEETFGCEYELFIEFTGLISWCKGASIGWHSDDNRSYLKQRDFASGEPVTVAPSAGDVIMYTADDRNIHSVDEVTDGERLTLALWFSRDSSHDEDSKLLSRLSQCTSHEVCLPLPASTNMYWFCPHQDGSNQNIGFDVCVARLHLLGFDVHSLQGEDHSTDASEQLMGPLQLAKGGKLLTRKFANILHALQVVQFYHWKASELVTSNVENDTLEEVKAMSHSQLETINALKSVFLLDENLVATTFGYSCSGEDRKDSLDLTGIALAVTSWEEYSCKLLKELLSSLPQWKTYQTIHKVESD

SEQ ID NO: 88883 - protein, 241 aa, Arabidopsis thaliana; identical to SEQ ID NO: 70722
  peptide (1)..(241): Ceres Seq. ID no. 12713451

SEQ ID NO: 88884 - protein, 181 aa, Arabidopsis thaliana
  peptide (1)..(181): Ceres Seq. ID no. 12713452
MYWFCPHQDGSNQNIGFDVCVARLHLLGFDVHSLQGEDHSTDASEQLMGPLQLAKGGKLLTRKFANILHALQVVQFYHWKASELVTSNVENDTLEEVKAMSHSQLETINALKSVFLLDENLVATTFGYSCSGEDRKDSLDLTGIALAVTSWEEYSCKLLKELLSSLPQWKTYQTIHKVESD

SEQ ID NO: 88885 - DNA, 1047 bp, Arabidopsis thaliana
  misc_feature (1)..(1047): Ceres Seq. ID no. 12713453
  misc_feature (1)..(1047): Ortholog of  Ceres SEQ ID NO 13585587 as cited in SEQ ID NO 65515
atgggcatcgatctttctcttaagctcgaggccgaggagaaaaagaaagagatagaaggatcgaaacatagccgtgagaacaaagaagacgaagaacatgatgctagtggtgatgaagatgaacaaatggtgaaagaagacgaagatgattcttcttctttaggtttaagaacccgagaagaagaaaacgaacgtgaagagctcttgcagctacagatccagatggaaagtgtgaaagaagagaatactaggttgaggaagcttgtcgagcagactcttgaagattatcgtcatcttgagatgaaattcccggttatcgataaaaccaagaagatggatcttgaaatgttccttggagtacaaggcaaacgatgtgtggatataacaagtaaggctcggaaaagaggagctgagagatctccgtcaatggaaagagaaatagggctttcactttctctagagaaaaaacagaaacaagaagagagcaaagaagctgttcagtctcatcaccaaagatacaatagtagcagcttagatatgaatatgccacgtatcatttcatcttctcaaggtaatagaaaggccagggtgtccgtgagggcgagatgtgagaccgcaacaatgaatgatggatgccaatggaggaagtacggtcagaaaaccgcgaaagggaatccatgtcctcgagcttattaccgatgcaccgtggctccaggatgtcccgttagaaaacaggtgcaaaggtgtttagaagacatgtcaatactgataacaacctacgaaggaacacataaccatccacttccggtcggagcaacagccatggcttccactgcctctacttctccattcttgttactcgattccagtgacaacctctctcatccttcctattaccaaactcctcaagccatagactcttctttgattacatacccacaaaatagcagctacaacaatcgaaccataagaagcttgaactttgatggtccatctagaggagatcacgtttcatcttctcaaaaccgattaaattggatgatgtag

SEQ ID NO: 88886 - protein, 348 aa, Arabidopsis thaliana
  peptide (1)..(348): Ceres Seq. ID no. 12713454
MGIDLSLKLEAEEKKKEIEGSKHSRENKEDEEHDASGDEDEQMVKEDEDDSSSLGLRTREEENEREELLQLQIQMESVKEENTRLRKLVEQTLEDYRHLEMKFPVIDKTKKMDLEMFLGVQGKRCVDITSKARKRGAERSPSMEREIGLSLSLEKKQKQEESKEAVQSHHQRYNSSSLDMNMPRIISSSQGNRKARVSVRARCETATMNDGCQWRKYGQKTAKGNPCPRAYYRCTVAPGCPVRKQVQRCLEDMSILITTYEGTHNHPLPVGATAMASTASTSPFLLLDSSDNLSHPSYYQTPQAIDSSLITYPQNSSYNNRTIRSLNFDGPSRGDHVSSSQNRLNWMM

SEQ ID NO: 88887 - protein, 306 aa, Arabidopsis thaliana
  peptide (1)..(306): Ceres Seq. ID no. 12713455
MVKEDEDDSSSLGLRTREEENEREELLQLQIQMESVKEENTRLRKLVEQTLEDYRHLEMKFPVIDKTKKMDLEMFLGVQGKRCVDITSKARKRGAERSPSMEREIGLSLSLEKKQKQEESKEAVQSHHQRYNSSSLDMNMPRIISSSQGNRKARVSVRARCETATMNDGCQWRKYGQKTAKGNPCPRAYYRCTVAPGCPVRKQVQRCLEDMSILITTYEGTHNHPLPVGATAMASTASTSPFLLLDSSDNLSHPSYYQTPQAIDSSLITYPQNSSYNNRTIRSLNFDGPSRGDHVSSSQNRLNWMM

SEQ ID NO: 88888 - protein, 274 aa, Arabidopsis thaliana
  peptide (1)..(274): Ceres Seq. ID no. 12713456
MESVKEENTRLRKLVEQTLEDYRHLEMKFPVIDKTKKMDLEMFLGVQGKRCVDITSKARKRGAERSPSMEREIGLSLSLEKKQKQEESKEAVQSHHQRYNSSSLDMNMPRIISSSQGNRKARVSVRARCETATMNDGCQWRKYGQKTAKGNPCPRAYYRCTVAPGCPVRKQVQRCLEDMSILITTYEGTHNHPLPVGATAMASTASTSPFLLLDSSDNLSHPSYYQTPQAIDSSLITYPQNSSYNNRTIRSLNFDGPSRGDHVSSSQNRLNWMM

SEQ ID NO: 88889 - DNA, 1029 bp, Arabidopsis thaliana
  misc_feature (1)..(1029): Ceres Seq. ID no. 12713457
  misc_feature (1)..(1029): Ortholog of  Ceres SEQ ID NO 13595351 as cited in SEQ ID NO 55934
  misc_feature (1)..(1029): Ortholog of  Ceres SEQ ID NO 13639645 as cited in SEQ ID NO 57488
atggagagaatatgtgaaatgtggagagaaatgaaagatataacggcaatggtggtggttcaaatagctacggcagggttaaacatatttttcaagctagcaatggaagatggtatgaacccaagtgtactcgtggcctatcgtctcttgtttgctacacttttcatgattcctatatgcttcatctttcaaaggctgatgttactagcattactctcagggttactcggtgtggtgataccaagtatcctaaccattacgggtctagctctaacgtcagcaacattcacctctgctgctggcgttctcactccattggtcactttcatcttcgctgcacttcttaggatggagagtgtacggcttggatcgagcgtagggctggctaaggtttttggaacattgtttggtgttggtggagctcttgtctttatattctatagaggaatagagatccgactatggtcaactcacgttaacctagtgaaccaaccacgtgactcctcacgtgatgctaccactcaccatatttccatccttggggctcttctagttaagataagcaaacaatttggagggccttattggaacgcgactctaatgaacatgatgggaggcgtagtggctatgcttgtcgctctttgctgggaacacgatttagatgaatggagattaggatggaatatcagactattaaccattgcttatgcggcaattctgatttccgggatggtggtagcagtcaacgcatggtgcattgagtctagaggaccgttatttgtatcggtatttagccctgtaggacttgtgatcgtagctcttgttggatcatttttgctagatgaaacacttcatttggggagcataattggtacagtgattatcgttggagcattatacattgtgctatgggctaaaaacaaggaaatgaagagtatgcttacgacatcggatcataatgaaacaaataagactagcaaagatatcacagtcaacaatctcccaacattaagtacaaatgtcccttga

SEQ ID NO: 88890 - protein, 342 aa, Arabidopsis thaliana
  peptide (1)..(342): Ceres Seq. ID no. 12713458
MERICEMWREMKDITAMVVVQIATAGLNIFFKLAMEDGMNPSVLVAYRLLFATLFMIPICFIFQRLMLLALLSGLLGVVIPSILTITGLALTSATFTSAAGVLTPLVTFIFAALLRMESVRLGSSVGLAKVFGTLFGVGGALVFIFYRGIEIRLWSTHVNLVNQPRDSSRDATTHHISILGALLVKISKQFGGPYWNATLMNMMGGVVAMLVALCWEHDLDEWRLGWNIRLLTIAYAAILISGMVVAVNAWCIESRGPLFVSVFSPVGLVIVALVGSFLLDETLHLGSIIGTVIIVGALYIVLWAKNKEMKSMLTTSDHNETNKTSKDITVNNLPTLSTNVP

SEQ ID NO: 88891 - protein, 336 aa, Arabidopsis thaliana
  peptide (1)..(336): Ceres Seq. ID no. 12713459
MWREMKDITAMVVVQIATAGLNIFFKLAMEDGMNPSVLVAYRLLFATLFMIPICFIFQRLMLLALLSGLLGVVIPSILTITGLALTSATFTSAAGVLTPLVTFIFAALLRMESVRLGSSVGLAKVFGTLFGVGGALVFIFYRGIEIRLWSTHVNLVNQPRDSSRDATTHHISILGALLVKISKQFGGPYWNATLMNMMGGVVAMLVALCWEHDLDEWRLGWNIRLLTIAYAAILISGMVVAVNAWCIESRGPLFVSVFSPVGLVIVALVGSFLLDETLHLGSIIGTVIIVGALYIVLWAKNKEMKSMLTTSDHNETNKTSKDITVNNLPTLSTNVP

SEQ ID NO: 88892 - protein, 332 aa, Arabidopsis thaliana
  peptide (1)..(332): Ceres Seq. ID no. 12713460
MKDITAMVVVQIATAGLNIFFKLAMEDGMNPSVLVAYRLLFATLFMIPICFIFQRLMLLALLSGLLGVVIPSILTITGLALTSATFTSAAGVLTPLVTFIFAALLRMESVRLGSSVGLAKVFGTLFGVGGALVFIFYRGIEIRLWSTHVNLVNQPRDSSRDATTHHISILGALLVKISKQFGGPYWNATLMNMMGGVVAMLVALCWEHDLDEWRLGWNIRLLTIAYAAILISGMVVAVNAWCIESRGPLFVSVFSPVGLVIVALVGSFLLDETLHLGSIIGTVIIVGALYIVLWAKNKEMKSMLTTSDHNETNKTSKDITVNNLPTLSTNVP

SEQ ID NO: 88893 - DNA, 1293 bp, Arabidopsis thaliana
  misc_feature (1)..(1293): Ceres Seq. ID no. 12713545
  misc_feature (1)..(1293): Ortholog of  Ceres SEQ ID NO 14313743 as cited in SEQ ID NO 59555
atgctgagacttagaaagaagcaacatttggtgtttctactatgcgtgtggtgtttggtggtggattggagcaaagcagaaacagaggaaagtgatggaagtcccatggagaaaacagagcaagctgctctatactctaccattcaaggctttgttggtgaatcttggaatggctcttatctttatcctgacccttgtggctggactcctatccagggtgtgacttgtgatatctatgatgagctttggtatgtaactgctctaagctttgggactatgaaagacaactctcttgcttgttctgaaagtccagtgatcagaccacaactctttgagctcaagcacctcaagtctctctctcttttcaactgcttcacaacgcctaaccgatatctagcttcaatctccgatgaaaagtggttggatctctctaaaagcttggagagacttgagatcagatcaaacccgggactgataggtgaactcccttctgtcatcactaacctcaccaaccttcaatctctggtggtgctagaaaacaagttaacaggtccattgccagtgaatttggccaagttaaccagattgagacgtttagtactgtctggaaaccggttcacagggagaatacctgaggtctacgggttaaccggattgttgatattggatgtgagcaggaatttcttatctggggcgttgcctttaagcgttggaggattgtattctctgctgaaacttgatcttagtaacaattacttggaaggaaagttacctagagagctagagtccttgaagaatctcactctattggacttgagaaacaacagattatcaggtgggttgagtaaagagatccaagagatgacttctttggtagaactggttctgtccaataatcgcctagccggggacttgacaggaataaagtggagaaatctgaagaatttagtggttcttgatctctccaacacaggcttaaaaggggagattcctggttcaatcttggagctcaagaaactgaggtttttgggtttgagcaacaacaatctcggaggcaaactcattccacaaatggaaaccgaaatgcctagtctcagcgcgctttacgtgaatggaaataacatcagcggagagttggaattctctaggtacttttatgagagaatgggaaggagacttggtgtttgggggaaccctaatctgtgttacaacggagatgagaccaagaaccttagcgatcatgttcctttcggagtgaaccaatgtaagagaattaaggcagataaatattag

SEQ ID NO: 88894 - protein, 430 aa, Arabidopsis thaliana; identical to SEQ ID NO: 47881
  peptide (1)..(430): Ceres Seq. ID no. 12713546

SEQ ID NO: 88895 - protein, 395 aa, Arabidopsis thaliana; identical to SEQ ID NO: 47882
  peptide (1)..(395): Ceres Seq. ID no. 12713547

SEQ ID NO: 88896 - protein, 338 aa, Arabidopsis thaliana
  peptide (1)..(338): Ceres Seq. ID no. 12713548
MKDNSLACSESPVIRPQLFELKHLKSLSLFNCFTTPNRYLASISDEKWLDLSKSLERLEIRSNPGLIGELPSVITNLTNLQSLVVLENKLTGPLPVNLAKLTRLRRLVLSGNRFTGRIPEVYGLTGLLILDVSRNFLSGALPLSVGGLYSLLKLDLSNNYLEGKLPRELESLKNLTLLDLRNNRLSGGLSKEIQEMTSLVELVLSNNRLAGDLTGIKWRNLKNLVVLDLSNTGLKGEIPGSILELKKLRFLGLSNNNLGGKLIPQMETEMPSLSALYVNGNNISGELEFSRYFYERMGRRLGVWGNPNLCYNGDETKNLSDHVPFGVNQCKRIKADKY

SEQ ID NO: 88897 - DNA, 2226 bp, Arabidopsis thaliana
  misc_feature (1)..(2226): Ceres Seq. ID no. 12713632
  misc_feature (1)..(2226): Ortholog of  Ceres SEQ ID NO 12586556 as cited in SEQ ID NO 64667
  misc_feature (1)..(2226): Ortholog of  Ceres SEQ ID NO 13660894 as cited in SEQ ID NO 67475
atgggttctccagattcgtctaggctcgtctttgaagcttttccttaccctgattccttcatgtacggtgttctcatcaaatgcaacgtctggtgtcatttactcgacgccgccattgatctgtaccataggttggtttcggagacgacccaaatcagtaagtttgtgtttccgtctgttttgagggcttgtgcgggttcgagggagcatctgagtgttggtgggaaagtccatgggagaattatcaagggcggtgtagacgacgacgctgtgatagagacgtctctgttgtgtatgtatggtcaaactgggaatttaagtgatgcagagaaggtgttcgatggaatgcctgtgagagaccttgtggcttggagtactcttgtttctagctgtctcgagaatggtgaggtggtgaaagcattgaggatgtttaagtgtatggtggatgatggtgttgagcccgatgctgtgacgatgatcagcgttgtagaaggatgtgctgagcttggatgtttgaggatcgctagatcagttcatggccagataacgaggaaaatgtttgatttagatgaaacattatgcaattctctgcttacaatgtacagtaagtgtggggatttgcttagctcggagagaatctttgagaagatcgccaagaagaatgctgtttcgtggacagccatgatttctagttacaaccgtggcgagttctctgaaaaggcattgagaagtttcagtgagatgataaagtctggaattgagcctaatttggttaccctttatagtgttttgagctcttgtggtttgatagggttgattagagaaggtaagtcggtccatggttttgcagttagacgagagctggatccgaattacgagtcgctttctctggccttagttgagctgtacgctgaatgcgggaaactaagcgactgtgagacagttttacgtgtggttagtgatagaaatattgtcgcatggaactctcttatatctctatatgcacacagaggtatggtgattcaagcattgggcttgtttagacagatggtgacacagagaataaaaccagacgcattcactttggccagctcaatctcagcatgcgagaatgctggtttagttccgctagggaaacagattcacggacatgttataaggacagatgtttcagatgagtttgtgcagaactcgttgatagacatgtactctaaaagcggatctgtggattcagcaagcacagtgtttaatcaaatcaagcataggagcgttgtgacatggaactcaatgctctgcgggttttctcagaatggtaactctgtagaggcaattagcctcttcgactatatgtatcatagctatctcgagatgaatgaagttacatttttggcggttattcaagcatgctcaagcataggttcactggagaaagggaaatgggttcaccacaagctcattatttccggtttaaaggatcttttcactgatacagctctaatcgacatgtatgccaaatgtggagatctcaacgcagctgaaacagtcttcagggccatgtcgagtagaagcattgtgtcatggagtagtatgatcaatgcctatggaatgcacggacggataggatccgccatatctacattcaatcaaatggtggaatccggaacgaaacctaacgaagttgtcttcatgaacgttctctctgcttgtggtcactctggttccgttgaagaaggtaagtactactttaacttgatgaaaagttttggcgtatcaccaaactcagagcatttcgcctgtttcatcgaccttttgagccgttctggtgatctcaaagaagcatatagaaccatcaaggagatgccttttctagctgatgcttcagtttggggttctctggtcaatggatgcagaatccatcagaaaatggatatcatcaaagccattaaaaacgatctttcggatattgttacagatgatacgggatactacactctcttgtccaatatatatgctgaagaaggggaatgggaagaattcaggagactgagatcagctatgaagagttcgaatcttaagaaagttcctgggtacagcgcgattgagattgatcaaaaagttttcagatttggagctggtgaagaaaatcgtatccaaacagatgaaatctataggtttcttggaaatttgcagaatctaacgaatgaagaacatgtcgtagattcttag

SEQ ID NO: 88898 - protein, 741 aa, Arabidopsis thaliana
  peptide (1)..(741): Ceres Seq. ID no. 12713633
MGSPDSSRLVFEAFPYPDSFMYGVLIKCNVWCHLLDAAIDLYHRLVSETTQISKFVFPSVLRACAGSREHLSVGGKVHGRIIKGGVDDDAVIETSLLCMYGQTGNLSDAEKVFDGMPVRDLVAWSTLVSSCLENGEVVKALRMFKCMVDDGVEPDAVTMISVVEGCAELGCLRIARSVHGQITRKMFDLDETLCNSLLTMYSKCGDLLSSERIFEKIAKKNAVSWTAMISSYNRGEFSEKALRSFSEMIKSGIEPNLVTLYSVLSSCGLIGLIREGKSVHGFAVRRELDPNYESLSLALVELYAECGKLSDCETVLRVVSDRNIVAWNSLISLYAHRGMVIQALGLFRQMVTQRIKPDAFTLASSISACENAGLVPLGKQIHGHVIRTDVSDEFVQNSLIDMYSKSGSVDSASTVFNQIKHRSVVTWNSMLCGFSQNGNSVEAISLFDYMYHSYLEMNEVTFLAVIQACSSIGSLEKGKWVHHKLIISGLKDLFTDTALIDMYAKCGDLNAAETVFRAMSSRSIVSWSSMINAYGMHGRIGSAISTFNQMVESGTKPNEVVFMNVLSACGHSGSVEEGKYYFNLMKSFGVSPNSEHFACFIDLLSRSGDLKEAYRTIKEMPFLADASVWGSLVNGCRIHQKMDIIKAIKNDLSDIVTDDTGYYTLLSNIYAEEGEWEEFRRLRSAMKSSNLKKVPGYSAIEIDQKVFRFGAGEENRIQTDEIYRFLGNLQNLTNEEHVVDS

SEQ ID NO: 88899 - protein, 721 aa, Arabidopsis thaliana
  peptide (1)..(721): Ceres Seq. ID no. 12713634
MYGVLIKCNVWCHLLDAAIDLYHRLVSETTQISKFVFPSVLRACAGSREHLSVGGKVHGRIIKGGVDDDAVIETSLLCMYGQTGNLSDAEKVFDGMPVRDLVAWSTLVSSCLENGEVVKALRMFKCMVDDGVEPDAVTMISVVEGCAELGCLRIARSVHGQITRKMFDLDETLCNSLLTMYSKCGDLLSSERIFEKIAKKNAVSWTAMISSYNRGEFSEKALRSFSEMIKSGIEPNLVTLYSVLSSCGLIGLIREGKSVHGFAVRRELDPNYESLSLALVELYAECGKLSDCETVLRVVSDRNIVAWNSLISLYAHRGMVIQALGLFRQMVTQRIKPDAFTLASSISACENAGLVPLGKQIHGHVIRTDVSDEFVQNSLIDMYSKSGSVDSASTVFNQIKHRSVVTWNSMLCGFSQNGNSVEAISLFDYMYHSYLEMNEVTFLAVIQACSSIGSLEKGKWVHHKLIISGLKDLFTDTALIDMYAKCGDLNAAETVFRAMSSRSIVSWSSMINAYGMHGRIGSAISTFNQMVESGTKPNEVVFMNVLSACGHSGSVEEGKYYFNLMKSFGVSPNSEHFACFIDLLSRSGDLKEAYRTIKEMPFLADASVWGSLVNGCRIHQKMDIIKAIKNDLSDIVTDDTGYYTLLSNIYAEEGEWEEFRRLRSAMKSSNLKKVPGYSAIEIDQKVFRFGAGEENRIQTDEIYRFLGNLQNLTNEEHVVDS

SEQ ID NO: 88900 - protein, 643 aa, Arabidopsis thaliana
  peptide (1)..(643): Ceres Seq. ID no. 12713635
MYGQTGNLSDAEKVFDGMPVRDLVAWSTLVSSCLENGEVVKALRMFKCMVDDGVEPDAVTMISVVEGCAELGCLRIARSVHGQITRKMFDLDETLCNSLLTMYSKCGDLLSSERIFEKIAKKNAVSWTAMISSYNRGEFSEKALRSFSEMIKSGIEPNLVTLYSVLSSCGLIGLIREGKSVHGFAVRRELDPNYESLSLALVELYAECGKLSDCETVLRVVSDRNIVAWNSLISLYAHRGMVIQALGLFRQMVTQRIKPDAFTLASSISACENAGLVPLGKQIHGHVIRTDVSDEFVQNSLIDMYSKSGSVDSASTVFNQIKHRSVVTWNSMLCGFSQNGNSVEAISLFDYMYHSYLEMNEVTFLAVIQACSSIGSLEKGKWVHHKLIISGLKDLFTDTALIDMYAKCGDLNAAETVFRAMSSRSIVSWSSMINAYGMHGRIGSAISTFNQMVESGTKPNEVVFMNVLSACGHSGSVEEGKYYFNLMKSFGVSPNSEHFACFIDLLSRSGDLKEAYRTIKEMPFLADASVWGSLVNGCRIHQKMDIIKAIKNDLSDIVTDDTGYYTLLSNIYAEEGEWEEFRRLRSAMKSSNLKKVPGYSAIEIDQKVFRFGAGEENRIQTDEIYRFLGNLQNLTNEEHVVDS

SEQ ID NO: 88901 - DNA, 1153 bp, Arabidopsis thaliana
  misc_feature (1)..(1153): Ceres Seq. ID no. 12713671
  misc_feature (1)..(1153): Ortholog of  Ceres SEQ ID NO 14309271 as cited in SEQ ID NO 0
ctaatcttgtgcctttagatttcttttcggggagatctagtagttgttggattcgttaaacggagaagtggatttggtacgagtctttaggtttccttcttcaccaaaagctctatatagagagaatctgcgagctctttttggtaggaaattagggttcgtgttgcttggtaaatatagaatcaatgacggaggttgttctgcatatatacgatgtgacgaacagtggatcggagaagactaacaacaccattgttcagatcaataggttcttcaaagacgggatcggtcttggcggtatattccacagcgctattcaggtatatggaaacgatgaatggtcttacgggtattgtgaactaggaactggtgtattcagctgcccgagtggaaagaatccaatgtacacataccgtgagaaaatcgtccttggcaaaacagattgcacaatcttcatggtgaatcagatgttgcgtgaactcagcagggaatggcctggacacacttatgatttgttgtcaaaaaattgcaatcacttctgcgatgtactctgtgaccggcttggtgtgccaaagatcccaggttgggttaatcgctttgctaatgctggggacacagccttggaagtggcaggaaacacagcaatgcggatgaagcaagccaaaactgaacttgtgtcagctagtaaagtggcttatcgcttcctctcgaatgttacttcgaacgtaaccaatggctccaatggctctccacaacgaccgggaactctcaacaattcagacagcgggaacttgagattgcaaggtagttggctcaaaggcttacttaacacagccaaaccctccactagtacagagatagggaacaaagatgaagatgcaaatcatgcagtcaccaatcagaagaaacaaagccgtgactctgatgttctactgtttcagtagcaaccgtaccgatccaccacaatgcattcggttagctgtatatccaccggtctaagagtcacgcactattctcctcgtctgtacccattactctgtatcaacgttggaacctgtcattttttcttgagtttttagctcacgtgtgcttttgttaagatcattctcgcttgttactgtcaaatcttaacatcaaaaggtttattagtctc

SEQ ID NO: 88902 - protein, 252 aa, Arabidopsis thaliana; identical to SEQ ID NO: 41677
  peptide (1)..(252): Ceres Seq. ID no. 12713672

SEQ ID NO: 88903 - protein, 180 aa, Arabidopsis thaliana; identical to SEQ ID NO: 41678
  peptide (1)..(180): Ceres Seq. ID no. 12713673

SEQ ID NO: 88904 - protein, 162 aa, Arabidopsis thaliana; identical to SEQ ID NO: 41679
  peptide (1)..(162): Ceres Seq. ID no. 12713674

SEQ ID NO: 88905 - DNA, 1188 bp, Arabidopsis thaliana
  misc_feature (1)..(1188): Ceres Seq. ID no. 12713680
  misc_feature (1)..(1188): Ortholog of  Ceres SEQ ID NO 14314371 as cited in SEQ ID NO 52260
gactgcgaatgaagtttaatggcgactagatcgccttataagagacaaacgaagcgatccatgattcagtctcttccagcttcttcttctgcatcatctcgccgccgattcatttctcggaagaggttcgcgatgatgattcctcttgctctcctctccggcgccgttttcctattctttatgccattcaatagctggggccaatcatctggttcttctctggatctctcccataggatcaatgaaattgaagtagttgctgagtttcctcatgatccggacgcctttactcagggtcttctttatgcgggaaacgatacactgttcgaatccactggtctatacgggaagtcttcagtgaggaaagtggatctacgaacaggaaaggttgaaattcttgaaaaaatggacaatacatattttggagagggtttaacactccttggagaaaggctctttcaagtcgcatggttgacaaacacgggtttcacatatgaccttcgcaacttaagtaaagtaaaaccatttaaacatcatatgaaagatggatggggactggctaccgatggaaaagcgttatttggaagtgatggcacttctacattatatcggatggaccctcaaacaatgaaagttactgataagcatatagtcagatataatggccgtgaggtacgttaccttaatgagctcgagtacataaacaacgaagtttgggcaaatgtgtggcagtctgattgtattgctagaatttcacccaaggacggatctctgcttggatggatactgctttcaaaattaagtcggggattgctgaaatctggacataggggtattgatgttttgaatggcatagcatgggacagtgacaagcaacgcctctttggtaataaatcttgttatcatcccctctaggcttgattactcgacgtcgcctcatagtcacaacattttgtgtctccatcaattttgtgtctcgatcatttgttttgcagtaacggggaaactgtggccaaagctgtaccaaatcaagctaaaacaagcatcagcaaagagcggaaattatatcgagcaacaatgcttggtatgaaaatattgcgcttggtaatggttagaatgtatactggctataatttaccataatttctgaacattagcatttagcaaacttcaatgattgaagatgag

SEQ ID NO: 88906 - protein, 298 aa, Arabidopsis thaliana
  peptide (1)..(298): Ceres Seq. ID no. 12713681
MATRSPYKRQTKRSMIQSLPASSSASSRRRFISRKRFAMMIPLALLSGAVFLFFMPFNSWGQSSGSSLDLSHRINEIEVVAEFPHDPDAFTQGLLYAGNDTLFESTGLYGKSSVRKVDLRTGKVEILEKMDNTYFGEGLTLLGERLFQVAWLTNTGFTYDLRNLSKVKPFKHHMKDGWGLATDGKALFGSDGTSTLYRMDPQTMKVTDKHIVRYNGREVRYLNELEYINNEVWANVWQSDCIARISPKDGSLLGWILLSKLSRGLLKSGHRGIDVLNGIAWDSDKQRLFGNKSCYHPL

SEQ ID NO: 88907 - protein, 284 aa, Arabidopsis thaliana
  peptide (1)..(284): Ceres Seq. ID no. 12713682
MIQSLPASSSASSRRRFISRKRFAMMIPLALLSGAVFLFFMPFNSWGQSSGSSLDLSHRINEIEVVAEFPHDPDAFTQGLLYAGNDTLFESTGLYGKSSVRKVDLRTGKVEILEKMDNTYFGEGLTLLGERLFQVAWLTNTGFTYDLRNLSKVKPFKHHMKDGWGLATDGKALFGSDGTSTLYRMDPQTMKVTDKHIVRYNGREVRYLNELEYINNEVWANVWQSDCIARISPKDGSLLGWILLSKLSRGLLKSGHRGIDVLNGIAWDSDKQRLFGNKSCYHPL

SEQ ID NO: 88908 - protein, 260 aa, Arabidopsis thaliana
  peptide (1)..(260): Ceres Seq. ID no. 12713683
MMIPLALLSGAVFLFFMPFNSWGQSSGSSLDLSHRINEIEVVAEFPHDPDAFTQGLLYAGNDTLFESTGLYGKSSVRKVDLRTGKVEILEKMDNTYFGEGLTLLGERLFQVAWLTNTGFTYDLRNLSKVKPFKHHMKDGWGLATDGKALFGSDGTSTLYRMDPQTMKVTDKHIVRYNGREVRYLNELEYINNEVWANVWQSDCIARISPKDGSLLGWILLSKLSRGLLKSGHRGIDVLNGIAWDSDKQRLFGNKSCYHPL

SEQ ID NO: 88909 - DNA, 3153 bp, Arabidopsis thaliana
  misc_feature (1)..(3153): Ceres Seq. ID no. 12713760
  misc_feature (1)..(3153): Ortholog of  Ceres SEQ ID NO 13658778 as cited in SEQ ID NO 66511
atggcgtccacgcctcctcaaacttctaaaaaggtccgtaacaattccggtagcggccaaaccgtcaaatttgcaagacgaacatctagcggaagatatgtgagtttatctcgagataatatagaattatcaggcgagctctccggggattattctaactatacggtgcacatacctccgacgccggacaatcagcccatggccaccaaagccgaagagcaatacgtgtcaaattctttatttactggtggtttcaacagtgtaacacgtgcacatcttatggacaaagtgatcgattcagatgtcacacaccctcagatggctggcgctaaaggctcttcgtgtgccatgcctgcttgcgacggaaatgtcatgaaagacgagagaggaaaggacgtgatgccatgtgaatgccggtttaagatctgtagggattgcttcatggacgcccagaaagagacaggcctttgtccaggatgcaaggaacaatacaaaatcggggacctagatgacgatacgcctgactattctagtggtgctctccccttaccagctccagggaaagatcaacgtgggaacaacaacaacatgtctatgatgaagaggaaccaaaacggtgaatttgatcacaacagatggctattcgagacgcaaggcacatatgggtacggtaatgcgtattggcctcaagacgaaatgtatggcgatgatatggatgaagggatgagaggcggcatggtggaaacagctgacaagccatggcggccactgagccgacgaatccctattccagccgccatcattagtccttacagattactaatcgtcattcgttttgtcgtgctatgtttttttctaacttggaggatccgaaatcctaacgaagacgcaatatggttatggctcatgtctataatatgcgagctttggtttggattttcatggattctagaccagatccctaagttgtgtccaataaaccggtccactgacctggaagttcttcgtgacaaatttgacatgccttctccctccaacccaacagggaggtcggatctcccaggtattgacctttttgtgtcaacggcagatccagagaaagagccgccccttgtcaccgccaacacgattctgtccatattggccgttgattatccggtggagaaggtgtcatgctatctttctgatgatggaggagctcttctatcctttgaagctatggcagaagctgctagctttgcggatctctgggtacctttttgtcgcaaacataacattgagcctcgaaatccagactcgtatttcagtttgaagatagatccaacaaagaataagagcagaattgattttgtcaaggacagaagaaagattaagagggagtatgatgaattcaaggttcgcatcaacgatggcacccactggccaggaacttgggcagcctctactcgagagcattccaaaggtgatcatgctgggattctccaggtgatgttgaaaccacctagcaacacggacactcgtttacccatgtttgtgtatgtgtcacgtgagaagcggcctggatatgatcacaacaagaaagctggagccatgaatgcacttgttcgtgcctctgctatcctctcaaatggaccttttatccttaatcttgattgtgatcattacatctataactgtaaggccgtacgagaagggatgtgttttatgatggacagaggtggtgaagacatttgctacattcagtttccgcaaagattcgaaggcatcgatccttctgatagatatgctaacaataacactgtattttttgacggtaatatgcgtgctctcgacggtgtccagggaccagtttatgttggaacaggtactatgtttaggcgctttgctctctatggttttgatccacccaaccctgacaagcttcttgagaagaaggaatcagaaacagaggctctaaccaccagtgactttgacccggaccttgatgtcacacaactccccaagcgctttgggaactccacactcctagctgagtcaattccaattgcagagttccaaggtcgtccattggcagaccacccggctgtcaagtacggtcgtcctcccggagcccttagagtccctcgtgacccacttgatgctaccactgtcgcagagtctgtttctgtaatctcttgttggtatgaggataaaacggagtggggagatagagttggatggatttatgggtcggtgacagaggacgtggtcacaggataccgcatgcataatcgtgggtggcgctcggtttactgcataactaagcgagattcttttcgaggctctgcacccattaatctcacggatcgtcttcaccaggtgttgcggtgggccactgggtctgttgagatcttcttctctagaaacaacgccattctcgcctccaaacgtctcaagttcctccaacgtctcgcatacctcaatgttgggatataccctttcacgtctctgtttctcatcctctattgttttcttccggcattctctcttttctctggacagttcatcgtgcggacgctcagtatctccttcttggtctaccttcttatgatcaccatttgtttgattggattggcggttttggaggtcaagtggtctggcattgggctggaagaatggtggagaaacgaacagtggtggctcatctcaggaacaagctctcacctttacgcagtggtccaaggagtcctcaaagtgattgcagggatcgagatctcctttaccttgacgaccaagtcagggggagatgacaatgaagacatatacgcggatttgtacatagtgaaatggtcgtcgctgatgataccgcctatagtgatagcaatggtgaacataatagcgattgtggtggcgttcatcaggacaatataccaagcggtgccacaatggagcaagctaatcggaggagcatttttcagcttctgggtgttggcgcatttgtatccatttgcaaaaggattgatgggacgaagaggcaaaactccaaccatagtttttgtgtgggcaggtctcattgccatcaccatctctctactgtggacggccataaacccaaacaccggacctgcagctgctgcagagggtgttggaggcggtggttttcaattcccgtaa

SEQ ID NO: 88910 - protein, 1050 aa, Arabidopsis thaliana
  peptide (1)..(1050): Ceres Seq. ID no. 12713761
MASTPPQTSKKVRNNSGSGQTVKFARRTSSGRYVSLSRDNIELSGELSGDYSNYTVHIPPTPDNQPMATKAEEQYVSNSLFTGGFNSVTRAHLMDKVIDSDVTHPQMAGAKGSSCAMPACDGNVMKDERGKDVMPCECRFKICRDCFMDAQKETGLCPGCKEQYKIGDLDDDTPDYSSGALPLPAPGKDQRGNNNNMSMMKRNQNGEFDHNRWLFETQGTYGYGNAYWPQDEMYGDDMDEGMRGGMVETADKPWRPLSRRIPIPAAIISPYRLLIVIRFVVLCFFLTWRIRNPNEDAIWLWLMSIICELWFGFSWILDQIPKLCPINRSTDLEVLRDKFDMPSPSNPTGRSDLPGIDLFVSTADPEKEPPLVTANTILSILAVDYPVEKVSCYLSDDGGALLSFEAMAEAASFADLWVPFCRKHNIEPRNPDSYFSLKIDPTKNKSRIDFVKDRRKIKREYDEFKVRINDGTHWPGTWAASTREHSKGDHAGILQVMLKPPSNTDTRLPMFVYVSREKRPGYDHNKKAGAMNALVRASAILSNGPFILNLDCDHYIYNCKAVREGMCFMMDRGGEDICYIQFPQRFEGIDPSDRYANNNTVFFDGNMRALDGVQGPVYVGTGTMFRRFALYGFDPPNPDKLLEKKESETEALTTSDFDPDLDVTQLPKRFGNSTLLAESIPIAEFQGRPLADHPAVKYGRPPGALRVPRDPLDATTVAESVSVISCWYEDKTEWGDRVGWIYGSVTEDVVTGYRMHNRGWRSVYCITKRDSFRGSAPINLTDRLHQVLRWATGSVEIFFSRNNAILASKRLKFLQRLAYLNVGIYPFTSLFLILYCFLPAFSLFSGQFIVRTLSISFLVYLLMITICLIGLAVLEVKWSGIGLEEWWRNEQWWLISGTSSHLYAVVQGVLKVIAGIEISFTLTTKSGGDDNEDIYADLYIVKWSSLMIPPIVIAMVNIIAIVVAFIRTIYQAVPQWSKLIGGAFFSFWVLAHLYPFAKGLMGRRGKTPTIVFVWAGLIAITISLLWTAINPNTGPAAAAEGVGGGGFQFP

SEQ ID NO: 88911 - protein, 984 aa, Arabidopsis thaliana
  peptide (1)..(984): Ceres Seq. ID no. 12713762
MATKAEEQYVSNSLFTGGFNSVTRAHLMDKVIDSDVTHPQMAGAKGSSCAMPACDGNVMKDERGKDVMPCECRFKICRDCFMDAQKETGLCPGCKEQYKIGDLDDDTPDYSSGALPLPAPGKDQRGNNNNMSMMKRNQNGEFDHNRWLFETQGTYGYGNAYWPQDEMYGDDMDEGMRGGMVETADKPWRPLSRRIPIPAAIISPYRLLIVIRFVVLCFFLTWRIRNPNEDAIWLWLMSIICELWFGFSWILDQIPKLCPINRSTDLEVLRDKFDMPSPSNPTGRSDLPGIDLFVSTADPEKEPPLVTANTILSILAVDYPVEKVSCYLSDDGGALLSFEAMAEAASFADLWVPFCRKHNIEPRNPDSYFSLKIDPTKNKSRIDFVKDRRKIKREYDEFKVRINDGTHWPGTWAASTREHSKGDHAGILQVMLKPPSNTDTRLPMFVYVSREKRPGYDHNKKAGAMNALVRASAILSNGPFILNLDCDHYIYNCKAVREGMCFMMDRGGEDICYIQFPQRFEGIDPSDRYANNNTVFFDGNMRALDGVQGPVYVGTGTMFRRFALYGFDPPNPDKLLEKKESETEALTTSDFDPDLDVTQLPKRFGNSTLLAESIPIAEFQGRPLADHPAVKYGRPPGALRVPRDPLDATTVAESVSVISCWYEDKTEWGDRVGWIYGSVTEDVVTGYRMHNRGWRSVYCITKRDSFRGSAPINLTDRLHQVLRWATGSVEIFFSRNNAILASKRLKFLQRLAYLNVGIYPFTSLFLILYCFLPAFSLFSGQFIVRTLSISFLVYLLMITICLIGLAVLEVKWSGIGLEEWWRNEQWWLISGTSSHLYAVVQGVLKVIAGIEISFTLTTKSGGDDNEDIYADLYIVKWSSLMIPPIVIAMVNIIAIVVAFIRTIYQAVPQWSKLIGGAFFSFWVLAHLYPFAKGLMGRRGKTPTIVFVWAGLIAITISLLWTAINPNTGPAAAAEGVGGGGFQFP

SEQ ID NO: 88912 - protein, 957 aa, Arabidopsis thaliana
  peptide (1)..(957): Ceres Seq. ID no. 12713763
MDKVIDSDVTHPQMAGAKGSSCAMPACDGNVMKDERGKDVMPCECRFKICRDCFMDAQKETGLCPGCKEQYKIGDLDDDTPDYSSGALPLPAPGKDQRGNNNNMSMMKRNQNGEFDHNRWLFETQGTYGYGNAYWPQDEMYGDDMDEGMRGGMVETADKPWRPLSRRIPIPAAIISPYRLLIVIRFVVLCFFLTWRIRNPNEDAIWLWLMSIICELWFGFSWILDQIPKLCPINRSTDLEVLRDKFDMPSPSNPTGRSDLPGIDLFVSTADPEKEPPLVTANTILSILAVDYPVEKVSCYLSDDGGALLSFEAMAEAASFADLWVPFCRKHNIEPRNPDSYFSLKIDPTKNKSRIDFVKDRRKIKREYDEFKVRINDGTHWPGTWAASTREHSKGDHAGILQVMLKPPSNTDTRLPMFVYVSREKRPGYDHNKKAGAMNALVRASAILSNGPFILNLDCDHYIYNCKAVREGMCFMMDRGGEDICYIQFPQRFEGIDPSDRYANNNTVFFDGNMRALDGVQGPVYVGTGTMFRRFALYGFDPPNPDKLLEKKESETEALTTSDFDPDLDVTQLPKRFGNSTLLAESIPIAEFQGRPLADHPAVKYGRPPGALRVPRDPLDATTVAESVSVISCWYEDKTEWGDRVGWIYGSVTEDVVTGYRMHNRGWRSVYCITKRDSFRGSAPINLTDRLHQVLRWATGSVEIFFSRNNAILASKRLKFLQRLAYLNVGIYPFTSLFLILYCFLPAFSLFSGQFIVRTLSISFLVYLLMITICLIGLAVLEVKWSGIGLEEWWRNEQWWLISGTSSHLYAVVQGVLKVIAGIEISFTLTTKSGGDDNEDIYADLYIVKWSSLMIPPIVIAMVNIIAIVVAFIRTIYQAVPQWSKLIGGAFFSFWVLAHLYPFAKGLMGRRGKTPTIVFVWAGLIAITISLLWTAINPNTGPAAAAEGVGGGGFQFP

SEQ ID NO: 88913 - DNA, 651 bp, Arabidopsis thaliana
  misc_feature (1)..(651): Ceres Seq. ID no. 12713807
  misc_feature (1)..(651): Ortholog of  Ceres SEQ ID NO 15226238 as cited in SEQ ID NO 68840
  misc_feature (1)..(651): Ortholog of  Ceres SEQ ID NO 12635175 as cited in SEQ ID NO 0
  misc_feature (1)..(651): Ortholog of  Ceres SEQ ID NO 14306100 as cited in SEQ ID NO 0
atggctaccggtttcttcgccggacacattgctgcggctctgccttccatctacaaagacggctccggctgcggagcttgcttccaggtcagatgcaagaacccgacgctttgcagcagcaaaggaaccacggtgattgtcacagacttgaacaagaccaaccaaaccgatcttgtccttagcagcagagcctttagggccatggctaagcctgttgttggcgccgacagagatcttctcaaacaaggcattgtcgatattgaatacaggagagttccttgcgattacggtaacaagaagatgaacgtgagagttgaagaatcaagcaaaaatccaaactacttggcgataaagctcttgtaccaaggaggccaaactgaagtggtagccatttacattgctcaggttggttcgtcacattggagttacatgaccagaagccacggagccgtgtgggttactgacaaagtacccaacggagctctgcagttcaggttcgtggtgaccgcaggctacgacggcaaaatggtctggtcgcagagggtccttccagctaactgggaagctggaaagtcctatgacgccggcgttcagatcacagacattgctcaggaaggttgtgatccatgcgacgatcacatctggaactga

SEQ ID NO: 88914 - protein, 216 aa, Arabidopsis thaliana; identical to SEQ ID NO: 24745
  peptide (1)..(216): Ceres Seq. ID no. 12713808

SEQ ID NO: 88915 - protein, 149 aa, Arabidopsis thaliana; identical to SEQ ID NO: 24746
  peptide (1)..(149): Ceres Seq. ID no. 12713809

SEQ ID NO: 88916 - protein, 116 aa, Arabidopsis thaliana
  peptide (1)..(116): Ceres Seq. ID no. 12713810
MNVRVEESSKNPNYLAIKLLYQGGQTEVVAIYIAQVGSSHWSYMTRSHGAVWVTDKVPNGALQFRFVVTAGYDGKMVWSQRVLPANWEAGKSYDAGVQITDIAQEGCDPCDDHIWN

SEQ ID NO: 88917 - DNA, 2814 bp, Arabidopsis thaliana
  misc_feature (1)..(2814): Ceres Seq. ID no. 12713826
  misc_feature (1)..(2814): Ortholog of  Ceres SEQ ID NO 13600595 as cited in SEQ ID NO 629
atgtggcccagtatcattgacaaagctagaattgggggacttaacaccatccaaacttatgttttctggaatgtccatgagcctgaacaaggcaagtatgatttcaaggggagatttgacttggtgaaattcatcaaactaatccacgagaaaggtctctatgtcactctcagactcggaccctttatccaagccgaatggaaccacggagggttgccgtactggctacgcgaggtcccagatgtttacttccgtacaaataatgaaccttttaaggaacatacagagagatatgtgaggaaaatacttgggatgatgaaggaagagaagctgttcgcttcacaaggaggtcccatcatcttgggacagatagagaatgagtacaacgcggttcagctagcctacaaggagaatggagagaagtatataaaatgggcagcaaatttggtggagtcaatgaatctgggaatcccctgggttatgtgcaaacaaaacgatgctcctggcaatctgattaatgcttgtaatggaaggcattgcggagatactttcccaggaccaaacagacacgataagccctccttatggaccgagaattggactactcagtttcgagtttttggggatcctccaacacagagaacagtcgaagatattgcattctcagtcgctagatacttctctaagaacggatcccatgtcaactactacatgtaccatggcggaacaaacttcggacgcacgtctgctcatttcgttaccactcgttactatgacgatgcgccacttgacgaatttggtttggagaaagctccaaaatacggtcacctaaaacatgtgcacagagcacttagattgtgcaagaaggcacttttttggggtcaacttcgcgcccagacacttggtcccgataccgaggttaggtactacgagcagccagggacaaaagtgtgtgcggctttcttatcgaacaataacacaagagatactaatacgattaaattcaaaggtcaagattacgttttaccgtctcgttctatcagcatcttaccggattgtaaaacagtcgtttacaatactgcacagattgtagcccaacacagttggagagattttgtcaagtcagagaagacaagcaaaggtctcaaatttgagatgtttagtgaaaatattccttccttacttgacggtgattctttgattccgggggagctttattacttaactaaagacaaaacagattatgcttggtataccacaagcgtaaagattgacgaagatgactttccagaccaaaaaggtctgaagactatactgagagtagcgagtcttggtcacgcactgatcgtttacgttaacggagagtacgcagggaaagcacatggacgccatgaaatgaagagtttcgagtttgcaaaaccagtgaactttaaaaccggagataatcgcatttcaattttgggtgtactaaccggattaccagacagtggatcatacatggaacacaggtttgctggtccacgtgctatttcaatcatcggtttaaagtcaggaacgcgagatttgaccgagaacaatgaatggggacacttggccggtttggaaggtgaaaagaaagaggtgtacacagaggaaggatctaagaaggtgaaatgggagaaagatggtaaacgtaagcctcttacgtggtacaagacctactttgagacaccagagggagtgaacgcggtcgcgattaggatgaaagcaatggggaagggattgatttgggttaatggaattggcgtagggagatattggatgtctttcctttctccactgggagagccaactcaaacggagtaccatataccgagatctttcatgaagggggagaagaagaagaacatgctggtgattctcgaggaagaaccaggggtgaagttagagtctattgatttcgtgttggtgaatagagacacaatctgtagtaatgtcggggaggattacccagtatcggtgaaatcgtggaagagagaagggccaaagatagtttcgagaagcaaagatatgaggctaaaggcagtgatgaggtgtccaccggagaaacaaatggtggaagtacaatttgcaagcttcggagatccgacaggaacttgtggtaacttcacaatggggaagtgctctgcatctaagtcaaaggaggtggtcgagaaggagtgtttgggtaggaattattgttccatagtagtagcgagggagacttttggggacaaagggtgtccggagatagtgaagacattggcagtgcaagtcaatcttgattccgattctgccctggtgtcggatctaggttttggccctttctctacggtagttgttaatgtccctctaatcggtggagcggctccgcctcagccccgcttcaatttaatgcctccgtcaaactatgtcgctggtttgggtcgtggggctgcagggtttactacccgctccgatattggtcctgctcgtgctaatggcgatggaaacgctgacgtgaatcacaagtttgatgattttgaagggcatgatgccggattgttcgctaatgccgagagtgatgaccaagacaaagaggctgatgctatttgggacgcaattgataggaggatggattcgaggaggaaagacagaagagaagcgaagctcaagcaagaaatcgagaattacagagcctccaaccctaaagtttctgggcagtttgtggatttgacgagaaagttgcatactttgtctgaggatgaatgggatagtattccagagattgggaattactcgcatagattgtattag

SEQ ID NO: 88918 - protein, 937 aa, Arabidopsis thaliana
  peptide (1)..(937): Ceres Seq. ID no. 12713827
MWPSIIDKARIGGLNTIQTYVFWNVHEPEQGKYDFKGRFDLVKFIKLIHEKGLYVTLRLGPFIQAEWNHGGLPYWLREVPDVYFRTNNEPFKEHTERYVRKILGMMKEEKLFASQGGPIILGQIENEYNAVQLAYKENGEKYIKWAANLVESMNLGIPWVMCKQNDAPGNLINACNGRHCGDTFPGPNRHDKPSLWTENWTTQFRVFGDPPTQRTVEDIAFSVARYFSKNGSHVNYYMYHGGTNFGRTSAHFVTTRYYDDAPLDEFGLEKAPKYGHLKHVHRALRLCKKALFWGQLRAQTLGPDTEVRYYEQPGTKVCAAFLSNNNTRDTNTIKFKGQDYVLPSRSISILPDCKTVVYNTAQIVAQHSWRDFVKSEKTSKGLKFEMFSENIPSLLDGDSLIPGELYYLTKDKTDYAWYTTSVKIDEDDFPDQKGLKTILRVASLGHALIVYVNGEYAGKAHGRHEMKSFEFAKPVNFKTGDNRISILGVLTGLPDSGSYMEHRFAGPRAISIIGLKSGTRDLTENNEWGHLAGLEGEKKEVYTEEGSKKVKWEKDGKRKPLTWYKTYFETPEGVNAVAIRMKAMGKGLIWVNGIGVGRYWMSFLSPLGEPTQTEYHIPRSFMKGEKKKNMLVILEEEPGVKLESIDFVLVNRDTICSNVGEDYPVSVKSWKREGPKIVSRSKDMRLKAVMRCPPEKQMVEVQFASFGDPTGTCGNFTMGKCSASKSKEVVEKECLGRNYCSIVVARETFGDKGCPEIVKTLAVQVNLDSDSALVSDLGFGPFSTVVVNVPLIGGAAPPQPRFNLMPPSNYVAGLGRGAAGFTTRSDIGPARANGDGNADVNHKFDDFEGHDAGLFANAESDDQDKEADAIWDAIDRRMDSRRKDRREAKLKQEIENYRASNPKVSGQFVDLTRKLHTLSEDEWDSIPEIGNYSHRLY

SEQ ID NO: 88919 - protein, 833 aa, Arabidopsis thaliana
  peptide (1)..(833): Ceres Seq. ID no. 12713828
MMKEEKLFASQGGPIILGQIENEYNAVQLAYKENGEKYIKWAANLVESMNLGIPWVMCKQNDAPGNLINACNGRHCGDTFPGPNRHDKPSLWTENWTTQFRVFGDPPTQRTVEDIAFSVARYFSKNGSHVNYYMYHGGTNFGRTSAHFVTTRYYDDAPLDEFGLEKAPKYGHLKHVHRALRLCKKALFWGQLRAQTLGPDTEVRYYEQPGTKVCAAFLSNNNTRDTNTIKFKGQDYVLPSRSISILPDCKTVVYNTAQIVAQHSWRDFVKSEKTSKGLKFEMFSENIPSLLDGDSLIPGELYYLTKDKTDYAWYTTSVKIDEDDFPDQKGLKTILRVASLGHALIVYVNGEYAGKAHGRHEMKSFEFAKPVNFKTGDNRISILGVLTGLPDSGSYMEHRFAGPRAISIIGLKSGTRDLTENNEWGHLAGLEGEKKEVYTEEGSKKVKWEKDGKRKPLTWYKTYFETPEGVNAVAIRMKAMGKGLIWVNGIGVGRYWMSFLSPLGEPTQTEYHIPRSFMKGEKKKNMLVILEEEPGVKLESIDFVLVNRDTICSNVGEDYPVSVKSWKREGPKIVSRSKDMRLKAVMRCPPEKQMVEVQFASFGDPTGTCGNFTMGKCSASKSKEVVEKECLGRNYCSIVVARETFGDKGCPEIVKTLAVQVNLDSDSALVSDLGFGPFSTVVVNVPLIGGAAPPQPRFNLMPPSNYVAGLGRGAAGFTTRSDIGPARANGDGNADVNHKFDDFEGHDAGLFANAESDDQDKEADAIWDAIDRRMDSRRKDRREAKLKQEIENYRASNPKVSGQFVDLTRKLHTLSEDEWDSIPEIGNYSHRLY

SEQ ID NO: 88920 - protein, 832 aa, Arabidopsis thaliana
  peptide (1)..(832): Ceres Seq. ID no. 12713829
MKEEKLFASQGGPIILGQIENEYNAVQLAYKENGEKYIKWAANLVESMNLGIPWVMCKQNDAPGNLINACNGRHCGDTFPGPNRHDKPSLWTENWTTQFRVFGDPPTQRTVEDIAFSVARYFSKNGSHVNYYMYHGGTNFGRTSAHFVTTRYYDDAPLDEFGLEKAPKYGHLKHVHRALRLCKKALFWGQLRAQTLGPDTEVRYYEQPGTKVCAAFLSNNNTRDTNTIKFKGQDYVLPSRSISILPDCKTVVYNTAQIVAQHSWRDFVKSEKTSKGLKFEMFSENIPSLLDGDSLIPGELYYLTKDKTDYAWYTTSVKIDEDDFPDQKGLKTILRVASLGHALIVYVNGEYAGKAHGRHEMKSFEFAKPVNFKTGDNRISILGVLTGLPDSGSYMEHRFAGPRAISIIGLKSGTRDLTENNEWGHLAGLEGEKKEVYTEEGSKKVKWEKDGKRKPLTWYKTYFETPEGVNAVAIRMKAMGKGLIWVNGIGVGRYWMSFLSPLGEPTQTEYHIPRSFMKGEKKKNMLVILEEEPGVKLESIDFVLVNRDTICSNVGEDYPVSVKSWKREGPKIVSRSKDMRLKAVMRCPPEKQMVEVQFASFGDPTGTCGNFTMGKCSASKSKEVVEKECLGRNYCSIVVARETFGDKGCPEIVKTLAVQVNLDSDSALVSDLGFGPFSTVVVNVPLIGGAAPPQPRFNLMPPSNYVAGLGRGAAGFTTRSDIGPARANGDGNADVNHKFDDFEGHDAGLFANAESDDQDKEADAIWDAIDRRMDSRRKDRREAKLKQEIENYRASNPKVSGQFVDLTRKLHTLSEDEWDSIPEIGNYSHRLY

SEQ ID NO: 88921 - DNA, 3813 bp, Arabidopsis thaliana
  misc_feature (1)..(3813): Ceres Seq. ID no. 12713844
  misc_feature (1)..(3813): Ortholog of  Ceres SEQ ID NO 15173069 as cited in SEQ ID NO 64846
atgcaacttgtggaggggggactagagaatgatgtagtttttgctctagttgttttctcgttgcagtatattcttgctagccatgagtattggaaatacaatcatggaaatatgcgttggaaagtgacactaaaagtcatcgagttgatgaaaacgtgtctcagattcagtaaattctccacaaagctgagggatgttctccttgatattttactgaacgatgcctctgttcacagtgctcttttcagaataatttgtacgactacgcaaaatttagagaacctttgttcgagccgttttattgaaccagcagagattgaaggatggcaacttgctatagtctctgttttggatgttttgaacgtcatactctcccaattttctgagagtacacattctggtcttcctgtgtttcatcaagccatgctgtcatctacaacaaaaccaatctcagttgttgcagctatcacatcactgatttcttacttccgcaatcctactatacaggtttgtgctgctcaagtgctgtcaaagttatttgccttggcagaatcatcacaactctatataataagcaatgcaggctttggtctagacaataaacagattacagatttaagaaattcggttacccagatcgtacttgatctatcgggacaaaatgagcatctagtcgttgccaccttgaaactactaactgttgcggcaagatttcagcctgctcttttagtggccatatttgattcagacgaagactcagattctagcaacgtaaaacagtcgcgcaaagatgcctcctcaattcctgactgggcttgtaaatctcgcttactgcacactatcctgcaatatgtagagagagcaaccgattttgtcgatagacacacagatatattactgggtttacttgatttcctgaaaaccctttggcaagaggctggccaatacgcaaatatgctggaaccgtttaaggcgtcaaaaaagttgtggcaggaattttccgacattatatcacaggcttctaagataaaagattcgacggttggaagtttaggcaaggaagaaatctcgaaattgttagtgaaatatcagtgtcaggcttctgttttggaaattatggcttgcaacatgtttttgtacaagaagttgctgtttgcggagtcacttaaaaagccatgtgtggagactaaaaagacagcaagtaatggagtatctccacccaaattaacttggacagctgattcagatcccaaggatatcttttcaaaatggtgtgacatatctgttttggatggcattatccatacttataaagcacaatcagtagagtttcaccacgctttacaccttttgcttaggtgcctccatatttcagaaatagttgctgccgttttacttattgtgcatttgattgtgaaactggaaacatctggcgcaggagcattgtctatggttttagttgagaagatcaaactcatatcagaaactctttgtgctcaacctgctttttctgagttgttggcgcaatattcaaaacttggttataggtttaccactgtttcacattttgcttacaatctattgggttctatttctagtggaggaaaggagttgatgcctatgattttcagcgatctatactgtcatcttcaaggaaaacttgagggtcgtgatatcccaactggtcctttcaaagagcttttccagtttctagtggagacgagcttttgggagaaatataaacagaaaactaataaggatgtaaatatggctttgggggactgtttgtttgacactcagcaaatacagactgaattaggtattgatatttgggatttctctgagtggaagacatctaaaacaacggcagaggaaatgttgaactacatgcagagagcaaactcgatggttttactctcaacttcgcagctctctgttttgcatgcattgatttccgtcttgatactttatgaggataattctcttgaagaaagtgcagctgcggaaaggaaaatcccttctcgagtcactcttttaagcattgataaagtatgccgaaaattttgcaccacggttgattcacttgcctctctctgggatgcacccaagattgtgtttgatattcttacagcacaggcagacttgctatcccgcctattgaaatccgcaaagaaaaatctttcattatctgtatgtgcacttgtcctgagaaatgttgggcctggcctcaagatccttggtagtttgaggcattcaaatgctatattgaagaagacgataaacctcctgcttgaggtgctgctcctggttgtgggttttggttcagacaactcaaactcgagtgggatgggacatatggtgctagccaaagattttgcagaaatatctgatgctacaattggattattaccccttctctgcaacttcatggggaatcccgagtacttgactctctgcctgaccacagtagacttgattctcaggaattttttgacgccagagacatggttccctattatacagagtcaactccgcttgcagcatgttattctacagcttcaggataagaaatccacaacatccgtttcagcaatactaaaatttttcttaactattgctcaagttcatggcggtgctcagatgcttctaaattctggatttttctcgactttaagagctttgttaatggagtttccggatggaatgtctactttggtatctgacaatgaaaagggctcgctgctagaaaagacagaaaaaactcagcatatctggggaatcggtttggctgtggttactgccatggttcattctctaggatctgtttctgcaggggctgatattgtggagagtgtcatatcttactttttcttggagaaaggttacatgatctcatactatctcgctgcaccagatttcccttctgatgatcgtgacaaagtgaggctacgaagtcaacggacgtggacttcccttgcttatctgagagtaaccgagcatactctccttctgctgtgtgcattagctagccattggagatcatgggttaaaattatgaaggatatggattctccattaagagaaatgacaatacatctcttggcctttatcagcaaaggcgctcaacggcttagagagtctcagagccacatatctcatctgttatgccctccagtagcgaaagaagagtttgattcctgcaaaagaccgtctttcatcaataccaaacacggatggttttcgctagcacctttagtttgtgttgggaaacccaagatcactgcagtatctatctcgactgctctagttgttaggggagacacaacagaacatcctgggtctgttcctcaatcgcaattttcagactcagttgcgatacagatatatagagtggcttctctattgttgaaatttctgtgcttacaagcagagggtgttgttacgagggcagaggaagtgggatatgtcgatattgctcatttccctgagcttccagagccggagattttacatggtctacaggaccaagcgacggcgatagtcgctgagctatgtgataattacaaatccaaagagattccagatgaagtaaagaagttgtgccttatgctgatccaaacgacagagatgtcgttatacttggaactctgtgtagttcaggtttgcaggatccatcctgtatttgggcgtgtggataacttctccaaagacttgaaaaaactagtgaaagctgctgaggtgcatacctacttagaaccgtccatagattcactgaagaaaatagctgcgtttctgtatcctggatcactttag

SEQ ID NO: 88922 - protein, 1270 aa, Arabidopsis thaliana
  peptide (1)..(1270): Ceres Seq. ID no. 12713845
MQLVEGGLENDVVFALVVFSLQYILASHEYWKYNHGNMRWKVTLKVIELMKTCLRFSKFSTKLRDVLLDILLNDASVHSALFRIICTTTQNLENLCSSRFIEPAEIEGWQLAIVSVLDVLNVILSQFSESTHSGLPVFHQAMLSSTTKPISVVAAITSLISYFRNPTIQVCAAQVLSKLFALAESSQLYIISNAGFGLDNKQITDLRNSVTQIVLDLSGQNEHLVVATLKLLTVAARFQPALLVAIFDSDEDSDSSNVKQSRKDASSIPDWACKSRLLHTILQYVERATDFVDRHTDILLGLLDFLKTLWQEAGQYANMLEPFKASKKLWQEFSDIISQASKIKDSTVGSLGKEEISKLLVKYQCQASVLEIMACNMFLYKKLLFAESLKKPCVETKKTASNGVSPPKLTWTADSDPKDIFSKWCDISVLDGIIHTYKAQSVEFHHALHLLLRCLHISEIVAAVLLIVHLIVKLETSGAGALSMVLVEKIKLISETLCAQPAFSELLAQYSKLGYRFTTVSHFAYNLLGSISSGGKELMPMIFSDLYCHLQGKLEGRDIPTGPFKELFQFLVETSFWEKYKQKTNKDVNMALGDCLFDTQQIQTELGIDIWDFSEWKTSKTTAEEMLNYMQRANSMVLLSTSQLSVLHALISVLILYEDNSLEESAAAERKIPSRVTLLSIDKVCRKFCTTVDSLASLWDAPKIVFDILTAQADLLSRLLKSAKKNLSLSVCALVLRNVGPGLKILGSLRHSNAILKKTINLLLEVLLLVVGFGSDNSNSSGMGHMVLAKDFAEISDATIGLLPLLCNFMGNPEYLTLCLTTVDLILRNFLTPETWFPIIQSQLRLQHVILQLQDKKSTTSVSAILKFFLTIAQVHGGAQMLLNSGFFSTLRALLMEFPDGMSTLVSDNEKGSLLEKTEKTQHIWGIGLAVVTAMVHSLGSVSAGADIVESVISYFFLEKGYMISYYLAAPDFPSDDRDKVRLRSQRTWTSLAYLRVTEHTLLLLCALASHWRSWVKIMKDMDSPLREMTIHLLAFISKGAQRLRESQSHISHLLCPPVAKEEFDSCKRPSFINTKHGWFSLAPLVCVGKPKITAVSISTALVVRGDTTEHPGSVPQSQFSDSVAIQIYRVASLLLKFLCLQAEGVVTRAEEVGYVDIAHFPELPEPEILHGLQDQATAIVAELCDNYKSKEIPDEVKKLCLMLIQTTEMSLYLELCVVQVCRIHPVFGRVDNFSKDLKKLVKAAEVHTYLEPSIDSLKKIAAFLYPGSL

SEQ ID NO: 88923 - protein, 1233 aa, Arabidopsis thaliana
  peptide (1)..(1233): Ceres Seq. ID no. 12713846
MRWKVTLKVIELMKTCLRFSKFSTKLRDVLLDILLNDASVHSALFRIICTTTQNLENLCSSRFIEPAEIEGWQLAIVSVLDVLNVILSQFSESTHSGLPVFHQAMLSSTTKPISVVAAITSLISYFRNPTIQVCAAQVLSKLFALAESSQLYIISNAGFGLDNKQITDLRNSVTQIVLDLSGQNEHLVVATLKLLTVAARFQPALLVAIFDSDEDSDSSNVKQSRKDASSIPDWACKSRLLHTILQYVERATDFVDRHTDILLGLLDFLKTLWQEAGQYANMLEPFKASKKLWQEFSDIISQASKIKDSTVGSLGKEEISKLLVKYQCQASVLEIMACNMFLYKKLLFAESLKKPCVETKKTASNGVSPPKLTWTADSDPKDIFSKWCDISVLDGIIHTYKAQSVEFHHALHLLLRCLHISEIVAAVLLIVHLIVKLETSGAGALSMVLVEKIKLISETLCAQPAFSELLAQYSKLGYRFTTVSHFAYNLLGSISSGGKELMPMIFSDLYCHLQGKLEGRDIPTGPFKELFQFLVETSFWEKYKQKTNKDVNMALGDCLFDTQQIQTELGIDIWDFSEWKTSKTTAEEMLNYMQRANSMVLLSTSQLSVLHALISVLILYEDNSLEESAAAERKIPSRVTLLSIDKVCRKFCTTVDSLASLWDAPKIVFDILTAQADLLSRLLKSAKKNLSLSVCALVLRNVGPGLKILGSLRHSNAILKKTINLLLEVLLLVVGFGSDNSNSSGMGHMVLAKDFAEISDATIGLLPLLCNFMGNPEYLTLCLTTVDLILRNFLTPETWFPIIQSQLRLQHVILQLQDKKSTTSVSAILKFFLTIAQVHGGAQMLLNSGFFSTLRALLMEFPDGMSTLVSDNEKGSLLEKTEKTQHIWGIGLAVVTAMVHSLGSVSAGADIVESVISYFFLEKGYMISYYLAAPDFPSDDRDKVRLRSQRTWTSLAYLRVTEHTLLLLCALASHWRSWVKIMKDMDSPLREMTIHLLAFISKGAQRLRESQSHISHLLCPPVAKEEFDSCKRPSFINTKHGWFSLAPLVCVGKPKITAVSISTALVVRGDTTEHPGSVPQSQFSDSVAIQIYRVASLLLKFLCLQAEGVVTRAEEVGYVDIAHFPELPEPEILHGLQDQATAIVAELCDNYKSKEIPDEVKKLCLMLIQTTEMSLYLELCVVQVCRIHPVFGRVDNFSKDLKKLVKAAEVHTYLEPSIDSLKKIAAFLYPGSL

SEQ ID NO: 88924 - protein, 1221 aa, Arabidopsis thaliana
  peptide (1)..(1221): Ceres Seq. ID no. 12713847
MKTCLRFSKFSTKLRDVLLDILLNDASVHSALFRIICTTTQNLENLCSSRFIEPAEIEGWQLAIVSVLDVLNVILSQFSESTHSGLPVFHQAMLSSTTKPISVVAAITSLISYFRNPTIQVCAAQVLSKLFALAESSQLYIISNAGFGLDNKQITDLRNSVTQIVLDLSGQNEHLVVATLKLLTVAARFQPALLVAIFDSDEDSDSSNVKQSRKDASSIPDWACKSRLLHTILQYVERATDFVDRHTDILLGLLDFLKTLWQEAGQYANMLEPFKASKKLWQEFSDIISQASKIKDSTVGSLGKEEISKLLVKYQCQASVLEIMACNMFLYKKLLFAESLKKPCVETKKTASNGVSPPKLTWTADSDPKDIFSKWCDISVLDGIIHTYKAQSVEFHHALHLLLRCLHISEIVAAVLLIVHLIVKLETSGAGALSMVLVEKIKLISETLCAQPAFSELLAQYSKLGYRFTTVSHFAYNLLGSISSGGKELMPMIFSDLYCHLQGKLEGRDIPTGPFKELFQFLVETSFWEKYKQKTNKDVNMALGDCLFDTQQIQTELGIDIWDFSEWKTSKTTAEEMLNYMQRANSMVLLSTSQLSVLHALISVLILYEDNSLEESAAAERKIPSRVTLLSIDKVCRKFCTTVDSLASLWDAPKIVFDILTAQADLLSRLLKSAKKNLSLSVCALVLRNVGPGLKILGSLRHSNAILKKTINLLLEVLLLVVGFGSDNSNSSGMGHMVLAKDFAEISDATIGLLPLLCNFMGNPEYLTLCLTTVDLILRNFLTPETWFPIIQSQLRLQHVILQLQDKKSTTSVSAILKFFLTIAQVHGGAQMLLNSGFFSTLRALLMEFPDGMSTLVSDNEKGSLLEKTEKTQHIWGIGLAVVTAMVHSLGSVSAGADIVESVISYFFLEKGYMISYYLAAPDFPSDDRDKVRLRSQRTWTSLAYLRVTEHTLLLLCALASHWRSWVKIMKDMDSPLREMTIHLLAFISKGAQRLRESQSHISHLLCPPVAKEEFDSCKRPSFINTKHGWFSLAPLVCVGKPKITAVSISTALVVRGDTTEHPGSVPQSQFSDSVAIQIYRVASLLLKFLCLQAEGVVTRAEEVGYVDIAHFPELPEPEILHGLQDQATAIVAELCDNYKSKEIPDEVKKLCLMLIQTTEMSLYLELCVVQVCRIHPVFGRVDNFSKDLKKLVKAAEVHTYLEPSIDSLKKIAAFLYPGSL

SEQ ID NO: 88925 - DNA, 930 bp, Arabidopsis thaliana
  misc_feature (1)..(930): Ceres Seq. ID no. 12713863
  misc_feature (1)..(930): Ortholog of  Ceres SEQ ID NO 14307265 as cited in SEQ ID NO 54298
atgttttacgatggatacgcttatcatggaactacctttgagcagacttaccggtgttatccctcatcctttattgataagcctcaaattgaaagtggtgacaagattataatgccaccatcagcccttgatcgtctagcttctttgcagattgattatccaatgctctttgaacttcgtaatgcttcaacagatagtttttctcactgcggagtccttgagttcatcgcagaagaaggcgtgatttacattccctactggatgatgcagaatttgctgttgcaagaaggagacatggtgagagttagaaatgtcactcttccaaagggaacctacgtgaaactgcaaccccacacaacagactttctcgatatactaacccgaaacttggagaccgcattgaggaactattcatgtctaacggtcggagatagcattatggtcccatacaacaataagaaatacttcatagacatagtggaggcaaagccttctaatggtattagcatcattgaaactgattgcgaggttgatttcgcacctccccttgattacaaggaacccgaacgacctgtagcacctgctccagccaaagctaaggaggttgatgtggctgaagcagaaccaaagtttaaccctttcacgggttcgggaagacgtttggatggacgacctttatcctatgaaccgcaacctggtgctgctaacagtaacggccaatcacatcctgttgcaagtagtagtagtagtgggtcagagaaggctacgcaacaaaatcgagggaaacttgtgttcggttcaaatgtagagcggtctactaaagagacaacaaaggttggagctgggaaagatagaaagcaagaggaagaggctgagaaggaagccaagttccaagcttttagtggtaaaaaatattcattgaggggttga

SEQ ID NO: 88926 - protein, 309 aa, Arabidopsis thaliana
  peptide (1)..(309): Ceres Seq. ID no. 12713864
MFYDGYAYHGTTFEQTYRCYPSSFIDKPQIESGDKIIMPPSALDRLASLQIDYPMLFELRNASTDSFSHCGVLEFIAEEGVIYIPYWMMQNLLLQEGDMVRVRNVTLPKGTYVKLQPHTTDFLDILTRNLETALRNYSCLTVGDSIMVPYNNKKYFIDIVEAKPSNGISIIETDCEVDFAPPLDYKEPERPVAPAPAKAKEVDVAEAEPKFNPFTGSGRRLDGRPLSYEPQPGAANSNGQSHPVASSSSSGSEKATQQNRGKLVFGSNVERSTKETTKVGAGKDRKQEEEAEKEAKFQAFSGKKYSLRG

SEQ ID NO: 88927 - protein, 272 aa, Arabidopsis thaliana
  peptide (1)..(272): Ceres Seq. ID no. 12713865
MPPSALDRLASLQIDYPMLFELRNASTDSFSHCGVLEFIAEEGVIYIPYWMMQNLLLQEGDMVRVRNVTLPKGTYVKLQPHTTDFLDILTRNLETALRNYSCLTVGDSIMVPYNNKKYFIDIVEAKPSNGISIIETDCEVDFAPPLDYKEPERPVAPAPAKAKEVDVAEAEPKFNPFTGSGRRLDGRPLSYEPQPGAANSNGQSHPVASSSSSGSEKATQQNRGKLVFGSNVERSTKETTKVGAGKDRKQEEEAEKEAKFQAFSGKKYSLRG

SEQ ID NO: 88928 - protein, 255 aa, Arabidopsis thaliana
  peptide (1)..(255): Ceres Seq. ID no. 12713866
MLFELRNASTDSFSHCGVLEFIAEEGVIYIPYWMMQNLLLQEGDMVRVRNVTLPKGTYVKLQPHTTDFLDILTRNLETALRNYSCLTVGDSIMVPYNNKKYFIDIVEAKPSNGISIIETDCEVDFAPPLDYKEPERPVAPAPAKAKEVDVAEAEPKFNPFTGSGRRLDGRPLSYEPQPGAANSNGQSHPVASSSSSGSEKATQQNRGKLVFGSNVERSTKETTKVGAGKDRKQEEEAEKEAKFQAFSGKKYSLRG

SEQ ID NO: 88929 - DNA, 2328 bp, Arabidopsis thaliana
  misc_feature (1)..(2328): Ceres Seq. ID no. 12713915
  misc_feature (1)..(2328): Ortholog of  Ceres SEQ ID NO 13518411 as cited in SEQ ID NO 55230
  misc_feature (1)..(2328): Ortholog of  Ceres SEQ ID NO 13598724 as cited in SEQ ID NO 61069
atggtggttctgaggaagacatccttgttggtcttcttcttattcctcctcttgttgttagagtcaacgtttgagcaacagacaagttctctgaatgagaaatcggcgcttctgctgttaaggtcttctcttgggttacgaagcagagattggcctgtaaaaggcaatccttgtctgaactggaacggcatcaaatgtgatcagaatggtagagtaactaagatcaacatttcagggttcagaaggacaaggattgggaatcaaaacccggaattctcagttggttctctcgtcaatctcacccgtctagcttccttcaacgcctcaaggttctatcttccaggtccaatcccggctttgtttggatcgagtctgttgactttagaggtgttggaccttagctcctgttcaatcacaggaaccatccctgaaagtttgactcggttatcacatctcaaagttcttgatctttcaaagaatgcgatcaatggggatattcctctgtctcttacctctcttcagaatctatcaatccttgatctttcctcaaactcggtgtttggttcgattcctgctaatattggggcactctcaaagctccagcgtctgaatctttcgcgtaacaccttgacttcttcaatacctccatcactcggagacctctctgttttaattgaccttgatctcagcttcaacggaatgtcaggttcggttccatcagatttgaaagggctaaggaacttgcagacattggtaattgcgggaaatcgcctttcaggatccctacctcctgatctgtttagtttgctgagtaaacttcagatcattgacttcagaggcagtggtttcataggcgctttaccgtccaggttatggtcgttaccggagctcaagtttctagatatttctggaaatcacttctctgacatgctgcctaataccactgtcagttttgattctactgtctccatgcttaacatatccgggaacatgttttacgttggagggtctatattgcttatgctcattctcatagtgttaccaataacagtgagtttctgtgtccgtcgaagaaacagatcatcaacaagtaatcatcctagaggaagacacaacggtgttggcccattacctcctgatgaaacacttccctcaagaggaggagtctctataaactttgggagtcttggatcatcatttacctatcagcagttgctcaatgccaccaaggagttcagtgattcaaacctgatcaagaaaggacaatctggggatcttttcaagggagttctagaaaacggagttcagatcgttgtgaaaagaatcagcttggaatctacaaagaacaacgaagcttatctaaccgagttggatttcttcagccggtttgcgcatccgagaataatcccattcgtagggaagagcttagagagcgcaactcataagttcttggtatacaagtacatgctgaatagggatttaccaagctcattgttctataaatccaattccctagttgacaacggattgagatctctcgattggatcaccagactgaaaatagcattgggagtagcagagggacttgcttacctgcaccatgattgctcaccatccgtcgtccacagggatattcaagcaagtagcattctcttggatgataagtttgaagttaggcttggaagctttagcaaagcttgtcatcaagaaaacaatggccgtccacggaaaatagcccgattgctcagactatcccagtcttctcaagaaagtgttcctgggtctgcagctacagcaacatgtgcctacgatgtgtactgcttcggcaagatacttctggagcttatcacagggaaactcggaatcagctcatgtaaagaaacccaattcaaaaaaatcctaaccgagatcatgccttacatttcatcgcaagagaaagaacccgtaatgaacattctagaccaatctcttctggtcgacgaagacctcttagaagaagtctgggcaatggcaatcgtcgctagatcttgtcttaacccaaaaccaacgagacggccgcttatgagacacatagtacaagccttggagaatccactgagagttgtgagagaagacagcagcgaatctgagagattccgtacgactggatcttcgagaggatcttcgagtagcggtcgaatatttggtagttggagacagagcgtgtctgatcctgtcgcagcgggaacaagtagccttctgtctcaggcggagggtttagcgactggatcgtcagcgagaggaagtagccgtggcgcgtcgagtcgacggagtatgaaagatgtatag

SEQ ID NO: 88930 - protein, 775 aa, Arabidopsis thaliana
  peptide (1)..(775): Ceres Seq. ID no. 12713916
MVVLRKTSLLVFFLFLLLLLESTFEQQTSSLNEKSALLLLRSSLGLRSRDWPVKGNPCLNWNGIKCDQNGRVTKINISGFRRTRIGNQNPEFSVGSLVNLTRLASFNASRFYLPGPIPALFGSSLLTLEVLDLSSCSITGTIPESLTRLSHLKVLDLSKNAINGDIPLSLTSLQNLSILDLSSNSVFGSIPANIGALSKLQRLNLSRNTLTSSIPPSLGDLSVLIDLDLSFNGMSGSVPSDLKGLRNLQTLVIAGNRLSGSLPPDLFSLLSKLQIIDFRGSGFIGALPSRLWSLPELKFLDISGNHFSDMLPNTTVSFDSTVSMLNISGNMFYVGGSILLMLILIVLPITVSFCVRRRNRSSTSNHPRGRHNGVGPLPPDETLPSRGGVSINFGSLGSSFTYQQLLNATKEFSDSNLIKKGQSGDLFKGVLENGVQIVVKRISLESTKNNEAYLTELDFFSRFAHPRIIPFVGKSLESATHKFLVYKYMLNRDLPSSLFYKSNSLVDNGLRSLDWITRLKIALGVAEGLAYLHHDCSPSVVHRDIQASSILLDDKFEVRLGSFSKACHQENNGRPRKIARLLRLSQSSQESVPGSAATATCAYDVYCFGKILLELITGKLGISSCKETQFKKILTEIMPYISSQEKEPVMNILDQSLLVDEDLLEEVWAMAIVARSCLNPKPTRRPLMRHIVQALENPLRVVREDSSESERFRTTGSSRGSSSSGRIFGSWRQSVSDPVAAGTSSLLSQAEGLATGSSARGSSRGASSRRSMKDV

SEQ ID NO: 88931 - protein, 542 aa, Arabidopsis thaliana
  peptide (1)..(542): Ceres Seq. ID no. 12713917
MSGSVPSDLKGLRNLQTLVIAGNRLSGSLPPDLFSLLSKLQIIDFRGSGFIGALPSRLWSLPELKFLDISGNHFSDMLPNTTVSFDSTVSMLNISGNMFYVGGSILLMLILIVLPITVSFCVRRRNRSSTSNHPRGRHNGVGPLPPDETLPSRGGVSINFGSLGSSFTYQQLLNATKEFSDSNLIKKGQSGDLFKGVLENGVQIVVKRISLESTKNNEAYLTELDFFSRFAHPRIIPFVGKSLESATHKFLVYKYMLNRDLPSSLFYKSNSLVDNGLRSLDWITRLKIALGVAEGLAYLHHDCSPSVVHRDIQASSILLDDKFEVRLGSFSKACHQENNGRPRKIARLLRLSQSSQESVPGSAATATCAYDVYCFGKILLELITGKLGISSCKETQFKKILTEIMPYISSQEKEPVMNILDQSLLVDEDLLEEVWAMAIVARSCLNPKPTRRPLMRHIVQALENPLRVVREDSSESERFRTTGSSRGSSSSGRIFGSWRQSVSDPVAAGTSSLLSQAEGLATGSSARGSSRGASSRRSMKDV

SEQ ID NO: 88932 - protein, 466 aa, Arabidopsis thaliana
  peptide (1)..(466): Ceres Seq. ID no. 12713918
MLPNTTVSFDSTVSMLNISGNMFYVGGSILLMLILIVLPITVSFCVRRRNRSSTSNHPRGRHNGVGPLPPDETLPSRGGVSINFGSLGSSFTYQQLLNATKEFSDSNLIKKGQSGDLFKGVLENGVQIVVKRISLESTKNNEAYLTELDFFSRFAHPRIIPFVGKSLESATHKFLVYKYMLNRDLPSSLFYKSNSLVDNGLRSLDWITRLKIALGVAEGLAYLHHDCSPSVVHRDIQASSILLDDKFEVRLGSFSKACHQENNGRPRKIARLLRLSQSSQESVPGSAATATCAYDVYCFGKILLELITGKLGISSCKETQFKKILTEIMPYISSQEKEPVMNILDQSLLVDEDLLEEVWAMAIVARSCLNPKPTRRPLMRHIVQALENPLRVVREDSSESERFRTTGSSRGSSSSGRIFGSWRQSVSDPVAAGTSSLLSQAEGLATGSSARGSSRGASSRRSMKDV

SEQ ID NO: 88933 - DNA, 1724 bp, Arabidopsis thaliana
  misc_feature (1)..(1724): Ceres Seq. ID no. 12713945
  misc_feature (1)..(1724): Ortholog of  Ceres SEQ ID NO 14308003 as cited in SEQ ID NO 65919
atggctttggtcagcttacttgaaatctccattgctttcttttgtttccttatctttcgaattttcctgatcagcaagaaaccacaccgttcatttctcacaaactggccgctcctgggcatgcttccgggtttacttaccgtgctccctcgagtttacgactttataaccgaggttcttgaggacggcaacttaaactatcttttcataggcccttttttagggggcatcgacatgttgttcaccgttgatcctgctaatatccatcacatcatgagctcaaactttgcgaattacccgaaaggaaccgaattcaagaagttatttgacgttttgggagatgggattttcaacgcggattcagatttgtggaaggatctaaggaaatcttctcaaagcatgatgaatcatcccgattttcaaaggttttcattagctacaagcttgagtaagctagagaaagggcttgtgccacttcttgatcatgttgctaaagagaaactcgtcgtggacttacaagatgttttccaaagattcacgtttgacactacctttgttttagcaaccgggtatgatccaggttgtctctcggtggaaatgccggaaatcgagtttgcaagagccttagacgatgcagaggaagctattttctacagacatttcaagccggaggtggtgtggaagatgcaaagattgattggggttggagctgagttgaagctgaaaagagctcacgcgattttcgatcgtgtttgctctaagtgcatagcttctaagagagatgagatcagccaagggattgattcttcttcttctaaagatttgttgatgtcttctataaatgttgacacgactaagtacaagttgttgaatccaagtgatgacagattccttagagacacaatcttgtccttcatgttagctggtagagacacaacaggctcagcgctcacttggttcttctggcttctatgcaataaccaagaagccatgaccaagattcgtcaagaaatcaacacaaatctatttccaagaaacaagaccgacgacggttctgtttcttatgattctgattcattcaatccccaagaggtaaagaagttggtgtatttacacggcgcggtttgtgaagccctcaggctctatccacctgttccctttaaccacaagtctcctgctaaacccgacgtgcttccaagcggccacaaagtcaaggccaattcgaggattttgttctgtctttactcattagggagaatgaaatcggtttggggagaagatgcaatggaatttaaaccggagagatggatttctgagagtggaagatcggtacatgagccatcttataagttcctatcgtttaacgccggtccaagaacttgtttggggaaagaagtggctatgacgcaaatgaagacagtggctgtgaaaatcatacaaaattatgacattaatgtcgttgaagggcacaagatcaagccagctccttcggttattctccacatgaagcatggtcttaaagtcactgtctctaaaagatgtttgtcttgaatgttttaactagaatgtagaaactgtggcagttgacgaagatgatttctatgatatgaagacatctcaaatcatgcatcctgaaatataatgttattgttaaacataatttctaaaatttaagtaaaatatataaatgttggtaagaaaattaataatttcctttttatttt

SEQ ID NO: 88934 - protein, 516 aa, Arabidopsis thaliana
  peptide (1)..(516): Ceres Seq. ID no. 12713946
MALVSLLEISIAFFCFLIFRIFLISKKPHRSFLTNWPLLGMLPGLLTVLPRVYDFITEVLEDGNLNYLFIGPFLGGIDMLFTVDPANIHHIMSSNFANYPKGTEFKKLFDVLGDGIFNADSDLWKDLRKSSQSMMNHPDFQRFSLATSLSKLEKGLVPLLDHVAKEKLVVDLQDVFQRFTFDTTFVLATGYDPGCLSVEMPEIEFARALDDAEEAIFYRHFKPEVVWKMQRLIGVGAELKLKRAHAIFDRVCSKCIASKRDEISQGIDSSSSKDLLMSSINVDTTKYKLLNPSDDRFLRDTILSFMLAGRDTTGSALTWFFWLLCNNQEAMTKIRQEINTNLFPRNKTDDGSVSYDSDSFNPQEVKKLVYLHGAVCEALRLYPPVPFNHKSPAKPDVLPSGHKVKANSRILFCLYSLGRMKSVWGEDAMEFKPERWISESGRSVHEPSYKFLSFNAGPRTCLGKEVAMTQMKTVAVKIIQNYDINVVEGHKIKPAPSVILHMKHGLKVTVSKRCLS

SEQ ID NO: 88935 - protein, 476 aa, Arabidopsis thaliana
  peptide (1)..(476): Ceres Seq. ID no. 12713947
MLPGLLTVLPRVYDFITEVLEDGNLNYLFIGPFLGGIDMLFTVDPANIHHIMSSNFANYPKGTEFKKLFDVLGDGIFNADSDLWKDLRKSSQSMMNHPDFQRFSLATSLSKLEKGLVPLLDHVAKEKLVVDLQDVFQRFTFDTTFVLATGYDPGCLSVEMPEIEFARALDDAEEAIFYRHFKPEVVWKMQRLIGVGAELKLKRAHAIFDRVCSKCIASKRDEISQGIDSSSSKDLLMSSINVDTTKYKLLNPSDDRFLRDTILSFMLAGRDTTGSALTWFFWLLCNNQEAMTKIRQEINTNLFPRNKTDDGSVSYDSDSFNPQEVKKLVYLHGAVCEALRLYPPVPFNHKSPAKPDVLPSGHKVKANSRILFCLYSLGRMKSVWGEDAMEFKPERWISESGRSVHEPSYKFLSFNAGPRTCLGKEVAMTQMKTVAVKIIQNYDINVVEGHKIKPAPSVILHMKHGLKVTVSKRCLS

SEQ ID NO: 88936 - protein, 438 aa, Arabidopsis thaliana
  peptide (1)..(438): Ceres Seq. ID no. 12713948
MLFTVDPANIHHIMSSNFANYPKGTEFKKLFDVLGDGIFNADSDLWKDLRKSSQSMMNHPDFQRFSLATSLSKLEKGLVPLLDHVAKEKLVVDLQDVFQRFTFDTTFVLATGYDPGCLSVEMPEIEFARALDDAEEAIFYRHFKPEVVWKMQRLIGVGAELKLKRAHAIFDRVCSKCIASKRDEISQGIDSSSSKDLLMSSINVDTTKYKLLNPSDDRFLRDTILSFMLAGRDTTGSALTWFFWLLCNNQEAMTKIRQEINTNLFPRNKTDDGSVSYDSDSFNPQEVKKLVYLHGAVCEALRLYPPVPFNHKSPAKPDVLPSGHKVKANSRILFCLYSLGRMKSVWGEDAMEFKPERWISESGRSVHEPSYKFLSFNAGPRTCLGKEVAMTQMKTVAVKIIQNYDINVVEGHKIKPAPSVILHMKHGLKVTVSKRCLS

SEQ ID NO: 88937 - DNA, 1437 bp, Arabidopsis thaliana
  misc_feature (1)..(1437): Ceres Seq. ID no. 12714053
  misc_feature (1)..(1437): Ortholog of  Ceres SEQ ID NO 15171476 as cited in SEQ ID NO 55569
atgggcaaactcttggttgtaatgttaattgggatgttcttggctttcgaaagcttggaagctcttgactatggagatgcactgaacaaatcaattttgttctttgaaggccaaagatctggtaaactcccgactaatcaaagggttaaatggcgagctgattctggcctgtctgacggtgcatcagctaatgtgaatttgattggaggatattacgatgctggtgacaatgtaaaatttgtgtggccaatgtcatttaccacaaccttgttgagttgggctgcacttgaataccagaatgagattactttcgttaaccagcttggttatctccggtctactatcaaatggggaactaattttatcctccgtgctcatacgtcgaccaacatgctatatacacaggtaggagatggaaattcagatcatagttgttgggagagaccagaagatatggacacacctagaactctctatagtatctcttcctcttcccccggttccgaagccgcaggtgaagccgcagccgctcttgccgcggcctcacttgttttcaaactggttgattctacatattcatccaaattactaaacaatgctaaatccctatttgaatttgctgataagtacagaggttcttaccaagcttcttgccccttctactgctcacactcaggctaccaggatgaacttttgtgggctgcggcttggttatacaaagcaacaggggaaaagagttacttaaattatgttataagcaacaaagattggagcaaagccatcaatgaatttagttgggacaacaaattcgccggcgttcaagctttactcgcatcggagttttacaacggggcaaatgacttggaaaaatttaagaccgatgttgaatcattcgtctgtgcattgatgccaggaagtagctctcaacaaattaagccaactcctggtggcattttgtttattagagacagtagcaacttacagtatgtaacaacggctacaactatattattctattactcaaaaactctaaccaaagccggggttggttcaatccagtgtgggtcgactcagttcaccgtatctcaaattcgaaattttgccaagtcacaggttgattacattcttggaaataatccattgaaaatgtcttacatggttggatttggaacaaagtatcctacacaacctcatcatagaggctcgtcattaccgtcaatccaatctaaaccagagaaaatcgactgtaatggaggattttcatactacaattttgatacaccaaacccgaatgtgcataccggcgcaattgtgggcggaccaaattcatccgaccagtatagcgacaaaagaacagattattctcatgcagagcccacaacttacatcaatgccgcctttattgggtcagtcgctgctctgatcagttcttcctaa

SEQ ID NO: 88938 - protein, 478 aa, Arabidopsis thaliana
  peptide (1)..(478): Ceres Seq. ID no. 12714054
MGKLLVVMLIGMFLAFESLEALDYGDALNKSILFFEGQRSGKLPTNQRVKWRADSGLSDGASANVNLIGGYYDAGDNVKFVWPMSFTTTLLSWAALEYQNEITFVNQLGYLRSTIKWGTNFILRAHTSTNMLYTQVGDGNSDHSCWERPEDMDTPRTLYSISSSSPGSEAAGEAAAALAAASLVFKLVDSTYSSKLLNNAKSLFEFADKYRGSYQASCPFYCSHSGYQDELLWAAAWLYKATGEKSYLNYVISNKDWSKAINEFSWDNKFAGVQALLASEFYNGANDLEKFKTDVESFVCALMPGSSSQQIKPTPGGILFIRDSSNLQYVTTATTILFYYSKTLTKAGVGSIQCGSTQFTVSQIRNFAKSQVDYILGNNPLKMSYMVGFGTKYPTQPHHRGSSLPSIQSKPEKIDCNGGFSYYNFDTPNPNVHTGAIVGGPNSSDQYSDKRTDYSHAEPTTYINAAFIGSVAALISSS

SEQ ID NO: 88939 - protein, 471 aa, Arabidopsis thaliana
  peptide (1)..(471): Ceres Seq. ID no. 12714055
MLIGMFLAFESLEALDYGDALNKSILFFEGQRSGKLPTNQRVKWRADSGLSDGASANVNLIGGYYDAGDNVKFVWPMSFTTTLLSWAALEYQNEITFVNQLGYLRSTIKWGTNFILRAHTSTNMLYTQVGDGNSDHSCWERPEDMDTPRTLYSISSSSPGSEAAGEAAAALAAASLVFKLVDSTYSSKLLNNAKSLFEFADKYRGSYQASCPFYCSHSGYQDELLWAAAWLYKATGEKSYLNYVISNKDWSKAINEFSWDNKFAGVQALLASEFYNGANDLEKFKTDVESFVCALMPGSSSQQIKPTPGGILFIRDSSNLQYVTTATTILFYYSKTLTKAGVGSIQCGSTQFTVSQIRNFAKSQVDYILGNNPLKMSYMVGFGTKYPTQPHHRGSSLPSIQSKPEKIDCNGGFSYYNFDTPNPNVHTGAIVGGPNSSDQYSDKRTDYSHAEPTTYINAAFIGSVAALISSS

SEQ ID NO: 88940 - protein, 467 aa, Arabidopsis thaliana
  peptide (1)..(467): Ceres Seq. ID no. 12714056
MFLAFESLEALDYGDALNKSILFFEGQRSGKLPTNQRVKWRADSGLSDGASANVNLIGGYYDAGDNVKFVWPMSFTTTLLSWAALEYQNEITFVNQLGYLRSTIKWGTNFILRAHTSTNMLYTQVGDGNSDHSCWERPEDMDTPRTLYSISSSSPGSEAAGEAAAALAAASLVFKLVDSTYSSKLLNNAKSLFEFADKYRGSYQASCPFYCSHSGYQDELLWAAAWLYKATGEKSYLNYVISNKDWSKAINEFSWDNKFAGVQALLASEFYNGANDLEKFKTDVESFVCALMPGSSSQQIKPTPGGILFIRDSSNLQYVTTATTILFYYSKTLTKAGVGSIQCGSTQFTVSQIRNFAKSQVDYILGNNPLKMSYMVGFGTKYPTQPHHRGSSLPSIQSKPEKIDCNGGFSYYNFDTPNPNVHTGAIVGGPNSSDQYSDKRTDYSHAEPTTYINAAFIGSVAALISSS

SEQ ID NO: 88941 - DNA, 1361 bp, Arabidopsis thaliana
  misc_feature (1)..(1361): Ceres Seq. ID no. 12714097
  misc_feature (1)..(1361): Ortholog of  Ceres SEQ ID NO 13599613 as cited in SEQ ID NO 0
  misc_feature (1)..(1361): Ortholog of  Ceres SEQ ID NO 15179570 as cited in SEQ ID NO 0
aaacaattaacaaactttggctgctttgtcttaaatctgaatcgtccttattcatcctaatcaatgacaccgttttacttcttcttcttcttctctctatcatcaagtcaagatttttttcaattaatggaccttaataaattttgagaattttcttgagtttccattaaagtccacttctttgggctaaattcagggttttgtgaagaatgggtaacagagtaatctgcatgaagaagaaagatgttgttatcagaagtggaggagatgggtccagaagcaagagagtgaatcgttcacagaggaagttgcttgctgatgaagagaatttgcatcgaagagctttgtctatggctattcatcaagctcaagtttctcagagatttgatggatccatgtctagacgaatcgggtctactagctctagaagaggaacactctctgactcattttctaataacaagcaggttcctgagtttttggagagcttgaaggttaagaaattcgttttggtgcatggtgaagggtttggggcatggtgttggtacaaaactattgcgtcattggaggagtctggactgtctcctgttacggttgacctcgctggatctggatttaatatgacagacgcaaatagtgtttccaccttagaagaatattcaaaaccgttgatcgagctcattcaaaatcttcctgctgaagaaaaggtgattctggtaggtcacagtactggaggggcatgtgtttcatatgcgttagagcggtttccagagaaaatctcaaaagctatattcatttgtgcaactatggttactgatggacaaagacccttcgatgtcttcgctgatgagcttggttctgcagaacggttcatgaaagagtcacagttcttgatctatggaaacggcaaggacaaccccgcgacagggttcatgttcgagaaacaacacatgaaaggcttgtacttcaatcagtcaccaaataaggacattgcattgtcaatgatctcgatgcggcctgtaccattaggtcccatgatggagaagttgtcacttagtgcagaaagatatgggaaaggtcggagattctatgtccagacgctcgatgacttggctctttcaccggacgttcaagagaaactggttcgagagaatagtcccgaagcagtttttaagatcaaaggaagtgatcattgcccattcttctctaaacctcagtctcttcacaagatccttcttgaaatagcacagattccttaaaaatagaaaatcttgaattcagaatgtataatatactttcagtttttttcctaaacatttgcatattcttatttacgtcaatatacaaacaagattcttgtt

SEQ ID NO: 88942 - protein, 349 aa, Arabidopsis thaliana
  peptide (1)..(349): Ceres Seq. ID no. 12714098
MGNRVICMKKKDVVIRSGGDGSRSKRVNRSQRKLLADEENLHRRALSMAIHQAQVSQRFDGSMSRRIGSTSSRRGTLSDSFSNNKQVPEFLESLKVKKFVLVHGEGFGAWCWYKTIASLEESGLSPVTVDLAGSGFNMTDANSVSTLEEYSKPLIELIQNLPAEEKVILVGHSTGGACVSYALERFPEKISKAIFICATMVTDGQRPFDVFADELGSAERFMKESQFLIYGNGKDNPATGFMFEKQHMKGLYFNQSPNKDIALSMISMRPVPLGPMMEKLSLSAERYGKGRRFYVQTLDDLALSPDVQEKLVRENSPEAVFKIKGSDHCPFFSKPQSLHKILLEIAQIP

SEQ ID NO: 88943 - protein, 342 aa, Arabidopsis thaliana
  peptide (1)..(342): Ceres Seq. ID no. 12714099
MKKKDVVIRSGGDGSRSKRVNRSQRKLLADEENLHRRALSMAIHQAQVSQRFDGSMSRRIGSTSSRRGTLSDSFSNNKQVPEFLESLKVKKFVLVHGEGFGAWCWYKTIASLEESGLSPVTVDLAGSGFNMTDANSVSTLEEYSKPLIELIQNLPAEEKVILVGHSTGGACVSYALERFPEKISKAIFICATMVTDGQRPFDVFADELGSAERFMKESQFLIYGNGKDNPATGFMFEKQHMKGLYFNQSPNKDIALSMISMRPVPLGPMMEKLSLSAERYGKGRRFYVQTLDDLALSPDVQEKLVRENSPEAVFKIKGSDHCPFFSKPQSLHKILLEIAQIP

SEQ ID NO: 88944 - protein, 302 aa, Arabidopsis thaliana
  peptide (1)..(302): Ceres Seq. ID no. 12714100
MAIHQAQVSQRFDGSMSRRIGSTSSRRGTLSDSFSNNKQVPEFLESLKVKKFVLVHGEGFGAWCWYKTIASLEESGLSPVTVDLAGSGFNMTDANSVSTLEEYSKPLIELIQNLPAEEKVILVGHSTGGACVSYALERFPEKISKAIFICATMVTDGQRPFDVFADELGSAERFMKESQFLIYGNGKDNPATGFMFEKQHMKGLYFNQSPNKDIALSMISMRPVPLGPMMEKLSLSAERYGKGRRFYVQTLDDLALSPDVQEKLVRENSPEAVFKIKGSDHCPFFSKPQSLHKILLEIAQIP

SEQ ID NO: 88945 - DNA, 876 bp, Arabidopsis thaliana
  misc_feature (1)..(876): Ceres Seq. ID no. 12714246
  misc_feature (1)..(876): Ortholog of  Ceres SEQ ID NO 13581701 as cited in SEQ ID NO 51151
  misc_feature (1)..(876): Ortholog of  Ceres SEQ ID NO 14315491 as cited in SEQ ID NO 57026
atgggttgcgtctcatctaacctcctaaaccacgacgaagacttctctcaaatcggcggtggaagctccgccttcggtcaccacatcgtcaaactaacctccaccacttatggtcttctcacactcgatcctcctcctcctccttctcctcctatgacgccgccggagaaattcacagtcgatacaaaatctaagtcaatatggtctgagccaagggtgataaagtcggaaccggagattattaactcttgggagttaatgtctggtctcgacggagagagtttccgattcacagaggattcggattctaattcgagaagccctagaaaatcgtttaaaccgttagatttgaaattggatgagaaatttgagaggatttgtccaccaggaggagagaatcgtgtggtgatgtacacgacgtcgttgcgaggtgttcgtcaaacgtttgaggcgtgtaacgctgtgagagcggcggtggagagttttggtgttgtggtttgcgagagagatgtgtcgatggatagaaggtttagagaagagcttgtgagtctaatggcgaagagagttggggatgagggagtggctgcattgccgcctcgggtttttgtgaagggaaggtacattggtggaggagaggaagtgttgagactagttgaggaaggttctttcggagagctgatcagcgggattccgagaaagaaagcgggaggatgcgagagcggcgcgtgtgatggttgcggcggtttgtttttcttgccgtgttttcggtgtaatggaagctgtaagatggtgaaaggatggggtagtgcttcggtggttgtgagatgtaatgagtgtaatgagaatggtcttgttccatgtcctatttgcagttga

SEQ ID NO: 88946 - protein, 291 aa, Arabidopsis thaliana
  peptide (1)..(291): Ceres Seq. ID no. 12714247
MGCVSSNLLNHDEDFSQIGGGSSAFGHHIVKLTSTTYGLLTLDPPPPPSPPMTPPEKFTVDTKSKSIWSEPRVIKSEPEIINSWELMSGLDGESFRFTEDSDSNSRSPRKSFKPLDLKLDEKFERICPPGGENRVVMYTTSLRGVRQTFEACNAVRAAVESFGVVVCERDVSMDRRFREELVSLMAKRVGDEGVAALPPRVFVKGRYIGGGEEVLRLVEEGSFGELISGIPRKKAGGCESGACDGCGGLFFLPCFRCNGSCKMVKGWGSASVVVRCNECNENGLVPCPICS

SEQ ID NO: 88947 - protein, 240 aa, Arabidopsis thaliana
  peptide (1)..(240): Ceres Seq. ID no. 12714248
MTPPEKFTVDTKSKSIWSEPRVIKSEPEIINSWELMSGLDGESFRFTEDSDSNSRSPRKSFKPLDLKLDEKFERICPPGGENRVVMYTTSLRGVRQTFEACNAVRAAVESFGVVVCERDVSMDRRFREELVSLMAKRVGDEGVAALPPRVFVKGRYIGGGEEVLRLVEEGSFGELISGIPRKKAGGCESGACDGCGGLFFLPCFRCNGSCKMVKGWGSASVVVRCNECNENGLVPCPICS

SEQ ID NO: 88948 - protein, 205 aa, Arabidopsis thaliana
  peptide (1)..(205): Ceres Seq. ID no. 12714249
MSGLDGESFRFTEDSDSNSRSPRKSFKPLDLKLDEKFERICPPGGENRVVMYTTSLRGVRQTFEACNAVRAAVESFGVVVCERDVSMDRRFREELVSLMAKRVGDEGVAALPPRVFVKGRYIGGGEEVLRLVEEGSFGELISGIPRKKAGGCESGACDGCGGLFFLPCFRCNGSCKMVKGWGSASVVVRCNECNENGLVPCPICS

SEQ ID NO: 88949 - DNA, 522 bp, Arabidopsis thaliana
  misc_feature (1)..(522): Ceres Seq. ID no. 12714298
  misc_feature (1)..(522): Ortholog of  Ceres SEQ ID NO 13623325 as cited in SEQ ID NO 357
  misc_feature (1)..(522): Ortholog of  Ceres SEQ ID NO 13635680 as cited in SEQ ID NO 578
atggaggtggtggcggaaatggaagaggcgctagtggttacgagaaacatagcagaggttacagatctggtggaggttgtggtggccgtgagggaggtggctaaggaggaggtgacgctggaagttacggaggaagcggagtggggtttggtagtcaacacgaatgtagttaaaaagaagaatggaaaagatagggtgtgcatcgacatcacgggcctaaataaggcatgccccaaggacagttttccacttccacttatacaccggctcgtggaatccaccgcggcgaatgagctactaacactcatagatgccttctcgggttataatcaaataatgatgaattctgaggatcaagaaaaaacttcattcatcacggatacaggtatttattgttataaggtaatgccttttggtttaaaaaatgcaggagcaacttaccaacgactagtgaacaagatgtttcacaaacaccttggcaaaacgatggaagtaaacatagacaatatgttggtgaaataa

SEQ ID NO: 88950 - protein, 173 aa, Arabidopsis thaliana
  peptide (1)..(173): Ceres Seq. ID no. 12714299
MEVVAEMEEALVVTRNIAEVTDLVEVVVAVREVAKEEVTLEVTEEAEWGLVVNTNVVKKKNGKDRVCIDITGLNKACPKDSFPLPLIHRLVESTAANELLTLIDAFSGYNQIMMNSEDQEKTSFITDTGIYCYKVMPFGLKNAGATYQRLVNKMFHKHLGKTMEVNIDNMLVK

SEQ ID NO: 88951 - protein, 167 aa, Arabidopsis thaliana
  peptide (1)..(167): Ceres Seq. ID no. 12714300
MEEALVVTRNIAEVTDLVEVVVAVREVAKEEVTLEVTEEAEWGLVVNTNVVKKKNGKDRVCIDITGLNKACPKDSFPLPLIHRLVESTAANELLTLIDAFSGYNQIMMNSEDQEKTSFITDTGIYCYKVMPFGLKNAGATYQRLVNKMFHKHLGKTMEVNIDNMLVK

SEQ ID NO: 88952 - DNA, 1287 bp, Arabidopsis thaliana
  misc_feature (1)..(1287): Ceres Seq. ID no. 12714383
  misc_feature (1)..(1287): Ortholog of  Ceres SEQ ID NO 13659759 as cited in SEQ ID NO 67663
atgacgaaaaaggcggtgcttattgggatcaattacccaggaaccaaggcggagttacggggatgcgtcaacgatgttcgtcgtatgtacaaatgtctcgttgaacggtacggcttctccgaggagaacatcaccgttctcatcgacaccgatgaatcctctactcagcctactggcaagaacatccgccgcgcgcttgctgatctcgtcgaatctgccgattccggcgacgttcttgtcgttcattacagtggacacggtacgaggttgccggctgagactggtgaagacgatgacactggtttcgacgagtgtattgttccttgcgacatgaatctgattactgatgatgattttagagatcttgtggacaaggttcctccaggttgcagaatgacaatcatttcagactcttgtcacagtggtggcctaatcgacgaagccaaggagcagattggagagagcactaagaaagaagccgaggacgaagatgaatctgaagaatcttcttcaagattcgggtttaggaagttcttgcgcagcaaagtggaaggcgccatcgagtctcgagggtttcacattggagggaacaagaaggatgaagatgaggcggaagaaatcgagactaaggagattgagcttgaagacggagaaacgatccatgccaaagacaaatctcttcctctgcagaccttgattgatattctcaagcagcaaacagggaatgataatatcgaagttgggaaaatcaggccaagcctttttgatgcgtttggtgatgattcgagcccgaaagtgaagaagtttatgaaagtgatcttaggtaagcttcaggctggaaatggagaagaaggtggattaatgggaatgcttggcaaattggcttcagggtttcttgagggtaaactaaacgatgaagactatgtgaaacccgctatgcagacacacgttgggagtaaagaagaggtttatgctggtggatcaagaggttcggttccgcttccagacagcgggatactgatcagcggttgccaaaccgatcagacctctgctgatgcgactccagcggggaaaccaactgaggcttatggagcgatgagcaattcgatacagacgatattggaggagacagacggtgagatatcaaacagagaaatggttacaagggctaggaaggcattgaagaagcaagggtttactcagcagccaggtttgtattgccatgatggttatgccaacgctcctttcatctgttgaaaacagaggttttattgaatgttttttact

SEQ ID NO: 88953 - protein, 418 aa, Arabidopsis thaliana; identical to SEQ ID NO: 41313
  peptide (1)..(418): Ceres Seq. ID no. 12714384

SEQ ID NO: 88954 - protein, 390 aa, Arabidopsis thaliana; identical to SEQ ID NO: 41314
  peptide (1)..(390): Ceres Seq. ID no. 12714385

SEQ ID NO: 88955 - protein, 308 aa, Arabidopsis thaliana
  peptide (1)..(308): Ceres Seq. ID no. 12714386
MNLITDDDFRDLVDKVPPGCRMTIISDSCHSGGLIDEAKEQIGESTKKEAEDEDESEESSSRFGFRKFLRSKVEGAIESRGFHIGGNKKDEDEAEEIETKEIELEDGETIHAKDKSLPLQTLIDILKQQTGNDNIEVGKIRPSLFDAFGDDSSPKVKKFMKVILGKLQAGNGEEGGLMGMLGKLASGFLEGKLNDEDYVKPAMQTHVGSKEEVYAGGSRGSVPLPDSGILISGCQTDQTSADATPAGKPTEAYGAMSNSIQTILEETDGEISNREMVTRARKALKKQGFTQQPGLYCHDGYANAPFIC

SEQ ID NO: 88956 - DNA, 1599 bp, Arabidopsis thaliana
  misc_feature (1)..(1599): Ceres Seq. ID no. 12714405
  misc_feature (1)..(1599): Ortholog of  Ceres SEQ ID NO 15179641 as cited in SEQ ID NO 56414
  misc_feature (1)..(1599): Ortholog of  Ceres SEQ ID NO 15176851 as cited in SEQ ID NO 61348
  misc_feature (1)..(1599): Ortholog of  Ceres SEQ ID NO 14316049 as cited in SEQ ID NO 67036
  misc_feature (1)..(1599): Ortholog of  Ceres SEQ ID NO 14313252 as cited in SEQ ID NO 67134
  misc_feature (1)..(1599): Ortholog of  Ceres SEQ ID NO 14302220 as cited in SEQ ID NO 69121
ataagccaagcaaagggggttttagggtttttgaccgcgagccagatctctttcttttgtttctcccacttccgaatcaatggccttctcttctctcctcagatctgccgcctcctacacggttgccgctcctcgccctgactttttctcgtcgccggcgtctgatcattctaaggtgttgtcaagtcttggatttagtcgcaacctgaagccatcaagattttcttctgggatatcttcatctctacaaaatggcaatgcaagaagtgtgcaacccatcaaggccacggctacagaagtgccatctgcagttcgaaggtcaagtagcagtggaaagacaaaggttgggatcaacggttttggtcggattggaaggttggtcctccgcattgcaacatcaagggatgatattgaggttgtagcagtgaatgacccattcattgatgccaagtacatggcttacatgttgaagtatgattctactcatggaaatttcaagggaagcatcaatgtcattgatgattctactttggagatcaatgggaagaaggtcaatgttgtcagcaagagagatccatctgagatcccatgggctgatcttggagctgattatgttgttgagtcttccggtgtattcaccaccctgtcaaaggctgcatcccatttgaagggcggtgccaagaaagttataatttctgccccttctgctgacgcacctatgtttgttgttggagtaaacgagcacacataccaaccaaacatggatatagtctccaatgcaagttgtaccaccaattgtcttgcccctcttgccaaggtggtgcatgaggaatttggtattcttgaaggcttgatgacaactgtccacgcaactacagctactcagaaaactgttgatgggccatcaatgaaggactggagaggaggtcggggcgctagtcaaaacatcattcctagctcaaccggcgccgcgaaggctgtaggtaaagttcttccagaactgaatgggaaacttacgggaatggccttccgtgtaccaacatcgaatgtttctgtggtggatttaacttgtcgacttgagaagggtgcctcttacgaagatgttaaggcagccattaagcatgcctcagaaggacctcttaaaggcattctcgggtacacagatgaagatgtcgtctccaatgatttcgtcggtgattcaaggtccagtatctttgacgccaatgctggtattggattgagcaagtcctttgtgaaacttgtctcttggtacgacaacgaatggggttacagcaaccgagttcttgaccttatagagcacatggctttggtagctgccagccactaaatacacacaccagttcttgcagaagcttgagtctttctgctttttgcgtaacctgctctacaaagccggtttggatttgttcggttcaattaggtgccactgtgctaggtgttttgaaatatttggcttgaatctcgagcctttactctatttttgttctgttccagtatcagcaaccatgatttggtccaaaagactgaaaaactgtgcgacttacatctatgaataaggggctaagctagttgtacttt

SEQ ID NO: 88957 - protein, 422 aa, Arabidopsis thaliana; identical to SEQ ID NO: 28404
  peptide (1)..(422): Ceres Seq. ID no. 12714406

SEQ ID NO: 88958 - protein, 297 aa, Arabidopsis thaliana; identical to SEQ ID NO: 28405
  peptide (1)..(297): Ceres Seq. ID no. 12714407

SEQ ID NO: 88959 - protein, 294 aa, Arabidopsis thaliana; identical to SEQ ID NO: 28406
  peptide (1)..(294): Ceres Seq. ID no. 12714408

SEQ ID NO: 88960 - DNA, 1887 bp, Arabidopsis thaliana
  misc_feature (1)..(1887): Ceres Seq. ID no. 12714409
  misc_feature (1)..(1887): Ortholog of  Ceres SEQ ID NO 13657677 as cited in SEQ ID NO 66119
atgaaggagtttgattgcagacccgatgtgttcacgtacaacgtgatattgcgagtcatgatgcgagaggaggtcttctttatgctggcttttgctgtgtacaatgaaatgctcaagtgcaattgttccccaaatctatacacgtttggtatcttgatggatggattgtataagaaagggagaacgagtgatgcacagaagatgttcgacgatatgaccggtagaggaatttcgcctaacagagttacctataccattctcatttcaggtttgtgtcagaggggaagtgctgacgatgcacgaaagctattctacgagatgcaaacgagcggtaactatcctgattccgtcgcacacaatgctttgcttgatgggttttgtaaattgggtcggatggttgaagcatttgagctgttgcggctttttgagaaagatggttttgtgcttggtcttcgaggttatagcagtttaatcgatggattgttcagagctaggagatacactcaggcatttgagctgtatgcaaatatgctgaagaagaatattaaacctgacatcattttgtacacgatattgattcaagggttatctaaagccggtaagattgaggatgcattgaagctgttaagcagcatgccaagtaagggcattagcccagatacctactgttacaatgctgttataaaggctctatgtgggaggggacttttggaagagggtcggtccctccaactcgaaatgtcagaaacggaatccttccctgatgcgtgcacacacacaattcttatctgtagtatgtgcaggaatgggctggttagggaagctgaagaaatttttacggagattgagaagagtggttgttctccttcggttgctacgttcaatgctttaattgatggactgtgcaagtccggtgagctcaaggaagccaggttattgttgcataaaatggaggtcgggagacctgcttccttgtttcttaggctttcgcacagtggaaaccggagttttgacaccatggttgaatccggttcgattctcaaggcatacagggatcttgcacattttgctgataccgggagttcgccagacattgtttcttacaatgttcttataaatgggttctgcagagcaggagacattgacggtgctctcaagcttctcaatgtgcttcaactaaagggattatcccctgatagcgtcacttacaacactctcatcaatggacttcatagagtcggcagagaagaagaagcttttaaactcttttacgctaaagatgattttagacacagtcccgcggtttacagatcgctcatgacatggtcatgtcggaaaagaaaagtcttggtggcttttaatctatggatgaaataccttaagaagatatcttgtctggatgatgaaacagctaatgagattgaacaatgtttcaaggaaggggaaaccgagagagctttaagacgacttattgaattagataccagaaaagacgagttaactttagggccttacacgatatggcttatcgggttatgccaatcagggagatttcacgaggccttgatggtgttttcggttttaagggagaagaagatccttgtaacacctccgagctgtgtcaaactgattcatggactctgcaaaagagaacaacttgatgctgcaatagaggtgttcttatacactctagataacaacttcaagctgatgcctagagtttgcaactacctcctaagctccctcctggaatcaacagaaaagatggagattgtttcgcaacttacaaacagaatggaacgtgcagggtacaatgttgactcgatgcttcgattcgagattttgaaatatcatagacatagaaagcaggtgctgatagatctttag

SEQ ID NO: 88961 - protein, 628 aa, Arabidopsis thaliana
  peptide (1)..(628): Ceres Seq. ID no. 12714410
MKEFDCRPDVFTYNVILRVMMREEVFFMLAFAVYNEMLKCNCSPNLYTFGILMDGLYKKGRTSDAQKMFDDMTGRGISPNRVTYTILISGLCQRGSADDARKLFYEMQTSGNYPDSVAHNALLDGFCKLGRMVEAFELLRLFEKDGFVLGLRGYSSLIDGLFRARRYTQAFELYANMLKKNIKPDIILYTILIQGLSKAGKIEDALKLLSSMPSKGISPDTYCYNAVIKALCGRGLLEEGRSLQLEMSETESFPDACTHTILICSMCRNGLVREAEEIFTEIEKSGCSPSVATFNALIDGLCKSGELKEARLLLHKMEVGRPASLFLRLSHSGNRSFDTMVESGSILKAYRDLAHFADTGSSPDIVSYNVLINGFCRAGDIDGALKLLNVLQLKGLSPDSVTYNTLINGLHRVGREEEAFKLFYAKDDFRHSPAVYRSLMTWSCRKRKVLVAFNLWMKYLKKISCLDDETANEIEQCFKEGETERALRRLIELDTRKDELTLGPYTIWLIGLCQSGRFHEALMVFSVLREKKILVTPPSCVKLIHGLCKREQLDAAIEVFLYTLDNNFKLMPRVCNYLLSSLLESTEKMEIVSQLTNRMERAGYNVDSMLRFEILKYHRHRKQVLIDL

SEQ ID NO: 88962 - protein, 609 aa, Arabidopsis thaliana
  peptide (1)..(609): Ceres Seq. ID no. 12714411
MMREEVFFMLAFAVYNEMLKCNCSPNLYTFGILMDGLYKKGRTSDAQKMFDDMTGRGISPNRVTYTILISGLCQRGSADDARKLFYEMQTSGNYPDSVAHNALLDGFCKLGRMVEAFELLRLFEKDGFVLGLRGYSSLIDGLFRARRYTQAFELYANMLKKNIKPDIILYTILIQGLSKAGKIEDALKLLSSMPSKGISPDTYCYNAVIKALCGRGLLEEGRSLQLEMSETESFPDACTHTILICSMCRNGLVREAEEIFTEIEKSGCSPSVATFNALIDGLCKSGELKEARLLLHKMEVGRPASLFLRLSHSGNRSFDTMVESGSILKAYRDLAHFADTGSSPDIVSYNVLINGFCRAGDIDGALKLLNVLQLKGLSPDSVTYNTLINGLHRVGREEEAFKLFYAKDDFRHSPAVYRSLMTWSCRKRKVLVAFNLWMKYLKKISCLDDETANEIEQCFKEGETERALRRLIELDTRKDELTLGPYTIWLIGLCQSGRFHEALMVFSVLREKKILVTPPSCVKLIHGLCKREQLDAAIEVFLYTLDNNFKLMPRVCNYLLSSLLESTEKMEIVSQLTNRMERAGYNVDSMLRFEILKYHRHRKQVLIDL

SEQ ID NO: 88963 - protein, 608 aa, Arabidopsis thaliana
  peptide (1)..(608): Ceres Seq. ID no. 12714412
MREEVFFMLAFAVYNEMLKCNCSPNLYTFGILMDGLYKKGRTSDAQKMFDDMTGRGISPNRVTYTILISGLCQRGSADDARKLFYEMQTSGNYPDSVAHNALLDGFCKLGRMVEAFELLRLFEKDGFVLGLRGYSSLIDGLFRARRYTQAFELYANMLKKNIKPDIILYTILIQGLSKAGKIEDALKLLSSMPSKGISPDTYCYNAVIKALCGRGLLEEGRSLQLEMSETESFPDACTHTILICSMCRNGLVREAEEIFTEIEKSGCSPSVATFNALIDGLCKSGELKEARLLLHKMEVGRPASLFLRLSHSGNRSFDTMVESGSILKAYRDLAHFADTGSSPDIVSYNVLINGFCRAGDIDGALKLLNVLQLKGLSPDSVTYNTLINGLHRVGREEEAFKLFYAKDDFRHSPAVYRSLMTWSCRKRKVLVAFNLWMKYLKKISCLDDETANEIEQCFKEGETERALRRLIELDTRKDELTLGPYTIWLIGLCQSGRFHEALMVFSVLREKKILVTPPSCVKLIHGLCKREQLDAAIEVFLYTLDNNFKLMPRVCNYLLSSLLESTEKMEIVSQLTNRMERAGYNVDSMLRFEILKYHRHRKQVLIDL

SEQ ID NO: 88964 - DNA, 4464 bp, Arabidopsis thaliana
  misc_feature (1)..(4464): Ceres Seq. ID no. 12714439
  misc_feature (1)..(4464): Ortholog of  Ceres SEQ ID NO 14304565 as cited in SEQ ID NO 53297
  misc_feature (1)..(4464): Ortholog of  Ceres SEQ ID NO 15172170 as cited in SEQ ID NO 58957
  misc_feature (1)..(4464): Ortholog of  Ceres SEQ ID NO 13654989 as cited in SEQ ID NO 63117
  misc_feature (1)..(4464): Ortholog of  Ceres SEQ ID NO 13584744 as cited in SEQ ID NO 69137
atgagctctaattgtagttgttctcttttgagtctcttctctctccttctgatcattgatctcaccgttgctagctcttgtcctaagacatgtggaggaatcgacatcccgtacccgtttggaatcggaacgggttgctatctcgagaaatggtacgagattatttgtgtcaacaactctgttccttttctttccatcattaacagggaagttgtgagtatctctttttcggatatgtatcgccggttctttaacgtaggctacgggtcaattcgcataagaaacccaatagcttcaaagggatgctcaagtggcggacaagagtttggatcacttttaaatatgacaggttaccctttttaccttggcgacaacaatatgctcatagcggttggctgcaacaacacggcgtcgttgacaaatgtcgagccaagtattgtgggatgcgagtctacttgcagcacaaatcaagatatacctataaatgattatctcggggtactctactgtaatgctaggtatggcgattccgagtattgtaaaaatatttccattatgaatgatacaagctgcaacggtattggatgctgcaaggcaagtttgcccgctaggtatcaacagattattggtgtggaaatagatgatagtaacacagaatccaagggatgcaaagttgccttcataacagacgaggaatactttttgtcaaatggatctgacccggagaggcttcatgctaatggatatgatacggttgacctaagatggttcatccatacggcgaatcattccttcataggctctctaggatgcaaaagtatagacgagtacacaattctaagaagagacaatcgtgaatacggaataggttgcctttgcgactataactctacaactacaggctatgcaacatgttcatgcgctagtggtttcgaaggcaacccatatattcctggcgaatgcaaagatattaatgaatgcgtaagaggcattgatggaaacccagtctgtacggcaggcaagtgtgtcaatttgctgggcggttatacgtgtgagtacacaaatcatcgaccacttgttatagggcttagcactagtttcagcacattggtattcattggtggaatatactggttatacaaatttattagaagacaaaggaggttaaaccaaaagaagaaattctttaagcgtaatgggggtttattgttgcaacaacaattgactacaactgaaggcaacgtggacagtacaagagtgttcaactcaagagagttggagaaagccaccgaaaactttagcttaaccagaatactaggcgaaggaggtcaaggtacagtgtacaagggaatgcttgtagacggtagaatagtagcagtaaagaagtccaaagtcgtagacgaagacaagctagaagagttcatcaacgaagtcgtcattctctcacaaatcaaccataggaacatcgtaaaactcttggggtgttgcctagagacagatgtccctattctagtctacgaattcattcctaatggtaacctttttgagcatcttcatgatgattccgatgattatacgatgactacttgggaagtgcgtcttcgtattgctgtagatattgcaggagcgctttcatatttgcactcggctgcatcatctccaatctatcacagagacatcaagtctacaaacataatgttagatgagaaacatcgagccaaagtgtccgattttggtacttcaagaacggtgaccgtggatcatacccacctcactacagtagtttcaggcacggtgggatatatggatccagagtatttccagtcgagccaattcacagacaaaagtgatgtttatagctttggagtcgtgctagcggagctaatcactggagaaaaatcagtctcttttctgcgatctcaggaatataggacattggcaacttatttcactcttgcaatgaaagagaacagactctccgacattattgatgctcgaataagagatggttgtaagttgaatcaagtgacagcagccgcaaaaattgcaaggaaatgtttgaatatgaagggaaggaaacgaccaagtatgagacaagtatcgatggaattggagaagattcgttcatattctgaagatatgcagccgtatgagtatgctagcgaaaacgaagaagaaaaaaaagaaacattagtggacgttaacgtagagtcgagaaactacgtgagtgttaccgccgcatcatctcaatacagcattgctacaacatcttcgtcgcgagactgttttctcaacgactggtacgaggttgtctgtaacagcaccacctccggtaaatccttagctccgttcctctataagatcaacagagaattagttagcatcactcttcgaagcagcatcgacagttcctacggagttgttcacattaaatctccggtgacttcctccggctgttctcaacgacccgtaaagcctcttcctttaaacctcaccggtaaaggaagtccctttttcatcaccgactcgaatcgtctcgtctcagttggttgtgacaacagagcattgattacagacatcgaatctcagatcacaggatgcgaatcgagctgcgacggagataagagtcgtttagacaagatctgcggtggttacacatgttgtcaggcgaagattccggcggatagaccgcaagtaatcggcgttgaccttgaaagctccggtggtaacacaactcaaggaggaaactgtaaagttgctttcttgacgaatgagacttactctccggcgaatgttacagagccggaacaattttatactaatgggtttacggtgattgagcttggttggtactttgatacatcagattctcggttaacgaatcctgtgggttgtgtgaatttgacggaaacagggatttacacgagcgcaccgagctgtgtttgtgagtatggtaacttctctggctttggttacagtaactgttactgcaatcagattggttacagagggaatccttatcttcctggtggatgcattgacattgacgaatgtgaggaaggaaaaggactaagcagctgtggagaactaacttgtgtgaatgttcctggatcgtggaggtgcgagctgaatggagtagggaagatcaagcctctgtttccaggtgaatcaatggagttcttttccagattccaaagtcatatcacagagcaaaaaagagtgatgatctttatagttttctttcgtccttgtgcaggtcttgttctaggttttccactgttgttcttggtacttgggatatggggattgatcaagttcgttaagaagagaaggaagattatccgaaagagaatgttctttaaacgtaatggaggcttgttgttgaaacaacagttaactacaagaggaggtaatgtgcagtcatcgaagatattcagttcgaaagagctggagaaagcgacggataacttcaatatgaacagggttcttgggcaaggaggtcaaggcactgtctacaaaggaatgttggtagatgggcgaattgttgctgtgaaaagatctaaagttttagatgaagataaagttgaggagtttatcaatgaagttggtgttctctcgcagattaaccatagaaatattgtcaaactcatggggtgttgtctcgagacagaggttcctatcttggtttatgaacatattccaaatggagacctattcaagcggcttcaccatgattctgatgattacactatgacttgggatgtgcgattgcgcatctctgttgagattgcaggagcacttgcttacttgcactcggctgcatcaactccggtctatcatagagatgtcaagaccacaaacatacttttggatgagaagtatagagccaaggtatcggatttcgggacctcgagatccataaacgtagatcaaactcacttgactactctagttgcaggtacttttggatacttggatccagagtactttcaaactagccagtttacggataaaagtgatgtttatagttttggggtcgtcttggttgagctcataactggagaaaagccgttttctgtaatgcggcccgaagaaaacagaggacttgtgtctcatttcaatgaggctatgaaacagaacagagttcttgatattgttgattctcggatcaaagaaggttgcacgttggaacaagtgttggctgtggcgaaacttgccagaaggtgtttaagtctaaaagggaagaaacgaccaaatatgagagaggtttcagttgagcttgagaggatccgttcatcacccgaagatttggagttacatattgaagaggaggacgaagaagaatgcgccatggaaatcaacatggatgattcttggagcgtcgacatgactgctccagcttccctctttgatttatcgcccaagttagacgttgaaccgctggttcctcaacgaacatggtga

SEQ ID NO: 88965 - protein, 1487 aa, Arabidopsis thaliana
  peptide (1)..(1487): Ceres Seq. ID no. 12714440
MSSNCSCSLLSLFSLLLIIDLTVASSCPKTCGGIDIPYPFGIGTGCYLEKWYEIICVNNSVPFLSIINREVVSISFSDMYRRFFNVGYGSIRIRNPIASKGCSSGGQEFGSLLNMTGYPFYLGDNNMLIAVGCNNTASLTNVEPSIVGCESTCSTNQDIPINDYLGVLYCNARYGDSEYCKNISIMNDTSCNGIGCCKASLPARYQQIIGVEIDDSNTESKGCKVAFITDEEYFLSNGSDPERLHANGYDTVDLRWFIHTANHSFIGSLGCKSIDEYTILRRDNREYGIGCLCDYNSTTTGYATCSCASGFEGNPYIPGECKDINECVRGIDGNPVCTAGKCVNLLGGYTCEYTNHRPLVIGLSTSFSTLVFIGGIYWLYKFIRRQRRLNQKKKFFKRNGGLLLQQQLTTTEGNVDSTRVFNSRELEKATENFSLTRILGEGGQGTVYKGMLVDGRIVAVKKSKVVDEDKLEEFINEVVILSQINHRNIVKLLGCCLETDVPILVYEFIPNGNLFEHLHDDSDDYTMTTWEVRLRIAVDIAGALSYLHSAASSPIYHRDIKSTNIMLDEKHRAKVSDFGTSRTVTVDHTHLTTVVSGTVGYMDPEYFQSSQFTDKSDVYSFGVVLAELITGEKSVSFLRSQEYRTLATYFTLAMKENRLSDIIDARIRDGCKLNQVTAAAKIARKCLNMKGRKRPSMRQVSMELEKIRSYSEDMQPYEYASENEEEKKETLVDVNVESRNYVSVTAASSQYSIATTSSSRDCFLNDWYEVVCNSTTSGKSLAPFLYKINRELVSITLRSSIDSSYGVVHIKSPVTSSGCSQRPVKPLPLNLTGKGSPFFITDSNRLVSVGCDNRALITDIESQITGCESSCDGDKSRLDKICGGYTCCQAKIPADRPQVIGVDLESSGGNTTQGGNCKVAFLTNETYSPANVTEPEQFYTNGFTVIELGWYFDTSDSRLTNPVGCVNLTETGIYTSAPSCVCEYGNFSGFGYSNCYCNQIGYRGNPYLPGGCIDIDECEEGKGLSSCGELTCVNVPGSWRCELNGVGKIKPLFPGESMEFFSRFQSHITEQKRVMIFIVFFRPCAGLVLGFPLLFLVLGIWGLIKFVKKRRKIIRKRMFFKRNGGLLLKQQLTTRGGNVQSSKIFSSKELEKATDNFNMNRVLGQGGQGTVYKGMLVDGRIVAVKRSKVLDEDKVEEFINEVGVLSQINHRNIVKLMGCCLETEVPILVYEHIPNGDLFKRLHHDSDDYTMTWDVRLRISVEIAGALAYLHSAASTPVYHRDVKTTNILLDEKYRAKVSDFGTSRSINVDQTHLTTLVAGTFGYLDPEYFQTSQFTDKSDVYSFGVVLVELITGEKPFSVMRPEENRGLVSHFNEAMKQNRVLDIVDSRIKEGCTLEQVLAVAKLARRCLSLKGKKRPNMREVSVELERIRSSPEDLELHIEEEDEEECAMEINMDDSWSVDMTAPASLFDLSPKLDVEPLVPQRTW

SEQ ID NO: 88966 - protein, 1409 aa, Arabidopsis thaliana
  peptide (1)..(1409): Ceres Seq. ID no. 12714441
MYRRFFNVGYGSIRIRNPIASKGCSSGGQEFGSLLNMTGYPFYLGDNNMLIAVGCNNTASLTNVEPSIVGCESTCSTNQDIPINDYLGVLYCNARYGDSEYCKNISIMNDTSCNGIGCCKASLPARYQQIIGVEIDDSNTESKGCKVAFITDEEYFLSNGSDPERLHANGYDTVDLRWFIHTANHSFIGSLGCKSIDEYTILRRDNREYGIGCLCDYNSTTTGYATCSCASGFEGNPYIPGECKDINECVRGIDGNPVCTAGKCVNLLGGYTCEYTNHRPLVIGLSTSFSTLVFIGGIYWLYKFIRRQRRLNQKKKFFKRNGGLLLQQQLTTTEGNVDSTRVFNSRELEKATENFSLTRILGEGGQGTVYKGMLVDGRIVAVKKSKVVDEDKLEEFINEVVILSQINHRNIVKLLGCCLETDVPILVYEFIPNGNLFEHLHDDSDDYTMTTWEVRLRIAVDIAGALSYLHSAASSPIYHRDIKSTNIMLDEKHRAKVSDFGTSRTVTVDHTHLTTVVSGTVGYMDPEYFQSSQFTDKSDVYSFGVVLAELITGEKSVSFLRSQEYRTLATYFTLAMKENRLSDIIDARIRDGCKLNQVTAAAKIARKCLNMKGRKRPSMRQVSMELEKIRSYSEDMQPYEYASENEEEKKETLVDVNVESRNYVSVTAASSQYSIATTSSSRDCFLNDWYEVVCNSTTSGKSLAPFLYKINRELVSITLRSSIDSSYGVVHIKSPVTSSGCSQRPVKPLPLNLTGKGSPFFITDSNRLVSVGCDNRALITDIESQITGCESSCDGDKSRLDKICGGYTCCQAKIPADRPQVIGVDLESSGGNTTQGGNCKVAFLTNETYSPANVTEPEQFYTNGFTVIELGWYFDTSDSRLTNPVGCVNLTETGIYTSAPSCVCEYGNFSGFGYSNCYCNQIGYRGNPYLPGGCIDIDECEEGKGLSSCGELTCVNVPGSWRCELNGVGKIKPLFPGESMEFFSRFQSHITEQKRVMIFIVFFRPCAGLVLGFPLLFLVLGIWGLIKFVKKRRKIIRKRMFFKRNGGLLLKQQLTTRGGNVQSSKIFSSKELEKATDNFNMNRVLGQGGQGTVYKGMLVDGRIVAVKRSKVLDEDKVEEFINEVGVLSQINHRNIVKLMGCCLETEVPILVYEHIPNGDLFKRLHHDSDDYTMTWDVRLRISVEIAGALAYLHSAASTPVYHRDVKTTNILLDEKYRAKVSDFGTSRSINVDQTHLTTLVAGTFGYLDPEYFQTSQFTDKSDVYSFGVVLVELITGEKPFSVMRPEENRGLVSHFNEAMKQNRVLDIVDSRIKEGCTLEQVLAVAKLARRCLSLKGKKRPNMREVSVELERIRSSPEDLELHIEEEDEEECAMEINMDDSWSVDMTAPASLFDLSPKLDVEPLVPQRTW

SEQ ID NO: 88967 - protein, 1373 aa, Arabidopsis thaliana
  peptide (1)..(1373): Ceres Seq. ID no. 12714442
MTGYPFYLGDNNMLIAVGCNNTASLTNVEPSIVGCESTCSTNQDIPINDYLGVLYCNARYGDSEYCKNISIMNDTSCNGIGCCKASLPARYQQIIGVEIDDSNTESKGCKVAFITDEEYFLSNGSDPERLHANGYDTVDLRWFIHTANHSFIGSLGCKSIDEYTILRRDNREYGIGCLCDYNSTTTGYATCSCASGFEGNPYIPGECKDINECVRGIDGNPVCTAGKCVNLLGGYTCEYTNHRPLVIGLSTSFSTLVFIGGIYWLYKFIRRQRRLNQKKKFFKRNGGLLLQQQLTTTEGNVDSTRVFNSRELEKATENFSLTRILGEGGQGTVYKGMLVDGRIVAVKKSKVVDEDKLEEFINEVVILSQINHRNIVKLLGCCLETDVPILVYEFIPNGNLFEHLHDDSDDYTMTTWEVRLRIAVDIAGALSYLHSAASSPIYHRDIKSTNIMLDEKHRAKVSDFGTSRTVTVDHTHLTTVVSGTVGYMDPEYFQSSQFTDKSDVYSFGVVLAELITGEKSVSFLRSQEYRTLATYFTLAMKENRLSDIIDARIRDGCKLNQVTAAAKIARKCLNMKGRKRPSMRQVSMELEKIRSYSEDMQPYEYASENEEEKKETLVDVNVESRNYVSVTAASSQYSIATTSSSRDCFLNDWYEVVCNSTTSGKSLAPFLYKINRELVSITLRSSIDSSYGVVHIKSPVTSSGCSQRPVKPLPLNLTGKGSPFFITDSNRLVSVGCDNRALITDIESQITGCESSCDGDKSRLDKICGGYTCCQAKIPADRPQVIGVDLESSGGNTTQGGNCKVAFLTNETYSPANVTEPEQFYTNGFTVIELGWYFDTSDSRLTNPVGCVNLTETGIYTSAPSCVCEYGNFSGFGYSNCYCNQIGYRGNPYLPGGCIDIDECEEGKGLSSCGELTCVNVPGSWRCELNGVGKIKPLFPGESMEFFSRFQSHITEQKRVMIFIVFFRPCAGLVLGFPLLFLVLGIWGLIKFVKKRRKIIRKRMFFKRNGGLLLKQQLTTRGGNVQSSKIFSSKELEKATDNFNMNRVLGQGGQGTVYKGMLVDGRIVAVKRSKVLDEDKVEEFINEVGVLSQINHRNIVKLMGCCLETEVPILVYEHIPNGDLFKRLHHDSDDYTMTWDVRLRISVEIAGALAYLHSAASTPVYHRDVKTTNILLDEKYRAKVSDFGTSRSINVDQTHLTTLVAGTFGYLDPEYFQTSQFTDKSDVYSFGVVLVELITGEKPFSVMRPEENRGLVSHFNEAMKQNRVLDIVDSRIKEGCTLEQVLAVAKLARRCLSLKGKKRPNMREVSVELERIRSSPEDLELHIEEEDEEECAMEINMDDSWSVDMTAPASLFDLSPKLDVEPLVPQRTW

SEQ ID NO: 88968 - DNA, 933 bp, Arabidopsis thaliana
  misc_feature (1)..(933): Ceres Seq. ID no. 12714443
  misc_feature (1)..(933): Ortholog of  Ceres SEQ ID NO 14315275 as cited in SEQ ID NO 52556
  misc_feature (1)..(933): Ortholog of  Ceres SEQ ID NO 13597260 as cited in SEQ ID NO 63885
atggcaaaagtctctgggaggagcaagaaaacaatcgttgacgatgaaatcagcgataaaacagcgtctgcgtctgagtctgcgtccattgccttaacatccaaacgcaaacgtaagtcgccgcctcgaaacgctcctcttcaacgcagctccccttacagaggcgtcacaaggcatagatggactgggagatacgaagcgcatttgtgggataagaacagctggaacgatacacagaccaagaaaggacgtcaaggggcttacgacgaagaagaagcagcagcacgtgcctacgacttagcagcattgaagtactggggacgagacacactcttgaacttccctttgccgagttatgacgaagacgtcaaagaaatggaaggccaatccaaggaagagtatattggatcattgagaagaaaaagtagtggattttctcgcggtgtatcaaaatacagaggcgttgcaaggcatcaccataatgggagatgggaagctagaattggaagggtgtttggtaataaatatctatatcttggaacatacgccacgcaagaagaagcagcaatcgcctacgacatcgcggcaatagagtaccgtggacttaacgccgttaccaatttcgacgtcagccgttatctaaaccctaacgccgccgcggataaagccgattccgattctaagcccattcgaagccctagtcgcgagcccgaatcgtcggatgataacaaatctccgaaatcagaggaagtaatcgaaccatctacatcgccggaagtgattccaactcgccggagcttccccgacgatatccagacgtattttgggtgtcaagattccggcaagttagcgactgaggaagacgtaatattcgattgtttcaattcttatataaatcctggcttctataacgagtttgattatggaccttaa

SEQ ID NO: 88969 - protein, 310 aa, Arabidopsis thaliana
  peptide (1)..(310): Ceres Seq. ID no. 12714444
MAKVSGRSKKTIVDDEISDKTASASESASIALTSKRKRKSPPRNAPLQRSSPYRGVTRHRWTGRYEAHLWDKNSWNDTQTKKGRQGAYDEEEAAARAYDLAALKYWGRDTLLNFPLPSYDEDVKEMEGQSKEEYIGSLRRKSSGFSRGVSKYRGVARHHHNGRWEARIGRVFGNKYLYLGTYATQEEAAIAYDIAAIEYRGLNAVTNFDVSRYLNPNAAADKADSDSKPIRSPSREPESSDDNKSPKSEEVIEPSTSPEVIPTRRSFPDDIQTYFGCQDSGKLATEEDVIFDCFNSYINPGFYNEFDYGP

SEQ ID NO: 88970 - protein, 185 aa, Arabidopsis thaliana
  peptide (1)..(185): Ceres Seq. ID no. 12714445
MEGQSKEEYIGSLRRKSSGFSRGVSKYRGVARHHHNGRWEARIGRVFGNKYLYLGTYATQEEAAIAYDIAAIEYRGLNAVTNFDVSRYLNPNAAADKADSDSKPIRSPSREPESSDDNKSPKSEEVIEPSTSPEVIPTRRSFPDDIQTYFGCQDSGKLATEEDVIFDCFNSYINPGFYNEFDYGP

SEQ ID NO: 88971 - DNA, 1212 bp, Arabidopsis thaliana
  misc_feature (1)..(1212): Ceres Seq. ID no. 12714465
  misc_feature (1)..(1212): Ortholog of  Ceres SEQ ID NO 13597407 as cited in SEQ ID NO 64106
atggatgaaggtcttgtggttagcacctgcttaggcggcgcctttattgggtctctgttcagtgggttggtagctgatggtgttgggcgccgtagagctttccagttgagcgctttaccaatgattgttggagcttctgtgagtgcatcaactgagagtcttatgggcatgctcctgggaaggtttttggtcggaattgggatgggcataggtccttctgttacagctctctatgtcactgaggtgtcacctgcttatgtgagaggtacatatgggagttctacccaaatcgcaacatgtattggactcttaggttcgctgtttgctggaatcccggcaaaagataacttgggctggtggcgcatatgtttttggatatccacagtcccagctgcaatgcttgctgtcttcatggaactctgcgtggaaagtcctcagtggctttttaagaggggaagggcagctgaagctgaagctgtgtttgagaagctattgggagggtcgtacgtcaaagctgctatggcagagttagtgaagtcggataggggagatgacgccgattcagccaaattgtcggagttgctttttggacgcagttttagagtggttttcattggatctaccctttttgctttacaacagttgtctgggataaatgctgtgttctatttctcatcaactgtcttcaagaaagctggtgtaccttcagcctctgcaaacatatgtgtaggagtttgcaacctcttaggatcaactgttgctgtggttttgatggataagctggggagaaaagtgttgcttattgggagttttgcgggcatggcagtatcgctgggtctccaagcaatagcatatacttcgcttccttcgccctttggaaccttgtttctctcggttggaggaatgctgctgtttgtgttgtcgtttgcaactggagcgggtcctgttccaagtcttctcctgtctgagatatgccctggtcgacttcgagcaactgcgttggctgtttgtcttgccgttcactgggttataaacttctttgtcgggctgctgtttctgagaatgctggagcaactaggttcggtgcttctaaatgcaatatttgggttcttctgtgtggtggcagtcatctttgtgcagaagaacgtggttgagactaaaggaaagagcctacaagagatagaaatcagtctgctctcttccacccagtga

SEQ ID NO: 88972 - protein, 403 aa, Arabidopsis thaliana
  peptide (1)..(403): Ceres Seq. ID no. 12714466
MDEGLVVSTCLGGAFIGSLFSGLVADGVGRRRAFQLSALPMIVGASVSASTESLMGMLLGRFLVGIGMGIGPSVTALYVTEVSPAYVRGTYGSSTQIATCIGLLGSLFAGIPAKDNLGWWRICFWISTVPAAMLAVFMELCVESPQWLFKRGRAAEAEAVFEKLLGGSYVKAAMAELVKSDRGDDADSAKLSELLFGRSFRVVFIGSTLFALQQLSGINAVFYFSSTVFKKAGVPSASANICVGVCNLLGSTVAVVLMDKLGRKVLLIGSFAGMAVSLGLQAIAYTSLPSPFGTLFLSVGGMLLFVLSFATGAGPVPSLLLSEICPGRLRATALAVCLAVHWVINFFVGLLFLRMLEQLGSVLLNAIFGFFCVVAVIFVQKNVVETKGKSLQEIEISLLSSTQ

SEQ ID NO: 88973 - protein, 363 aa, Arabidopsis thaliana
  peptide (1)..(363): Ceres Seq. ID no. 12714467
MIVGASVSASTESLMGMLLGRFLVGIGMGIGPSVTALYVTEVSPAYVRGTYGSSTQIATCIGLLGSLFAGIPAKDNLGWWRICFWISTVPAAMLAVFMELCVESPQWLFKRGRAAEAEAVFEKLLGGSYVKAAMAELVKSDRGDDADSAKLSELLFGRSFRVVFIGSTLFALQQLSGINAVFYFSSTVFKKAGVPSASANICVGVCNLLGSTVAVVLMDKLGRKVLLIGSFAGMAVSLGLQAIAYTSLPSPFGTLFLSVGGMLLFVLSFATGAGPVPSLLLSEICPGRLRATALAVCLAVHWVINFFVGLLFLRMLEQLGSVLLNAIFGFFCVVAVIFVQKNVVETKGKSLQEIEISLLSSTQ

SEQ ID NO: 88974 - protein, 349 aa, Arabidopsis thaliana
  peptide (1)..(349): Ceres Seq. ID no. 12714468
MGMLLGRFLVGIGMGIGPSVTALYVTEVSPAYVRGTYGSSTQIATCIGLLGSLFAGIPAKDNLGWWRICFWISTVPAAMLAVFMELCVESPQWLFKRGRAAEAEAVFEKLLGGSYVKAAMAELVKSDRGDDADSAKLSELLFGRSFRVVFIGSTLFALQQLSGINAVFYFSSTVFKKAGVPSASANICVGVCNLLGSTVAVVLMDKLGRKVLLIGSFAGMAVSLGLQAIAYTSLPSPFGTLFLSVGGMLLFVLSFATGAGPVPSLLLSEICPGRLRATALAVCLAVHWVINFFVGLLFLRMLEQLGSVLLNAIFGFFCVVAVIFVQKNVVETKGKSLQEIEISLLSSTQ

SEQ ID NO: 88975 - DNA, 2496 bp, Arabidopsis thaliana
  misc_feature (1)..(2496): Ceres Seq. ID no. 12714500
  misc_feature (1)..(2496): Ortholog of  Ceres SEQ ID NO 12465083 as cited in SEQ ID NO 68239
atgagtgtagtcgggtttgattttggaaacgagaattgccttgttgccgttgcgaggcaaagaggtatcgacgtcgtgcttaatgatgagtccaatcgtgagactcctgctattgtctgcttcggtgacaagcagcgcttcatcggcactgctggagctgcttctaccatgatgaaccctaaaaactccatctctcaaattaagcgcttaattggtcgccagttttccgaccctgagcttcaaagggatatcaaatcccttcccttttctgtcaccgaaggccctgatggctatcctttgatacatgctaattatttgggagagaagcgagcctttaccccgactcaagtcatgggcatgatgttgtctaacctgaaaggtattgccgagaagaatttgaatacagctgttgtcgactgctgtattggtattcctgtttactttaccgacctccagcgtagggctgttctcgatgctgccactattgctggcttgcatcccttgcgcttgatccacgagactacagctacggctttggcatatggtatttataagacagatttgccagagagtgaccagctcaatgttgcattcattgacattggacacgcaagcatgcaagtctgtattgcaggctttaaaaaaggacagctcaaaatcttgtctcacgctttcgatcgctcccttgggggaagggactttgatgaagttcttttcaatcattttgctgctaagttcaaggacgagtacaagattgacgtctcccagaatgctaaggcttctctcaggctccgtgctacatgcgagaaactgaaaaaggttctaagcgctaatcctctggcaccgttgaatatcgagtgtttgatggatgagaaagatgttaggggtgtcatcaagagggaagagtttgaagagatcagcatcccgattttggagcgtgtaaagaggcctctagagaaagctctctctgatgcaggcctcactgttgaagatgtacatatggttgaggttattggctctggctctcgtgtccctgctatgatcaagattctaactgagttttttggtaaggagcccaggcggacaatgaatgcaagtgagtgtgtgtcaaggggatgtgccttgcagtgtgccattctcagtccgacctttaaagttcgcgaattccaggttcatgagagcttccctttctcaatttctctcgcttggaaaggagcagcttctgaagctcaaaatggaggagctgagaatcagcagagcaccattgtttttcccaaaggaaatcccattcctagtgtcaaggctctaacgttttatcgttctggaacattctctgttgatgtgcagtacagtgatgtgaacgatttgcaagcacctccaaaaatcagcacatacacgattggtccgttccagtcatcaaaaggcgagagggcaaagcttaaagtgaaagtgagattgaaccttcatggaatcgtctcagttgaatctgcaactcttttggaagaggaagaagttgaagttccggtcacaaaagaacattcagaggaaactactaagatggactctgacaaagcttctgctgaggcagctcctgcttctggagactgtgatgtaaacatgcaggacgccaaagacaccagtgatgcaactggtactgacaatggtgttccagagtctgctgagaagccggtgcaaatggaaactgattcaaaggctgaggctccaaagaagaaggtgaagaaaacaaatgtaccactgtctgaattggtctatggtgccttgaaaactgtggaggtcgaaaaggcagtggagaaggaatttgagatggctttgcaagacagagttatggaagagaccaaggaccggaagaatgctgttgagtcttatgtttatgatatgcggaacaaactgagtgacaaataccaggaatatatcactgactcggagagggaagcattcctggcgaatctgcaggaagttgaggattggttgtatgaagatggggaagatgagaccaaaggtgtttatgttgcgaagctcgaggagctcaagaaggtgggtgaccctgttgaagtgcgttacaaggagtcattggaaagagggtcggtcattgatcagcttggttactgtattaacagctacagagaggcagctatgtctactgatcccaagtttgatcacattgaattggcagagaagcaaaaggttttgaacgagtgtgtggaagcagaagcatggctgcggggaaagcagcagcagcaggacacacttcccaagtatgccacaccggctctcttgtcagctgacgttaaaagcaaggcagaggcattggacaagttttgcaggcctataatgaccaaaccaaagccggtggctaaagcagaggcaccacaagccaagggaggtgagcaggcggatgagggcaagagtgagccagagcaaccagcttctgccgaaccaatggagactgagaatcccgcggaaggtagtacctaa

SEQ ID NO: 88976 - protein, 831 aa, Arabidopsis thaliana; identical to SEQ ID NO: 78067
  peptide (1)..(831): Ceres Seq. ID no. 12714501

SEQ ID NO: 88977 - protein, 775 aa, Arabidopsis thaliana; identical to SEQ ID NO: 78068
  peptide (1)..(775): Ceres Seq. ID no. 12714502

SEQ ID NO: 88978 - protein, 774 aa, Arabidopsis thaliana; identical to SEQ ID NO: 78069
  peptide (1)..(774): Ceres Seq. ID no. 12714503

SEQ ID NO: 88979 - DNA, 2115 bp, Arabidopsis thaliana
  misc_feature (1)..(2115): Ceres Seq. ID no. 12714588
  misc_feature (1)..(2115): Ortholog of  Ceres SEQ ID NO 15170269 as cited in SEQ ID NO 54916
  misc_feature (1)..(2115): Ortholog of  Ceres SEQ ID NO 13663060 as cited in SEQ ID NO 60964
  misc_feature (1)..(2115): Ortholog of  Ceres SEQ ID NO 13598532 as cited in SEQ ID NO 65204
  misc_feature (1)..(2115): Ortholog of  Ceres SEQ ID NO 13656849 as cited in SEQ ID NO 65764
  misc_feature (1)..(2115): Ortholog of  Ceres SEQ ID NO 13656501 as cited in SEQ ID NO 69206
atgggttgcgttagctcgaagcagacggtctctgtgacgcctgcgatcgatcactcaggcgtcttcaaggataatgaaaatgagtgttctggatcgggtcggattgtggtggaggatccgcctcggccgacgttgaagaagctcgtgtcgtggaggagtaggagcgggaagaggaggagtcagaagagcggtagcgagttagggagtgagtcaggacgtgctagtgactcgcttagttttcgactcggtaatgttagtagataccttgaagctgagcaagtcgctgctggttggcctgcgtggttgagcaacgttgctggtgaagctatccatggttgggtcccacttcgatccgatgcgttcgaaaaactcgaaaagattggacaaggtacttatagcaatgtgtttcgtgcggtggagactgaaactgggaggattgtggcattgaagaaggtgaggtttgataattttgagccggagagtgttaagtttatggcaagagagattttgatacttagaagacttaatcatcccaacattatcaaactggaaggtttgattacttcaaaactatcctgcaacattcaacttgtgttcgagtatatggagcatgatcttactggtcttctttcttcccctgacatcaaatttacgacgccacagattaagtgttacatgaagcaattgttgtctgggcttgatcattgtcattcacgaggcgtgatgcatcgagacataaagggttcgaatcttttgttgagtaatgaagggatattaaaggtggctgattttgggttagcaaacttcagtaatagttctggacacaagaagaaacctcttaccagtcgagttgtgactctgtggtatcgtccaccagaacttttgctcggggcaacggactatggagcatctgttgatttgtggagtgttggttgtgttttcgctgagctgcttcttggaaaacctattctccggggaagaactgaggttgaacagttgcacaagatattcaaactgtgtggatctccaccagaagattactggaaaaagtccaaacttccccatgcaatgcttttcaagccacagcaaacttatgatagttgtctccgcgaaaccttgaaagatttgtctgagactgaaatcaatctgatagaaactcttctttctatagatccccacaaacgcggtactgcctctagtgcccttgtttctcagtattttactacaaagccttttgcttgtgatccctcaagcttgccaatatacccacctagcaaggagatagatacaaagcatcgggacgaagcagcaaggaaaaaaattagcgggaatgggagacgtggtatagatccgaggaagccatcaaggaaggcccattcattcaatagattggcaccagttgagttacttcctacttactcacttttctacatgttatctgatgtgcggcaccaaactgaaacatttcagaaacgaattggtcatttagttcatagttcgattgaaagtgatgccaggttatgtgggaaactgcaaaacccgttagatcacaagaaagacgaagcttcccatgtgaagcatgcatcacaaggagatgtgcctttctcagggccgttacaagtctctaaatcaaacagttttgcttgggcgaaacgagaaaaagatgacgtatgtgttagggtgcataatcgatctctctcaagaggttacattcctagcttgtcaggacattcccccgcattcaatgggaaaagtgatgttgaatccaagataaataaggatgaaaaggaggacaagacagattctcgaggcgaggagtcatatgagatggtgaagcgttctatgctaaagcagtggagacaacttgaacgtccagattcttttggtgcatctgacgagtatcactcgcaggaactgtcattgggactctatcagagagatgaaatggcaaaaaagatgggtaataatttgggtgatggggacaagatcgaattctcgggccctttgttgtctcaatcttatggagttgatgaactgttggaacgccatgaacgcaacatccgcaagctaattcgaaaaccgtggtttcaaaaagataagaaacaggggaagtga

SEQ ID NO: 88980 - protein, 704 aa, Arabidopsis thaliana
  peptide (1)..(704): Ceres Seq. ID no. 12714589
MGCVSSKQTVSVTPAIDHSGVFKDNENECSGSGRIVVEDPPRPTLKKLVSWRSRSGKRRSQKSGSELGSESGRASDSLSFRLGNVSRYLEAEQVAAGWPAWLSNVAGEAIHGWVPLRSDAFEKLEKIGQGTYSNVFRAVETETGRIVALKKVRFDNFEPESVKFMAREILILRRLNHPNIIKLEGLITSKLSCNIQLVFEYMEHDLTGLLSSPDIKFTTPQIKCYMKQLLSGLDHCHSRGVMHRDIKGSNLLLSNEGILKVADFGLANFSNSSGHKKKPLTSRVVTLWYRPPELLLGATDYGASVDLWSVGCVFAELLLGKPILRGRTEVEQLHKIFKLCGSPPEDYWKKSKLPHAMLFKPQQTYDSCLRETLKDLSETEINLIETLLSIDPHKRGTASSALVSQYFTTKPFACDPSSLPIYPPSKEIDTKHRDEAARKKISGNGRRGIDPRKPSRKAHSFNRLAPVELLPTYSLFYMLSDVRHQTETFQKRIGHLVHSSIESDARLCGKLQNPLDHKKDEASHVKHASQGDVPFSGPLQVSKSNSFAWAKREKDDVCVRVHNRSLSRGYIPSLSGHSPAFNGKSDVESKINKDEKEDKTDSRGEESYEMVKRSMLKQWRQLERPDSFGASDEYHSQELSLGLYQRDEMAKKMGNNLGDGDKIEFSGPLLSQSYGVDELLERHERNIRKLIRKPWFQKDKKQGK

SEQ ID NO: 88981 - protein, 540 aa, Arabidopsis thaliana
  peptide (1)..(540): Ceres Seq. ID no. 12714590
MAREILILRRLNHPNIIKLEGLITSKLSCNIQLVFEYMEHDLTGLLSSPDIKFTTPQIKCYMKQLLSGLDHCHSRGVMHRDIKGSNLLLSNEGILKVADFGLANFSNSSGHKKKPLTSRVVTLWYRPPELLLGATDYGASVDLWSVGCVFAELLLGKPILRGRTEVEQLHKIFKLCGSPPEDYWKKSKLPHAMLFKPQQTYDSCLRETLKDLSETEINLIETLLSIDPHKRGTASSALVSQYFTTKPFACDPSSLPIYPPSKEIDTKHRDEAARKKISGNGRRGIDPRKPSRKAHSFNRLAPVELLPTYSLFYMLSDVRHQTETFQKRIGHLVHSSIESDARLCGKLQNPLDHKKDEASHVKHASQGDVPFSGPLQVSKSNSFAWAKREKDDVCVRVHNRSLSRGYIPSLSGHSPAFNGKSDVESKINKDEKEDKTDSRGEESYEMVKRSMLKQWRQLERPDSFGASDEYHSQELSLGLYQRDEMAKKMGNNLGDGDKIEFSGPLLSQSYGVDELLERHERNIRKLIRKPWFQKDKKQGK

SEQ ID NO: 88982 - protein, 503 aa, Arabidopsis thaliana
  peptide (1)..(503): Ceres Seq. ID no. 12714591
MEHDLTGLLSSPDIKFTTPQIKCYMKQLLSGLDHCHSRGVMHRDIKGSNLLLSNEGILKVADFGLANFSNSSGHKKKPLTSRVVTLWYRPPELLLGATDYGASVDLWSVGCVFAELLLGKPILRGRTEVEQLHKIFKLCGSPPEDYWKKSKLPHAMLFKPQQTYDSCLRETLKDLSETEINLIETLLSIDPHKRGTASSALVSQYFTTKPFACDPSSLPIYPPSKEIDTKHRDEAARKKISGNGRRGIDPRKPSRKAHSFNRLAPVELLPTYSLFYMLSDVRHQTETFQKRIGHLVHSSIESDARLCGKLQNPLDHKKDEASHVKHASQGDVPFSGPLQVSKSNSFAWAKREKDDVCVRVHNRSLSRGYIPSLSGHSPAFNGKSDVESKINKDEKEDKTDSRGEESYEMVKRSMLKQWRQLERPDSFGASDEYHSQELSLGLYQRDEMAKKMGNNLGDGDKIEFSGPLLSQSYGVDELLERHERNIRKLIRKPWFQKDKKQGK

SEQ ID NO: 88983 - DNA, 1114 bp, Arabidopsis thaliana
  misc_feature (1)..(1114): Ceres Seq. ID no. 12714596
  misc_feature (1)..(1114): Ortholog of  Ceres SEQ ID NO 15178317 as cited in SEQ ID NO 52489
  misc_feature (1)..(1114): Ortholog of  Ceres SEQ ID NO 14314415 as cited in SEQ ID NO 57442
attgaaaggcgtttcagagtcaccatgttttacgacgcgtgtctctttttcagccggttttcttctcgctggttacatcagagcttcggagatattatataactcaacgacgtagctgttgcattttttgtttttgcaatgatcttcatcttcatgaccggataaactcttagagaaagattcaaagtgattatctttgtggatccctccattgctatgtggaatttagcttcaaaatcgatcagagaaggttttatatcgaagggagaagaagctgctacaaaaccaagaagagctactttagatagatcaggagatggaagaaagacaacaaaggaagaaaaattggagtgtcccatttgctgggaatcattcaacgttgttgagaatgtaccttatgtcttatggtgtggtcatacaatctgcaagtactgtctcttagggcttcaacgtgccattgtcatcaaatcctctgctttaccattccagcttcccttcttcgttgcttgcccttggtgcaatattctctctttaaggctggtttgcaatggaaccatcagatttccttccaagaacttttaccttctgtggatggtagaaagcatgaatggctccagatcggaggcacccagcgacaacaaaagggttgcttcagggcagagagacttgagaaataggtgtgatggagtgagtaataccgccttgggtgatgaagggttgctggacaatcgcagctggtggaatggtgtgaccagaggattcttcagaactgggaggctccatgactcggtacgtaagtcaatggctcttgttgctcatttgttggctaagtttcctctggtagtcatattcctgttgatggctttatatgcaatccctgtgagtgctgcagttctcggggtttatttctttgttacgtttgctttggctgtcccgtcgtttctcgtcctttattttgccttcccgagcttaaactggctgatcagagagattgcaacctgactcattgtactgtttctttcttcctgtatgtttcctgacttgtaagaaacacgagatagagccaacgttgtttacactcaatatagacaagaagaagagaagatctttattt

SEQ ID NO: 88984 - protein, 261 aa, Arabidopsis thaliana
  peptide (1)..(261): Ceres Seq. ID no. 12714597
MWNLASKSIREGFISKGEEAATKPRRATLDRSGDGRKTTKEEKLECPICWESFNVVENVPYVLWCGHTICKYCLLGLQRAIVIKSSALPFQLPFFVACPWCNILSLRLVCNGTIRFPSKNFYLLWMVESMNGSRSEAPSDNKRVASGQRDLRNRCDGVSNTALGDEGLLDNRSWWNGVTRGFFRTGRLHDSVRKSMALVAHLLAKFPLVVIFLLMALYAIPVSAAVLGVYFFVTFALAVPSFLVLYFAFPSLNWLIREIAT

SEQ ID NO: 88985 - protein, 136 aa, Arabidopsis thaliana
  peptide (1)..(136): Ceres Seq. ID no. 12714598
MVESMNGSRSEAPSDNKRVASGQRDLRNRCDGVSNTALGDEGLLDNRSWWNGVTRGFFRTGRLHDSVRKSMALVAHLLAKFPLVVIFLLMALYAIPVSAAVLGVYFFVTFALAVPSFLVLYFAFPSLNWLIREIAT

SEQ ID NO: 88986 - protein, 132 aa, Arabidopsis thaliana
  peptide (1)..(132): Ceres Seq. ID no. 12714599
MNGSRSEAPSDNKRVASGQRDLRNRCDGVSNTALGDEGLLDNRSWWNGVTRGFFRTGRLHDSVRKSMALVAHLLAKFPLVVIFLLMALYAIPVSAAVLGVYFFVTFALAVPSFLVLYFAFPSLNWLIREIAT

SEQ ID NO: 88987 - DNA, 3780 bp, Arabidopsis thaliana
  misc_feature (1)..(3780): Ceres Seq. ID no. 12714653
  misc_feature (1)..(3780): Ortholog of  Ceres SEQ ID NO 14316302 as cited in SEQ ID NO 55232
  misc_feature (1)..(3780): Ortholog of  Ceres SEQ ID NO 14308274 as cited in SEQ ID NO 55597
  misc_feature (1)..(3780): Ortholog of  Ceres SEQ ID NO 13659710 as cited in SEQ ID NO 60808
atgggaggcggaaatcttcattcccttccgccggaaaacgcttccgtttctgcatcttatgcggtgaccgttggaaataccaagctttctgatgctccggttcttttcttcgtttactgccacaaggctttccgtgctcagctggtggagctccggcgtttcgctactgacgctgctgaagccgattcctttagtggggatctggcggtggagctctcccggaagtttgagttcttgaagcttgtatataagtatcatagcgcagctgaagatgaggttatatttttggcgctagataaacgagtgaaaaacatagtttctaattactcacttgagcatgctggcacagatgatctctttacctcaattttccactggctacatgttcttgaagaagaaataggaagtagaagcgatgtacttcgtgaagttattttatgcataggcaccatccagtcatctatatgccaacatatgcttaaagaagagcggcaggtgtttcctttgttaatagagaagttttctttccgagaacaagcatcacttgtgtggcaattcatttgtagtgttccagtgatggtgcttgaagactttttgccatggatgatctctcatctctctcacgaggagaaaattgaagttgagaattgtataaaagatgttgccccaaatgaagactcattgcaacaggtcataagctcttggctgcttgacgatagtcaatcttcttgtgggactcctacagagatcatgaaaggagtccagtatgttaatgtgtctaaaagtttgaagaaatcacctgagtcacatccgtcaagcggatgttttcaacgcttttgggagtggagtaaaaagtccctttcaattccaaatgtaggacggagcccaattcatggtcttagactttttcaaaatgcaattgaaaaagatttgagagatattcaagaaggattatgccaagcaaaattccaaacccttattttggatcttgatgtactgatggctagattaaacttccttgctgatgtccttgtttcttatagcaatgcatttaagaagttctttcacccagtgttagaagaaatgacagctcgccgctcttcaactgccaaacagttcaacatagatgattgtcttgagaattttcagagattgttatacaaaagtgctgatgataaaacaaagacggacaattttctattgcagcttcaggaggaacttgagtcccttataatccaagtaacaaagcaatttgccatacagagaacagaggtattcccaatcatcagcaagaattgcaaccatgaaatgcagaagcagctcctatacacaagcattcatgtcttacctcttggattactaaagtgtgtcatactttggttttctgctcatttatcagaagaagaatctcaatccattcttcatttcttaagtttggaagattcttctcccaagaaatcatttccacgcctcttgctacagtggcttcgttttggctattcaggcaaaacctctgttgaaagattttggaaacagttggatgttatgttcaaagtaagatgttcctgccaaaaggagcacactgaagaagcatcaggatcattttccaaccaaacacagctgcaactatgtaaagtatctaaagatgtttatcctagaaagaaagataagtcttcaacctgcttcatgtcaatggatctagctgttggagacatgtatgagacaccttactcaagtcgaatgaatcaacaaatgactttctcaggaaagcttaagcctcctctccatctcccagatttttttggtgagaagaatatggatgatcctatgattatggatgttaaaccaattgacctccttttcttcttccacaaggcaatgaagatggatttggactaccttgtttgtggatcaacaagattggcagccgactttcgtttcctcgcggagtttcagcaacggttccatatgataaagtttttgtatcagatacattctgatgcagaagatgagattgcatttccagcattggaagccaagggacagctaaaaaacattagtcactcgtttagcattgatcatgagctagaaactaaacacttcgacaaagtttcgttcattttgaatgagatgtcagagctgaacatgttggtttctaccatcaataccactgcagctgaccacgaccgaaaaatgaagtatgagcggttatgtctcagtctccgagagatttgcaaatcaatgcacaagctattgtctgagcatatccaacatgaagaaactgagctttggggtctattcaggaactgcttctctattgaagaacaagagaaaatcataggatgcatgctcgggagaataagtggggaaatattgcaggatatgattccttggttaatggaatctttaacctctgatgaacagcttgccgcgatgtccttgtggcgccaagcaacaaggaaaacaatgtttgtcgaatggctaacagaatggtataacggtcatgttttacaagaggaagcaggagaagcaaacaacgatccatttggggattcagatccactagagattgtctggaagtatctctttgaagcatctgctgatggggaaaaagggagcatgcgcagcagccttctcaaactcccgaagacgaattttacaggtattatgaatcagcctcctcctaattacaaggttgaagttggcaaaaaagaggaaaaagatctagaacggtcagaaagtaaaaagatatgcagaggatctaaccaagagggggacaaagaacaaactgacaaaatgtctcagaaggttagccagtttggtccatccaagaaatatgaacaactgttaacaatgagtgaagaagaacttgtggttgtgattaagaaaatatcatgcgactcttccctggatcctcagaagaaagactatatcaagcagaacttgttaatgagtcggtggaatatctcacaacgtacatataatttggaaccatcctctctctcgagcaacatggaaacagttcatggtcaacatccatcatatcgagatcctcacagtttgatctttggttgcaatcactacaagagaaattgtaaacttcttgctccttgttgtgacaagctcttcacatgtatacgatgccatgatgaagaagctgatcactcggtggataggaaacagattacaaagatgatgtgcatgaaatgcctcttgattcaaccgattggtgcaaattgctcaaatacttcgtgcaagtcgtcaatgggaaaatacttctgcaaaatatgcaaattatatgacgatgaaaggaaaatttatcactgtccttactgcaacctctgtcgagtagggaaaggattgggtattgactacttccactgcatgaaatgcaatgcttgtatgtcacgtaccttagtagagcatgtttgcagggaaaagtgcttagaagataattgtccgatttgccatgagtatatcttcacctccagctccccagtgaaggctcttccttgtggtcacttgatgcactccacatgctttcaggagtacacatgttcacattacacatgccctgtctgcagcaagtcgcttggagatatgcaggtctactttaagatgttagacgcattgcttgcagaagagaagatgcctgatgaatactccaacaaaactcaggtgatcttgtgtaatgattgtggaagaaaaggaaatgctccttaccattggctttaccacaaatgcacaacctgtggctcctacaactcaaggctcctttag

SEQ ID NO: 88988 - protein, 1259 aa, Arabidopsis thaliana
  peptide (1)..(1259): Ceres Seq. ID no. 12714654
MGGGNLHSLPPENASVSASYAVTVGNTKLSDAPVLFFVYCHKAFRAQLVELRRFATDAAEADSFSGDLAVELSRKFEFLKLVYKYHSAAEDEVIFLALDKRVKNIVSNYSLEHAGTDDLFTSIFHWLHVLEEEIGSRSDVLREVILCIGTIQSSICQHMLKEERQVFPLLIEKFSFREQASLVWQFICSVPVMVLEDFLPWMISHLSHEEKIEVENCIKDVAPNEDSLQQVISSWLLDDSQSSCGTPTEIMKGVQYVNVSKSLKKSPESHPSSGCFQRFWEWSKKSLSIPNVGRSPIHGLRLFQNAIEKDLRDIQEGLCQAKFQTLILDLDVLMARLNFLADVLVSYSNAFKKFFHPVLEEMTARRSSTAKQFNIDDCLENFQRLLYKSADDKTKTDNFLLQLQEELESLIIQVTKQFAIQRTEVFPIISKNCNHEMQKQLLYTSIHVLPLGLLKCVILWFSAHLSEEESQSILHFLSLEDSSPKKSFPRLLLQWLRFGYSGKTSVERFWKQLDVMFKVRCSCQKEHTEEASGSFSNQTQLQLCKVSKDVYPRKKDKSSTCFMSMDLAVGDMYETPYSSRMNQQMTFSGKLKPPLHLPDFFGEKNMDDPMIMDVKPIDLLFFFHKAMKMDLDYLVCGSTRLAADFRFLAEFQQRFHMIKFLYQIHSDAEDEIAFPALEAKGQLKNISHSFSIDHELETKHFDKVSFILNEMSELNMLVSTINTTAADHDRKMKYERLCLSLREICKSMHKLLSEHIQHEETELWGLFRNCFSIEEQEKIIGCMLGRISGEILQDMIPWLMESLTSDEQLAAMSLWRQATRKTMFVEWLTEWYNGHVLQEEAGEANNDPFGDSDPLEIVWKYLFEASADGEKGSMRSSLLKLPKTNFTGIMNQPPPNYKVEVGKKEEKDLERSESKKICRGSNQEGDKEQTDKMSQKVSQFGPSKKYEQLLTMSEEELVVVIKKISCDSSLDPQKKDYIKQNLLMSRWNISQRTYNLEPSSLSSNMETVHGQHPSYRDPHSLIFGCNHYKRNCKLLAPCCDKLFTCIRCHDEEADHSVDRKQITKMMCMKCLLIQPIGANCSNTSCKSSMGKYFCKICKLYDDERKIYHCPYCNLCRVGKGLGIDYFHCMKCNACMSRTLVEHVCREKCLEDNCPICHEYIFTSSSPVKALPCGHLMHSTCFQEYTCSHYTCPVCSKSLGDMQVYFKMLDALLAEEKMPDEYSNKTQVILCNDCGRKGNAPYHWLYHKCTTCGSYNSRLL

SEQ ID NO: 88989 - protein, 1101 aa, Arabidopsis thaliana
  peptide (1)..(1101): Ceres Seq. ID no. 12714655
MLKEERQVFPLLIEKFSFREQASLVWQFICSVPVMVLEDFLPWMISHLSHEEKIEVENCIKDVAPNEDSLQQVISSWLLDDSQSSCGTPTEIMKGVQYVNVSKSLKKSPESHPSSGCFQRFWEWSKKSLSIPNVGRSPIHGLRLFQNAIEKDLRDIQEGLCQAKFQTLILDLDVLMARLNFLADVLVSYSNAFKKFFHPVLEEMTARRSSTAKQFNIDDCLENFQRLLYKSADDKTKTDNFLLQLQEELESLIIQVTKQFAIQRTEVFPIISKNCNHEMQKQLLYTSIHVLPLGLLKCVILWFSAHLSEEESQSILHFLSLEDSSPKKSFPRLLLQWLRFGYSGKTSVERFWKQLDVMFKVRCSCQKEHTEEASGSFSNQTQLQLCKVSKDVYPRKKDKSSTCFMSMDLAVGDMYETPYSSRMNQQMTFSGKLKPPLHLPDFFGEKNMDDPMIMDVKPIDLLFFFHKAMKMDLDYLVCGSTRLAADFRFLAEFQQRFHMIKFLYQIHSDAEDEIAFPALEAKGQLKNISHSFSIDHELETKHFDKVSFILNEMSELNMLVSTINTTAADHDRKMKYERLCLSLREICKSMHKLLSEHIQHEETELWGLFRNCFSIEEQEKIIGCMLGRISGEILQDMIPWLMESLTSDEQLAAMSLWRQATRKTMFVEWLTEWYNGHVLQEEAGEANNDPFGDSDPLEIVWKYLFEASADGEKGSMRSSLLKLPKTNFTGIMNQPPPNYKVEVGKKEEKDLERSESKKICRGSNQEGDKEQTDKMSQKVSQFGPSKKYEQLLTMSEEELVVVIKKISCDSSLDPQKKDYIKQNLLMSRWNISQRTYNLEPSSLSSNMETVHGQHPSYRDPHSLIFGCNHYKRNCKLLAPCCDKLFTCIRCHDEEADHSVDRKQITKMMCMKCLLIQPIGANCSNTSCKSSMGKYFCKICKLYDDERKIYHCPYCNLCRVGKGLGIDYFHCMKCNACMSRTLVEHVCREKCLEDNCPICHEYIFTSSSPVKALPCGHLMHSTCFQEYTCSHYTCPVCSKSLGDMQVYFKMLDALLAEEKMPDEYSNKTQVILCNDCGRKGNAPYHWLYHKCTTCGSYNSRLL

SEQ ID NO: 88990 - protein, 1067 aa, Arabidopsis thaliana
  peptide (1)..(1067): Ceres Seq. ID no. 12714656
MVLEDFLPWMISHLSHEEKIEVENCIKDVAPNEDSLQQVISSWLLDDSQSSCGTPTEIMKGVQYVNVSKSLKKSPESHPSSGCFQRFWEWSKKSLSIPNVGRSPIHGLRLFQNAIEKDLRDIQEGLCQAKFQTLILDLDVLMARLNFLADVLVSYSNAFKKFFHPVLEEMTARRSSTAKQFNIDDCLENFQRLLYKSADDKTKTDNFLLQLQEELESLIIQVTKQFAIQRTEVFPIISKNCNHEMQKQLLYTSIHVLPLGLLKCVILWFSAHLSEEESQSILHFLSLEDSSPKKSFPRLLLQWLRFGYSGKTSVERFWKQLDVMFKVRCSCQKEHTEEASGSFSNQTQLQLCKVSKDVYPRKKDKSSTCFMSMDLAVGDMYETPYSSRMNQQMTFSGKLKPPLHLPDFFGEKNMDDPMIMDVKPIDLLFFFHKAMKMDLDYLVCGSTRLAADFRFLAEFQQRFHMIKFLYQIHSDAEDEIAFPALEAKGQLKNISHSFSIDHELETKHFDKVSFILNEMSELNMLVSTINTTAADHDRKMKYERLCLSLREICKSMHKLLSEHIQHEETELWGLFRNCFSIEEQEKIIGCMLGRISGEILQDMIPWLMESLTSDEQLAAMSLWRQATRKTMFVEWLTEWYNGHVLQEEAGEANNDPFGDSDPLEIVWKYLFEASADGEKGSMRSSLLKLPKTNFTGIMNQPPPNYKVEVGKKEEKDLERSESKKICRGSNQEGDKEQTDKMSQKVSQFGPSKKYEQLLTMSEEELVVVIKKISCDSSLDPQKKDYIKQNLLMSRWNISQRTYNLEPSSLSSNMETVHGQHPSYRDPHSLIFGCNHYKRNCKLLAPCCDKLFTCIRCHDEEADHSVDRKQITKMMCMKCLLIQPIGANCSNTSCKSSMGKYFCKICKLYDDERKIYHCPYCNLCRVGKGLGIDYFHCMKCNACMSRTLVEHVCREKCLEDNCPICHEYIFTSSSPVKALPCGHLMHSTCFQEYTCSHYTCPVCSKSLGDMQVYFKMLDALLAEEKMPDEYSNKTQVILCNDCGRKGNAPYHWLYHKCTTCGSYNSRLL

SEQ ID NO: 88991 - DNA, 1177 bp, Arabidopsis thaliana
  misc_feature (1)..(1177): Ceres Seq. ID no. 12714661
  misc_feature (1)..(1177): Ortholog of  Ceres SEQ ID NO 14311934 as cited in SEQ ID NO 51605
aactcacaccactccattgcccattgctctgtgtactttgcttctttaggagaaagaaagcacaaggggcaaaatcggaaagattatcatggccgacggtagtactagttcttcggagtccactaccgcctgcgctggaagcggcacaagaagagagattatgctgttcggagtcagggttgtgcttgacccgatgagaaagtgcgtgagtttgaacaatctgtctgactatgaacagacggcggagactccaaagatcgacggcgaagatagagatgaacaagatatgaacaaaaccccggccggttacgcctcggcggatgaagctcttcccatgtcttcttctaacggcaaaatcgagaggaaacgaggagttccatggactgaagaagaacacaagctgttcttgcttgggctgcagagagtcggtaaaggagattggaaaggaatatcaagaaactttgtcaagaccagaacctctacacaagttgctagtcatgctcagaaatacttcctcaggcgaagtaatcttaaccgtcgccgccgaagatctagcctttttgacatgactactgatacggtcatacccatggaagaagatcaccaagtgcttatacaggagaacacatctcaatcatcttctcctgtaccggaaatcaacaacttctctatacatccggttatgcaagtctttcccgagttcccggtaccaacagggaatcaatcatacggacagcttacttcatcgaatctcatcaatttggttccattaacttttcagtcaagtccagcaccgctttctctcaacctctcactagcttcatctaatcttaatgaaccatctccttcaatgcatccagcattcaacacgattggagtcgcttagagcttatcctaaaggtgaaaatctgcaacacaccctgtttgtttctttgctgtacagataggtcttgactttgttataaaaaaattcgtcaaatttatgtatttggctaaaaaaaatctgttgaaaagaagaataataaacagagtttggagataggacttaagtggggttttagggttcataatcatcctgtgtttttccttccatgtttggaagttgttgtaatactctctaagttcattcgtgtggatctatcaaaacttataaatcatattaacgttatgtttgttt

SEQ ID NO: 88992 - protein, 265 aa, Arabidopsis thaliana; identical to SEQ ID NO: 40934
  peptide (1)..(265): Ceres Seq. ID no. 12714662

SEQ ID NO: 88993 - protein, 241 aa, Arabidopsis thaliana; identical to SEQ ID NO: 40935
  peptide (1)..(241): Ceres Seq. ID no. 12714663

SEQ ID NO: 88994 - protein, 230 aa, Arabidopsis thaliana; identical to SEQ ID NO: 40936
  peptide (1)..(230): Ceres Seq. ID no. 12714664

SEQ ID NO: 88995 - DNA, 663 bp, Arabidopsis thaliana
  misc_feature (1)..(663): Ceres Seq. ID no. 12714690
  misc_feature (1)..(663): Ortholog of  Ceres SEQ ID NO 15179271 as cited in SEQ ID NO 0
atggtgctgaaagaagaatcatttttcaaccctaatggctcgacaaaagactctagtgatactgcatctaccctgctatctgagaaatatgctgattttacaaagcaaagaaatctatccgctcgagcatcgtctatgctggaagctgaacgagattcatcaaaaagatggagtcctattcttgagatgcagtacagaggaggacttttcaagggaagatgccaaggaggccttcccgaaggaaagacagacttcttagttaatccgaaagtaacagctgactattcccaccagggtcgtttggtacttggagatggaagcatatatgatggaatgtggcacaacggtaaaagatctggtctcggaacattctacttcaagaatggagacgtgttccaaggcacatggagagaagatttaatacacggaaagggttggttttatttccacaaaggtgatcgatggtttgcaaatttctggaaaggaaaagccagtggcgaaggccggttctattcaaagtccggtgagatattctttggacatttcaaagatggttggcgccacggacaattcctctgtatagatttggatggaacaagatactctgaaacttgggacgacggtgttctcattgaccggaaacaagtggacgccggagattga

SEQ ID NO: 88996 - protein, 220 aa, Arabidopsis thaliana
  peptide (1)..(220): Ceres Seq. ID no. 12714691
MVLKEESFFNPNGSTKDSSDTASTLLSEKYADFTKQRNLSARASSMLEAERDSSKRWSPILEMQYRGGLFKGRCQGGLPEGKTDFLVNPKVTADYSHQGRLVLGDGSIYDGMWHNGKRSGLGTFYFKNGDVFQGTWREDLIHGKGWFYFHKGDRWFANFWKGKASGEGRFYSKSGEIFFGHFKDGWRHGQFLCIDLDGTRYSETWDDGVLIDRKQVDAGD

SEQ ID NO: 88997 - protein, 175 aa, Arabidopsis thaliana
  peptide (1)..(175): Ceres Seq. ID no. 12714692
MLEAERDSSKRWSPILEMQYRGGLFKGRCQGGLPEGKTDFLVNPKVTADYSHQGRLVLGDGSIYDGMWHNGKRSGLGTFYFKNGDVFQGTWREDLIHGKGWFYFHKGDRWFANFWKGKASGEGRFYSKSGEIFFGHFKDGWRHGQFLCIDLDGTRYSETWDDGVLIDRKQVDAGD

SEQ ID NO: 88998 - protein, 158 aa, Arabidopsis thaliana
  peptide (1)..(158): Ceres Seq. ID no. 12714693
MQYRGGLFKGRCQGGLPEGKTDFLVNPKVTADYSHQGRLVLGDGSIYDGMWHNGKRSGLGTFYFKNGDVFQGTWREDLIHGKGWFYFHKGDRWFANFWKGKASGEGRFYSKSGEIFFGHFKDGWRHGQFLCIDLDGTRYSETWDDGVLIDRKQVDAGD

SEQ ID NO: 88999 - DNA, 741 bp, Arabidopsis thaliana
  misc_feature (1)..(741): Ceres Seq. ID no. 12714698
  misc_feature (1)..(741): Ortholog of  Ceres SEQ ID NO 13595658 as cited in SEQ ID NO 59888
  misc_feature (1)..(741): Ortholog of  Ceres SEQ ID NO 13661330 as cited in SEQ ID NO 61614
  misc_feature (1)..(741): Ortholog of  Ceres SEQ ID NO 13596025 as cited in SEQ ID NO 62024
  misc_feature (1)..(741): Ortholog of  Ceres SEQ ID NO 13662324 as cited in SEQ ID NO 62162
  misc_feature (1)..(741): Ortholog of  Ceres SEQ ID NO 12625713 as cited in SEQ ID NO 64160
  misc_feature (1)..(741): Ortholog of  Ceres SEQ ID NO 15174373 as cited in SEQ ID NO 0
atggcgaattactcaagtattcacattctcttcttggtcttcatcacaagcggcattgctgtttccgccgccaccgtcttcactttacagaacagttgtccttacaccgtttggcctggaattctctccggcaacgacaacaccctcggcgacggcggatttcccttaacaccaggcgcttccgtacagctcacggctcctgcaggatggtcaggacggttctgggctcgtaccggctgcaacttcgacgcctccggccacggtaactgcggcaccggagactgcggcggtgttcttaaatgtaacggcggcggagttccaccagtcactctggctgaattcacacttgtaggcgacggcggcaaggatttctacgacgtgagtctcgtcgacggttacaatgtcgagatggggattaaacctcaaggaggttccggtgattgccattacgccggctgcgtcgccgacgtcaacgcggtttgccctaacgagcttcggctcatggatccacatacaggaatcatcgcggcgtgtaaaagcgcttgtgcggcgtttaattctgaggagttctgttgtaccggtgctcacgcgacgccgcaaacttgttctccgacgcattactcggcgatgtttaaaagcgcttgccctggtgcttacagttacgcctacgacgacgccacgagcaccttcacttgtaccggctctaactacttgatctctttctgccccacccggaactaa

SEQ ID NO: 89000 - protein, 246 aa, Arabidopsis thaliana
  peptide (1)..(246): Ceres Seq. ID no. 12714699
MANYSSIHILFLVFITSGIAVSAATVFTLQNSCPYTVWPGILSGNDNTLGDGGFPLTPGASVQLTAPAGWSGRFWARTGCNFDASGHGNCGTGDCGGVLKCNGGGVPPVTLAEFTLVGDGGKDFYDVSLVDGYNVEMGIKPQGGSGDCHYAGCVADVNAVCPNELRLMDPHTGIIAACKSACAAFNSEEFCCTGAHATPQTCSPTHYSAMFKSACPGAYSYAYDDATSTFTCTGSNYLISFCPTRN

SEQ ID NO: 89001 - DNA, 1197 bp, Arabidopsis thaliana
  misc_feature (1)..(1197): Ceres Seq. ID no. 12714706
  misc_feature (1)..(1197): Ortholog of  Ceres SEQ ID NO 14303355 as cited in SEQ ID NO 59746
  misc_feature (1)..(1197): Ortholog of  Ceres SEQ ID NO 14302415 as cited in SEQ ID NO 62781
gtatatgccttcgtagtaaaattttaatgttgtgattttggatgttctccttgtcttcctccttcataagatgggtgtgttttcattctccagcggtgtgcaatgctccagaaaaaaaaaaaatcttaagtggctatacaccacaagttatacactagaagcaaaaagttcacgtctatctatcgaagacgacgaagcgttcttggcacccgagataaatgccttcggggatcagttcagggactacgatgccgagaatgagaggcagaaaggcgtggaagccttttagaaatctcaacacattaaccaaactgtcgactttgtgatagagacgagggcagaatttggtaaattggataaagaagtgatgagcatttgggaatgttgtgagcttcttaatgaggtggtggacgagagtgatccagatctcgacgagcctcaaattcaacatttgcttcaatctgccgaagccatcagcaaggattaccttagcgaagcttggcttcatctaaccgctctcattcatggtgacatagattccttgttaggtgtgcatttgatgaatctaacgtacaacacgggtatttaaccaaaaatggcatctacagtcaagcatgtggactaaacaatgagcatgatgtcatggggccatgacgactacatgtacatggaatttacactcaaggatgtggattaaacaatatagttaagcaaagttcattttgacttgatcttcatcacgtcaacatgaactttgattttactgtataacttgtatttactgtaataacaacaatatataacaattagaggttgtagatattatgatcaattacttaatcatgtcttgatcctaataactacggtctctgaattgctgtatattattattattacagcaagtacaagttataccgcaagatcaaagttcacgttgatgtggagaaagtcaagtcctactagatgtctctgataggtggtggtggagaaagttcacgttgatctagaaatatattccggaggtggtggtgaagtgtggagaagaaaagaagtggggcatcacttagaagaattcaagaaatacagatagtacaatatcttaaataaagagacatttgtatatgtatcataagttaacataactccataaacaaggagaactagtgtatctacaaagattgtaagtgtaatccatat

SEQ ID NO: 89002 - protein, 73 aa, Arabidopsis thaliana
  peptide (1)..(73): Ceres Seq. ID no. 12714707
MSIWECCELLNEVVDESDPDLDEPQIQHLLQSAEAISKDYLSEAWLHLTALIHGDIDSLLGVHLMNLTYNTGI

SEQ ID NO: 89003 - protein, 72 aa, Arabidopsis thaliana
  peptide (1)..(72): Ceres Seq. ID no. 12714708
MGVFSFSSGVQCSRKKKNLKWLYTTSYTLEAKSSRLSIEDDEAFLAPEINAFGDQFRDYDAENERQKGVEAF

SEQ ID NO: 89004 - protein, 38 aa, Arabidopsis thaliana
  peptide (1)..(38): Ceres Seq. ID no. 12714709
MFSLSSSFIRWVCFHSPAVCNAPEKKKILSGYTPQVIH

SEQ ID NO: 89005 - DNA, 1042 bp, Arabidopsis thaliana
  misc_feature (1)..(1042): Ceres Seq. ID no. 12714710
  misc_feature (1)..(1042): Ortholog of  Ceres SEQ ID NO 13662367 as cited in SEQ ID NO 67774
atggctcaaatgtcgatgaccgtcgagaagagtatcaaagctgacgtgacggtgagccatgaccgtgtgaaaagggcttacgtcactttccttgctggaaacaaagactactggatgggtgtagttggtctagccaagggacttcgtaaggtgaaatctgcttatcctcttgtggttgcgattctcccggacgtgcctgaggaacaccgtcaaatcctgttggctcagggatgcatcatccgtgagattgaaccggtttatccaccggaaaacaaaaccggttattcaatggcctattacgttatcaactactccaagcttcgtatttgggagtttgtggagtatgaaaagatgatttatctagatggagacattcaagtatttagtaacatcgatcatcttttcgatactcctcgtggctacttgtacgctgtcaaagattgcttttgcgagatttcttggtccaaaactcctcaatttaagataggttactgccaacaatgtcctgaaaaggtgacatggcctgttgaaagtcttggttctccaccgccggtatatttcaacgccggtatgttggtttttgaacctaatctcctcacttacgaggatctccttcgtgttgttcaaatcaccactccgacatattttgccgaacaggattttctgaatgaatactttacagacatttacaagcccatcccttcgacctacaaccttgtaatggctatgctttggcgtcatcctgaacacattgaccttgaccaaatcagtgttattcattattgtgcaaatggttcgaagccttggagattcgatgaaactgaagagcatatggatcgtgaggacataaaaatgttggtgaagaaatggtgggatatttatgaagattcgagtttagattacaagaactttgtcgagactgagtccaaactgagtccgatcaatgcaaccttggcttccaaggaatctgttggcgatgtccttattagtcttgccccttccgctgcataaccaattctttatgtggaagctctatctatgc

SEQ ID NO: 89006 - protein, 336 aa, Arabidopsis thaliana
  peptide (1)..(336): Ceres Seq. ID no. 12714711
MAQMSMTVEKSIKADVTVSHDRVKRAYVTFLAGNKDYWMGVVGLAKGLRKVKSAYPLVVAILPDVPEEHRQILLAQGCIIREIEPVYPPENKTGYSMAYYVINYSKLRIWEFVEYEKMIYLDGDIQVFSNIDHLFDTPRGYLYAVKDCFCEISWSKTPQFKIGYCQQCPEKVTWPVESLGSPPPVYFNAGMLVFEPNLLTYEDLLRVVQITTPTYFAEQDFLNEYFTDIYKPIPSTYNLVMAMLWRHPEHIDLDQISVIHYCANGSKPWRFDETEEHMDREDIKMLVKKWWDIYEDSSLDYKNFVETESKLSPINATLASKESVGDVLISLAPSAA

SEQ ID NO: 89007 - protein, 333 aa, Arabidopsis thaliana
  peptide (1)..(333): Ceres Seq. ID no. 12714712
MSMTVEKSIKADVTVSHDRVKRAYVTFLAGNKDYWMGVVGLAKGLRKVKSAYPLVVAILPDVPEEHRQILLAQGCIIREIEPVYPPENKTGYSMAYYVINYSKLRIWEFVEYEKMIYLDGDIQVFSNIDHLFDTPRGYLYAVKDCFCEISWSKTPQFKIGYCQQCPEKVTWPVESLGSPPPVYFNAGMLVFEPNLLTYEDLLRVVQITTPTYFAEQDFLNEYFTDIYKPIPSTYNLVMAMLWRHPEHIDLDQISVIHYCANGSKPWRFDETEEHMDREDIKMLVKKWWDIYEDSSLDYKNFVETESKLSPINATLASKESVGDVLISLAPSAA

SEQ ID NO: 89008 - protein, 331 aa, Arabidopsis thaliana
  peptide (1)..(331): Ceres Seq. ID no. 12714713
MTVEKSIKADVTVSHDRVKRAYVTFLAGNKDYWMGVVGLAKGLRKVKSAYPLVVAILPDVPEEHRQILLAQGCIIREIEPVYPPENKTGYSMAYYVINYSKLRIWEFVEYEKMIYLDGDIQVFSNIDHLFDTPRGYLYAVKDCFCEISWSKTPQFKIGYCQQCPEKVTWPVESLGSPPPVYFNAGMLVFEPNLLTYEDLLRVVQITTPTYFAEQDFLNEYFTDIYKPIPSTYNLVMAMLWRHPEHIDLDQISVIHYCANGSKPWRFDETEEHMDREDIKMLVKKWWDIYEDSSLDYKNFVETESKLSPINATLASKESVGDVLISLAPSAA

SEQ ID NO: 89009 - DNA, 2221 bp, Arabidopsis thaliana
  misc_feature (1)..(2221): Ceres Seq. ID no. 12714714
  misc_feature (1)..(2221): Ortholog of  Ceres SEQ ID NO 13600595 as cited in SEQ ID NO 629
  misc_feature (1)..(2221): Ortholog of  Ceres SEQ ID NO 13593379 as cited in SEQ ID NO 20573
atggggttaaatttcagggaaaaggcatggatacttctggggattctttgttgttcatctttgatttgttcagttaaagcaattgtcacttacgatcgtaaagctgtgatcatcaatggtcagagaaggatccttctctctggctccattcactacccaagaagcacacctgagatgtggcctgaccttatacaaaaagccaaagatggagggttggatgttatacagacttatgttttctggaatgggcatgaaccttctcctggacaatattattttgaggacagatatgatctagttaagttcatcaaggtggtacaacaagctggtctttacgttcatctcaggattggtccctatgtttgcgctgaatggaactttggagggtttcctgtgtggctcaaatatgttcccggtatggtatttaggaccgacaatgaacctttcaaggctgcaatgcaaaaattcactgagaagattgtgaggatgatgaaagaagaaaaattatttgagactcaaggaggacccatcattctgtcacagatagagaatgagtatggaccaatagagtgggagataggagcaccagggaaggcatacacaaaatgggtagctgaaatggcacaaggactctccactggtgtcccatggattatgtgcaagcaagatgatgctcctaactctattataaacacatgtaatgggttttattgtgagaatttcaaaccaaactcggacaataagccgaaaatgtggacagagaactggactggttggtttacagagtttggaggtgcagtaccatacaggccagccgaagacattgccttatccgtggctcgcttcatacagaacggtggctctttcatcaactattatatgtaccatggaggaaccaacttcgacagaacagccggtgaattcatcgccaccagctatgactatgatgctcctcttgatgaatacgggttaccgagagaacctaagtatagtcacttgaaaaggctgcataaggtcatcaagctctgcgaaccggcattggtctctgctgatcctacagtcacatcactcggggataaacaagaagctcacgtgttcaagtctaagtcatcttgcgctgcttttctctcaaactacaacacaagttctgctgcaagagtcttgtttggcggatctacatatgatctgcctccttggtctgtcagtattctacccgactgcaaaactgagtattacaacactgccaaggtacaggtccgtacatcaagcatacacatgaagatggttcctacaaacacaccattctcttggggttcatacaacgaagagattccttctgcaaatgacaatggtaccttttcacaagatgggcttgtggaacagataagtatcaccagagacaagacagactatttctggtatctgacagatattacaatcagtcctgatgaaaagttcctaactggtgaagaccctcttcttactattgggtcagctgggcatgctcttcatgtattcgttaatggccagcttgcaggaactgcatatggatcactggagaagccaaagctaacatttagtcagaagatcaaattacatgcaggggtcaacaaacttgctctattgagtactgcagcgggtctgccgaacgttggcgtgcattatgagacttggaatactggagttcttggcccagtgacactgaatggagttaactccggaacatgggacatgactaaatggaaatggtcttacaagattggtactaagggtgaagctctgagcgttcataccttagccgggagttcaacggtagaatggaaagaaggatcattagtggctaaaaagcagcccttgacctggtacaagtctacttttgactcaccaacaggcaatgaaccattggctttagacatgaacacaatggggaaaggtcaaatgtggataaatgggcagaacatcggacgccactggccagcatatacagctcgtgggaaatgcgaacgctgcagctatgccgggactttcacagagaagaaatgtttgagtaactgtggagaagcttcacaaagatggtaccatgtgcctcgttcatggctgaagccaactaataaccttgtcattgtacttgaagaatggggtggtgaacccaatgggatctctcttgtaaaaagaacagccaaataatagctttctgactccatttttttcaggataaaat

SEQ ID NO: 89010 - protein, 728 aa, Arabidopsis thaliana
  peptide (1)..(728): Ceres Seq. ID no. 12714715
MGLNFREKAWILLGILCCSSLICSVKAIVTYDRKAVIINGQRRILLSGSIHYPRSTPEMWPDLIQKAKDGGLDVIQTYVFWNGHEPSPGQYYFEDRYDLVKFIKVVQQAGLYVHLRIGPYVCAEWNFGGFPVWLKYVPGMVFRTDNEPFKAAMQKFTEKIVRMMKEEKLFETQGGPIILSQIENEYGPIEWEIGAPGKAYTKWVAEMAQGLSTGVPWIMCKQDDAPNSIINTCNGFYCENFKPNSDNKPKMWTENWTGWFTEFGGAVPYRPAEDIALSVARFIQNGGSFINYYMYHGGTNFDRTAGEFIATSYDYDAPLDEYGLPREPKYSHLKRLHKVIKLCEPALVSADPTVTSLGDKQEAHVFKSKSSCAAFLSNYNTSSAARVLFGGSTYDLPPWSVSILPDCKTEYYNTAKVQVRTSSIHMKMVPTNTPFSWGSYNEEIPSANDNGTFSQDGLVEQISITRDKTDYFWYLTDITISPDEKFLTGEDPLLTIGSAGHALHVFVNGQLAGTAYGSLEKPKLTFSQKIKLHAGVNKLALLSTAAGLPNVGVHYETWNTGVLGPVTLNGVNSGTWDMTKWKWSYKIGTKGEALSVHTLAGSSTVEWKEGSLVAKKQPLTWYKSTFDSPTGNEPLALDMNTMGKGQMWINGQNIGRHWPAYTARGKCERCSYAGTFTEKKCLSNCGEASQRWYHVPRSWLKPTNNLVIVLEEWGGEPNGISLVKRTAK

SEQ ID NO: 89011 - protein, 670 aa, Arabidopsis thaliana
  peptide (1)..(670): Ceres Seq. ID no. 12714716
MWPDLIQKAKDGGLDVIQTYVFWNGHEPSPGQYYFEDRYDLVKFIKVVQQAGLYVHLRIGPYVCAEWNFGGFPVWLKYVPGMVFRTDNEPFKAAMQKFTEKIVRMMKEEKLFETQGGPIILSQIENEYGPIEWEIGAPGKAYTKWVAEMAQGLSTGVPWIMCKQDDAPNSIINTCNGFYCENFKPNSDNKPKMWTENWTGWFTEFGGAVPYRPAEDIALSVARFIQNGGSFINYYMYHGGTNFDRTAGEFIATSYDYDAPLDEYGLPREPKYSHLKRLHKVIKLCEPALVSADPTVTSLGDKQEAHVFKSKSSCAAFLSNYNTSSAARVLFGGSTYDLPPWSVSILPDCKTEYYNTAKVQVRTSSIHMKMVPTNTPFSWGSYNEEIPSANDNGTFSQDGLVEQISITRDKTDYFWYLTDITISPDEKFLTGEDPLLTIGSAGHALHVFVNGQLAGTAYGSLEKPKLTFSQKIKLHAGVNKLALLSTAAGLPNVGVHYETWNTGVLGPVTLNGVNSGTWDMTKWKWSYKIGTKGEALSVHTLAGSSTVEWKEGSLVAKKQPLTWYKSTFDSPTGNEPLALDMNTMGKGQMWINGQNIGRHWPAYTARGKCERCSYAGTFTEKKCLSNCGEASQRWYHVPRSWLKPTNNLVIVLEEWGGEPNGISLVKRTAK

SEQ ID NO: 89012 - protein, 589 aa, Arabidopsis thaliana
  peptide (1)..(589): Ceres Seq. ID no. 12714717
MVFRTDNEPFKAAMQKFTEKIVRMMKEEKLFETQGGPIILSQIENEYGPIEWEIGAPGKAYTKWVAEMAQGLSTGVPWIMCKQDDAPNSIINTCNGFYCENFKPNSDNKPKMWTENWTGWFTEFGGAVPYRPAEDIALSVARFIQNGGSFINYYMYHGGTNFDRTAGEFIATSYDYDAPLDEYGLPREPKYSHLKRLHKVIKLCEPALVSADPTVTSLGDKQEAHVFKSKSSCAAFLSNYNTSSAARVLFGGSTYDLPPWSVSILPDCKTEYYNTAKVQVRTSSIHMKMVPTNTPFSWGSYNEEIPSANDNGTFSQDGLVEQISITRDKTDYFWYLTDITISPDEKFLTGEDPLLTIGSAGHALHVFVNGQLAGTAYGSLEKPKLTFSQKIKLHAGVNKLALLSTAAGLPNVGVHYETWNTGVLGPVTLNGVNSGTWDMTKWKWSYKIGTKGEALSVHTLAGSSTVEWKEGSLVAKKQPLTWYKSTFDSPTGNEPLALDMNTMGKGQMWINGQNIGRHWPAYTARGKCERCSYAGTFTEKKCLSNCGEASQRWYHVPRSWLKPTNNLVIVLEEWGGEPNGISLVKRTAK

SEQ ID NO: 89013 - DNA, 1472 bp, Arabidopsis thaliana
  misc_feature (1)..(1472): Ceres Seq. ID no. 12714735
  misc_feature (1)..(1472): Ortholog of  Ceres SEQ ID NO 13596392 as cited in SEQ ID NO 62136
  misc_feature (1)..(1472): Ortholog of  Ceres SEQ ID NO 14313244 as cited in SEQ ID NO 66802
  misc_feature (1)..(1472): Ortholog of  Ceres SEQ ID NO 13654360 as cited in SEQ ID NO 67980
  misc_feature (1)..(1472): Ortholog of  Ceres SEQ ID NO 13596394 as cited in SEQ ID NO 68561
attcctgcggagaggagctaattctctctccttgggaagaagacgacgagcttaatacattcgacagtggagaatatcagattctttttggcgagggttggttgattccttcttattcatcagattaaggatcgtttccggtggctgaagagtaatagaaggaggaagaagaggagaggagaggtaaaaatgtcagacctagatcggcaaatagggcagcttaagcgatgcgaaccattgagcgaatcggaggtgaaggctctttgcctcaaagccatggaaattcttgttgaagagagtaatgttcagagagttgatgcccctgtcactttatgtggtgacatccatgggcagttctatgatatgatggagcttttcaaagttgggggtgattgtcctaagaccaactatttgtttatgggagattttgttgatcgtggatattattcggttgagacatttctacttctactcgcactcaaggttagatatccagaccgcataactctcatcagaggaaaccatgaaagcaggcaaatcacacagtaggtttatggattttatgatgagtgtttgcgtaaatatggctcttcaaatgtctggagatactgcaccgacatttttgactacatgagtctttcagctgttgtggagaacaagatattctgtgttcatggtggtctttctccagctattatgactcttgatcagattaggacaattgaccggaagcaagaagtaccacatgatggtgccatgtgtgatctcctatggtctgatcctgaagatattgttgatggctggggattgagccctcgtggtgccggattcctttttggtggcagtgttgtcacgtcttttaaccactcaaacaacatagactacatagcccgtgcccatcaactagttatggagggttacaaatggatgtttgatagccagattgtgacagtgtggtcagccccaaattactgttacagatgcggtaatgtggcttcaattctagagcttgacgagaatctaaataaagaattccgtgtgtttgatgcagcccagcaggactcgagagggcctcccgccaaaaagccggcccctgattacttcctataatgggcaaaacttcgaaaaccttattcccaaagtcgaactagcgtcaatattcaactccgttgaagaggaagagaattactattcgttcagtgtttaggttgcagtgcagaagaatatacaatagagttgtttcaggcgagctctacctaggccacaaagactgatcgaactggggttgtctaaaaaagatattgttgttgttgtttccggttttggtgtaactgtagtcaaaagagtgtttgtgtattggtagttaaagagtgattttgtcctgattcaagtttgtactttcttaggagataagacctcaaacagttttggagctcacagttatatcaatagaattcacagggaagcattag

SEQ ID NO: 89014 - protein, 159 aa, Arabidopsis thaliana
  peptide (1)..(159): Ceres Seq. ID no. 12714736
MSLSAVVENKIFCVHGGLSPAIMTLDQIRTIDRKQEVPHDGAMCDLLWSDPEDIVDGWGLSPRGAGFLFGGSVVTSFNHSNNIDYIARAHQLVMEGYKWMFDSQIVTVWSAPNYCYRCGNVASILELDENLNKEFRVFDAAQQDSRGPPAKKPAPDYFL

SEQ ID NO: 89015 - protein, 137 aa, Arabidopsis thaliana
  peptide (1)..(137): Ceres Seq. ID no. 12714737
MTLDQIRTIDRKQEVPHDGAMCDLLWSDPEDIVDGWGLSPRGAGFLFGGSVVTSFNHSNNIDYIARAHQLVMEGYKWMFDSQIVTVWSAPNYCYRCGNVASILELDENLNKEFRVFDAAQQDSRGPPAKKPAPDYFL

SEQ ID NO: 89016 - protein, 119 aa, Arabidopsis thaliana
  peptide (1)..(119): Ceres Seq. ID no. 12714738
MSDLDRQIGQLKRCEPLSESEVKALCLKAMEILVEESNVQRVDAPVTLCGDIHGQFYDMMELFKVGGDCPKTNYLFMGDFVDRGYYSVETFLLLLALKVRYPDRITLIRGNHESRQITQ

SEQ ID NO: 89017 - DNA, 1484 bp, Arabidopsis thaliana
  misc_feature (1)..(1484): Ceres Seq. ID no. 12714754
  misc_feature (1)..(1484): Ortholog of  Ceres SEQ ID NO 13594536 as cited in SEQ ID NO 51382
aagatttttgtgctcttattttgtttgtatcccactagcagggaactcgggcatctcgaggtcggcgagtttagtttcttcaaccctgcaaagatgggtcaggcctttttcagctgaaactggagataccgtggaagcagttgtgcctcatatgggggaatcaattactgatggcaccttggccacctttctgaagaaacctggtgagagagtccaggctgatgaggctattgcacaaattgaaactgataaggtgacaatagatattgctagcccagcaagtggtgtaatccaagagtttctagtcaacgaaggagatactgtagaaccaggaaccaaggtcgctattatatcaaagtctgaggatactgcatctcaggttaccccctctcagaagataccagagacaactgataccaaaccttctcctcctgctgaagataagcagaagcccagagtggaaagtgctcctgtagcagagaaacccaaagcaccatcctcaccacctccacccaaacagtctgctaaagaaccgcagcttcctcctaaggaaagagaaagacgggttccgatgacaagacttcggaaacgagttgcaacaagattgaaagactctcaaaatactttcgcgttgctgacaactttcaatgaagttgatatgacaaatttgatgaagctccgatcccaatacaaggatgcattttatgaaaagcatggagtgaagttggggcttatgtctggatttattaaagctgctgttagcgcccttcagcatcaaccagttgtaaatgcagttattgacggggatgatatcatatacagagactatgtggatatcagtatcgctgttggtacctctaagggacttgtagtaccagtcataagaggtgctgataaaatgaactttgccgagatagagaagacgataaactcacttgccaagaaggcaaatgaaggaaccatatccatagatgagatggctggcggatcattcaccgtttcaaatggcggtgtctatggaagtctcataagcactccgatcattaatcctcctcagtctgccatactcggcatgcactcgattgtgtcacgtccaatggtagtaggaggaagcgtagtgcctagaccaatgatgtatgtcgcacttacgtatgatcacaggctgattgatggtagagaggctgtgtacttcctgcgccgtgtcaaggatgttgtggaggatccacaaaggcttcttcttgacatataaaagatttggtttcgaggagtcacaaagtgtctggcttttgccagttatagacctgcagtgtctttaaaacgtttgggggtaacaacaattcttatctttcaagtttctttacagtttcccgagtattgcgggattggaagaataggcctcagtgtctacgttcttactttttacacagtttgatacagatatgttcaattttgactgaataagatacccttttgaggtttttcgg

SEQ ID NO: 89018 - protein, 415 aa, Arabidopsis thaliana
  peptide (1)..(415): Ceres Seq. ID no. 12714755
RFLCSYFVCIPLAGNSGISRSASLVSSTLQRWVRPFSAETGDTVEAVVPHMGESITDGTLATFLKKPGERVQADEAIAQIETDKVTIDIASPASGVIQEFLVNEGDTVEPGTKVAIISKSEDTASQVTPSQKIPETTDTKPSPPAEDKQKPRVESAPVAEKPKAPSSPPPPKQSAKEPQLPPKERERRVPMTRLRKRVATRLKDSQNTFALLTTFNEVDMTNLMKLRSQYKDAFYEKHGVKLGLMSGFIKAAVSALQHQPVVNAVIDGDDIIYRDYVDISIAVGTSKGLVVPVIRGADKMNFAEIEKTINSLAKKANEGTISIDEMAGGSFTVSNGGVYGSLISTPIINPPQSAILGMHSIVSRPMVVGGSVVPRPMMYVALTYDHRLIDGREAVYFLRRVKDVVEDPQRLLLDI

SEQ ID NO: 89019 - protein, 365 aa, Arabidopsis thaliana
  peptide (1)..(365): Ceres Seq. ID no. 12714756
MGESITDGTLATFLKKPGERVQADEAIAQIETDKVTIDIASPASGVIQEFLVNEGDTVEPGTKVAIISKSEDTASQVTPSQKIPETTDTKPSPPAEDKQKPRVESAPVAEKPKAPSSPPPPKQSAKEPQLPPKERERRVPMTRLRKRVATRLKDSQNTFALLTTFNEVDMTNLMKLRSQYKDAFYEKHGVKLGLMSGFIKAAVSALQHQPVVNAVIDGDDIIYRDYVDISIAVGTSKGLVVPVIRGADKMNFAEIEKTINSLAKKANEGTISIDEMAGGSFTVSNGGVYGSLISTPIINPPQSAILGMHSIVSRPMVVGGSVVPRPMMYVALTYDHRLIDGREAVYFLRRVKDVVEDPQRLLLDI

SEQ ID NO: 89020 - protein, 225 aa, Arabidopsis thaliana
  peptide (1)..(225): Ceres Seq. ID no. 12714757
MTRLRKRVATRLKDSQNTFALLTTFNEVDMTNLMKLRSQYKDAFYEKHGVKLGLMSGFIKAAVSALQHQPVVNAVIDGDDIIYRDYVDISIAVGTSKGLVVPVIRGADKMNFAEIEKTINSLAKKANEGTISIDEMAGGSFTVSNGGVYGSLISTPIINPPQSAILGMHSIVSRPMVVGGSVVPRPMMYVALTYDHRLIDGREAVYFLRRVKDVVEDPQRLLLDI

SEQ ID NO: 89021 - DNA, 983 bp, Arabidopsis thaliana
  misc_feature (1)..(983): Ceres Seq. ID no. 12714758
  misc_feature (1)..(983): Ortholog of  Ceres SEQ ID NO 12609566 as cited in SEQ ID NO 52161
gaacaattcattcttctgggtgtgttgtgtttgagtttttggatcatacgaagaagaaatcggcgggagaagctatgtcgaggctatgggcgagatttgcgggattgttcagtagcaagagttttatcggagtagacaagactggtaacaagtacttttccagaatggaggagattgacggattcgtgaaggagaaaagatgggtcaagtttagacgagaggaggacccaacctctattcctgttgaatggatttgttggctgaatgggcagcgaaaaagggctcctactcctgaggaaatgattgaacttgaagcaaggcgtgagcgtgtaaagcttaatgttgctcttctcaagaaggaagaggaggagaagaaagccagagtaggcaccggacgcaaaatcaccattggtaaagttgatggtccagatttgacaagctttgttcgccaatttccaccagattcaaaaggtggtgaaccagaggaagctagtgaagaagcagataaatcaagggccaaggaacatgaacccgagatagtttctgcagaaccacccgaaccaaagacaacagagccatcaggatctggatcatcatttaggcccgggacatggcagccaccatcctaaacacatctctcttcacgcagatgacaaaccaacatactattcaattattttgtttgttgtactctacacaaccgattggtttgagccttacagatgagccataagaccagagagcttttcaagaccctaaaattgtgtcctttcacgctgtcattgaggacttagaagagtcaaaatgagaagccatcttcttatactttgttttgtttagggtgtttgtctcttggcataatgcttgagacttttagcctgccttgtccttcatagctgaagaggagcctagctaccttttgtttctcttcgttgacttgaataaaacagtttgattgaataacagttattcattttcatgtc

SEQ ID NO: 89022 - protein, 208 aa, Arabidopsis thaliana
  peptide (1)..(208): Ceres Seq. ID no. 12714759
TIHSSGCVVFEFLDHTKKKSAGEAMSRLWARFAGLFSSKSFIGVDKTGNKYFSRMEEIDGFVKEKRWVKFRREEDPTSIPVEWICWLNGQRKRAPTPEEMIELEARRERVKLNVALLKKEEEEKKARVGTGRKITIGKVDGPDLTSFVRQFPPDSKGGEPEEASEEADKSRAKEHEPEIVSAEPPEPKTTEPSGSGSSFRPGTWQPPS

SEQ ID NO: 89023 - protein, 184 aa, Arabidopsis thaliana
  peptide (1)..(184): Ceres Seq. ID no. 12714760
MSRLWARFAGLFSSKSFIGVDKTGNKYFSRMEEIDGFVKEKRWVKFRREEDPTSIPVEWICWLNGQRKRAPTPEEMIELEARRERVKLNVALLKKEEEEKKARVGTGRKITIGKVDGPDLTSFVRQFPPDSKGGEPEEASEEADKSRAKEHEPEIVSAEPPEPKTTEPSGSGSSFRPGTWQPPS

SEQ ID NO: 89024 - protein, 154 aa, Arabidopsis thaliana
  peptide (1)..(154): Ceres Seq. ID no. 12714761
MEEIDGFVKEKRWVKFRREEDPTSIPVEWICWLNGQRKRAPTPEEMIELEARRERVKLNVALLKKEEEEKKARVGTGRKITIGKVDGPDLTSFVRQFPPDSKGGEPEEASEEADKSRAKEHEPEIVSAEPPEPKTTEPSGSGSSFRPGTWQPPS

SEQ ID NO: 89025 - DNA, 1096 bp, Arabidopsis thaliana
  misc_feature (1)..(1096): Ceres Seq. ID no. 12714770
  misc_feature (1)..(1096): Ortholog of  Ceres SEQ ID NO 15169380 as cited in SEQ ID NO 58483
  misc_feature (1)..(1096): Ortholog of  Ceres SEQ ID NO 15177787 as cited in SEQ ID NO 59431
  misc_feature (1)..(1096): Ortholog of  Ceres SEQ ID NO 12617197 as cited in SEQ ID NO 63406
  misc_feature (1)..(1096): Ortholog of  Ceres SEQ ID NO 14301622 as cited in SEQ ID NO 65156
  misc_feature (1)..(1096): Ortholog of  Ceres SEQ ID NO 13596284 as cited in SEQ ID NO 68273
atggaattgcaaggagaggaaagcaaaacggcgacgtattgcgtgacgggtgcaagtggatacatcggttcttggttggttaagtctcttctccaaagaggttacacagtccatgccactctcagagatcttgcaaaatctgaatactttcaatctaaatggaaggaaaatgaacggctcagattattccgagcggatcttcgagatgacggcagctttgacgacgccgttaagggttgtgacggcgtcttccatgtcgccgcttccatggagtttgatatctcatcagatcacgttaatctcgagagttatgtccagagcaaagtcatagaaccggcgctaaaaggcgtacggaatgtacttagttcttgtctaaagtcaaagtcagtcaaaagagttgtcttcacatcatccatcagcactctcactgctaaagatgagaatgaacggatgagatctttcgtggatgaaacatgcaaggctcatgttgatcatgtccttaaaacacaagcaagtggatggatttatgtattatcgaagctcgtatcagaggaagaagcatttcggtatgcgaaagagagaggaatggatcttgtttcagtcattacaacaactgtttcaggtccattccttactccatttgtcccatcaagcgttcaagttctcttgtctccaattacaggtgactcaaagttgtttgcgatattatcagctgtgaacaaaagaatgggttcgattgctttagtacacattgaagatatttgcagggctcatctgtttttgatggaacaaccaaaggctaaaggtcaatatatatgttgtgttgacaatattgatatgcatgagttgatgcttcatcacttctctaaggactatctttgtaaagttcaaaaggtaaatgaagacgaggaagagagagaatgtatgaagcctataatttcttcaaagaagttaagagaattggggtttgagtacaaatatggtattgaagaaattgttgatcaaaccattgatgcttctatcaagattaagttccctaccttgaaccacaaactcaggcagtgagaatgtgagatcaacaacgattgatgcttct

SEQ ID NO: 89026 - protein, 354 aa, Arabidopsis thaliana
  peptide (1)..(354): Ceres Seq. ID no. 12714771
MELQGEESKTATYCVTGASGYIGSWLVKSLLQRGYTVHATLRDLAKSEYFQSKWKENERLRLFRADLRDDGSFDDAVKGCDGVFHVAASMEFDISSDHVNLESYVQSKVIEPALKGVRNVLSSCLKSKSVKRVVFTSSISTLTAKDENERMRSFVDETCKAHVDHVLKTQASGWIYVLSKLVSEEEAFRYAKERGMDLVSVITTTVSGPFLTPFVPSSVQVLLSPITGDSKLFAILSAVNKRMGSIALVHIEDICRAHLFLMEQPKAKGQYICCVDNIDMHELMLHHFSKDYLCKVQKVNEDEEERECMKPIISSKKLRELGFEYKYGIEEIVDQTIDASIKIKFPTLNHKLRQ

SEQ ID NO: 89027 - protein, 265 aa, Arabidopsis thaliana
  peptide (1)..(265): Ceres Seq. ID no. 12714772
MEFDISSDHVNLESYVQSKVIEPALKGVRNVLSSCLKSKSVKRVVFTSSISTLTAKDENERMRSFVDETCKAHVDHVLKTQASGWIYVLSKLVSEEEAFRYAKERGMDLVSVITTTVSGPFLTPFVPSSVQVLLSPITGDSKLFAILSAVNKRMGSIALVHIEDICRAHLFLMEQPKAKGQYICCVDNIDMHELMLHHFSKDYLCKVQKVNEDEEERECMKPIISSKKLRELGFEYKYGIEEIVDQTIDASIKIKFPTLNHKLRQ

SEQ ID NO: 89028 - protein, 204 aa, Arabidopsis thaliana
  peptide (1)..(204): Ceres Seq. ID no. 12714773
MRSFVDETCKAHVDHVLKTQASGWIYVLSKLVSEEEAFRYAKERGMDLVSVITTTVSGPFLTPFVPSSVQVLLSPITGDSKLFAILSAVNKRMGSIALVHIEDICRAHLFLMEQPKAKGQYICCVDNIDMHELMLHHFSKDYLCKVQKVNEDEEERECMKPIISSKKLRELGFEYKYGIEEIVDQTIDASIKIKFPTLNHKLRQ

SEQ ID NO: 89029 - DNA, 1168 bp, Arabidopsis thaliana
  misc_feature (1)..(1168): Ceres Seq. ID no. 12714782
  misc_feature (1)..(1168): Ortholog of  Ceres SEQ ID NO 14314939 as cited in SEQ ID NO 58010
ggtgccgctcgacgtgttaatcttcttcctcctgaagatctctctctgaaagacattctcaaattttctcgggaaaacacctttttctgattcgtttttctccagatcattccttctttcttatatccgatttcttcgggaggaggcgaagagacggtcaacaattttatccaatgtcgcgccgtcttttcgcctgtttcggcctcaagaaatcttcaactaaacctatctctggtggtaacaattccgccgccgtagccgcagaaattcccgccggagatggtcccgttctcgtccagctattctcgtctcagggatgtaaaacatcgcccgcggcggagatgttgatgtcccggctaggtcgaggtgatttcgacgctcagatccgtggcgaagatggtggatctggatctccgacgatggttttggtgtttcatgtggattattgggattacaaggggtggaaagatccgtatggatcgagccaatggacggtgaggcagaaggcgtatatagaggcgttgaatctggatacgatgtttactccgcagcttgtgatccaaggtcgttctcaattgatcggaaacgaagaggagacgctgctcaaatctatctccgaagcgcctaggtttccttctccagccttccgggcgactttccagagaccaacctcagagacactgcaagtatcactcaccggagctttgagaatgaaagtagacggagacggaatggacataatggtggcaatatacgaaaccgggcttgtgaacgactgtgcaagaggagagaacgaaggaagaatgttgtcgaatgattacgttgtaagaaagatggaaaagatgtgcactgtgaaagatgtagcaccgaagaagccagtctcggggactgctcattttacgctctgggatggattcaacagcagcaaatgtggagtcgccgtctttcttcagaactcttctcttcagatttttggtacacagagttttaaattacctgatgagatttgagttaatttccctaatatctgaaaaataaagaaaagaaaaccgatctttgtatcgtccatattttgcttgtgataatcattcgggttccactctgcttttgtacagttataaatgtgtgactacttataacttaatagggtttaaggtttcttctaatt

SEQ ID NO: 89030 - protein, 278 aa, Arabidopsis thaliana; identical to SEQ ID NO: 23190
  peptide (1)..(278): Ceres Seq. ID no. 12714783

SEQ ID NO: 89031 - protein, 222 aa, Arabidopsis thaliana; identical to SEQ ID NO: 23191
  peptide (1)..(222): Ceres Seq. ID no. 12714784

SEQ ID NO: 89032 - protein, 220 aa, Arabidopsis thaliana; identical to SEQ ID NO: 23192
  peptide (1)..(220): Ceres Seq. ID no. 12714785

SEQ ID NO: 89033 - DNA, 1487 bp, Arabidopsis thaliana
  misc_feature (1)..(1487): Ceres Seq. ID no. 12714790
  misc_feature (1)..(1487): Ortholog of  Ceres SEQ ID NO 13654468 as cited in SEQ ID NO 68094
acatatcatttttctgattctcccacgaagatgaaccacctcgttcgtaaaagctccgtcggttactccgccttgaggtccgtttcgtacctccgtcaatctgccgttacctctccacctccgattttctccgccgccgcttcaaccgttcgccagttcacttccgccggctatccttccaacagttttcaattgacgccgccgacgaattggggaatccggatagttccggagaggaaggcgtttgtgattgagcgattcggtaaatacgctacgacgttgccgtcggggattcatttcctcattccgttcgtggatcgtattgcttatgttcattctctcaaggaagaagctatcccgattccgaatcagactgcgattactaaagacaacgttagtatccacatcgatggtgttctctacgttaagattgtggatcctaagttagcttcttatggcgttgagagtcctatctatgctgttgtacagctggctcagaccacaatgcgtagtgagcttggtaagatcactcttgataagacctttgaggaacgagacactctcaacgagaagatagtggaagccatcaatgttgctgcaaaagactggggtcttcagtgccttcgttatgagataagggatattatgccccctcatggagtgcgagctgctatggaaatgcaagctgaagctgagcgtaaaaagagagcccagattcttgagtctgaaggagaaaggcaatcccatatcaacattgctgatggtaagaaaagttctgtaatcttggcatctgaagcagcaaagatggaccaggtgaatcgagcacaaggtgaggcagaagcaatactagctagagcacaagcaactgcgaaaggcctggtcttgttatctcagtccctcaaggaaactgggggagtagaggcggcgagtttgagagttgcagagcaatacattacagccttcggtaacattgccaaggagggtacgataatgttgcttccaagtggtgcttcaaatcctgctagcatgattgctcaagctttaacaatgtacaaaagccttgtcatcaatggtccaagcaaagatcaccaagaaacacaagcacttgatgaaacagatttggaagagttggaagacatgggtgagaaacatatatcagaaggctctaataaccgatcaggctcaatatcatttgacacagagaaaccaggtcacaccggtgaaccacgattttctcttcagaaccgcaacaaggatccgcagtaggcagccgaaccggggatgagataaattctttgggcttgagaaaactggaaaccatttttcatctttcaaatatgaggcagtaaccatcttttccgtttgaatagctagaatatcatcactttgcatatagaaacgaatctgaacatctgttctccgataagaattttcctactggatttgttatgaacatggtccttgtgttcttattcacctttattccc

SEQ ID NO: 89034 - protein, 421 aa, Arabidopsis thaliana
  peptide (1)..(421): Ceres Seq. ID no. 12714791
TYHFSDSPTKMNHLVRKSSVGYSALRSVSYLRQSAVTSPPPIFSAAASTVRQFTSAGYPSNSFQLTPPTNWGIRIVPERKAFVIERFGKYATTLPSGIHFLIPFVDRIAYVHSLKEEAIPIPNQTAITKDNVSIHIDGVLYVKIVDPKLASYGVESPIYAVVQLAQTTMRSELGKITLDKTFEERDTLNEKIVEAINVAAKDWGLQCLRYEIRDIMPPHGVRAAMEMQAEAERKKRAQILESEGERQSHINIADGKKSSVILASEAAKMDQVNRAQGEAEAILARAQATAKGLVLLSQSLKETGGVEAASLRVAEQYITAFGNIAKEGTIMLLPSGASNPASMIAQALTMYKSLVINGPSKDHQETQALDETDLEELEDMGEKHISEGSNNRSGSISFDTEKPGHTGEPRFSLQNRNKDPQ

SEQ ID NO: 89035 - protein, 411 aa, Arabidopsis thaliana; identical to SEQ ID NO: 34823
  peptide (1)..(411): Ceres Seq. ID no. 12714792

SEQ ID NO: 89036 - protein, 253 aa, Arabidopsis thaliana; identical to SEQ ID NO: 34824
  peptide (1)..(253): Ceres Seq. ID no. 12714793

SEQ ID NO: 89037 - DNA, 1500 bp, Arabidopsis thaliana
  misc_feature (1)..(1500): Ceres Seq. ID no. 12714802
  misc_feature (1)..(1500): Ortholog of  Ceres SEQ ID NO 13595870 as cited in SEQ ID NO 62101
  misc_feature (1)..(1500): Ortholog of  Ceres SEQ ID NO 13590241 as cited in SEQ ID NO 63878
  misc_feature (1)..(1500): Ortholog of  Ceres SEQ ID NO 13657939 as cited in SEQ ID NO 66349
  misc_feature (1)..(1500): Ortholog of  Ceres SEQ ID NO 13660597 as cited in SEQ ID NO 67655
gtcgtcgtccacaagaacaaccaaatttgtttccgtcttctgctaacatatcctctttttcatctgggaaccctaatttcttgactaacttagggttttatttatccatttgagatactctgtaattgaaaggttgaatttttagaagagacatgggaggttcgtcggagacaaagatcttacaagaactcatactttacgcggcgagcgctgctttcagctgcttggttctctttgcgggtcttcgtcatctcgatcctaatcgtgaggcttctaaaaaagctctcgagcataagaaggaaatctctaaacgtttgggtcgtcctcttgttcagaccaatccatacgaggatgtaattgcatgtgatgtgataaatccagaccacattgatgtggagtttggttctattggagggttggagaccatcaagcaggctttgtatgagcttgtgattttaccactgaaaagacctgagctttttgcttacgggaagcttcttggacctcaaaaaggtgtcttgctctatggacctcctggtactggaaagactatgcttgctaaggctattgccaaagagtcaggagctgttttcattaatgttagggtttcaaacctgatgagcaagtggtttggagatgctcagaagcttgtttctgctgtgtttagcttggcctacaaactccaacctgctatcatttttattgatgaggttgagagctttcttggtcagcgccgttcaacagatcatgaagctatggccaacatgaagactgagtttatggctttatgggatggattctctactgatccgcatgcaagggttatggttcttgctgcaactaacagaccgtcagagcttgatgaagcaatattaaggcgtcttcctcaggcctttgagattggaatacctgatcgccgggagagagctgagatattgaaagtgactctgaaaggagagagggtggaacctgatattgactttgatcacatagctcgcttatgcgaaggctataccggatcagacatttttgagctatgcaagaaagcagcttacttccctatcagagaaatcctagatgcagagagaaaggggaaaccatgtttggaccctaggccattatcacagttagatttggagaaggttcttgcaacgtcaaagaagacacaagttgcagcaggcgagtactcattgagctcgcagtcctcggcttggagaggctcaagggaaccagatgaggtccaggcagcgataagtgggatctcgaagcttctagtttctcagatcattaacctacagtcagaatctcaggattcatggcagcgggatcccgaagaagattcccgatgaaattccggatcacttttataaacgttctggtgttttcattggaagtttagaatttgtcacacacttcagtttattctgtaaaacttttcttttctttttggtaggatcatttgataacttatgactgtactaaaaagtctctcaagtttct

SEQ ID NO: 89038 - protein, 398 aa, Arabidopsis thaliana; identical to SEQ ID NO: 42203
  peptide (1)..(398): Ceres Seq. ID no. 12714803

SEQ ID NO: 89039 - protein, 265 aa, Arabidopsis thaliana; identical to SEQ ID NO: 42204
  peptide (1)..(265): Ceres Seq. ID no. 12714804

SEQ ID NO: 89040 - protein, 243 aa, Arabidopsis thaliana; identical to SEQ ID NO: 42205
  peptide (1)..(243): Ceres Seq. ID no. 12714805

SEQ ID NO: 89041 - DNA, 1616 bp, Arabidopsis thaliana
  misc_feature (1)..(1616): Ceres Seq. ID no. 12714839
  misc_feature (1)..(1616): Ortholog of  Ceres SEQ ID NO 13518411 as cited in SEQ ID NO 55230
  misc_feature (1)..(1616): Ortholog of  Ceres SEQ ID NO 13654989 as cited in SEQ ID NO 63117
  misc_feature (1)..(1616): Ortholog of  Ceres SEQ ID NO 13584744 as cited in SEQ ID NO 69137
agtctacctgtaacgacgtcgtatcaccgatcatccgccggattcttatttggcggtgtaatcgttggagctcttctactaattctgttaggtcttctctttgtcttctacagagctaccagaaatagaaataacaacagcagctctgctcatcatcaatccaaaactccctcaaaagttcaacatcatcggggcggtaatgctggtacgaaccaggcacatgttatcacaatgccaccaccaatccatgctaaatatatatctagtggaggttgtgatacgaaggagaacaattctgttgcgaaaaacatttcaatgccatctggaatgttctcctacgaagaactttcaaaagcaactggtggattttcagaggagaaccttttgggagaaggcggtttcggatatgttcacaaaggagtgttgaaaaacgggacagaagttgcggtgaagcagctgaagattgggagctatcaaggggaaagagaattccaagctgaggttgacacaatcagtagggttcatcataagcacctcgtttcattggttggttattgcgttaatggagataaaagactcttggtttacgagtttgttcctaaagataccttggagttccacttgcatgagaacagaggaagcgtgttggaatgggaaatgaggctcaggattgctgtaggagcagcaaaaggattagcttatcttcatgaggattgcagtccaactataattcaccgtgatatcaaagcagctaatatccttctagattccaaatttgaggcaaaggtctctgactttggactagccaagtttttctcagacaccaattcatcattcactcatatctctactcgagtggtaggaactttcggatacatggctccagaatacgcgtccagtggtaaagtaactgataaatcagatgtatattcctttggggtcgtgcttctagaactcatcactggacgtccatcaattttcgccaaagattcttccacaaaccagagtttagtagactgggcgaggccattgcttacgaaagcaatctctggagaaagttttgactttcttgtagactcaaggttggagaagaattacgatacaactcagatggcaaacatggctgcttgtgctgctgcttgcatacgccaatcagcttggcttcggcctagaatgagccaggtagtacgtgctcttgaaggcgaggtggccctgagaaaggtcgaagagactgggaatagcgtgacctatagctcttctgaaaacccgaatgacatcacaccacggtatggaacaaataagaggagattcgacacaggttcaagcgatggttacacttcagaatatggagttaacccttctcagtcgagcagtgaacatcaacaggtgaatacttagttcacaggttcaatagggcaagtttcaccacaattattgggttttcggatacagtcatcttgggttaacataaaatgttgtaagaaattagactacttcattcatttgtagttaaggggtccgaagaacactgcttgtgttttgttaaatgtataaattggttgtaatattggggcacaagtttaattatgttgcaaatactttgtttgcttctgatc

SEQ ID NO: 89042 - protein, 465 aa, Arabidopsis thaliana
  peptide (1)..(465): Ceres Seq. ID no. 12714840
SLPVTTSYHRSSAGFLFGGVIVGALLLILLGLLFVFYRATRNRNNNSSSAHHQSKTPSKVQHHRGGNAGTNQAHVITMPPPIHAKYISSGGCDTKENNSVAKNISMPSGMFSYEELSKATGGFSEENLLGEGGFGYVHKGVLKNGTEVAVKQLKIGSYQGEREFQAEVDTISRVHHKHLVSLVGYCVNGDKRLLVYEFVPKDTLEFHLHENRGSVLEWEMRLRIAVGAAKGLAYLHEDCSPTIIHRDIKAANILLDSKFEAKVSDFGLAKFFSDTNSSFTHISTRVVGTFGYMAPEYASSGKVTDKSDVYSFGVVLLELITGRPSIFAKDSSTNQSLVDWARPLLTKAISGESFDFLVDSRLEKNYDTTQMANMAACAAACIRQSAWLRPRMSQVVRALEGEVALRKVEETGNSVTYSSSENPNDITPRYGTNKRRFDTGSSDGYTSEYGVNPSQSSSEHQQVNT

SEQ ID NO: 89043 - protein, 388 aa, Arabidopsis thaliana; identical to SEQ ID NO: 80299
  peptide (1)..(388): Ceres Seq. ID no. 12714841

SEQ ID NO: 89044 - protein, 360 aa, Arabidopsis thaliana
  peptide (1)..(360): Ceres Seq. ID no. 12714842
MPSGMFSYEELSKATGGFSEENLLGEGGFGYVHKGVLKNGTEVAVKQLKIGSYQGEREFQAEVDTISRVHHKHLVSLVGYCVNGDKRLLVYEFVPKDTLEFHLHENRGSVLEWEMRLRIAVGAAKGLAYLHEDCSPTIIHRDIKAANILLDSKFEAKVSDFGLAKFFSDTNSSFTHISTRVVGTFGYMAPEYASSGKVTDKSDVYSFGVVLLELITGRPSIFAKDSSTNQSLVDWARPLLTKAISGESFDFLVDSRLEKNYDTTQMANMAACAAACIRQSAWLRPRMSQVVRALEGEVALRKVEETGNSVTYSSSENPNDITPRYGTNKRRFDTGSSDGYTSEYGVNPSQSSSEHQQVNT

SEQ ID NO: 89045 - DNA, 1029 bp, Arabidopsis thaliana
  misc_feature (1)..(1029): Ceres Seq. ID no. 12714859
  misc_feature (1)..(1029): Ortholog of  Ceres SEQ ID NO 15170866 as cited in SEQ ID NO 54810
atgaaagtgatggataagaatttagggttagaggaggttcagaaacttgaaggtcacactgatcgtgtttggaacgtcgcctggaatcccgccgctgacggtgttattgcttcctgcagtgccgataagaccgtacgaatctgggagcagagttctcttactcgttcctggacctgcaaggctgttttggaaggcgcgcacacaagaagtgtgaagtcgttacttggtcaccgtctgggaagtttcgatggcaatacttgcgtttgggaaaattttgctactgactccgagtctgtctctgttttacggggacatgaaagcgaagtcaaaagtgtatcatggaatgcatctggttcgttgcttgcaacttgtggtagagacaagtctgtctggatttgggaaatacaaccagaggaggacgatgaatttgatactattgcagtgttaactggtcattcagaagatgttaagatggtcttgtggcatcccaccatggatgttttgttctcttgcagttatgataacactatcaagatttggtgctctgaggatgaagatggtgattataattgtgtacaaaccttaagtgaacttaacaatggtcattcttctaccgtctggagtatctcttttaatgctgcaggggacaagatggtcacttgtagtgatgatctagcagtgaaaatatggaagacagatatttcaaggatgcaatctggtgaaggatatgtaccctggactcatgtttgtacactctctggttttcacgatcgtaccatatattcagttcattggtcaagggacggtgttattgctagtggagcaggcgatgatactatacagttatttgtggacagcgacagtgactctgttgatggaccttcatacaaacttttggttaagaaggagaaagcacatgaaatggatgtaaattcggtccaatgggcacctgataaggaaagccggttgcttgcctcggccagcgacgataaaatggttaaaatttggaaacttgcctcggagccatga

SEQ ID NO: 89046 - protein, 342 aa, Arabidopsis thaliana
  peptide (1)..(342): Ceres Seq. ID no. 12714860
MKVMDKNLGLEEVQKLEGHTDRVWNVAWNPAADGVIASCSADKTVRIWEQSSLTRSWTCKAVLEGAHTRSVKSLLGHRLGSFDGNTCVWENFATDSESVSVLRGHESEVKSVSWNASGSLLATCGRDKSVWIWEIQPEEDDEFDTIAVLTGHSEDVKMVLWHPTMDVLFSCSYDNTIKIWCSEDEDGDYNCVQTLSELNNGHSSTVWSISFNAAGDKMVTCSDDLAVKIWKTDISRMQSGEGYVPWTHVCTLSGFHDRTIYSVHWSRDGVIASGAGDDTIQLFVDSDSDSVDGPSYKLLVKKEKAHEMDVNSVQWAPDKESRLLASASDDKMVKIWKLASEP

SEQ ID NO: 89047 - protein, 339 aa, Arabidopsis thaliana
  peptide (1)..(339): Ceres Seq. ID no. 12714861
MDKNLGLEEVQKLEGHTDRVWNVAWNPAADGVIASCSADKTVRIWEQSSLTRSWTCKAVLEGAHTRSVKSLLGHRLGSFDGNTCVWENFATDSESVSVLRGHESEVKSVSWNASGSLLATCGRDKSVWIWEIQPEEDDEFDTIAVLTGHSEDVKMVLWHPTMDVLFSCSYDNTIKIWCSEDEDGDYNCVQTLSELNNGHSSTVWSISFNAAGDKMVTCSDDLAVKIWKTDISRMQSGEGYVPWTHVCTLSGFHDRTIYSVHWSRDGVIASGAGDDTIQLFVDSDSDSVDGPSYKLLVKKEKAHEMDVNSVQWAPDKESRLLASASDDKMVKIWKLASEP

SEQ ID NO: 89048 - protein, 185 aa, Arabidopsis thaliana
  peptide (1)..(185): Ceres Seq. ID no. 12714862
MVLWHPTMDVLFSCSYDNTIKIWCSEDEDGDYNCVQTLSELNNGHSSTVWSISFNAAGDKMVTCSDDLAVKIWKTDISRMQSGEGYVPWTHVCTLSGFHDRTIYSVHWSRDGVIASGAGDDTIQLFVDSDSDSVDGPSYKLLVKKEKAHEMDVNSVQWAPDKESRLLASASDDKMVKIWKLASEP

SEQ ID NO: 89049 - DNA, 1536 bp, Arabidopsis thaliana
  misc_feature (1)..(1536): Ceres Seq. ID no. 12714870
  misc_feature (1)..(1536): Ortholog of  Ceres SEQ ID NO 13594037 as cited in SEQ ID NO 55666
  misc_feature (1)..(1536): Ortholog of  Ceres SEQ ID NO 13657707 as cited in SEQ ID NO 66407
atgtcatgtttgaagtatttcttgatcttattgatgttgggactgtttccggcaagcgagtttgtgagctccataaacacaattgtggtagtgataagacaagtgagttcaattttgtctcagttcgctgatttcagcggagatcgccggctgcagaatgcggtttccgattgccttgatctgcttgacttttcttcagaggagctcacttggtctgcttctgcttctgagaatccaaaaggtaagggcaacggaacaggggacgttggatcggacacaaggacatggttaagtgctgctctctccaaccaagccacttgtatggaaggcttcgatggtacctctggtctcgtaaaatcccttgtcgctggcagtctcgatcaactatattctatgcttagggaattgttaccacttgtgcaaccagagcagaaacccaaggctgtttctaaacctggccctattgctaaaggaccgaaggcaccacctggccgtaaactcagagacaccgacgaagacgaaagccttcaattcccagactgggtcagaccggacgatcgtaaactattagaatcaaacggtaggacttacgacgttagtgtagcattggatgggacaggcaacttcacaaagataatggacgccataaagaaagctcctgattatagctcgacacgtttcgtcatatacattaaaaaaggtttatatttggagaatgttgagatcaagaagaagaaatggaacattgtaatgttaggtgatggcattgacgtgactgttatttccggtaaccgcagcttcatcgatggttggaccactttccgatcagctacattcgcggtaagcggaagaggattcttagcaagagatataacgttccagaacacagcagggccagagaagcatcaggcggtagcactgagatcagactctgacctctctgtgttcttcagatgtgcgatgaggggttatcaagatacactctacacgcacaccatgcgtcagttctaccgtgagtgcaccatcacgggaacagtagattttatatttggggatgggactgttgtgtttcaaaactgtcaaattttggctaaaagaggactccctaaccaaaagaacaccatcactgcacaaggccggaaagatgtcaaccaaccctcaggattctcaattcaattcagcaatatctcggcggacgcagatttggtcccatacctaaacacgacaaggacgtatctaggaaggccatggaagctatattcgagaacggttttcattaggaacaatatgagcgacgttgtgagacccgaaggatggcttgagtggaacgctgattttgcgttggacacactcttctacggagagttcatgaactacgggcctggttcaggactcagcagccgagtcaaatggcctggttaccacgtctttaacaactcggatcaggctaacaacttcaccgtttctcagttcattaaaggaaatctttggctgccttctacgggagtaacgtttagtgatggcttgtatatctaa

SEQ ID NO: 89050 - protein, 511 aa, Arabidopsis thaliana
  peptide (1)..(511): Ceres Seq. ID no. 12714871
MSCLKYFLILLMLGLFPASEFVSSINTIVVVIRQVSSILSQFADFSGDRRLQNAVSDCLDLLDFSSEELTWSASASENPKGKGNGTGDVGSDTRTWLSAALSNQATCMEGFDGTSGLVKSLVAGSLDQLYSMLRELLPLVQPEQKPKAVSKPGPIAKGPKAPPGRKLRDTDEDESLQFPDWVRPDDRKLLESNGRTYDVSVALDGTGNFTKIMDAIKKAPDYSSTRFVIYIKKGLYLENVEIKKKKWNIVMLGDGIDVTVISGNRSFIDGWTTFRSATFAVSGRGFLARDITFQNTAGPEKHQAVALRSDSDLSVFFRCAMRGYQDTLYTHTMRQFYRECTITGTVDFIFGDGTVVFQNCQILAKRGLPNQKNTITAQGRKDVNQPSGFSIQFSNISADADLVPYLNTTRTYLGRPWKLYSRTVFIRNNMSDVVRPEGWLEWNADFALDTLFYGEFMNYGPGSGLSSRVKWPGYHVFNNSDQANNFTVSQFIKGNLWLPSTGVTFSDGLYI

SEQ ID NO: 89051 - protein, 500 aa, Arabidopsis thaliana
  peptide (1)..(500): Ceres Seq. ID no. 12714872
MLGLFPASEFVSSINTIVVVIRQVSSILSQFADFSGDRRLQNAVSDCLDLLDFSSEELTWSASASENPKGKGNGTGDVGSDTRTWLSAALSNQATCMEGFDGTSGLVKSLVAGSLDQLYSMLRELLPLVQPEQKPKAVSKPGPIAKGPKAPPGRKLRDTDEDESLQFPDWVRPDDRKLLESNGRTYDVSVALDGTGNFTKIMDAIKKAPDYSSTRFVIYIKKGLYLENVEIKKKKWNIVMLGDGIDVTVISGNRSFIDGWTTFRSATFAVSGRGFLARDITFQNTAGPEKHQAVALRSDSDLSVFFRCAMRGYQDTLYTHTMRQFYRECTITGTVDFIFGDGTVVFQNCQILAKRGLPNQKNTITAQGRKDVNQPSGFSIQFSNISADADLVPYLNTTRTYLGRPWKLYSRTVFIRNNMSDVVRPEGWLEWNADFALDTLFYGEFMNYGPGSGLSSRVKWPGYHVFNNSDQANNFTVSQFIKGNLWLPSTGVTFSDGLYI

SEQ ID NO: 89052 - protein, 404 aa, Arabidopsis thaliana
  peptide (1)..(404): Ceres Seq. ID no. 12714873
MEGFDGTSGLVKSLVAGSLDQLYSMLRELLPLVQPEQKPKAVSKPGPIAKGPKAPPGRKLRDTDEDESLQFPDWVRPDDRKLLESNGRTYDVSVALDGTGNFTKIMDAIKKAPDYSSTRFVIYIKKGLYLENVEIKKKKWNIVMLGDGIDVTVISGNRSFIDGWTTFRSATFAVSGRGFLARDITFQNTAGPEKHQAVALRSDSDLSVFFRCAMRGYQDTLYTHTMRQFYRECTITGTVDFIFGDGTVVFQNCQILAKRGLPNQKNTITAQGRKDVNQPSGFSIQFSNISADADLVPYLNTTRTYLGRPWKLYSRTVFIRNNMSDVVRPEGWLEWNADFALDTLFYGEFMNYGPGSGLSSRVKWPGYHVFNNSDQANNFTVSQFIKGNLWLPSTGVTFSDGLYI

SEQ ID NO: 89053 - DNA, 2451 bp, Arabidopsis thaliana
  misc_feature (1)..(2451): Ceres Seq. ID no. 12714886
  misc_feature (1)..(2451): Ortholog of  Ceres SEQ ID NO 14307030 as cited in SEQ ID NO 54041
  misc_feature (1)..(2451): Ortholog of  Ceres SEQ ID NO 14302891 as cited in SEQ ID NO 66282
atggccatcaccgattttttcgccggtgaaattgcgacggagctcctgaagcagctctttacgatatctacaacggcgtggagatacaaaaacaccgccaaacaactcctcaccttgatcgatagcattcgaccgacgatcaaggagattcaatacagcggcgtggagcttcctgctcaccgccaagctcaaatcggtatgctcttcgatactttagagaaaggcaagaagctcactgacaaagtccttagctctaagcgatggaatttatatcgacagctaaccctagccagaaaaatggagaagctagagaagaccatctctaatttccttaaaaatgaggtctttacacatatcctcgctgacgttcatcatctccgggccgataccagtgtgcgtttggatcgggttgacatgagcctcgacagggtgattcagcaagtgggttccatgaaaattgggggaggtggcttgatatcagaggccatgaagagagccgaggctatggagattgagaccaacgacgattcggagaaatttggggttggattggaattgggaaaggttaaggttaagaagatgatgttcgaatctcaaggaggggtttttgggatcagtggaatgggcggtgttggtaaaaccactcttgccaaagaacttcaacgggaccatgaagtccaatgtcactttgagaaccggattttgtttctgactgtatcacaatctccgcttcttgaggagctgagggaacttatatggggtttcttatctggttgtgaagctggaaatcctgttcctgactgtaattttccgtttgatggcgcgcgtaagctcgtgattcttgatgatgtttggaccacacaggccctggaccgcttgacctcgtttaagtttcctggttgcacaactcttgtggtctcacgatccaaactcactgagcctaaattcacttatgatgtcgaagtactgagtgaagatgaagcaatctctctcttctgtctctgtgctttcggtcagaaatctatccctcttggtttctgcaaagatctggttaagcaggttgctaatgaatgtaaagggcttcctttagctctcaaagtcacgggtgcttcattaaatggcaaacctgaaatgtactggaagggcgtattgcagaggttatcaaaaggtgaacctgctgatgactctcacgagagtagattgcttcgtcaaatggaagctagtctagacaatctcgaccagacgaccaaagattgtttcttggatcttggcgccttccctgaagacaggaagattcctcttgatgttctcatcaacatttggattgagttacatgatatagatgaaggaaatgcttttgccatccttgttgatttgtcacacaagaatctccttactcttgggaaggatccacggcttggctctttgtacgcaagccactatgatatatttgtgacacagcatgatgttctgcgagacctagctcttcatttaagcaatgcagggaaagtaaacagaagaaagcggttgctgatgccgaaaagagagttagatcttccaggagattgggaaaggaacaatgatgagcattacattgcccagattgtctctattcatactggggaaatgaatgaaatgcaatggtttgacatggagttccccaaggcagagattctaatattgaacttctcttcagacaagtatgttcttccgccttttatcagtaagatgagccggcttaaggtcctagtgattatcaacaacggcatgtctcccgcggttctccatgacttttcaatatttgctcatttgtcgaaactaagaagtctctggctagagagggttcacgtccctcaactctccaactcaaccacccccttgaaaaatctccacaagatgtctttgattctgtgcaagatcaataaaagttttgatcaaaccggacttgacgtggcagatatcttcccaaaattgggcgatctgacaatagatcactgtgatgatctcgtggcactaccttcaagcatttgcggactgacctcccttagctgcttaagcataacaaattgtccacgcctcggtgaattgcccaagaacctcagtaagctacaagctctcgaaatcttaaggctatatgcttgccctgagctaaagacattacctggagaaatatgtgagcttcctgggcttaagtatctcgacatctcacaatgtgtcagcctgagttgtcttccagaggaaataggaaagctaaagaagcttgagaagatcgacatgagagaatgttgcttctcggatagaccgagctctgctgtttcactgaagtctctgcgccatgtaatctgcgataccgacgttgcatttatgtgggaagaagttgagaaggctgttccagggttaaagatcgaagctgctgagaaatgcttcagcctagactggcttgacgaataa

SEQ ID NO: 89054 - protein, 816 aa, Arabidopsis thaliana
  peptide (1)..(816): Ceres Seq. ID no. 12714887
MAITDFFAGEIATELLKQLFTISTTAWRYKNTAKQLLTLIDSIRPTIKEIQYSGVELPAHRQAQIGMLFDTLEKGKKLTDKVLSSKRWNLYRQLTLARKMEKLEKTISNFLKNEVFTHILADVHHLRADTSVRLDRVDMSLDRVIQQVGSMKIGGGGLISEAMKRAEAMEIETNDDSEKFGVGLELGKVKVKKMMFESQGGVFGISGMGGVGKTTLAKELQRDHEVQCHFENRILFLTVSQSPLLEELRELIWGFLSGCEAGNPVPDCNFPFDGARKLVILDDVWTTQALDRLTSFKFPGCTTLVVSRSKLTEPKFTYDVEVLSEDEAISLFCLCAFGQKSIPLGFCKDLVKQVANECKGLPLALKVTGASLNGKPEMYWKGVLQRLSKGEPADDSHESRLLRQMEASLDNLDQTTKDCFLDLGAFPEDRKIPLDVLINIWIELHDIDEGNAFAILVDLSHKNLLTLGKDPRLGSLYASHYDIFVTQHDVLRDLALHLSNAGKVNRRKRLLMPKRELDLPGDWERNNDEHYIAQIVSIHTGEMNEMQWFDMEFPKAEILILNFSSDKYVLPPFISKMSRLKVLVIINNGMSPAVLHDFSIFAHLSKLRSLWLERVHVPQLSNSTTPLKNLHKMSLILCKINKSFDQTGLDVADIFPKLGDLTIDHCDDLVALPSSICGLTSLSCLSITNCPRLGELPKNLSKLQALEILRLYACPELKTLPGEICELPGLKYLDISQCVSLSCLPEEIGKLKKLEKIDMRECCFSDRPSSAVSLKSLRHVICDTDVAFMWEEVEKAVPGLKIEAAEKCFSLDWLDE

SEQ ID NO: 89055 - protein, 750 aa, Arabidopsis thaliana
  peptide (1)..(750): Ceres Seq. ID no. 12714888
MLFDTLEKGKKLTDKVLSSKRWNLYRQLTLARKMEKLEKTISNFLKNEVFTHILADVHHLRADTSVRLDRVDMSLDRVIQQVGSMKIGGGGLISEAMKRAEAMEIETNDDSEKFGVGLELGKVKVKKMMFESQGGVFGISGMGGVGKTTLAKELQRDHEVQCHFENRILFLTVSQSPLLEELRELIWGFLSGCEAGNPVPDCNFPFDGARKLVILDDVWTTQALDRLTSFKFPGCTTLVVSRSKLTEPKFTYDVEVLSEDEAISLFCLCAFGQKSIPLGFCKDLVKQVANECKGLPLALKVTGASLNGKPEMYWKGVLQRLSKGEPADDSHESRLLRQMEASLDNLDQTTKDCFLDLGAFPEDRKIPLDVLINIWIELHDIDEGNAFAILVDLSHKNLLTLGKDPRLGSLYASHYDIFVTQHDVLRDLALHLSNAGKVNRRKRLLMPKRELDLPGDWERNNDEHYIAQIVSIHTGEMNEMQWFDMEFPKAEILILNFSSDKYVLPPFISKMSRLKVLVIINNGMSPAVLHDFSIFAHLSKLRSLWLERVHVPQLSNSTTPLKNLHKMSLILCKINKSFDQTGLDVADIFPKLGDLTIDHCDDLVALPSSICGLTSLSCLSITNCPRLGELPKNLSKLQALEILRLYACPELKTLPGEICELPGLKYLDISQCVSLSCLPEEIGKLKKLEKIDMRECCFSDRPSSAVSLKSLRHVICDTDVAFMWEEVEKAVPGLKIEAAEKCFSLDWLDE

SEQ ID NO: 89056 - protein, 717 aa, Arabidopsis thaliana
  peptide (1)..(717): Ceres Seq. ID no. 12714889
MEKLEKTISNFLKNEVFTHILADVHHLRADTSVRLDRVDMSLDRVIQQVGSMKIGGGGLISEAMKRAEAMEIETNDDSEKFGVGLELGKVKVKKMMFESQGGVFGISGMGGVGKTTLAKELQRDHEVQCHFENRILFLTVSQSPLLEELRELIWGFLSGCEAGNPVPDCNFPFDGARKLVILDDVWTTQALDRLTSFKFPGCTTLVVSRSKLTEPKFTYDVEVLSEDEAISLFCLCAFGQKSIPLGFCKDLVKQVANECKGLPLALKVTGASLNGKPEMYWKGVLQRLSKGEPADDSHESRLLRQMEASLDNLDQTTKDCFLDLGAFPEDRKIPLDVLINIWIELHDIDEGNAFAILVDLSHKNLLTLGKDPRLGSLYASHYDIFVTQHDVLRDLALHLSNAGKVNRRKRLLMPKRELDLPGDWERNNDEHYIAQIVSIHTGEMNEMQWFDMEFPKAEILILNFSSDKYVLPPFISKMSRLKVLVIINNGMSPAVLHDFSIFAHLSKLRSLWLERVHVPQLSNSTTPLKNLHKMSLILCKINKSFDQTGLDVADIFPKLGDLTIDHCDDLVALPSSICGLTSLSCLSITNCPRLGELPKNLSKLQALEILRLYACPELKTLPGEICELPGLKYLDISQCVSLSCLPEEIGKLKKLEKIDMRECCFSDRPSSAVSLKSLRHVICDTDVAFMWEEVEKAVPGLKIEAAEKCFSLDWLDE

SEQ ID NO: 89057 - DNA, 945 bp, Arabidopsis thaliana
  misc_feature (1)..(945): Ceres Seq. ID no. 12714906
  misc_feature (1)..(945): Ortholog of  Ceres SEQ ID NO 13639124 as cited in SEQ ID NO 56718
  misc_feature (1)..(945): Ortholog of  Ceres SEQ ID NO 13596474 as cited in SEQ ID NO 62169
  misc_feature (1)..(945): Ortholog of  Ceres SEQ ID NO 13598714 as cited in SEQ ID NO 62656
  misc_feature (1)..(945): Ortholog of  Ceres SEQ ID NO 13596969 as cited in SEQ ID NO 63375
  misc_feature (1)..(945): Ortholog of  Ceres SEQ ID NO 14302240 as cited in SEQ ID NO 64162
  misc_feature (1)..(945): Ortholog of  Ceres SEQ ID NO 13584480 as cited in SEQ ID NO 64751
  misc_feature (1)..(945): Ortholog of  Ceres SEQ ID NO 13597519 as cited in SEQ ID NO 64759
  misc_feature (1)..(945): Ortholog of  Ceres SEQ ID NO 13595926 as cited in SEQ ID NO 67778
  misc_feature (1)..(945): Ortholog of  Ceres SEQ ID NO 13596362 as cited in SEQ ID NO 67877
  misc_feature (1)..(945): Ortholog of  Ceres SEQ ID NO 13587054 as cited in SEQ ID NO 0
atggttagggcaaatatagtgagcatggttctgttgatgcatgccatcgttgggtttccttttcatgcgaggggattaagtatgacttactacatgatgagctgtcctttcgctgaacagattgtgaagaacagtgttaacaatgctcttcaagccgatcccactttagccgctggtcttatccgtatgttgttccacgactgtttcatcgagggatgtgatgcgtcaattctgctagattcaacgaaagacaacactgcggaaaaggattcgcctgcgaatctgagtctacgtggctacgagatcatcgatgatgcaaaggagaaaatcgagaatagatgtccaggagttgtatcatgcgcagatatagttgccatggctgctagagatgctgtcttttgggctggtggtccatattatgacataccgaaaggaaggtttgatggtaaaagatcaaagatagaagatacaagaaatctaccttcaccttttcttaatgcctctcaactcattcaaacttttggccaacgtggtttcactccacaagatgttgttgctctctctggagcacataccctaggagttgcacgatgctcctccttcaaggctagacttaccgtcccagactcttcattagactcgacttttgcaaacactctctctaaaacatgcagcgcgggtgacaatgcagagcaaccctttgatgctacgcgcaacgatttcgacaatgcttacttcaatgcgcttcagatgaaatcaggagtcctcttttcagaccaaactttattcaacacaccaaggaccaggaatcttgttaacggctatgcacttaaccaagccaagttcttctttgatttccaacaggccatgcgcaagatgagcaatcttgatgttaaacttggctctcaaggtgaagtccgtcaaaattgtcggagtattaattag

SEQ ID NO: 89058 - protein, 314 aa, Arabidopsis thaliana; identical to SEQ ID NO: 21993
  peptide (1)..(314): Ceres Seq. ID no. 12714907

SEQ ID NO: 89059 - protein, 306 aa, Arabidopsis thaliana; identical to SEQ ID NO: 21994
  peptide (1)..(306): Ceres Seq. ID no. 12714908

SEQ ID NO: 89060 - protein, 302 aa, Arabidopsis thaliana; identical to SEQ ID NO: 21995
  peptide (1)..(302): Ceres Seq. ID no. 12714909

SEQ ID NO: 89061 - DNA, 1482 bp, Arabidopsis thaliana
  misc_feature (1)..(1482): Ceres Seq. ID no. 12714914
  misc_feature (1)..(1482): Ortholog of  Ceres SEQ ID NO 14315862 as cited in SEQ ID NO 60207
  misc_feature (1)..(1482): Ortholog of  Ceres SEQ ID NO 13660129 as cited in SEQ ID NO 67547
atgaagaaagtttctgtcaataaaataggagactgtgagacaaatggttatcaagagaatcgtatggaggttcaggcaagaccgtcattgtctacacaacaggaaattacgcctgtatccaccattgaaattgatgacaatttggatgtgacggaaaagcctattgaagctgaggagaatcttgtcgcggaaccaacagctacagatgatttgtctcctgatgaactcctttcaacttcagaagcaacacatcgcagcgttgatgagattgctcaaaaacctgtaattgatacgtctgaggaaaaccttctgaacacttttgaagctgaggagaatcctgtagttgaaccaacagctacagctgctgtctcttctgatgaactcatttcaacttcagaagcaacacgtcacagcgttgatgagatcgctcaaaagcctattattgatacgtctgagaaaaaccctatggaaacttttgttgaaccagaagcagtgcatagtagcgttgacgagagcactgaaaagcttgtagttgttacgtctgatgtggaaaatgatggagaaaatgtagcttcaaccacagaagatgaaataactgtgagggacacaataactgatagtggtagcatatccaataatgatgacacaaaagtggaagatctccaacttcctgtacctgaaacggccagtcttgaacccattaaagcggcttctggcagggaagaacttgtgtccaaagcattttacttggactctggttttgcttcactccaaagcccctttaaggcattggcaggtcgggaagatgcttattttatctctcaccacaattggataggtattgctgatggagtctctcagtggtcatttgaaggaatcaataagggaatgtatgctcaagaactcatgagcaactgtgaaaagattatttccaatgaaactgctaagataagtgacccagttcaagttctccatagaagtgtcaatgagactaagtcctctggatcatcaacagccttaattgctcatcttgacaataatgaactccacatagccaatattggagattcgggattcatggtcattagggatggcacagtattgcagaattcgtctccaatgtttcatcatttttgttttcccttgcatattacgcaaggctgtgatgtcctaaaacttgcagaggtttaccatgtgaacctggaagaaggcgatgttgtcatcgcagcaactgatgggctctttgataacttatacgaaaaagaaatcgtttcaatagtttgcgggtcactgaaacagagtctggaacctcagaaaatagcagagttggtagctgcaaaagcacaagaagtaggacgatctaagacagagagaacgccatttgctgacgcagctaaagaagaaggatacaatggacacaaaggtggtaaacttgatgctgttaccgtcatcatttcattcgtgaaaattgtctctacataa

SEQ ID NO: 89062 - protein, 493 aa, Arabidopsis thaliana; identical to SEQ ID NO: 77351
  peptide (1)..(493): Ceres Seq. ID no. 12714915

SEQ ID NO: 89063 - protein, 472 aa, Arabidopsis thaliana; identical to SEQ ID NO: 77352
  peptide (1)..(472): Ceres Seq. ID no. 12714916

SEQ ID NO: 89064 - protein, 338 aa, Arabidopsis thaliana
  peptide (1)..(338): Ceres Seq. ID no. 12714917
METFVEPEAVHSSVDESTEKLVVVTSDVENDGENVASTTEDEITVRDTITDSGSISNNDDTKVEDLQLPVPETASLEPIKAASGREELVSKAFYLDSGFASLQSPFKALAGREDAYFISHHNWIGIADGVSQWSFEGINKGMYAQELMSNCEKIISNETAKISDPVQVLHRSVNETKSSGSSTALIAHLDNNELHIANIGDSGFMVIRDGTVLQNSSPMFHHFCFPLHITQGCDVLKLAEVYHVNLEEGDVVIAATDGLFDNLYEKEIVSIVCGSLKQSLEPQKIAELVAAKAQEVGRSKTERTPFADAAKEEGYNGHKGGKLDAVTVIISFVKIVST

SEQ ID NO: 89065 - DNA, 1736 bp, Arabidopsis thaliana
  misc_feature (1)..(1736): Ceres Seq. ID no. 12714918
  misc_feature (1)..(1736): Ortholog of  Ceres SEQ ID NO 15174547 as cited in SEQ ID NO 59586
  misc_feature (1)..(1736): Ortholog of  Ceres SEQ ID NO 15169470 as cited in SEQ ID NO 66036
atccattctctgccgaactagtcgtcaatcgaaatcccaaagatcagcgatggtgactctaaacgcttcttctcctctcacgaccaagtcgttcctcccctaccgtcacgctcctcgccgtccaatctctttctcccctgtcttcgccgttcattcgactgaccccaagaaatctacccaatcagcctccgcttcggttaaatggagtctagagagttggaagtcgaagaaagctttgcaattgccggattatcctgatcagaaggatgttgattcggttctacagacgctttcttcttttcctcctatagttttcgctggtgaggctaggaaactagaggataagcttggtcaagcggctatgggtcaagcctttatgcttcaaggtggtgattgtgctgagagtttcaaggaatttaacgctaataacattagagacacctttagggttcttcttcagatgggtgttgttctcatgttcggtggccagttaccagttatcaaggtgggaagaatggctggtcagtttgcgaagccgagatcagacccatttgaggagaaagatggtgtgaagctgccgagttacagaggagataacataaatggtgatgcttttgatgagaaatcgaggattcctgatcctcataggatggttagagcgtacacacagtctgtggctacgttgaatctcttgagagcatttgctactggaggttatgcagctatgcagagagttagccagtggaaccttgatttcacgcaacatagtgaacagggtgacaggtaccgtgaattggctaatagagttgatgaggctttgggattcatgggtgcagctggacttactagtgctcacccgatcatgactactactgagttttggacatcccatgagtgtttgttattgccttatgagcaagcactcacaagagaggattcaacatctggactttactatgattgctctgcgcacatgctttgggttggagaacgaactcgccaacttgatggtgctcatgttgagtttctgaggggaatcgctaaccccctcggaatcaaggtgagtgataaaatggtccctagtgaactggttaagctgatagagatactaaaccctcagaacaagcctggaaggattacggttatagtgagaatgggagctgagaatatgcgggtcaagcttcctaatttgatcagagcagtccgtggagccggtcagattgtgacttgggttagtgatccaatgcacggaaacacaatcatggctcctggtgggctaaaaactcgttctttcgatgcaatcagggcggaattgagagcgttcttcgacgtccatgatcaagaagggagtttccctggcggggttcatttagaaatgactggtcaaaacgtgacagaatgtgtcggagggtcacgcaccatcacttacaacgatctaagctcacgctaccacactcactgtgacccaagactcaacgcatctcagtctctggagcttgcattcatcattgcagagcgtctgcgaaagagaaggcttggttccgggaatcttccgtcatctattggagtctagagaacaagaaaatacttatccgagctaggatgtgtgtgtatagaggctgatctctacttattaagttgccaagttaaatgagcttgtgtactgttaaaagtaagatattgttgtttttgtgtgttgggttatgattttgtctgaaataagtggctgactttat

SEQ ID NO: 89066 - protein, 523 aa, Arabidopsis thaliana; identical to SEQ ID NO: 24003
  peptide (1)..(523): Ceres Seq. ID no. 12714919

SEQ ID NO: 89067 - protein, 507 aa, Arabidopsis thaliana; identical to SEQ ID NO: 24004
  peptide (1)..(507): Ceres Seq. ID no. 12714920

SEQ ID NO: 89068 - protein, 403 aa, Arabidopsis thaliana; identical to SEQ ID NO: 24005
  peptide (1)..(403): Ceres Seq. ID no. 12714921

SEQ ID NO: 89069 - DNA, 1220 bp, Arabidopsis thaliana
  misc_feature (1)..(1220): Ceres Seq. ID no. 12714933
  misc_feature (1)..(1220): Ortholog of  Ceres SEQ ID NO 13597590 as cited in SEQ ID NO 60707
  misc_feature (1)..(1220): Ortholog of  Ceres SEQ ID NO 14309283 as cited in SEQ ID NO 0
aatttaggcttgttgagccaccgtgtgggcaaaaatatccaaaaacacaacacaagtgttgtcttctcgcgtctctcatcaacgagaaccagtttttttgttgatcctatcaacaatgacgaaaatagagcttcgagctttggggaacacagggcttaaggttagcgccgttggttttggtgcctctccgctcggaagtgtcttcggtccagtcgccgaagatgatgccgtcgccaccgtgcgcgaggctttccgtctcggtatcaacttcttcgacacctccccgtattatggaggaacactgtctgagaaaatgcttggtaagggactaaaggctttgcaagtccctagaagtgactacattgtggctactaagtgtggtagatataaagaaggttttgatttcagtgctgagagagtaagaaagagtattgacgagagcttggagaggcttcagcttgattatgttgacatacttcattgccatgacattgagttcgggtctcttgatcagattgtgagtgaaacaattcctgctcttcagaaactgaaacaagaggggaagacccggttcattggtatcactggtcttccgttagatattttcacttatgttcttgatcgagtgcctccagggactgtcgatgtgatattgtcatactgtcattacggcgttaatgattcgacgttgctggatttactaccttacttgaagagcaaaggtgtgggtgtgataagtgcttctccattagcaatgggcctccttacagaacaaggtcctcctgaatggcaccctgcttcccctgagctcaagtctgcaagcaaagccgcagttgctcactgcaaatcaaagggcaagaagatcacaaagttagctctgcaatacagtttagcaaacaaggagatttcgtcggtgttggttgggatgagctctgtctcacaggtagaagaaaatgttgcagcagttacagagcttgaaagtctggggatggatcaagaaactctgtctgaggttgaagctattctcgagcctgtaaagaatctgacatggccaagtggaatccatcagaactaaaagaagctctttgtgtttctggtaaactcttgtcttgcttcttgtaatgcttatgcattcgttgttgtgtcattgtgttaataagagtgtaagtttggttggtatgattaataaagtttcttagatatcaaaatcagtcggaaca

SEQ ID NO: 89070 - protein, 319 aa, Arabidopsis thaliana; identical to SEQ ID NO: 21407
  peptide (1)..(319): Ceres Seq. ID no. 12714934

SEQ ID NO: 89071 - protein, 253 aa, Arabidopsis thaliana; identical to SEQ ID NO: 21408
  peptide (1)..(253): Ceres Seq. ID no. 12714935

SEQ ID NO: 89072 - DNA, 1482 bp, Arabidopsis thaliana
  misc_feature (1)..(1482): Ceres Seq. ID no. 12714949
  misc_feature (1)..(1482): Ortholog of  Ceres SEQ ID NO 15174599 as cited in SEQ ID NO 53646
  misc_feature (1)..(1482): Ortholog of  Ceres SEQ ID NO 15174646 as cited in SEQ ID NO 54499
atgtcgacagaaatggaggtcgttagtgttcttaagtaccttgacaacaaatccatattggtcgttggaactgctgggttcttagcaaatatctttgtggagaagatattaagggtggcaccaaacgtgaagaaactctatctccttctaagagcatcaaaaggaaaatctgctacccagaggtttaacgacgagattttgaagaaagatttgttcaaggtgctgaaggagaagtatggtcccaatctaaatcaacttacatcagagaaaatcactattgtcgacggagacatttgccttgaggatttaggtcttcaagacttcgacttggctcatgagatgatccaccaagttgatgccattgttaatttagctgcaactactaagtttgatgaaagatacgatgtagctcttgggatcaacacattgggtgctctcaatgtcttgaactttgccaagagatgtgcaaaggttaagatccttgttcatgtatcaacagcttacgtgtgcggagaaaaatctggcttgataatggaaacaccgtaccgtatgggtgagacgttgaatggaaccaccggtttagacatcaactacgagaaaaaattggttcaggagaaacttgaccagctccgagtaatcggagccgctcctgaaaccatcacggaaaccatgaaggatctcggactcagacgggcaaagatgtacggatggccaaacacatatgtgttcaccaaagcaatgggggagatgatggtagggacaaaaagagaaaatctgtcacttgtgttgcttcgtccttcaattattaccagcacattcaaagaaccatttcctggttggactgagggcatcaggactattgatagtttagctgttggatatggcaaaggcaaactcacgtgcttcctctgtgatcttgatgctgtttctgatgtgatgccggcagatatggtagtaaattcgattcttgtatcaatggccgctcaagccggtaaacaagaagagattatttaccatgtgggttcttcacttagaaatccgatgaaaaattcaaagtttcctgaattagcgtatcggtatttctcaatcaaaccgtggaccaacaaagaagggaaggtcgttaaggtcggggccattgagatcctgagttctatgcgtagtttccatagatacatgaccatacgctacttgattgcattgaagggacttgaattggtaaacataatactttgcaagttgtttgagaaggaatttcagtatttcaataagaaaataaattttatattccggcttgttgatctctatcagccttacctctttttctatggaatatttgatgattcaaacacagaaaaattgcgaaaaatggtatcgaagacgggagtcgaaaacgagatgttttatttcgatccaaaggttctcgattgggacgactattttttgaacacacatgttattgggctgcttaagtatgtcttctaa

SEQ ID NO: 89073 - protein, 493 aa, Arabidopsis thaliana
  peptide (1)..(493): Ceres Seq. ID no. 12714950
MSTEMEVVSVLKYLDNKSILVVGTAGFLANIFVEKILRVAPNVKKLYLLLRASKGKSATQRFNDEILKKDLFKVLKEKYGPNLNQLTSEKITIVDGDICLEDLGLQDFDLAHEMIHQVDAIVNLAATTKFDERYDVALGINTLGALNVLNFAKRCAKVKILVHVSTAYVCGEKSGLIMETPYRMGETLNGTTGLDINYEKKLVQEKLDQLRVIGAAPETITETMKDLGLRRAKMYGWPNTYVFTKAMGEMMVGTKRENLSLVLLRPSIITSTFKEPFPGWTEGIRTIDSLAVGYGKGKLTCFLCDLDAVSDVMPADMVVNSILVSMAAQAGKQEEIIYHVGSSLRNPMKNSKFPELAYRYFSIKPWTNKEGKVVKVGAIEILSSMRSFHRYMTIRYLIALKGLELVNIILCKLFEKEFQYFNKKINFIFRLVDLYQPYLFFYGIFDDSNTEKLRKMVSKTGVENEMFYFDPKVLDWDDYFLNTHVIGLLKYVF

SEQ ID NO: 89074 - protein, 489 aa, Arabidopsis thaliana
  peptide (1)..(489): Ceres Seq. ID no. 12714951
MEVVSVLKYLDNKSILVVGTAGFLANIFVEKILRVAPNVKKLYLLLRASKGKSATQRFNDEILKKDLFKVLKEKYGPNLNQLTSEKITIVDGDICLEDLGLQDFDLAHEMIHQVDAIVNLAATTKFDERYDVALGINTLGALNVLNFAKRCAKVKILVHVSTAYVCGEKSGLIMETPYRMGETLNGTTGLDINYEKKLVQEKLDQLRVIGAAPETITETMKDLGLRRAKMYGWPNTYVFTKAMGEMMVGTKRENLSLVLLRPSIITSTFKEPFPGWTEGIRTIDSLAVGYGKGKLTCFLCDLDAVSDVMPADMVVNSILVSMAAQAGKQEEIIYHVGSSLRNPMKNSKFPELAYRYFSIKPWTNKEGKVVKVGAIEILSSMRSFHRYMTIRYLIALKGLELVNIILCKLFEKEFQYFNKKINFIFRLVDLYQPYLFFYGIFDDSNTEKLRKMVSKTGVENEMFYFDPKVLDWDDYFLNTHVIGLLKYVF

SEQ ID NO: 89075 - protein, 380 aa, Arabidopsis thaliana; identical to SEQ ID NO: 27534
  peptide (1)..(380): Ceres Seq. ID no. 12714952

SEQ ID NO: 89076 - DNA, 1710 bp, Arabidopsis thaliana
  misc_feature (1)..(1710): Ceres Seq. ID no. 12714956
  misc_feature (1)..(1710): Ortholog of  Ceres SEQ ID NO 14313288 as cited in SEQ ID NO 67419
atgaagaacatcaacaatggcttcttcctctgcatgcttttactcctctggtgttttgtgcattcggggatttcaattgatcctttctccccaagcgactcactcaaaacagagtgtgtaatgaagcctccacgaagcagtgaaacgaaaggattattacaatttagccgctctgtcgaagatgactctgatgaagaatggaaaatagatggaagtggatccataagagaaatgacacagagaattcagcttcacgaaggaaacatttacagcttctctgcttgggtgaagttgagagaaggaaacaataagaaagtaggagttgtgtttaggacagaaaatggaagatttgttcatggaggtgaagttagggcaaagaaaagatgttggactttgcttaaaggtggcattgtgccagatgtttcaggctctgtagatattttcttcgagagtgatgacaaagaagcaaagatttctgcaagcgatgtgtccctgaaacagttcagtaaacaagaatggaaactgaaacaagaccaactaattgaaaagataaggaagagcaaggtgagatttgaagtaacttatcagaacaaaactgcggtaaaaggcgcagtgatatctatagaacaaaccaaaccatctttcctattaggctgcgcaatgaatttccggatcctacaaagcgaagggtacagaaattggtttgcgtcgcggtttaaaatcacatccttcaccaatgaaatgaaatggtatacaacggagaaagaacgtggtcacgagaactacacggcagctgattcaatgttaaaatttgcggaagagaatggaatattggttagaggtcatactgtgttgtgggatgaccctttaatgcagccaacttgggtgccaaaaatagaagatccaaacgatttgatgaatgtgacattgaaccggataaactcggttatgacgagatacaaagggaagttaaccgggtgggacgtggttaatgagaacgtgcattgggattactttgagaaaatgcttggtgccaacgcttcgtcaagtttctacaatttggcttttaagcttgatcctgatgtgacaatgttcgttaacgagtacaacacgatagagaaccgtgtagaggttaccgcgacgccggttaaggtgaaggagaagatggaggagattcttgcttacccaggtaacatgaacattaaaggagctattggagctcaaggtcactttcgtccaactcagcctaacttagcttacatgagatctgcattggatactttaggctcactaggtttgcctatctggcttacagaggttgatatgcctaagtgccctaatcaggaggtatacattgaagaaattttgagggaagcgtattcgcatcctgcggttaaaggcatcataatatttgctgggcctgaggtgtctggtttcgacaagctgacacttgcggacaaatacttcaacaacactgcaacaggagatgtaattgacaagttgctcaaggagtggcagcaatcttcagagattcccaagattttcatgacggattccgagaatgatgaagaagaggtctcattgttgcatggacattacaatgtgaatgtaagtcatccatggatgaagaacatgtcaaccagtttcagcttggaggtaactaaggagatgggtcagcgtcaggtggttagagttgtaattaatgcttga

SEQ ID NO: 89077 - protein, 569 aa, Arabidopsis thaliana
  peptide (1)..(569): Ceres Seq. ID no. 12714957
MKNINNGFFLCMLLLLWCFVHSGISIDPFSPSDSLKTECVMKPPRSSETKGLLQFSRSVEDDSDEEWKIDGSGSIREMTQRIQLHEGNIYSFSAWVKLREGNNKKVGVVFRTENGRFVHGGEVRAKKRCWTLLKGGIVPDVSGSVDIFFESDDKEAKISASDVSLKQFSKQEWKLKQDQLIEKIRKSKVRFEVTYQNKTAVKGAVISIEQTKPSFLLGCAMNFRILQSEGYRNWFASRFKITSFTNEMKWYTTEKERGHENYTAADSMLKFAEENGILVRGHTVLWDDPLMQPTWVPKIEDPNDLMNVTLNRINSVMTRYKGKLTGWDVVNENVHWDYFEKMLGANASSSFYNLAFKLDPDVTMFVNEYNTIENRVEVTATPVKVKEKMEEILAYPGNMNIKGAIGAQGHFRPTQPNLAYMRSALDTLGSLGLPIWLTEVDMPKCPNQEVYIEEILREAYSHPAVKGIIIFAGPEVSGFDKLTLADKYFNNTATGDVIDKLLKEWQQSSEIPKIFMTDSENDEEEVSLLHGHYNVNVSHPWMKNMSTSFSLEVTKEMGQRQVVRVVINA

SEQ ID NO: 89078 - protein, 558 aa, Arabidopsis thaliana
  peptide (1)..(558): Ceres Seq. ID no. 12714958
MLLLLWCFVHSGISIDPFSPSDSLKTECVMKPPRSSETKGLLQFSRSVEDDSDEEWKIDGSGSIREMTQRIQLHEGNIYSFSAWVKLREGNNKKVGVVFRTENGRFVHGGEVRAKKRCWTLLKGGIVPDVSGSVDIFFESDDKEAKISASDVSLKQFSKQEWKLKQDQLIEKIRKSKVRFEVTYQNKTAVKGAVISIEQTKPSFLLGCAMNFRILQSEGYRNWFASRFKITSFTNEMKWYTTEKERGHENYTAADSMLKFAEENGILVRGHTVLWDDPLMQPTWVPKIEDPNDLMNVTLNRINSVMTRYKGKLTGWDVVNENVHWDYFEKMLGANASSSFYNLAFKLDPDVTMFVNEYNTIENRVEVTATPVKVKEKMEEILAYPGNMNIKGAIGAQGHFRPTQPNLAYMRSALDTLGSLGLPIWLTEVDMPKCPNQEVYIEEILREAYSHPAVKGIIIFAGPEVSGFDKLTLADKYFNNTATGDVIDKLLKEWQQSSEIPKIFMTDSENDEEEVSLLHGHYNVNVSHPWMKNMSTSFSLEVTKEMGQRQVVRVVINA

SEQ ID NO: 89079 - protein, 529 aa, Arabidopsis thaliana
  peptide (1)..(529): Ceres Seq. ID no. 12714959
MKPPRSSETKGLLQFSRSVEDDSDEEWKIDGSGSIREMTQRIQLHEGNIYSFSAWVKLREGNNKKVGVVFRTENGRFVHGGEVRAKKRCWTLLKGGIVPDVSGSVDIFFESDDKEAKISASDVSLKQFSKQEWKLKQDQLIEKIRKSKVRFEVTYQNKTAVKGAVISIEQTKPSFLLGCAMNFRILQSEGYRNWFASRFKITSFTNEMKWYTTEKERGHENYTAADSMLKFAEENGILVRGHTVLWDDPLMQPTWVPKIEDPNDLMNVTLNRINSVMTRYKGKLTGWDVVNENVHWDYFEKMLGANASSSFYNLAFKLDPDVTMFVNEYNTIENRVEVTATPVKVKEKMEEILAYPGNMNIKGAIGAQGHFRPTQPNLAYMRSALDTLGSLGLPIWLTEVDMPKCPNQEVYIEEILREAYSHPAVKGIIIFAGPEVSGFDKLTLADKYFNNTATGDVIDKLLKEWQQSSEIPKIFMTDSENDEEEVSLLHGHYNVNVSHPWMKNMSTSFSLEVTKEMGQRQVVRVVINA

SEQ ID NO: 89080 - DNA, 2271 bp, Arabidopsis thaliana
  misc_feature (1)..(2271): Ceres Seq. ID no. 12715026
  misc_feature (1)..(2271): Ortholog of  Ceres SEQ ID NO 15168900 as cited in SEQ ID NO 217
atgacttccaacagaagcaacctcctgttctcattagtcctcttccactttctttttgtccccacacaactccaagctcttaacactgatggtgttcttctgcttactttcaaatactccatcctcactgaccctctctctgttctacgcaattggaactatgatgatgcaacaccatgcttgtggacaggtgtcacatgtacagagcttgggaagcctaacacaccagacatgttcagagtcacaagcttggtacttcccaacaaacaccttttgggttccatcactccggacttgttctcgattccatatctaaggatcttggatctgtctagcaatttcttcaacgggtcactcccggactcggtgttcaacgccactgagcttcagagtatctcccttggaagcaacaatctctctggtgatttgcccaagagtgtcaacagtgtgactaatctccagctcttgaatctctcagctaacgcatttactggcgaaattccgctcaacatctcacttctgaagaatctaacggtcgtttccttgtcaaaaaacaccttttcaggtgatattccaagtggtttcgaagcagcacagattcttgatctttcttcaaatcttctcaacggctctcttcccaaggatttgggaggaaaaagcctgcattacttgaacttatcacacaacaaagtcctcggcgagatttctccaaattttgcagagaagtttccagcaaatgccacagtcgatctctcctttaacaacctcacaggcccaatcccaagttccctttctttacttaaccaaaaggctgagtctttttccggtaaccaagagctttgtgggaagccattgaagatcctttgttcaattccttccactctttcaaaccctccaaatatctctgaaactacttcaccagcaatagcagttaaaccaagaagtacagctccaataaaccctttgacagaaaaaccaaatcagacaggaaaaagcaagctaaagccaagcaccattgccgcaatcacagttgcagatatagttggtctagctttcattggtctactcgtgctctacgtataccaagtcaggaaacgcagaaggtacccagaatctagcaaatttagcttcttcaagttctgtctggagaaaaacgaagccaagaaatcgaaaccaagcaccactgaggtcacagtcccagaatcaccagaggccaaaacgacatgcggttcatgcattatcttgaccggaggaaggtacgacgagacatcgacatcagagagcgacgtagagaatcaacaaaccgttcaggcattcactcgaacagatggtgggcaactgaagcagagctcccaaactcaattggttacagtcgacggcgagactcggctagatctagacactctgctaaaggcatctgcttacatattgggaaccaccggaaccgggatcgtgtataaggcggtgctggagaacggcacggcattcgcggtgaggcggatcgagacggagagctgtgcggctgcgaaacccaaggaattcgagagggaggttcgtgccatcgctaagcttcgtcacccaaatctcgtcagaattcgtgggttctgctggggagacgacgagaaacttctcatttccgattatgttcccaatggcagcctcctctgtttcttcaccgccactaaggcaagctcaagctcatcttcttcgtcgtcattacaaaaccctcttacttttgaagcacggctcaagatagcaagaggaatggctagaggactatcttacatcaatgagaagaaacaagtgcacggtaacatcaagcccaataacattctcttgaacgctgagaatgagcccatcatcaccgatttagggctagaccgcctcatgacaccagcgcgtgaatctcacaccactggaccaacttcgagctcaccgtaccagccaccggaatggtccacaagcctgaaaccaaaccctaaatgggacgtttactcctttggcgtcatacttttagaacttctcacaagcaaagtgttctcggtagatcatgatatagatcagttctcaaacttatccgactctgcagcggaagagaatggccggttcttgaggttaatcgacggtgcaattaggagtgatgtcgctcgccatgaggatgctgcaatggcgtgctttaggttagggattgaatgtgtctcttccttgcctcagaagcgaccatccatgaaagaattggtgcaatttgatttcttaattcgtatagcctaa

SEQ ID NO: 89081 - protein, 756 aa, Arabidopsis thaliana
  peptide (1)..(756): Ceres Seq. ID no. 12715027
MTSNRSNLLFSLVLFHFLFVPTQLQALNTDGVLLLTFKYSILTDPLSVLRNWNYDDATPCLWTGVTCTELGKPNTPDMFRVTSLVLPNKHLLGSITPDLFSIPYLRILDLSSNFFNGSLPDSVFNATELQSISLGSNNLSGDLPKSVNSVTNLQLLNLSANAFTGEIPLNISLLKNLTVVSLSKNTFSGDIPSGFEAAQILDLSSNLLNGSLPKDLGGKSLHYLNLSHNKVLGEISPNFAEKFPANATVDLSFNNLTGPIPSSLSLLNQKAESFSGNQELCGKPLKILCSIPSTLSNPPNISETTSPAIAVKPRSTAPINPLTEKPNQTGKSKLKPSTIAAITVADIVGLAFIGLLVLYVYQVRKRRRYPESSKFSFFKFCLEKNEAKKSKPSTTEVTVPESPEAKTTCGSCIILTGGRYDETSTSESDVENQQTVQAFTRTDGGQLKQSSQTQLVTVDGETRLDLDTLLKASAYILGTTGTGIVYKAVLENGTAFAVRRIETESCAAAKPKEFEREVRAIAKLRHPNLVRIRGFCWGDDEKLLISDYVPNGSLLCFFTATKASSSSSSSSSLQNPLTFEARLKIARGMARGLSYINEKKQVHGNIKPNNILLNAENEPIITDLGLDRLMTPARESHTTGPTSSSPYQPPEWSTSLKPNPKWDVYSFGVILLELLTSKVFSVDHDIDQFSNLSDSAAEENGRFLRLIDGAIRSDVARHEDAAMACFRLGIECVSSLPQKRPSMKELVQFDFLIRIA

SEQ ID NO: 89082 - protein, 679 aa, Arabidopsis thaliana
  peptide (1)..(679): Ceres Seq. ID no. 12715028
MFRVTSLVLPNKHLLGSITPDLFSIPYLRILDLSSNFFNGSLPDSVFNATELQSISLGSNNLSGDLPKSVNSVTNLQLLNLSANAFTGEIPLNISLLKNLTVVSLSKNTFSGDIPSGFEAAQILDLSSNLLNGSLPKDLGGKSLHYLNLSHNKVLGEISPNFAEKFPANATVDLSFNNLTGPIPSSLSLLNQKAESFSGNQELCGKPLKILCSIPSTLSNPPNISETTSPAIAVKPRSTAPINPLTEKPNQTGKSKLKPSTIAAITVADIVGLAFIGLLVLYVYQVRKRRRYPESSKFSFFKFCLEKNEAKKSKPSTTEVTVPESPEAKTTCGSCIILTGGRYDETSTSESDVENQQTVQAFTRTDGGQLKQSSQTQLVTVDGETRLDLDTLLKASAYILGTTGTGIVYKAVLENGTAFAVRRIETESCAAAKPKEFEREVRAIAKLRHPNLVRIRGFCWGDDEKLLISDYVPNGSLLCFFTATKASSSSSSSSSLQNPLTFEARLKIARGMARGLSYINEKKQVHGNIKPNNILLNAENEPIITDLGLDRLMTPARESHTTGPTSSSPYQPPEWSTSLKPNPKWDVYSFGVILLELLTSKVFSVDHDIDQFSNLSDSAAEENGRFLRLIDGAIRSDVARHEDAAMACFRLGIECVSSLPQKRPSMKELVQFDFLIRIA

SEQ ID NO: 89083 - DNA, 1971 bp, Arabidopsis thaliana
  misc_feature (1)..(1971): Ceres Seq. ID no. 12715074
  misc_feature (1)..(1971): Ortholog of  Ceres SEQ ID NO 13655640 as cited in SEQ ID NO 63844
  misc_feature (1)..(1971): Ortholog of  Ceres SEQ ID NO 13584744 as cited in SEQ ID NO 69137
atggcggactcaccggtggattcatctcctgcccctgaaacctcaaatgggacaccaccgtcaaacggaacatcgccgtctaatgagtcatcgccgccaacaccaccttcttcaccaccaccatcatcaatatctgctcctccgccagatatctccgcttctttttcaccgccgcctgcaccaccaacgcaagaaacgtcacctcctacatctccgtcctcatcgccgcctgttgtagctaatccgtcaccgcagactccagagaatccttctccacctgcacctgaaggctcaactcctgtaacgccacctgcaccaccacaaacaccgtcgaaccaatcaccggaaagaccaactcctccttctcctggtgccaatgatgaccgaaacagaaccaatggcggaaacaacaacagagacggctccacaccatcaccaccgtcgtcagggaacagaacttccggtgacggtggctcaccttcaccacctcggtcgataagccctcctcagaatagtggagattcagactcatcatcggtgtgtatttgcatctgttgcaacaggaagaagaagaagaaatctcctcaggtcaaccacatgcactactacaataacaatccttatggaggagcaccctcaggtaatggtggttattacaagggaacacctcaagatcatgtggtgaatatggctggtcaaggaggtgggaattggggtccacagcaacctgtgtctggtcctcacagtgatgcttccaacttaaccggtcgaactgctataccgtcacctcaagctgcaactcttggtcacaaccaaagcactttcacatacgatgaactgtccattgcaacagaaggtttcgctcagtcaaatttgctaggacaaggaggatttgggtatgttcataaaggagttctgcctagtggcaaagaagttgcagtgaagagtcttaaacttggaagtggacaaggggaacgcgagtttcaagcagaggttgatatcattagccgtgtccatcatcgtcatctcgtttctcttgttggatattgcatctctggtggtcaaagacttttggtttatgagtttatacctaacaacactcttgaatttcatcttcatggaaagggtcgtccggttttggattggcctacaagagtgaagattgcattgggatcagctagaggccttgcatatttgcatgaagactgtcaccctcgcattatccacagagatatcaaagctgcaaacattcttcttgatttcagttttgagaccaaggtggcagattttggattggctaagctatctcaagacaactatactcatgtctccactcgcgtcatgggaacttttggatacttagctccagagtatgcatcaagcggaaagttatccgacaaatctgatgttttctcatttggagtaatgcttcttgagctcataaccggaagacctcctctggatctaactggagaaatggaagatagcttggtagattgggcaaggcctttgtgtttgaaagcagctcaagatggagattacaaccaattggctgatccacgtctagagctaaactacagtcatcaagagatggttcaaatggcttcttgtgcagctgcagcaatcagacattcagcaagaagacggcctaagatgagccaggttcaaaaactcataccacttgttggttctattattgtacgagcactagaaggagatatgtcaatggatgatctaagtgagggaacaagaccaggacaaagcacgtacttgagccccgggagcgtgagctcagagtatgacgcaagctcgtacacggcagacatgaaaaagttcaagaaactggcgttagagaataaagaatatcaaagcagtgaatatggtggaacaagtgagtatggcttaaacccttctgcttcaagtagtgaagaaatgaatagaggctcaatgaaacgcaatcctcagctttga

SEQ ID NO: 89084 - protein, 656 aa, Arabidopsis thaliana
  peptide (1)..(656): Ceres Seq. ID no. 12715075
MADSPVDSSPAPETSNGTPPSNGTSPSNESSPPTPPSSPPPSSISAPPPDISASFSPPPAPPTQETSPPTSPSSSPPVVANPSPQTPENPSPPAPEGSTPVTPPAPPQTPSNQSPERPTPPSPGANDDRNRTNGGNNNRDGSTPSPPSSGNRTSGDGGSPSPPRSISPPQNSGDSDSSSVCICICCNRKKKKKSPQVNHMHYYNNNPYGGAPSGNGGYYKGTPQDHVVNMAGQGGGNWGPQQPVSGPHSDASNLTGRTAIPSPQAATLGHNQSTFTYDELSIATEGFAQSNLLGQGGFGYVHKGVLPSGKEVAVKSLKLGSGQGEREFQAEVDIISRVHHRHLVSLVGYCISGGQRLLVYEFIPNNTLEFHLHGKGRPVLDWPTRVKIALGSARGLAYLHEDCHPRIIHRDIKAANILLDFSFETKVADFGLAKLSQDNYTHVSTRVMGTFGYLAPEYASSGKLSDKSDVFSFGVMLLELITGRPPLDLTGEMEDSLVDWARPLCLKAAQDGDYNQLADPRLELNYSHQEMVQMASCAAAAIRHSARRRPKMSQVQKLIPLVGSIIVRALEGDMSMDDLSEGTRPGQSTYLSPGSVSSEYDASSYTADMKKFKKLALENKEYQSSEYGGTSEYGLNPSASSSEEMNRGSMKRNPQL

SEQ ID NO: 89085 - protein, 457 aa, Arabidopsis thaliana
  peptide (1)..(457): Ceres Seq. ID no. 12715076
MHYYNNNPYGGAPSGNGGYYKGTPQDHVVNMAGQGGGNWGPQQPVSGPHSDASNLTGRTAIPSPQAATLGHNQSTFTYDELSIATEGFAQSNLLGQGGFGYVHKGVLPSGKEVAVKSLKLGSGQGEREFQAEVDIISRVHHRHLVSLVGYCISGGQRLLVYEFIPNNTLEFHLHGKGRPVLDWPTRVKIALGSARGLAYLHEDCHPRIIHRDIKAANILLDFSFETKVADFGLAKLSQDNYTHVSTRVMGTFGYLAPEYASSGKLSDKSDVFSFGVMLLELITGRPPLDLTGEMEDSLVDWARPLCLKAAQDGDYNQLADPRLELNYSHQEMVQMASCAAAAIRHSARRRPKMSQVQKLIPLVGSIIVRALEGDMSMDDLSEGTRPGQSTYLSPGSVSSEYDASSYTADMKKFKKLALENKEYQSSEYGGTSEYGLNPSASSSEEMNRGSMKRNPQL

SEQ ID NO: 89086 - protein, 427 aa, Arabidopsis thaliana
  peptide (1)..(427): Ceres Seq. ID no. 12715077
MAGQGGGNWGPQQPVSGPHSDASNLTGRTAIPSPQAATLGHNQSTFTYDELSIATEGFAQSNLLGQGGFGYVHKGVLPSGKEVAVKSLKLGSGQGEREFQAEVDIISRVHHRHLVSLVGYCISGGQRLLVYEFIPNNTLEFHLHGKGRPVLDWPTRVKIALGSARGLAYLHEDCHPRIIHRDIKAANILLDFSFETKVADFGLAKLSQDNYTHVSTRVMGTFGYLAPEYASSGKLSDKSDVFSFGVMLLELITGRPPLDLTGEMEDSLVDWARPLCLKAAQDGDYNQLADPRLELNYSHQEMVQMASCAAAAIRHSARRRPKMSQVQKLIPLVGSIIVRALEGDMSMDDLSEGTRPGQSTYLSPGSVSSEYDASSYTADMKKFKKLALENKEYQSSEYGGTSEYGLNPSASSSEEMNRGSMKRNPQL

SEQ ID NO: 89087 - DNA, 921 bp, Arabidopsis thaliana
  misc_feature (1)..(921): Ceres Seq. ID no. 12715098
  misc_feature (1)..(921): Ortholog of  Ceres SEQ ID NO 14316324 as cited in SEQ ID NO 55612
  misc_feature (1)..(921): Ortholog of  Ceres SEQ ID NO 14316378 as cited in SEQ ID NO 57746
  misc_feature (1)..(921): Ortholog of  Ceres SEQ ID NO 13596097 as cited in SEQ ID NO 68421
  misc_feature (1)..(921): Ortholog of  Ceres SEQ ID NO 13598439 as cited in SEQ ID NO 69016
  misc_feature (1)..(921): Ortholog of  Ceres SEQ ID NO 13599524 as cited in SEQ ID NO 0
atggaggaggagaagaagaagagcagagttttgatcatcggagcaacaggaagattagggaactatttgacccgtttcagcatcgaatcgggtcacccgactttcgctctcatcagaaacaccactctctccgataagctgaaatctctctccgacgccggcgttaccctcctcaaaggttcattggaggatgaaggaagcttagcagaagcagtgagtaaagtagatgtggtgatctctgcaattccatcaaaacatgttcttgatcagaaactcctcgtcagagttatcaaacaagctggttccatcaagaggtttattcctgctgaatatggagcaaatcctgataaaactcaagtctcggatcttgatcatgacttctattcgaagaaatcagagattaggcatatgatagaatcagaggggattccatatacatacatttgctgcggactgttcatgagagttctacttccatcgcttgtgcaaccggggcttcaatctcctccaacagataaagtcacagtttttggagatggaaacgttaaagctgttttcgtgaatgatgtcgatgttgcagcatttactatcaagacgatagatgatcctcgaacactgaataagaccttgtaccttagcccgcccggaaacatatgttccatgaatgatcttgtcgagctctgggagggcaagattgagaagaagcttgagaaaacgtttgctacagagaatcaacttctcaagaagatcaaagaaactccatatccggataacatggagatggtattcatatactctgtctttatcaaaggagatcacacatacttcgacatcgagtcttgtggtggagtgaatggtactgagctttaccctgatgtcaaatacatgaccgtgagcgagtttcttgatactcttctctag

SEQ ID NO: 89088 - protein, 306 aa, Arabidopsis thaliana
  peptide (1)..(306): Ceres Seq. ID no. 12715099
MEEEKKKSRVLIIGATGRLGNYLTRFSIESGHPTFALIRNTTLSDKLKSLSDAGVTLLKGSLEDEGSLAEAVSKVDVVISAIPSKHVLDQKLLVRVIKQAGSIKRFIPAEYGANPDKTQVSDLDHDFYSKKSEIRHMIESEGIPYTYICCGLFMRVLLPSLVQPGLQSPPTDKVTVFGDGNVKAVFVNDVDVAAFTIKTIDDPRTLNKTLYLSPPGNICSMNDLVELWEGKIEKKLEKTFATENQLLKKIKETPYPDNMEMVFIYSVFIKGDHTYFDIESCGGVNGTELYPDVKYMTVSEFLDTLL

SEQ ID NO: 89089 - protein, 170 aa, Arabidopsis thaliana
  peptide (1)..(170): Ceres Seq. ID no. 12715100
MIESEGIPYTYICCGLFMRVLLPSLVQPGLQSPPTDKVTVFGDGNVKAVFVNDVDVAAFTIKTIDDPRTLNKTLYLSPPGNICSMNDLVELWEGKIEKKLEKTFATENQLLKKIKETPYPDNMEMVFIYSVFIKGDHTYFDIESCGGVNGTELYPDVKYMTVSEFLDTLL

SEQ ID NO: 89090 - protein, 153 aa, Arabidopsis thaliana
  peptide (1)..(153): Ceres Seq. ID no. 12715101
MRVLLPSLVQPGLQSPPTDKVTVFGDGNVKAVFVNDVDVAAFTIKTIDDPRTLNKTLYLSPPGNICSMNDLVELWEGKIEKKLEKTFATENQLLKKIKETPYPDNMEMVFIYSVFIKGDHTYFDIESCGGVNGTELYPDVKYMTVSEFLDTLL

SEQ ID NO: 89091 - DNA, 1710 bp, Arabidopsis thaliana
  misc_feature (1)..(1710): Ceres Seq. ID no. 12715104
  misc_feature (1)..(1710): Ortholog of  Ceres SEQ ID NO 15175771 as cited in SEQ ID NO 55443
atggctgagaccaaacctgaaatagagatgtcggaggaagagaggaagatagtgaagataagctcgctgaagaagaaagcgataaatgcatccaacagattcaagaactccttcaagaaaaaaggtcggagaagcagcagcagagtcatgtccgttccgattgaggacgacattgacgcagaagatcttcaagctcttgatgcttttcgtcaagctcttatccttgacgagcttttgccatccaaactcgatgatctccacatgatgcttcgatttttgagagcaagaaagtttgacattgagaaagctaagcaaatgtggagtgacatgatccaatggaggaaagatttcggcgctgacacaatcattgaggattttgatttcgaagaaattgatgaagtgatgaagcactaccctcaaggctatcatggagttgacaaggaaggcagaccagtttacattgagagactaggtcaaatcgatgctaacaagctactccaagtgacaacaatggaccggtacgtgaaatatcatgtcaaagagttcgagaagactttcaaggtcaagttcccttcttgttctgtagcagcaaataaacacattgatcagagcacaacaattcttgacgtgcaaggcgtgggtcttaagaacttcagcaaatctgcaagagagcttcttcaaaggctttgcaagattgacaatgaaaattaccctgagactttgaaccggatgtttatcatcaatgctggttctggattccggctcttgtggagcacagttaagtcgtttcttgatcccaagaccacagcaaagattcatgttcttgggaacaaatatcatagcaaattgctcgaggtcatcgatgctagtgaattgcctgagttctttggaggtgcttgcacttgtgaagacaaaggaggttgtatgcgctctgacaaaggtccatggaatgatcctgaagttctcaagatcgctataaaccgtgaagctaagtgttcaccgatttcagaagatgaacacaagcatgtagaccaaggaagatcaacttcaggtttcgaaagtcttgagagaatcaagaagaaaaccgatgaagataatgtgtatgagaagcaaattgcaaccattgacaagtcaatggatatggcatggcttgccaaaactcagaaagctgaaaactttccaatctctaaagggttagagtgctatgttaggaaaggggcacccaagaaaggagatggattacttgtgggaggggtcatggcctttgtgatgggaatagttgcaatggttaggctatcaaaagacgttccacgcaaactcaccgaggctgctttatatggaaactcagtctgttatgaggaatctacaaagtctaagcagaatcaaggtcaattcgcagcaccagtctcgagctctgaatatatgttgatggtgaaacgtatggctgagctggaagataagtgcatgttccttgacttgaaacctgctcatgtcgaatctgagaaagaagagaaacttcaggccgcgcttaatcgcgttcaagtgcttgagcaagagttgactgagaccaagaaggctttggaagaagcacttgtgagccagaaggagattttggcatacatcgagaaaaagaagaagaagaagaagctggttttttttcatttgattattcacaaattaactattttatttagtgttggtggtaattga

SEQ ID NO: 89092 - protein, 569 aa, Arabidopsis thaliana
  peptide (1)..(569): Ceres Seq. ID no. 12715105
MAETKPEIEMSEEERKIVKISSLKKKAINASNRFKNSFKKKGRRSSSRVMSVPIEDDIDAEDLQALDAFRQALILDELLPSKLDDLHMMLRFLRARKFDIEKAKQMWSDMIQWRKDFGADTIIEDFDFEEIDEVMKHYPQGYHGVDKEGRPVYIERLGQIDANKLLQVTTMDRYVKYHVKEFEKTFKVKFPSCSVAANKHIDQSTTILDVQGVGLKNFSKSARELLQRLCKIDNENYPETLNRMFIINAGSGFRLLWSTVKSFLDPKTTAKIHVLGNKYHSKLLEVIDASELPEFFGGACTCEDKGGCMRSDKGPWNDPEVLKIAINREAKCSPISEDEHKHVDQGRSTSGFESLERIKKKTDEDNVYEKQIATIDKSMDMAWLAKTQKAENFPISKGLECYVRKGAPKKGDGLLVGGVMAFVMGIVAMVRLSKDVPRKLTEAALYGNSVCYEESTKSKQNQGQFAAPVSSSEYMLMVKRMAELEDKCMFLDLKPAHVESEKEEKLQAALNRVQVLEQELTETKKALEEALVSQKEILAYIEKKKKKKKLVFFHLIIHKLTILFSVGGN

SEQ ID NO: 89093 - protein, 560 aa, Arabidopsis thaliana
  peptide (1)..(560): Ceres Seq. ID no. 12715106
MSEEERKIVKISSLKKKAINASNRFKNSFKKKGRRSSSRVMSVPIEDDIDAEDLQALDAFRQALILDELLPSKLDDLHMMLRFLRARKFDIEKAKQMWSDMIQWRKDFGADTIIEDFDFEEIDEVMKHYPQGYHGVDKEGRPVYIERLGQIDANKLLQVTTMDRYVKYHVKEFEKTFKVKFPSCSVAANKHIDQSTTILDVQGVGLKNFSKSARELLQRLCKIDNENYPETLNRMFIINAGSGFRLLWSTVKSFLDPKTTAKIHVLGNKYHSKLLEVIDASELPEFFGGACTCEDKGGCMRSDKGPWNDPEVLKIAINREAKCSPISEDEHKHVDQGRSTSGFESLERIKKKTDEDNVYEKQIATIDKSMDMAWLAKTQKAENFPISKGLECYVRKGAPKKGDGLLVGGVMAFVMGIVAMVRLSKDVPRKLTEAALYGNSVCYEESTKSKQNQGQFAAPVSSSEYMLMVKRMAELEDKCMFLDLKPAHVESEKEEKLQAALNRVQVLEQELTETKKALEEALVSQKEILAYIEKKKKKKKLVFFHLIIHKLTILFSVGGN

SEQ ID NO: 89094 - protein, 520 aa, Arabidopsis thaliana
  peptide (1)..(520): Ceres Seq. ID no. 12715107
MSVPIEDDIDAEDLQALDAFRQALILDELLPSKLDDLHMMLRFLRARKFDIEKAKQMWSDMIQWRKDFGADTIIEDFDFEEIDEVMKHYPQGYHGVDKEGRPVYIERLGQIDANKLLQVTTMDRYVKYHVKEFEKTFKVKFPSCSVAANKHIDQSTTILDVQGVGLKNFSKSARELLQRLCKIDNENYPETLNRMFIINAGSGFRLLWSTVKSFLDPKTTAKIHVLGNKYHSKLLEVIDASELPEFFGGACTCEDKGGCMRSDKGPWNDPEVLKIAINREAKCSPISEDEHKHVDQGRSTSGFESLERIKKKTDEDNVYEKQIATIDKSMDMAWLAKTQKAENFPISKGLECYVRKGAPKKGDGLLVGGVMAFVMGIVAMVRLSKDVPRKLTEAALYGNSVCYEESTKSKQNQGQFAAPVSSSEYMLMVKRMAELEDKCMFLDLKPAHVESEKEEKLQAALNRVQVLEQELTETKKALEEALVSQKEILAYIEKKKKKKKLVFFHLIIHKLTILFSVGGN

SEQ ID NO: 89095 - DNA, 1239 bp, Arabidopsis thaliana
  misc_feature (1)..(1239): Ceres Seq. ID no. 12715115
  misc_feature (1)..(1239): Ortholog of  Ceres SEQ ID NO 12617887 as cited in SEQ ID NO 65526
atgggaagcttgagtacgattttgagacatccggatgagttatatccgctcttgaagttgaaacttgcgattacgaaagctcagaagcagattccacttgagccacacttagctttctgttattcaattcttcacaaagtttctaaaagcttttctcttgttattcaacaacttggcaccgagcttcgtaacgccaaaaagttagtatcatcttctcatatttttgctactacagaggatgacacaagcgtaccagtggagatcaaagttccaattctgatagctttccaccgtcatatatacgatggtgactggcatttttcatgtggtacaaaagagtataaacttctaatggaccaatttcaccatgtttctgcagcttttctgaaacttgaaaaagggtatcaagaggctattgaagatataactaaaagaatgggtgcaggaatggccaagttcatttgcaaggaggtagaaacaattgatgactatgatgaatactgccattatgctgcaggacttgttggtttaggtttgtcaaaaatcttcattgcttcggaattagaaatactgactccagattggaagcagatttcaaattctacaggtttatttctgcagaaaacaaacattatcaaagattatcttgaagacattaatgagagaccaaagtcgcgcatgttttggcctcgtgagatttggggaaaatatgttgacaaacttgaggacttcaaaaatgaggagaaagctacaaaagcagtgcagtgtttgaatgaaatggtcactaatgcattgaatcatgttgaagattgtttgaaatccttggcttcactgcgtgatcctgcaatatttcagtcttgcgccatccctcagatcgtggcgattggaacacttgcgttatgctataacaatgtacaagtgtttagaggtgtcgtgagattgagacgaggtctaatagctaaagtcattgatcgcacaaagacaatggatgatgtctacggtgcgttctatgatttttcttgcatgctacaaacaaaggttgacaataacgatccaaatgctatgaaaacattaaaccgactcgaaaccatcaagaaattttgcaaagaaaatggaggacttcacaaaagaaaatcttatgttaacgatgaaacacaatccaaggctatctttgttgtaatgtttgtgcttctactggccatagtcgttgtatatctcaaagcaaaccaatgtaagtga

SEQ ID NO: 89096 - protein, 412 aa, Arabidopsis thaliana
  peptide (1)..(412): Ceres Seq. ID no. 12715116
MGSLSTILRHPDELYPLLKLKLAITKAQKQIPLEPHLAFCYSILHKVSKSFSLVIQQLGTELRNAKKLVSSSHIFATTEDDTSVPVEIKVPILIAFHRHIYDGDWHFSCGTKEYKLLMDQFHHVSAAFLKLEKGYQEAIEDITKRMGAGMAKFICKEVETIDDYDEYCHYAAGLVGLGLSKIFIASELEILTPDWKQISNSTGLFLQKTNIIKDYLEDINERPKSRMFWPREIWGKYVDKLEDFKNEEKATKAVQCLNEMVTNALNHVEDCLKSLASLRDPAIFQSCAIPQIVAIGTLALCYNNVQVFRGVVRLRRGLIAKVIDRTKTMDDVYGAFYDFSCMLQTKVDNNDPNAMKTLNRLETIKKFCKENGGLHKRKSYVNDETQSKAIFVVMFVLLLAIVVVYLKANQCK

SEQ ID NO: 89097 - protein, 295 aa, Arabidopsis thaliana
  peptide (1)..(295): Ceres Seq. ID no. 12715117
MDQFHHVSAAFLKLEKGYQEAIEDITKRMGAGMAKFICKEVETIDDYDEYCHYAAGLVGLGLSKIFIASELEILTPDWKQISNSTGLFLQKTNIIKDYLEDINERPKSRMFWPREIWGKYVDKLEDFKNEEKATKAVQCLNEMVTNALNHVEDCLKSLASLRDPAIFQSCAIPQIVAIGTLALCYNNVQVFRGVVRLRRGLIAKVIDRTKTMDDVYGAFYDFSCMLQTKVDNNDPNAMKTLNRLETIKKFCKENGGLHKRKSYVNDETQSKAIFVVMFVLLLAIVVVYLKANQCK

SEQ ID NO: 89098 - protein, 267 aa, Arabidopsis thaliana
  peptide (1)..(267): Ceres Seq. ID no. 12715118
MGAGMAKFICKEVETIDDYDEYCHYAAGLVGLGLSKIFIASELEILTPDWKQISNSTGLFLQKTNIIKDYLEDINERPKSRMFWPREIWGKYVDKLEDFKNEEKATKAVQCLNEMVTNALNHVEDCLKSLASLRDPAIFQSCAIPQIVAIGTLALCYNNVQVFRGVVRLRRGLIAKVIDRTKTMDDVYGAFYDFSCMLQTKVDNNDPNAMKTLNRLETIKKFCKENGGLHKRKSYVNDETQSKAIFVVMFVLLLAIVVVYLKANQCK

SEQ ID NO: 89099 - DNA, 1866 bp, Arabidopsis thaliana
  misc_feature (1)..(1866): Ceres Seq. ID no. 12715348
  misc_feature (1)..(1866): Ortholog of  Ceres SEQ ID NO 12586556 as cited in SEQ ID NO 64667
  misc_feature (1)..(1866): Ortholog of  Ceres SEQ ID NO 13660894 as cited in SEQ ID NO 67475
atgtctgagagaaatattgtaacttggacaacgatggtttctgggtatacgagtgatggaaaacccaataaagctattgagttatacagaagaatgttagactccgaagaagaagcggcgaacgagtttatgtattctgcggttttgaaagcttgtgggttagtgggtgatattcagctggggattttggtttatgaaagaattggtaaagagaatttgagaggtgatgttgttttgatgaatagtgttgttgatatgtatgttaagaatgggagacttatcgaagctaatagcagttttaaggagattttacggcctagttcgacttcgtggaacactcttatttctggttattgtaaagctggtttgatggatgaagcggttactttgttccatcgaatgccgcagccaaatgtcgtgtcttggaactgtttgatatcgggatttgtcgataagggtagtcctcgtgcgttggagtttttagttaggatgcagagagaaggacttgtgttagacggttttgctttaccatgtggtcttaaagcttgtagttttggtggcttattaacaatgggtaaacagctgcattgttgtgtcgtaaagtcgggtctagagtctagcccgttcgcaatatctgctcttattgatatgtactcgaactgtggctctctaatatatgcagctgatgtttttcatcaggaaaaactggccgttaatagtagtgtcgcggtttggaattctatgctctctggatttttgataaatgaggagaatgaagcagcattatggctgcttttgcagatatatcagtcagatttgtgttttgattcctacactctaagtggtgccttaaagatatgtatcaactatgtcaacttaagactcgggcttcaagtacatagtttagttgtagtaagtggttatgagttggattacatcgtaggaagtattcttgttgatttacatgcaaatgttgggaatatacaagatgcacataaactgtttcataggcttccaaataaagatatcatcgctttctctggcttgatacgaggctgtgtgaaatcagggttcaattctttagcattttatctgttcagggaattaatcaagttgggactcgatgctgaccagttcatcgtctcaaatattcttaaagtttgttcaagtttagcatctcttggatggggtaagcaaattcatgggttgtgtataaagaaaggttatgaatcagaacctgtcacagcgacagcactagtagatatgtatgtaaaatgtggtgagatagataatggtgtagtgttgtttgatggtatgttagaaagagatgttgtctcttggacagggataattgttggattcggacaaaacggacgagtcgaagaagcgtttcggtatttccacaagatgataaatattggaattgaaccaaataaggtaacttttttggggcttctttctgcttgccgacattctggactacttgaagaagcaagatcaaccctcgaaacgatgaaatctgaatatggtcttgaaccgtatctagagcattattattgtgtagttgatcttcttggtcaagccgggctgttccaagaggctaacgaattgataaataaaatgccgttggagcccgacaaaacaatatggacgtctctgctcactgcttgcggaactcacaagaatgccggactggttactgtaattgctgagaaattactcaaggggtttccggatgatccatcggtttatacatctctttcgaatgcttatgctacgttaggcatgtgggatcagttaagtaaagtgagagaagctgctaagaagctaggggcaaaagaatctggaatgagttggataatttag

SEQ ID NO: 89100 - protein, 621 aa, Arabidopsis thaliana
  peptide (1)..(621): Ceres Seq. ID no. 12715349
MSERNIVTWTTMVSGYTSDGKPNKAIELYRRMLDSEEEAANEFMYSAVLKACGLVGDIQLGILVYERIGKENLRGDVVLMNSVVDMYVKNGRLIEANSSFKEILRPSSTSWNTLISGYCKAGLMDEAVTLFHRMPQPNVVSWNCLISGFVDKGSPRALEFLVRMQREGLVLDGFALPCGLKACSFGGLLTMGKQLHCCVVKSGLESSPFAISALIDMYSNCGSLIYAADVFHQEKLAVNSSVAVWNSMLSGFLINEENEAALWLLLQIYQSDLCFDSYTLSGALKICINYVNLRLGLQVHSLVVVSGYELDYIVGSILVDLHANVGNIQDAHKLFHRLPNKDIIAFSGLIRGCVKSGFNSLAFYLFRELIKLGLDADQFIVSNILKVCSSLASLGWGKQIHGLCIKKGYESEPVTATALVDMYVKCGEIDNGVVLFDGMLERDVVSWTGIIVGFGQNGRVEEAFRYFHKMINIGIEPNKVTFLGLLSACRHSGLLEEARSTLETMKSEYGLEPYLEHYYCVVDLLGQAGLFQEANELINKMPLEPDKTIWTSLLTACGTHKNAGLVTVIAEKLLKGFPDDPSVYTSLSNAYATLGMWDQLSKVREAAKKLGAKESGMSWII

SEQ ID NO: 89101 - protein, 610 aa, Arabidopsis thaliana
  peptide (1)..(610): Ceres Seq. ID no. 12715350
MVSGYTSDGKPNKAIELYRRMLDSEEEAANEFMYSAVLKACGLVGDIQLGILVYERIGKENLRGDVVLMNSVVDMYVKNGRLIEANSSFKEILRPSSTSWNTLISGYCKAGLMDEAVTLFHRMPQPNVVSWNCLISGFVDKGSPRALEFLVRMQREGLVLDGFALPCGLKACSFGGLLTMGKQLHCCVVKSGLESSPFAISALIDMYSNCGSLIYAADVFHQEKLAVNSSVAVWNSMLSGFLINEENEAALWLLLQIYQSDLCFDSYTLSGALKICINYVNLRLGLQVHSLVVVSGYELDYIVGSILVDLHANVGNIQDAHKLFHRLPNKDIIAFSGLIRGCVKSGFNSLAFYLFRELIKLGLDADQFIVSNILKVCSSLASLGWGKQIHGLCIKKGYESEPVTATALVDMYVKCGEIDNGVVLFDGMLERDVVSWTGIIVGFGQNGRVEEAFRYFHKMINIGIEPNKVTFLGLLSACRHSGLLEEARSTLETMKSEYGLEPYLEHYYCVVDLLGQAGLFQEANELINKMPLEPDKTIWTSLLTACGTHKNAGLVTVIAEKLLKGFPDDPSVYTSLSNAYATLGMWDQLSKVREAAKKLGAKESGMSWII

SEQ ID NO: 89102 - protein, 590 aa, Arabidopsis thaliana
  peptide (1)..(590): Ceres Seq. ID no. 12715351
MLDSEEEAANEFMYSAVLKACGLVGDIQLGILVYERIGKENLRGDVVLMNSVVDMYVKNGRLIEANSSFKEILRPSSTSWNTLISGYCKAGLMDEAVTLFHRMPQPNVVSWNCLISGFVDKGSPRALEFLVRMQREGLVLDGFALPCGLKACSFGGLLTMGKQLHCCVVKSGLESSPFAISALIDMYSNCGSLIYAADVFHQEKLAVNSSVAVWNSMLSGFLINEENEAALWLLLQIYQSDLCFDSYTLSGALKICINYVNLRLGLQVHSLVVVSGYELDYIVGSILVDLHANVGNIQDAHKLFHRLPNKDIIAFSGLIRGCVKSGFNSLAFYLFRELIKLGLDADQFIVSNILKVCSSLASLGWGKQIHGLCIKKGYESEPVTATALVDMYVKCGEIDNGVVLFDGMLERDVVSWTGIIVGFGQNGRVEEAFRYFHKMINIGIEPNKVTFLGLLSACRHSGLLEEARSTLETMKSEYGLEPYLEHYYCVVDLLGQAGLFQEANELINKMPLEPDKTIWTSLLTACGTHKNAGLVTVIAEKLLKGFPDDPSVYTSLSNAYATLGMWDQLSKVREAAKKLGAKESGMSWII

SEQ ID NO: 89103 - DNA, 1122 bp, Arabidopsis thaliana
  misc_feature (1)..(1122): Ceres Seq. ID no. 12715364
  misc_feature (1)..(1122): Ortholog of  Ceres SEQ ID NO 13595351 as cited in SEQ ID NO 55934
  misc_feature (1)..(1122): Ortholog of  Ceres SEQ ID NO 13639645 as cited in SEQ ID NO 57488
atgaaaggaggaaagatggataaattgaagccaataatagcaatcatatcactccaatttggatatgcaggcatgtacatcattactatggtctccttcaagcatggcatgaaccattggatccttgctacttaccgacatgtcgtcgccacaattgtcatagctccttttgctctcattctcgagaggaaaataaggcctaagatgacatggccattgttccttaggattcttgcccttggattcctagaaccacttttggaccagaacttgtactacataggaatgaaagccacgtcagcaacgtatagttctgcctttgttaatgcacttcccgccattaccttcataatggctgtcattttcaggatagaaactgtaaatttgaagaagacacgaagtcttgcaaaagtgattggaacagcaataactgtgggaggagcaatggttatgacgttgtacaaaggtccagccattgagctctttaagactgctcatagctctttacacggcggctcctcgggcacctcctccgagaccactgatcagaattgggttaccggaactctagcggttatgggtagtatcaccacttgggcaggtttcttcattctacaatcgttcacgttgaaaaaatatccggctgagctttcgctagtgatgtggatttgtgccatgggaacggtcttaaacaccatcgcttcgctcataatggtgcgcgacgtaagcgcatggaaagtcggtatggactcgggcacacttgcggctgtttactccggagtggtttgttcgggtatggcgtattacatacaaagcattgtgattagggaacgaggtccggtttttacgacatcgtttagtcctatgtgcatgatcatcactgctttcctcggcgtgttagttttggctgaaaagattcaccttggaagtataatcggggcgatttttatcgtcttcgggctatatagcgttgtgtgggggaaagctaaggacgaagtgatatcggtggaagagaaaataggaatgcaggagctgccgatcaccaacacatcgacaaaagtggagggtggtggtattaccagtgaagtaaacgaaggtgtgactaacaatacccaagtgtaa

SEQ ID NO: 89104 - protein, 373 aa, Arabidopsis thaliana
  peptide (1)..(373): Ceres Seq. ID no. 12715365
MKGGKMDKLKPIIAIISLQFGYAGMYIITMVSFKHGMNHWILATYRHVVATIVIAPFALILERKIRPKMTWPLFLRILALGFLEPLLDQNLYYIGMKATSATYSSAFVNALPAITFIMAVIFRIETVNLKKTRSLAKVIGTAITVGGAMVMTLYKGPAIELFKTAHSSLHGGSSGTSSETTDQNWVTGTLAVMGSITTWAGFFILQSFTLKKYPAELSLVMWICAMGTVLNTIASLIMVRDVSAWKVGMDSGTLAAVYSGVVCSGMAYYIQSIVIRERGPVFTTSFSPMCMIITAFLGVLVLAEKIHLGSIIGAIFIVFGLYSVVWGKAKDEVISVEEKIGMQELPITNTSTKVEGGGITSEVNEGVTNNTQV

SEQ ID NO: 89105 - protein, 368 aa, Arabidopsis thaliana; identical to SEQ ID NO: 82203
  peptide (1)..(368): Ceres Seq. ID no. 12715366

SEQ ID NO: 89106 - protein, 349 aa, Arabidopsis thaliana; identical to SEQ ID NO: 82204
  peptide (1)..(349): Ceres Seq. ID no. 12715367

SEQ ID NO: 89107 - DNA, 1441 bp, Arabidopsis thaliana
  misc_feature (1)..(1441): Ceres Seq. ID no. 12715372
  misc_feature (1)..(1441): Ortholog of  Ceres SEQ ID NO 13595351 as cited in SEQ ID NO 55934
  misc_feature (1)..(1441): Ortholog of  Ceres SEQ ID NO 13639645 as cited in SEQ ID NO 57488
atagtttttgtttttccttttgctactctacatgactctcgatcgagggaaaaaactagttctcatgtttatccaaaactctatatcacctttttgatgtttttatataagaagacttgttcatccatactctttcaataaccttgacagaaaaaaaaaataaacacaaaatttcaataaccatggagggtgttagtgcaactatgcataagttaaggccttatttgttaatgatctttttgcaatttggagcagcaggaacatatattgttattatggccactcttaaccaaggccagaaccgttacgtcgtaattgtgtatcgtaatcttgtggctgctcttgtccttgcaccttttgcactcatctttgaaaggaaagtgaggccgaagatgacactatcggttttgtggaaaataatggcacttggtttcttagagccagtcttggatcagggttttggttacttggggatgaacatgacatcagcaacatatacatctgcgatcatgaacattcttccttctgtcacatttataatagcttggattttaagaatggagaaagttaacatagcggaggtacgaagcaaagcaaagatcattgggacattggtgggtcttggaggggcactagtaatgacattgtacaaaggtccgcttattcctttaccgtggtctaacccgaatatggatcaacaaaacggacatacaaataattcacaagaccataacaattgggttgttggaaccttgttgattctcctcggttgtgttgcttggtctggtttttatgttttacagtcgataacaataaagacgtaccctgccgatctttcattatcagccttaatatgcctagccggggctgtccaaagcttcgcggtagcgcttgtggtggagagacaccctagcggatgggcggttggttgggatgcaaggctttttgcacctctttatacaggaatagttagctcggggataacgtactatgttcaagggatggttatgaagacgagagggccagtttttgttactgcctttaaccctctctgcatgattcttgtagctctcattgcctcttttattcttcatgaacaaatccatttcggatgtgtaataggaggggcagtgatcgccgcgggtttgtatatggttgtttggggaaaaggaaaagactatgaagtatccggattagatatccttgaaaagaatagcctccaagaattgcctatcacaactaaaagtgaggatgacaacaaattggtttcttctataagcgacaacagcaatgtgaccattcctggtggtgcgcatagtaacacatctggaatataagtgaagaaagcatttctcgagttataaatacatatttgtattcgactaaaataaatacatatgtatttgtatgcatttggtatgaaatacatgaaattattttt

SEQ ID NO: 89108 - protein, 384 aa, Arabidopsis thaliana
  peptide (1)..(384): Ceres Seq. ID no. 12715373
MEGVSATMHKLRPYLLMIFLQFGAAGTYIVIMATLNQGQNRYVVIVYRNLVAALVLAPFALIFERKVRPKMTLSVLWKIMALGFLEPVLDQGFGYLGMNMTSATYTSAIMNILPSVTFIIAWILRMEKVNIAEVRSKAKIIGTLVGLGGALVMTLYKGPLIPLPWSNPNMDQQNGHTNNSQDHNNWVVGTLLILLGCVAWSGFYVLQSITIKTYPADLSLSALICLAGAVQSFAVALVVERHPSGWAVGWDARLFAPLYTGIVSSGITYYVQGMVMKTRGPVFVTAFNPLCMILVALIASFILHEQIHFGCVIGGAVIAAGLYMVVWGKGKDYEVSGLDILEKNSLQELPITTKSEDDNKLVSSISDNSNVTIPGGAHSNTSGI

SEQ ID NO: 89109 - protein, 377 aa, Arabidopsis thaliana
  peptide (1)..(377): Ceres Seq. ID no. 12715374
MHKLRPYLLMIFLQFGAAGTYIVIMATLNQGQNRYVVIVYRNLVAALVLAPFALIFERKVRPKMTLSVLWKIMALGFLEPVLDQGFGYLGMNMTSATYTSAIMNILPSVTFIIAWILRMEKVNIAEVRSKAKIIGTLVGLGGALVMTLYKGPLIPLPWSNPNMDQQNGHTNNSQDHNNWVVGTLLILLGCVAWSGFYVLQSITIKTYPADLSLSALICLAGAVQSFAVALVVERHPSGWAVGWDARLFAPLYTGIVSSGITYYVQGMVMKTRGPVFVTAFNPLCMILVALIASFILHEQIHFGCVIGGAVIAAGLYMVVWGKGKDYEVSGLDILEKNSLQELPITTKSEDDNKLVSSISDNSNVTIPGGAHSNTSGI

SEQ ID NO: 89110 - protein, 368 aa, Arabidopsis thaliana
  peptide (1)..(368): Ceres Seq. ID no. 12715375
MIFLQFGAAGTYIVIMATLNQGQNRYVVIVYRNLVAALVLAPFALIFERKVRPKMTLSVLWKIMALGFLEPVLDQGFGYLGMNMTSATYTSAIMNILPSVTFIIAWILRMEKVNIAEVRSKAKIIGTLVGLGGALVMTLYKGPLIPLPWSNPNMDQQNGHTNNSQDHNNWVVGTLLILLGCVAWSGFYVLQSITIKTYPADLSLSALICLAGAVQSFAVALVVERHPSGWAVGWDARLFAPLYTGIVSSGITYYVQGMVMKTRGPVFVTAFNPLCMILVALIASFILHEQIHFGCVIGGAVIAAGLYMVVWGKGKDYEVSGLDILEKNSLQELPITTKSEDDNKLVSSISDNSNVTIPGGAHSNTSGI

SEQ ID NO: 89111 - DNA, 1515 bp, Arabidopsis thaliana
  misc_feature (1)..(1515): Ceres Seq. ID no. 12715401
  misc_feature (1)..(1515): Ortholog of  Ceres SEQ ID NO 13638292 as cited in SEQ ID NO 57738
atggggttaggacagtgcatggtttatgttgtcgtcctaagtgccattgcggctacagtgacatcatacccttacacatcccctcaaactccacattacaattctccaagccatgaacacaaaatccctaagtacacaccacatccaaaaccatctatttacagctcttcaccacctccatcatactactctccttctccaaaggttgattacaagtctccaccaccatcatacgtttacagttccccaccaccaccatactactctccgtctccaaaggttgactacaagtccctaccacccccatacgtctacagttccccacccccaccatactactctccttcaccaaaggttaactacaagtctccaccgccaccatacgtctacagctctccaccaccaccatactacagtccatctccaaagggtgactacaagtctccaccacccccatacgtctacagttccccacccccaccatactactctccttctccaaaggttgactacaagtctccaccaccaccatacgtctacagctccccaccaccaccatactacagtccaactccaaaggttgactacaagtccccaccacccccatacgtctacagctccccacccccaccatactacagtccatctccaaaggttgactacaagtctccaccaccaccatacgtctacagctccccacccccaccatactactctccttcaccaaaggttaactacaagtctccaccaccaccatactacagatctccaccaccaccatactacagtccatctccaaaggttgattacaagtccccaccacccccatacgtctacagttccccacccccaccatactactctccttctccaaaggttgactacaagtctccaccaccaccatacgtctacagctccccaccaccaccatactacagtccaactccaaaggttgactacaagtccccaccacccccatacgtctacagctccccaccaccaccatactatagtccatctccaaaggttgactacaagtccccaccacccccatacgtctacagttccccacccccaccatactactctccttcaccaaaagttgactataagtctccaccaccaccatacgtctataactccccacccccaccatattactctccttctccaaaagttgactacaagtctccacctccaccatacatctataactccccacccccaccatattattctccttcaccaaaggtaaactacaaaactccaccaccaccatacgtctatagctccccaccaccaccatactactctccttctccaaaggttaactacaagtccccaccaccaccatatgtctacagctccccacctccaccgtactactccccttctccaaatgtcgactacaaatctcccccaccaccatatgtctacagctcaccacccacaccatactactctccttcttctaaagtcacttacaagtctcccccaccaccatatgtctactag

SEQ ID NO: 89112 - protein, 504 aa, Arabidopsis thaliana; identical to SEQ ID NO: 69894
  peptide (1)..(504): Ceres Seq. ID no. 12715402

SEQ ID NO: 89113 - protein, 498 aa, Arabidopsis thaliana; identical to SEQ ID NO: 69895
  peptide (1)..(498): Ceres Seq. ID no. 12715403

SEQ ID NO: 89114 - protein, 380 aa, Arabidopsis thaliana; identical to SEQ ID NO: 69896
  peptide (1)..(380): Ceres Seq. ID no. 12715404

SEQ ID NO: 89115 - DNA, 2043 bp, Arabidopsis thaliana
  misc_feature (1)..(2043): Ceres Seq. ID no. 12715412
  misc_feature (1)..(2043): Ortholog of  Ceres SEQ ID NO 13638292 as cited in SEQ ID NO 57738
atggggttaggacagtgcatggtttatgttgtcgtcctaagtgccattgcggctacagtgacatcatacccttacacatcccctcaaactccacattacaattctccaagccatgaacacaaaatccctaagtacacaccacatccaaaaccatctatttacagctcttcaccacctccatcatactactctccttctccaaaggttgattacaagtctccaccaccatcatacgtttacagttccccaccaccaccatactactctccgtctccaaaggttgactacaagtccctaccacccccatacgtctacagttccccacccccaccatactactctccttcaccaaaggttaactacaagtctccaccgccaccatacgtctacagctctccaccaccaccatactacagtccatctccaaagggtgactacaagtctccaccacccccatacgtctacagttccccacccccaccatactactctccttctccaaaggttgactacaagtctccaccaccaccatacgtctacagctccccaccaccaccatactacagtccaactccaaaggttgactacaagtccccaccacccccatacgtctacagctccccacccccaccatactacagtccatctccaaaggttgactacaagtctccaccacccccatacgtgtacagctccccacccccaccatactactctccttcaccaaaggttaactacaagtctccaccaccaccatacgtctacggctctccaccaccaccatactacagtccatctccaaaggttgactacaagtccccaccacccccatacgtctacagttccccacccccaccatactactctccttcaccaaaggttaactacaagtctccaccaccaccatacgtctacggctctccaccaccaccatactacagtccatctccaaaggttgactacaagtccccaccacccccatacgtctacagttccccacccccaccatactactctccttctccaaaggttgactacaagtctccaccaccaccatacgtttacagctccacaccaccaccatactacagtccatcaccaaaggttgactacaagtccccaccacccccatacgtctacagttccccacccccaccatactactctccttctccaaaggttgactacaagtccccaccaccaccatacatctacagctccacaccactaccatactacagtccatctccaaaggttgactacaagtccccaccacccccatacgtctacagctccccacccccaccatactactctccttctccaaaggttgactacaagcctccaccaccaccatacgtctacagctccccaccaccaccatactacagtccatctccaaaggttgactacaagtccccaccacccccatacgtctacagcttcccacccccaccatactacagtccatctccaaaggttgactacaagtctccaccacccccatacgtctacagctctccacccccaccatactactctccttcaccaaaggttaactataagtctccaccaccaccatacgtctacagttctccaccaccaccgtactactctccttctccaaaagttgaatacaagtccccaccacccccatacatctatagttccccacctccaccatactacgctccttcaccaaaggttgactacaagtctccaccaccaccatacgtctatagctccccacccccaccatattactctccttctccaaaagttgactataagtctccacctccaccatacgtctatagctcaccaccaccaccatactactctccttctccaaaggttaactacaagtccccaccaccaccatatgtctacagctccccacctccaccgtactactccccttctcctaaggtcgactacaaatcttccccaccacaatatgtctacagctcaccacccacaccatactactctccttctcctaaagtcacttacaagtctcccccaccaccatatgtttactag

SEQ ID NO: 89116 - protein, 680 aa, Arabidopsis thaliana
  peptide (1)..(680): Ceres Seq. ID no. 12715413
MGLGQCMVYVVVLSAIAATVTSYPYTSPQTPHYNSPSHEHKIPKYTPHPKPSIYSSSPPPSYYSPSPKVDYKSPPPSYVYSSPPPPYYSPSPKVDYKSLPPPYVYSSPPPPYYSPSPKVNYKSPPPPYVYSSPPPPYYSPSPKGDYKSPPPPYVYSSPPPPYYSPSPKVDYKSPPPPYVYSSPPPPYYSPTPKVDYKSPPPPYVYSSPPPPYYSPSPKVDYKSPPPPYVYSSPPPPYYSPSPKVNYKSPPPPYVYGSPPPPYYSPSPKVDYKSPPPPYVYSSPPPPYYSPSPKVNYKSPPPPYVYGSPPPPYYSPSPKVDYKSPPPPYVYSSPPPPYYSPSPKVDYKSPPPPYVYSSTPPPYYSPSPKVDYKSPPPPYVYSSPPPPYYSPSPKVDYKSPPPPYIYSSTPLPYYSPSPKVDYKSPPPPYVYSSPPPPYYSPSPKVDYKPPPPPYVYSSPPPPYYSPSPKVDYKSPPPPYVYSFPPPPYYSPSPKVDYKSPPPPYVYSSPPPPYYSPSPKVNYKSPPPPYVYSSPPPPYYSPSPKVEYKSPPPPYIYSSPPPPYYAPSPKVDYKSPPPPYVYSSPPPPYYSPSPKVDYKSPPPPYVYSSPPPPYYSPSPKVNYKSPPPPYVYSSPPPPYYSPSPKVDYKSSPPQYVYSSPPTPYYSPSPKVTYKSPPPPYVY

SEQ ID NO: 89117 - protein, 674 aa, Arabidopsis thaliana
  peptide (1)..(674): Ceres Seq. ID no. 12715414
MVYVVVLSAIAATVTSYPYTSPQTPHYNSPSHEHKIPKYTPHPKPSIYSSSPPPSYYSPSPKVDYKSPPPSYVYSSPPPPYYSPSPKVDYKSLPPPYVYSSPPPPYYSPSPKVNYKSPPPPYVYSSPPPPYYSPSPKGDYKSPPPPYVYSSPPPPYYSPSPKVDYKSPPPPYVYSSPPPPYYSPTPKVDYKSPPPPYVYSSPPPPYYSPSPKVDYKSPPPPYVYSSPPPPYYSPSPKVNYKSPPPPYVYGSPPPPYYSPSPKVDYKSPPPPYVYSSPPPPYYSPSPKVNYKSPPPPYVYGSPPPPYYSPSPKVDYKSPPPPYVYSSPPPPYYSPSPKVDYKSPPPPYVYSSTPPPYYSPSPKVDYKSPPPPYVYSSPPPPYYSPSPKVDYKSPPPPYIYSSTPLPYYSPSPKVDYKSPPPPYVYSSPPPPYYSPSPKVDYKPPPPPYVYSSPPPPYYSPSPKVDYKSPPPPYVYSFPPPPYYSPSPKVDYKSPPPPYVYSSPPPPYYSPSPKVNYKSPPPPYVYSSPPPPYYSPSPKVEYKSPPPPYIYSSPPPPYYAPSPKVDYKSPPPPYVYSSPPPPYYSPSPKVDYKSPPPPYVYSSPPPPYYSPSPKVNYKSPPPPYVYSSPPPPYYSPSPKVDYKSSPPQYVYSSPPTPYYSPSPKVTYKSPPPPYVY

SEQ ID NO: 89118 - protein, 643 aa, Arabidopsis thaliana; identical to SEQ ID NO: 69877
  peptide (1)..(643): Ceres Seq. ID no. 12715415

SEQ ID NO: 89119 - DNA, 2286 bp, Arabidopsis thaliana
  misc_feature (1)..(2286): Ceres Seq. ID no. 12715433
  misc_feature (1)..(2286): Ortholog of  Ceres SEQ ID NO 13596198 as cited in SEQ ID NO 68488
atgaagaagtcgtcggataagtcaccggtgcggcaacatgacacggcgacgcaaatcaactctgacgcagtgtcttcttctacttccttcactgattccgactctacttgttcctttttgactccctccatggagttcccggatcgaatcagtttccggagaatcgattttagtgaagcagctcctactggtgtcgttcttccttctacttccagtgagttaactcgttccaattccagtgagaataagattcccaatgaagatatttccgtttcaacttcttctcgctatttggtgtttgataaaattctagctcttatgaagaaatcaccaggacgaagaggagataagactagtccggcgcggcggttagaccgtagtgatgcggtgaggaggaatatcgattatgacgcaggtgaagattcttcttcgttgttgataactcgttctttggatttcccgaatcgtactagttttcgagtcgatggagttgatgatggagaaatagatcggatttatcagtatattggtgtttctggtcctgaagattttgctatttcttctgatgcttggaaagctcgtatggagcatgagcgttcttcttcagatgttgttaataagttaaagtctcttgatcttgatagtcgtgaagcaggtcctagtggtggtgttgttgcttctagttcaatgaatcataagtttcagggtcatgatttgagtgaagcaggttctattggtgttgttgttgcttctaattttacgctttctgagtcgaataagattgagaacttaaatagtttgagggataaggaaattgttgatggtgatatggtagagaataggtgcggtattgagcgaaaaccgactattttggtgaagtcgagagggtatcttgttcacaatgatgatgtgggtgttggtggtggaattaagggtgtaagaccaccagtactaaacgttcctcgtgcggataaggaagttgttgatggtggtacggtggagagcaagagtggtattgaatggaaaccaactattttggtgaagtcaaaagggtatcttgtttccaatgatggtggaataaagggggtaacatcaccggtactaaatcttcgcccgacagataaggaagttgttgatagtggtacggtagagaatagacgtggtattaagggcgtaagaccatcggtacttaagcctcctccggtgatgaaactacctccagttgatcttccgggatcatcttgggatatccttactcattttgctcctgatagtgaaatagttaggcggccgagttcctcttcttcttccgaaaatggttgtgatgaagaagaagccgaggatgacaaattggaggatacgactgatgaggcatgctcattcactacaaacgagggtgactcctcaagtacagtatccaatacctcaccgatttgtgtctctgggggatctatcaatacttcttggcaaaagggtcaacttctgcgacaaggatcgtttggctctgtgtatgaagccatttcagaagatggggacttctttgctgtcaaggaagtttcacttcttgatcagggaagtcaggcacaagaatgcatacaacaacttgagggggaaattgcactacttagtcagcttgagcatcagaatattctgcgatatcgtggcacagacaaggacgggtcaaatttgtatatttttcttgagcttgtaacacaaggatcccttctagaactctaccgaagataccagattcgggactcgctaatctccttgtacacaaaacaaatccttgacggtttgaaatatcttcaccataaaggtttcattcacagggacattaaatgtgcaactatattggtggacgccaatggcaccgtcaaacttgcagattttggattggcaaaggtgtcaaagttaaacgacattaagtcccgcaaggaaactctattttggatggctccagaggttattaaccggaaggataatgatggttacagaagtccagctgatatatggagcctcgggtgcactgtgctggaaatgtgtactggtcagatcccatactctgatctagaacccgttgaagccctgtttaggatcagaaggggtacgcttccggaagtacctgatactttatcactagacgctcggcatttcatacttaagtgtctcaaattgaacccggaagagcgtccaactgcaactgagctactgaaccatccatttgtgagaaggcccttaccatcctcaggctcaggatcaacatctccgctaatccgtagatga

SEQ ID NO: 89120 - protein, 761 aa, Arabidopsis thaliana
  peptide (1)..(761): Ceres Seq. ID no. 12715434
MKKSSDKSPVRQHDTATQINSDAVSSSTSFTDSDSTCSFLTPSMEFPDRISFRRIDFSEAAPTGVVLPSTSSELTRSNSSENKIPNEDISVSTSSRYLVFDKILALMKKSPGRRGDKTSPARRLDRSDAVRRNIDYDAGEDSSSLLITRSLDFPNRTSFRVDGVDDGEIDRIYQYIGVSGPEDFAISSDAWKARMEHERSSSDVVNKLKSLDLDSREAGPSGGVVASSSMNHKFQGHDLSEAGSIGVVVASNFTLSESNKIENLNSLRDKEIVDGDMVENRCGIERKPTILVKSRGYLVHNDDVGVGGGIKGVRPPVLNVPRADKEVVDGGTVESKSGIEWKPTILVKSKGYLVSNDGGIKGVTSPVLNLRPTDKEVVDSGTVENRRGIKGVRPSVLKPPPVMKLPPVDLPGSSWDILTHFAPDSEIVRRPSSSSSSENGCDEEEAEDDKLEDTTDEACSFTTNEGDSSSTVSNTSPICVSGGSINTSWQKGQLLRQGSFGSVYEAISEDGDFFAVKEVSLLDQGSQAQECIQQLEGEIALLSQLEHQNILRYRGTDKDGSNLYIFLELVTQGSLLELYRRYQIRDSLISLYTKQILDGLKYLHHKGFIHRDIKCATILVDANGTVKLADFGLAKVSKLNDIKSRKETLFWMAPEVINRKDNDGYRSPADIWSLGCTVLEMCTGQIPYSDLEPVEALFRIRRGTLPEVPDTLSLDARHFILKCLKLNPEERPTATELLNHPFVRRPLPSSGSGSTSPLIRR

SEQ ID NO: 89121 - protein, 718 aa, Arabidopsis thaliana
  peptide (1)..(718): Ceres Seq. ID no. 12715435
MEFPDRISFRRIDFSEAAPTGVVLPSTSSELTRSNSSENKIPNEDISVSTSSRYLVFDKILALMKKSPGRRGDKTSPARRLDRSDAVRRNIDYDAGEDSSSLLITRSLDFPNRTSFRVDGVDDGEIDRIYQYIGVSGPEDFAISSDAWKARMEHERSSSDVVNKLKSLDLDSREAGPSGGVVASSSMNHKFQGHDLSEAGSIGVVVASNFTLSESNKIENLNSLRDKEIVDGDMVENRCGIERKPTILVKSRGYLVHNDDVGVGGGIKGVRPPVLNVPRADKEVVDGGTVESKSGIEWKPTILVKSKGYLVSNDGGIKGVTSPVLNLRPTDKEVVDSGTVENRRGIKGVRPSVLKPPPVMKLPPVDLPGSSWDILTHFAPDSEIVRRPSSSSSSENGCDEEEAEDDKLEDTTDEACSFTTNEGDSSSTVSNTSPICVSGGSINTSWQKGQLLRQGSFGSVYEAISEDGDFFAVKEVSLLDQGSQAQECIQQLEGEIALLSQLEHQNILRYRGTDKDGSNLYIFLELVTQGSLLELYRRYQIRDSLISLYTKQILDGLKYLHHKGFIHRDIKCATILVDANGTVKLADFGLAKVSKLNDIKSRKETLFWMAPEVINRKDNDGYRSPADIWSLGCTVLEMCTGQIPYSDLEPVEALFRIRRGTLPEVPDTLSLDARHFILKCLKLNPEERPTATELLNHPFVRRPLPSSGSGSTSPLIRR

SEQ ID NO: 89122 - protein, 655 aa, Arabidopsis thaliana
  peptide (1)..(655): Ceres Seq. ID no. 12715436
MKKSPGRRGDKTSPARRLDRSDAVRRNIDYDAGEDSSSLLITRSLDFPNRTSFRVDGVDDGEIDRIYQYIGVSGPEDFAISSDAWKARMEHERSSSDVVNKLKSLDLDSREAGPSGGVVASSSMNHKFQGHDLSEAGSIGVVVASNFTLSESNKIENLNSLRDKEIVDGDMVENRCGIERKPTILVKSRGYLVHNDDVGVGGGIKGVRPPVLNVPRADKEVVDGGTVESKSGIEWKPTILVKSKGYLVSNDGGIKGVTSPVLNLRPTDKEVVDSGTVENRRGIKGVRPSVLKPPPVMKLPPVDLPGSSWDILTHFAPDSEIVRRPSSSSSSENGCDEEEAEDDKLEDTTDEACSFTTNEGDSSSTVSNTSPICVSGGSINTSWQKGQLLRQGSFGSVYEAISEDGDFFAVKEVSLLDQGSQAQECIQQLEGEIALLSQLEHQNILRYRGTDKDGSNLYIFLELVTQGSLLELYRRYQIRDSLISLYTKQILDGLKYLHHKGFIHRDIKCATILVDANGTVKLADFGLAKVSKLNDIKSRKETLFWMAPEVINRKDNDGYRSPADIWSLGCTVLEMCTGQIPYSDLEPVEALFRIRRGTLPEVPDTLSLDARHFILKCLKLNPEERPTATELLNHPFVRRPLPSSGSGSTSPLIRR

SEQ ID NO: 89123 - DNA, 1446 bp, Arabidopsis thaliana
  misc_feature (1)..(1446): Ceres Seq. ID no. 12715518
  misc_feature (1)..(1446): Ortholog of  Ceres SEQ ID NO 12614670 as cited in SEQ ID NO 68565
atgggttccgtggagaatccaatctcacttcaagaaagcgtgacgggtcctagttaccggatattcagtggaaactccggcgaggttagccggctaacggcggaggcgaagtcaaagccgattccttccgggagaaatcctcatgagttcgtccaccgtgtggcgcctcactaccacgaatggtcacgtgtctacgggaagacgttcctctactggttcgggtcgaaacctgtggtggctacgtcggatccaagactaatccgggaagctttgacgacgggtgggtcgtttgaccgaattgggcataaccctttgtctaagctgctttatgctcaaggtcttcctggtcttagaggtgatcaatgggctttccatagaagaatcgccaaacaagcttttacaatggagaaactcaagaggtgggtgccacaaatggtaacaagtactatgatgttgatggagaagtgggaagatatgagaaacggaggagaagagattgagttagaggtacacaaagagatgcacaatttgtctgcagaaatgttatcaagaacagcttttgggaacagcgtggaagaagggaaaggaatctttgaattgcaggagcgtatgatgcgtcttttttatctggttcgatggagcgtttatatcccaggattcagattctttccttcgaagacgaatagagagatatggagaattgagaagcaaatccgtgtttctatcttgaaactgatcgaaaacaataaaacagctgttgagaaatcaggaactctgcttcaggcttttatgtctccttacacaaatcagaatggtcaagaagagaagcttgggatagaagaagttacagatgaatgcaaaacgttctactttgcagctaaggaaacaactgctaaccttatgacgtttgttttagtcctcttagctatgaaccaagaatggcaaaacattgctcgggaagaagtcatatgcgttctcggacaaaccgggcttcctactctagacatcttacaagacctcaagactctaagtatgataatcaatgagactctccggctctaccctccagcaatgacattaaaccgtgacactcttaaaagagctaagctaggagaccttgacatccctgcaggaactcaactctatttatcagtagtcgcgatgcaccacgataaagaaacatggggagacgacgcagaggagtttaatccgcgtaggtttgaagatcctaagaaacaatcagctctgcttgtaccgtttgggttagggcctaggacttgtgtgggacagaatcttgctgtgaatgaggctaaaactgttctggctacgatcttgaagtattacagtttcaggttgtctccaagttatgctcatgctcctgttttatttgtgacgttgcagcctcaaaatggtgctcatcttctctttactaggatatcaagttaa

SEQ ID NO: 89124 - protein, 481 aa, Arabidopsis thaliana
  peptide (1)..(481): Ceres Seq. ID no. 12715519
MGSVENPISLQESVTGPSYRIFSGNSGEVSRLTAEAKSKPIPSGRNPHEFVHRVAPHYHEWSRVYGKTFLYWFGSKPVVATSDPRLIREALTTGGSFDRIGHNPLSKLLYAQGLPGLRGDQWAFHRRIAKQAFTMEKLKRWVPQMVTSTMMLMEKWEDMRNGGEEIELEVHKEMHNLSAEMLSRTAFGNSVEEGKGIFELQERMMRLFYLVRWSVYIPGFRFFPSKTNREIWRIEKQIRVSILKLIENNKTAVEKSGTLLQAFMSPYTNQNGQEEKLGIEEVTDECKTFYFAAKETTANLMTFVLVLLAMNQEWQNIAREEVICVLGQTGLPTLDILQDLKTLSMIINETLRLYPPAMTLNRDTLKRAKLGDLDIPAGTQLYLSVVAMHHDKETWGDDAEEFNPRRFEDPKKQSALLVPFGLGPRTCVGQNLAVNEAKTVLATILKYYSFRLSPSYAHAPVLFVTLQPQNGAHLLFTRISS

SEQ ID NO: 89125 - protein, 347 aa, Arabidopsis thaliana; identical to SEQ ID NO: 50028
  peptide (1)..(347): Ceres Seq. ID no. 12715520

SEQ ID NO: 89126 - protein, 337 aa, Arabidopsis thaliana
  peptide (1)..(337): Ceres Seq. ID no. 12715521
MVTSTMMLMEKWEDMRNGGEEIELEVHKEMHNLSAEMLSRTAFGNSVEEGKGIFELQERMMRLFYLVRWSVYIPGFRFFPSKTNREIWRIEKQIRVSILKLIENNKTAVEKSGTLLQAFMSPYTNQNGQEEKLGIEEVTDECKTFYFAAKETTANLMTFVLVLLAMNQEWQNIAREEVICVLGQTGLPTLDILQDLKTLSMIINETLRLYPPAMTLNRDTLKRAKLGDLDIPAGTQLYLSVVAMHHDKETWGDDAEEFNPRRFEDPKKQSALLVPFGLGPRTCVGQNLAVNEAKTVLATILKYYSFRLSPSYAHAPVLFVTLQPQNGAHLLFTRISS

SEQ ID NO: 89127 - DNA, 836 bp, Arabidopsis thaliana
  misc_feature (1)..(836): Ceres Seq. ID no. 12715584
  misc_feature (1)..(836): Ortholog of  Ceres SEQ ID NO 13597821 as cited in SEQ ID NO 64462
  misc_feature (1)..(836): Ortholog of  Ceres SEQ ID NO 12618069 as cited in SEQ ID NO 65387
atggaagatattcataatctcgatatagagaaaagtgatagatcgatttggttgatgaagtgtcctgtagttgtagacaaggcatggcacaagatagcagcttcgtcgtcttcttcttttgcttcctcggattctcctcccgacatggcaaagattgttcgcgaagttgatcctctacgggacgattctccccccgagttcaaaatgtatatggttggtgctgagtatgggaacatgccaaagtgctacgctttgaacatgttcacagactttgttccgatggggggcttttccgatgttaatcaaggttgtgcagctgctgaaggaaaggttgatcacaaattcgatatgaagccatatggtgaaaccattgaagaatatgctaggctttgtcgtgagagaacgagcaaagccatggttaaaaatcgacagattcaggttattgataatgaccgcggagttcatatgaggcccatgcctggaatgcttggtttagtttcctccaattccaaggaaaagaggaaacctcccccagtcaagcaaaccgaggtgaagaggacgaggagagatcgtggtgagcttgaagctataatgttcaagctatttgaaggccagcctaactggacattgaagcagcttgtacaagagacggaccagccagctcagttcctgaaagaaatactaaacgagctgtgcgtgtacaataagagaggatcgaaccaagggacatatgagcttaaacctgaatacaagaaatctgctgaagatgatacaggtgggcagtgaaatcaaccccttgtgtaattcactattatatacatgtgacatagtcataa

SEQ ID NO: 89128 - protein, 261 aa, Arabidopsis thaliana; identical to SEQ ID NO: 35607
  peptide (1)..(261): Ceres Seq. ID no. 12715585

SEQ ID NO: 89129 - protein, 243 aa, Arabidopsis thaliana; identical to SEQ ID NO: 35608
  peptide (1)..(243): Ceres Seq. ID no. 12715586

SEQ ID NO: 89130 - protein, 213 aa, Arabidopsis thaliana; identical to SEQ ID NO: 77698
  peptide (1)..(213): Ceres Seq. ID no. 12715587

SEQ ID NO: 89131 - DNA, 1405 bp, Arabidopsis thaliana
  misc_feature (1)..(1405): Ceres Seq. ID no. 12715596
  misc_feature (1)..(1405): Ortholog of  Ceres SEQ ID NO 15178142 as cited in SEQ ID NO 1163
gggatcgtaagaacagaggatttttctcggccaagttttctctagctcaggttaaaattcgatttgtgagatctgttagttagattgtacatgacggtgcgaatttattgaatctgtttaaatctattgaaacgtgaaacgcatttgagtattgtgaggctgaggaaatttctgaaagtggttttgggacgatgatgctggtgttgcggagtttgccataatcagatctgtatgtatgtgggtttcttgataaaagttgtatgaggaaggcattggagatttgtgttgaagaattgatgtatgggagtatgaaggaggtaatgttgttggtgtgtgtggttgatgttggcaggtgtttgatgtgaattttttgagggaggggaatgagttcaatgagcagaagcagaagtcgaagtagaagtcgtagtcgggatcggtttcgtagtcggagtccgagagacaggagaatgagatctgaacgagtttcttaccatgatgctccttctagaagggagagggagccacgtcgtgccttcagccaaggaaatctctgcaacaactgcaagcgacctggtcactttgcaagagactgttctaatgtttccgtctgtaacaactgtggtcttccagggcacattgcagcagaatgcactgcggaatcacgttgttggaactgtagagaaccgggccacgtagcctcaaactgttcaaacgaaggaatctgccactcctgtggtaaatctggacatcgagccagagactgctctaattcggattctcgtgcaggagacttaaggctctgcaacaactgcttcaaacagggacatcttgccgctgactgcacaaatgacaaggcgtgcaagaactgcaggacttcaggtcacatagctcgcgattgcaggaacgatccagtttgtaacatctgcagtatctcggggcatgttgctagacactgcccaaagggtgacagcaattactctgacagaggaagcagggttcgagatggtggtatgcaaagaggtggtttgagcagaatgagcagagacagagaaggcgttagtgctatgataatatgtcacaattgtggtggccgaggacacagggcgtacgagtgtccgtctgctcgagtcgctgaccgtggattccgccggtactgaggctcttaaatttaccaattgaagttccattcatcttcacctttacccttttagcttctgcactcttgtttttgttgagctacattgttgttttctaatctcatggtttttgtctattggagtgaatcaaggatggttttagttttggtttgttttcggaaaatttgagacattgcttgtgttgtatgaagtattgaacagattagtgtgatgcagagttctgagttttcagaactcaatattatatt

SEQ ID NO: 89132 - protein, 257 aa, Arabidopsis thaliana; identical to SEQ ID NO: 39512
  peptide (1)..(257): Ceres Seq. ID no. 12715597

SEQ ID NO: 89133 - protein, 254 aa, Arabidopsis thaliana; identical to SEQ ID NO: 39513
  peptide (1)..(254): Ceres Seq. ID no. 12715598

SEQ ID NO: 89134 - protein, 229 aa, Arabidopsis thaliana; identical to SEQ ID NO: 39514
  peptide (1)..(229): Ceres Seq. ID no. 12715599

SEQ ID NO: 89135 - DNA, 411 bp, Arabidopsis thaliana
  misc_feature (1)..(411): Ceres Seq. ID no. 12715604
  misc_feature (1)..(411): Ortholog of  Ceres SEQ ID NO 13581889 as cited in SEQ ID NO 50900
atggctcgtacgaagcaaactgcaagaaaatcacacggaggaaaagctccgaggactctgctcgctaccaaggcggcgaggaaatctgcgccgactactggaggagtcaagaaacctcaccgttaccgtcccggaaccgtcgctcttcgtgagattcgtaaataccagaagagcacagagttgttgatccgtaaacttccttttcaacgtcttgttcgtgaaatcgctcaagattacaagacggatctgagattccagagccatgcggtgttagctcttcaagaagctgctgaagcatatttggttggtttgtttgaagatacaaatctgtgtgccattcatgccaagagggttacgatcatgcctaaagatgttcaattggcaagaaggattcgtggagagcgtgcttag

SEQ ID NO: 89136 - protein, 136 aa, Arabidopsis thaliana
  peptide (1)..(136): Ceres Seq. ID no. 12715605
MARTKQTARKSHGGKAPRTLLATKAARKSAPTTGGVKKPHRYRPGTVALREIRKYQKSTELLIRKLPFQRLVREIAQDYKTDLRFQSHAVLALQEAAEAYLVGLFEDTNLCAIHAKRVTIMPKDVQLARRIRGERA

SEQ ID NO: 89137 - DNA, 1199 bp, Arabidopsis thaliana
  misc_feature (1)..(1199): Ceres Seq. ID no. 12715636
  misc_feature (1)..(1199): Ortholog of  Ceres SEQ ID NO 13593955 as cited in SEQ ID NO 54278
  misc_feature (1)..(1199): Ortholog of  Ceres SEQ ID NO 13597380 as cited in SEQ ID NO 64054
  misc_feature (1)..(1199): Ortholog of  Ceres SEQ ID NO 12625474 as cited in SEQ ID NO 64169
atgaacttaattagggttctatatgtttagaaaaaaaatgttggtgttagcattattttccatttacttcttatcaatagaagctgtccggaatgaatcatttcctgcgctattagcttttggagattcaatggtcgatactggtaacaacaattacctcctgactctaatgaaaggaaattactggccatatgggtggaatttcgactcaaaaataccgaccggaagatttggaaacggaagagttttctccgatgtagttgctgaaggtttggggatcaaaagaattgtaccagcttatcgtaagttatacattgctccaagcgaccttaaaacgggtgtttcttttgcatcaggtggtgcaggagtcgaccctgttacatccaaattgctgagagttttatcgccagctgaccaagtaaaagatttcaaaggctacaaaagaaagctaaaaggtgtagtaggcaggtcaaaagcaaaaaaaatagttgcaaattcagtgattcttgtttctgaaggaaataatgatattggaatcacatatgcgattcatgatgctggtatgcgattaatgactccgaaagtatacaccagtaaattagttggttggaacaaaaaatttataaaagatttatatgatcacggagcaagaaaatttgcggtgatgggagtgataccattgggatgtttgcctatgtcaagacttatttttggtgggttcttcgtgtggtgtaatttcttggcaaacacaatctctgaagattacaacaaaaaattgaaaagcggaattaaaagttggagaggagcatcagattttaggggtgctaggtttgtctatgtcgacatgtacaactctcttatggatgttatcaacaatcataggaaatacggatttacccatgagaagaatggatgttgttgtatgcttacggcaatagtaccatgctccaacccagataaatatgtcttctatgactttgctcatccctccgagaaagcctacaaaacaattgctaaaaagcttgtcgaggatatcaagacaggacttgcctgatttcttacaatgctattttcatcttggaattaccataattaattatatacgtacttcttctgtttcaaaatctttgatgttctagagaatttttttttgttttacattataatgttctcatttttaatgtaaaatttattagttt

SEQ ID NO: 89138 - protein, 343 aa, Arabidopsis thaliana
  peptide (1)..(343): Ceres Seq. ID no. 12715637
MFRKKMLVLALFSIYFLSIEAVRNESFPALLAFGDSMVDTGNNNYLLTLMKGNYWPYGWNFDSKIPTGRFGNGRVFSDVVAEGLGIKRIVPAYRKLYIAPSDLKTGVSFASGGAGVDPVTSKLLRVLSPADQVKDFKGYKRKLKGVVGRSKAKKIVANSVILVSEGNNDIGITYAIHDAGMRLMTPKVYTSKLVGWNKKFIKDLYDHGARKFAVMGVIPLGCLPMSRLIFGGFFVWCNFLANTISEDYNKKLKSGIKSWRGASDFRGARFVYVDMYNSLMDVINNHRKYGFTHEKNGCCCMLTAIVPCSNPDKYVFYDFAHPSEKAYKTIAKKLVEDIKTGLA

SEQ ID NO: 89139 - protein, 338 aa, Arabidopsis thaliana
  peptide (1)..(338): Ceres Seq. ID no. 12715638
MLVLALFSIYFLSIEAVRNESFPALLAFGDSMVDTGNNNYLLTLMKGNYWPYGWNFDSKIPTGRFGNGRVFSDVVAEGLGIKRIVPAYRKLYIAPSDLKTGVSFASGGAGVDPVTSKLLRVLSPADQVKDFKGYKRKLKGVVGRSKAKKIVANSVILVSEGNNDIGITYAIHDAGMRLMTPKVYTSKLVGWNKKFIKDLYDHGARKFAVMGVIPLGCLPMSRLIFGGFFVWCNFLANTISEDYNKKLKSGIKSWRGASDFRGARFVYVDMYNSLMDVINNHRKYGFTHEKNGCCCMLTAIVPCSNPDKYVFYDFAHPSEKAYKTIAKKLVEDIKTGLA

SEQ ID NO: 89140 - protein, 307 aa, Arabidopsis thaliana
  peptide (1)..(307): Ceres Seq. ID no. 12715639
MVDTGNNNYLLTLMKGNYWPYGWNFDSKIPTGRFGNGRVFSDVVAEGLGIKRIVPAYRKLYIAPSDLKTGVSFASGGAGVDPVTSKLLRVLSPADQVKDFKGYKRKLKGVVGRSKAKKIVANSVILVSEGNNDIGITYAIHDAGMRLMTPKVYTSKLVGWNKKFIKDLYDHGARKFAVMGVIPLGCLPMSRLIFGGFFVWCNFLANTISEDYNKKLKSGIKSWRGASDFRGARFVYVDMYNSLMDVINNHRKYGFTHEKNGCCCMLTAIVPCSNPDKYVFYDFAHPSEKAYKTIAKKLVEDIKTGLA

SEQ ID NO: 89141 - DNA, 2604 bp, Arabidopsis thaliana
  misc_feature (1)..(2604): Ceres Seq. ID no. 12715643
  misc_feature (1)..(2604): Ortholog of  Ceres SEQ ID NO 13597380 as cited in SEQ ID NO 64054
  misc_feature (1)..(2604): Ortholog of  Ceres SEQ ID NO 12625474 as cited in SEQ ID NO 64169
  misc_feature (1)..(2604): Ortholog of  Ceres SEQ ID NO 13600220 as cited in SEQ ID NO 0
atgtttaggggaaaaatatttgtgttatcattattttctatttacgtcctctcatcagcggctgaaaaaaatacatcattttctgcgctttttgcttttggtgattcagtcttagatacgggaaacaataattttcttcttactcttctcaaaggaaattattggccatatggtttgagttttgactataaatttccgacgggaagattcggaaatggaagagttttcaccgatatagttgccgaaggtttacagatcaaaagacttgtaccagcttatagcaagattcgtcgcatcagttctgaagaccttaagactggcgtttgttttgcatcaggtggttcaggaattgacgatcttacatcccgaacactgagagttttatcggcaggtgaccaagtaaaagactttaaagactatttgaagaaactaagaagagtagtgaaacgtaagaaaaaagtaaaagaaatagtttcaaacgctgtgtttcttatttctgaaggaaataatgatcttggatactttgtcgctcccgctcttcttcgattacagtccacaacaacatacaccagtaaaatggttgtttggaccagaaagtttctaaaagatttatacgatcttggagcgagaaaatttgcggtgatgggagtgatgcctgtgggatgtttgcctatccatcgagcctcattcggtggggtattcggatggtgtaacttcctcttgaatagaattacggaggacttcaacatgaaattgcagaaaggtcttacaagttacgcagtagaatatgatttcaaagatgcaaagtttgtttacgtcgacatatacggtactcttatggatcttgtcaaaaatcctatggcctatgggtttacagaagcgaaaaaagcttgttgttgtatgccgaatgcaataataccatgcttccatccagataaatacgtcttctatgactttgctcacccttcccagaaagcctacgaacaaaaatcccttccaacatatttgccatttacacttcttcaagttttccatatactaatggggaggtttcataaatttcctctcctaggtttagttctgttcctcggtctgaccggctcacttatcgccgccaatgagtatgcctgttctagtaccgatatacactttactcgtgccaatttccctaaaggtttcatttttggtaccgcaactgctgcttttcaggttgaaggagctgtaaatgaaggatgtagaggtccaagcatgtgggacgtatacaccaagaaattcccacataaatgtaattatcacaatgccgacgttgctgtcgatttctaccatcgttacaaggaagatatcaagttgatgaaaaatctgaacactgatggctttagattttccattgcatggcccagaatattcccccatggtaggatggagaaaggaataagcaaagcaggtgtgcagtattaccacgatctgatcgatgagctcctcgcaaatggtataacaccattagtaactgtttttcactgggacactcctcaagacttagaagatgaatatggtggctttttaagcgaccagtacggagacaaagtgaagcattggatcacatttaacgaaccatgggtgttcagtcgagctggctacgacattgggaacaaagcaccgggacgttgttctaagtacatcaaagaacatggagagatgtgtcacgatggacggtcaggacacgaagcttatatcgttagtcataacatgctcttggcacatgccgatgccgttgatgcctttaggaaatgcgacaagtgcaaaggtggtaaaattgggattgctcacagtccagcttggtttgaggctcatgagctctcggatgaagagcacgaaactcctgtaactggcctgattgacttcatattgggatggcatttgcatccgaccacatatggagattatccacaatcaatgaaggatcacatcggacatcgactgccgaaattcacagaggcacagaaagagaagttgaaaaattcagctgattttgtaggaatcaactattacacatcagtgtttgcattgcacgacgaagagccagatccttcgcaaccaagttggcagagtgattctctcgtggactgggaaccaaggtatgtggataaattcaatgcttttgctaacaagcctgatgttgctaaagtggaagtctacgcaaagggtttgaggagcctcttgaaatatatcaaggacaaatacggcaatcctgaaatcatgatcaccgagaatggatacggagaggatctaggtgagcaagacacaagccttgtagtggcgctgtcagatcagcacagaacatactatatccagaaacatctcttgagcttgcacgaagcaatttgcgatgataaagtaaacgttacagggtattttcattggtcattgatggacaattttgaatggcaagatggatacaaggcgagatttgggctctactacgtcgattacaaaaataatttgacgcgccacgaaaaattatcagcccagtggtactcgagtttcctccacgatggatcaaaagagttcgaaatcgagcacgagttcgaacacgatgagttgtag

SEQ ID NO: 89142 - protein, 867 aa, Arabidopsis thaliana
  peptide (1)..(867): Ceres Seq. ID no. 12715644
MFRGKIFVLSLFSIYVLSSAAEKNTSFSALFAFGDSVLDTGNNNFLLTLLKGNYWPYGLSFDYKFPTGRFGNGRVFTDIVAEGLQIKRLVPAYSKIRRISSEDLKTGVCFASGGSGIDDLTSRTLRVLSAGDQVKDFKDYLKKLRRVVKRKKKVKEIVSNAVFLISEGNNDLGYFVAPALLRLQSTTTYTSKMVVWTRKFLKDLYDLGARKFAVMGVMPVGCLPIHRASFGGVFGWCNFLLNRITEDFNMKLQKGLTSYAVEYDFKDAKFVYVDIYGTLMDLVKNPMAYGFTEAKKACCCMPNAIIPCFHPDKYVFYDFAHPSQKAYEQKSLPTYLPFTLLQVFHILMGRFHKFPLLGLVLFLGLTGSLIAANEYACSSTDIHFTRANFPKGFIFGTATAAFQVEGAVNEGCRGPSMWDVYTKKFPHKCNYHNADVAVDFYHRYKEDIKLMKNLNTDGFRFSIAWPRIFPHGRMEKGISKAGVQYYHDLIDELLANGITPLVTVFHWDTPQDLEDEYGGFLSDQYGDKVKHWITFNEPWVFSRAGYDIGNKAPGRCSKYIKEHGEMCHDGRSGHEAYIVSHNMLLAHADAVDAFRKCDKCKGGKIGIAHSPAWFEAHELSDEEHETPVTGLIDFILGWHLHPTTYGDYPQSMKDHIGHRLPKFTEAQKEKLKNSADFVGINYYTSVFALHDEEPDPSQPSWQSDSLVDWEPRYVDKFNAFANKPDVAKVEVYAKGLRSLLKYIKDKYGNPEIMITENGYGEDLGEQDTSLVVALSDQHRTYYIQKHLLSLHEAICDDKVNVTGYFHWSLMDNFEWQDGYKARFGLYYVDYKNNLTRHEKLSAQWYSSFLHDGSKEFEIEHEFEHDEL

SEQ ID NO: 89143 - protein, 675 aa, Arabidopsis thaliana
  peptide (1)..(675): Ceres Seq. ID no. 12715645
MVVWTRKFLKDLYDLGARKFAVMGVMPVGCLPIHRASFGGVFGWCNFLLNRITEDFNMKLQKGLTSYAVEYDFKDAKFVYVDIYGTLMDLVKNPMAYGFTEAKKACCCMPNAIIPCFHPDKYVFYDFAHPSQKAYEQKSLPTYLPFTLLQVFHILMGRFHKFPLLGLVLFLGLTGSLIAANEYACSSTDIHFTRANFPKGFIFGTATAAFQVEGAVNEGCRGPSMWDVYTKKFPHKCNYHNADVAVDFYHRYKEDIKLMKNLNTDGFRFSIAWPRIFPHGRMEKGISKAGVQYYHDLIDELLANGITPLVTVFHWDTPQDLEDEYGGFLSDQYGDKVKHWITFNEPWVFSRAGYDIGNKAPGRCSKYIKEHGEMCHDGRSGHEAYIVSHNMLLAHADAVDAFRKCDKCKGGKIGIAHSPAWFEAHELSDEEHETPVTGLIDFILGWHLHPTTYGDYPQSMKDHIGHRLPKFTEAQKEKLKNSADFVGINYYTSVFALHDEEPDPSQPSWQSDSLVDWEPRYVDKFNAFANKPDVAKVEVYAKGLRSLLKYIKDKYGNPEIMITENGYGEDLGEQDTSLVVALSDQHRTYYIQKHLLSLHEAICDDKVNVTGYFHWSLMDNFEWQDGYKARFGLYYVDYKNNLTRHEKLSAQWYSSFLHDGSKEFEIEHEFEHDEL

SEQ ID NO: 89144 - protein, 653 aa, Arabidopsis thaliana
  peptide (1)..(653): Ceres Seq. ID no. 12715646
MGVMPVGCLPIHRASFGGVFGWCNFLLNRITEDFNMKLQKGLTSYAVEYDFKDAKFVYVDIYGTLMDLVKNPMAYGFTEAKKACCCMPNAIIPCFHPDKYVFYDFAHPSQKAYEQKSLPTYLPFTLLQVFHILMGRFHKFPLLGLVLFLGLTGSLIAANEYACSSTDIHFTRANFPKGFIFGTATAAFQVEGAVNEGCRGPSMWDVYTKKFPHKCNYHNADVAVDFYHRYKEDIKLMKNLNTDGFRFSIAWPRIFPHGRMEKGISKAGVQYYHDLIDELLANGITPLVTVFHWDTPQDLEDEYGGFLSDQYGDKVKHWITFNEPWVFSRAGYDIGNKAPGRCSKYIKEHGEMCHDGRSGHEAYIVSHNMLLAHADAVDAFRKCDKCKGGKIGIAHSPAWFEAHELSDEEHETPVTGLIDFILGWHLHPTTYGDYPQSMKDHIGHRLPKFTEAQKEKLKNSADFVGINYYTSVFALHDEEPDPSQPSWQSDSLVDWEPRYVDKFNAFANKPDVAKVEVYAKGLRSLLKYIKDKYGNPEIMITENGYGEDLGEQDTSLVVALSDQHRTYYIQKHLLSLHEAICDDKVNVTGYFHWSLMDNFEWQDGYKARFGLYYVDYKNNLTRHEKLSAQWYSSFLHDGSKEFEIEHEFEHDEL

SEQ ID NO: 89145 - DNA, 561 bp, Arabidopsis thaliana
  misc_feature (1)..(561): Ceres Seq. ID no. 12715779
  misc_feature (1)..(561): Ortholog of  Ceres SEQ ID NO 13661143 as cited in SEQ ID NO 61139
  misc_feature (1)..(561): Ortholog of  Ceres SEQ ID NO 13597234 as cited in SEQ ID NO 64118
atggcaggaggaggaacagaagcgtttcctgatcttggagagcattgccaagaccctgattgcaaattactcgattttctcccttttacttgcgacggctgcaaattggtgttttgtttggagcatagatcatacaagtcacataactgtccgaaatccgatcatgggagcagaacggtttccatctgtgaaacatgttcaatagcgattgaaacaactggttttgatgaaaaaggaatcaaatctttgcttgagaaacacgaaagatccggagattgtgatccaaacaagaaaaagaaaccaacgtgtcctgtaaaacgttgcaaagagattctgacttttgcgaataaccttacttgcaaatattgtggagtcaagttctgtttgaaacaccggtttccgacagatcatgtctgtaacaagaagatcattaataccgcgggaacaagctcgaggtggaacgagaggtttatggaagctttgagtttaagaaaccagaaagggtgtggaagagggagctctgtttcatcaaaatcttcaccatcagttagatcgttttag

SEQ ID NO: 89146 - protein, 186 aa, Arabidopsis thaliana; identical to SEQ ID NO: 77756
  peptide (1)..(186): Ceres Seq. ID no. 12715780

SEQ ID NO: 89147 - DNA, 1808 bp, Arabidopsis thaliana
  misc_feature (1)..(1808): Ceres Seq. ID no. 12715867
  misc_feature (1)..(1808): Ortholog of  Ceres SEQ ID NO 13594037 as cited in SEQ ID NO 55666
  misc_feature (1)..(1808): Ortholog of  Ceres SEQ ID NO 13657707 as cited in SEQ ID NO 66407
gatatcatcaaaaaccacaaaactttcttttctttttctaactattttatttattattcctacaaaatgtcatgtttgaagtatttcttgatcttattgatgttgggactgtgtgtctccatcggaggagaattttcaatatgactacttgaaagttccggcaagcgagtttgtgagctccataaacacaattgtggtagtgataagacaagtgagttcaattttgtctcagttcgctgatttcagcggagatcgccggctgcagaatgcggtttccgattgccttgatctgcttgacttttcttcagaggagctcacttggtctgcttctgcttctgagaatccaaaaggtaagggcaacggaacaggggacgttggatcggacacaaggacatggttaagtgctgctctctccaaccaagccacttgtatggaaggcttcgatggtacctctggtctcgtaaaatcccttgtcgctggcagtctcgatcaactatattctatgcttagggaattgttaccacttgtgcaaccagagcagaaacccaaggctgtttctaaacctggccctattgctaaaggaccgaaggcaccacctggccgtaaactcagagacaccgacgaagacgaaagccttcaattcccagactgggtcagaccggacgatcgtaaactattagaatcaaacggtaggacttacgacgttagtgtagcattggatgggacaggcaacttcacaaagataatggacgccataaagaaagctcctgattatagctcgacacgtttcgtcatatacattaaaaaaggtttatatttggagaatgttgagatcaagaagaagaaatggaacattgtaatgttaggtgatggcattgacgtgactgttatttccggtaaccgcagcttcatcgatggttggaccactttccgatcagctacattcgcggtaagcggaagaggattcttagcaagagatataacgttccagaacacagcagggccagagaagcatcaggcggtagcactgagatcagactctgacctctctgtgttcttcagatgtgcgatgaggggttatcaagatacactctacacgcacaccatgcgtcagttctaccgtgagtgcaccatcacgggaacagtagattttatatttggggatgggactgttgtgtttcaaaactgtcaaattttggctaaaagaggactccctaaccaaaagaacaccatcactgcacaaggccggaaagatgtcaaccaaccctcaggattctcaattcaattcagcaatatctcggcggacgcagatttggtcccatacctaaacacgacaaggacgtatctaggaaggccatggaagctatattcgagaacggttttcattaggaacaatatgagcgacgttgtgagacccgaaggatggcttgagtggaacgctgattttgcgttggacacactcttctacggagagttcatgaactacgggcctggttcaggactcagcagccgagtcaaatggcctggttaccacgtctttaacaactcggatcaggctaacaacttcaccgtttctcagttcattaaaggaaatctttggctgccttctacgggagtaacgtttagtgatggcttgtatatctaaactggctcagtgtttctattgtgaatgttcctgttttttgttccttttcattttgttttgcgttttcttgtcatgttcttctaagttggtttgttgtggtatttcacggttttggaaaaatattgataaatggggaatttaagtcgatcggctgaagttgaac

SEQ ID NO: 89148 - protein, 404 aa, Arabidopsis thaliana; identical to SEQ ID NO: 89052
  peptide (1)..(404): Ceres Seq. ID no. 12715868

SEQ ID NO: 89149 - protein, 380 aa, Arabidopsis thaliana
  peptide (1)..(380): Ceres Seq. ID no. 12715869
MLRELLPLVQPEQKPKAVSKPGPIAKGPKAPPGRKLRDTDEDESLQFPDWVRPDDRKLLESNGRTYDVSVALDGTGNFTKIMDAIKKAPDYSSTRFVIYIKKGLYLENVEIKKKKWNIVMLGDGIDVTVISGNRSFIDGWTTFRSATFAVSGRGFLARDITFQNTAGPEKHQAVALRSDSDLSVFFRCAMRGYQDTLYTHTMRQFYRECTITGTVDFIFGDGTVVFQNCQILAKRGLPNQKNTITAQGRKDVNQPSGFSIQFSNISADADLVPYLNTTRTYLGRPWKLYSRTVFIRNNMSDVVRPEGWLEWNADFALDTLFYGEFMNYGPGSGLSSRVKWPGYHVFNNSDQANNFTVSQFIKGNLWLPSTGVTFSDGLYI

SEQ ID NO: 89150 - protein, 299 aa, Arabidopsis thaliana
  peptide (1)..(299): Ceres Seq. ID no. 12715870
MDAIKKAPDYSSTRFVIYIKKGLYLENVEIKKKKWNIVMLGDGIDVTVISGNRSFIDGWTTFRSATFAVSGRGFLARDITFQNTAGPEKHQAVALRSDSDLSVFFRCAMRGYQDTLYTHTMRQFYRECTITGTVDFIFGDGTVVFQNCQILAKRGLPNQKNTITAQGRKDVNQPSGFSIQFSNISADADLVPYLNTTRTYLGRPWKLYSRTVFIRNNMSDVVRPEGWLEWNADFALDTLFYGEFMNYGPGSGLSSRVKWPGYHVFNNSDQANNFTVSQFIKGNLWLPSTGVTFSDGLYI

SEQ ID NO: 89151 - DNA, 2821 bp, Arabidopsis thaliana
  misc_feature (1)..(2821): Ceres Seq. ID no. 12715871
  misc_feature (1)..(2821): Ortholog of  Ceres SEQ ID NO 13590691 as cited in SEQ ID NO 66290
aagcacgaaaatcccgagtaattgaccttctcttcttcccagtgttgtcttctcttctccacgaacttaattttttcaaaaccctagcaactttgattcattcaaaatccgatccaacgatgactattgaagaagtttccggtgagactcctccgtctacgcctccttcttcttctacgccttctccgtcttcctccaccaccaacgccgcgccgttgggatcctctgtgattccgattgtaaacaagctacaagacatattcgctcagctcggaagccagtctacgatcgcgcttcctcaggttgttgttgttggaagccaaagcagtggcaagtctagcgtccttgaagcactcgtcggccgtgactttctccctcgtggtaatgatatctgcacgcgtcgtcctcttgttctccagctcctccagactaaaagccgcgctaatggcggatccgatgatgagtggggggagtttcgtcaccttcctgaaactcgtttctatgatttctctgagattcgtcgagaaattgaggctgagacgaatagattagttggagagaacaaaggtgtagcagatacacagattcgtcttaaaatttcttcacctaatgtattgaacatcacgcttgtggatctgcctggtattaccaaggtgccagttggtgaccagccatccgacattgaagcacgtataagaacgatgatcttgtcttacatcaagcaagatacttgcttgatattggctgttacccctgctaataccgatctagcaaactctgatgcccttcaaattgctagcattgtagatcctgatggtcacagaacgataggtgtaatcacaaagttggatattatggacaaaggtactgatgctcgaaaactccttcttggaaatgttgttcctcttcgacttggatacgtgggagttgtaaatcgttgccaggaggatattttgctaaaccgcacagtcaaggaagcacttctcgcagaggagaagttcttccggagtcacccggtttaccatggtcttgccgatcgtttgggtgttcctcagctagcaaagaagttaaatcagatccttgttcaacatatcaaggtcttgcttccggatttgaagtcgcggataagtaatgctttggttgctacagcaaaagagcatcagagctatggtgaattaacagaatcaagggctgggcaaggagctcttctcctcaactttctctccaaatactgtgaagcatactcttcattgctggaagggaaaagtgaagaaatgtctacgtcagagctctctggaggagcaagaattcactatattttccagtcaatctttgttaagagtttggaggaggttgatccatgcgaggacttgacagatgatgatattcggactgcaattcagaatgcaactggtccaagatctgcattatttgttccagatgttccatttgaagttcttgttaggaggcagatatctcgtttgttagatcctagccttcagtgtgcccggttcatttttgaagagctaataaaggtgagtgtttttttggtttgttgttaataagtaataagattacttcataaatttgaatttctctacagattagccatagatgtatgatgaatgagttacaacgatttccagtcctacgaaagcgcatggatgaggttatcggggatttcctgcgagaaggtcttgaaccctcagaagcaatgatcggggatatcattgatatggagatggattacataaacacttcacatccaaattttattggtggaaccaaggccgtggaagctgcaatgcatcaagtgaagtcttcgaggattccccatcctgtggcacgaccaaagcaggacactgtggagcctgatagaacatcttcttccacgagtcaagtgaaatctagatcgtttctcggcaggcaagctaatggaattgttactgatcagggagttgtatctgcagatgctgaaaaagctcaacctgctgcaaatgcgagtgatacaaggtggggtatcccttcaattttccgagggggtgatactagagcagttactaaagatagcttattaaacaaaccattcagtgaagctgttgaggatatgtctcacaacttatccatgatctatctaaaggagcccccagctgtcttgaggccaaccgaaacccattcagaacaggaagcagttgagattcagataacaaagctgttactaagatcatactatgacattgtaaggaagaatattgaggactcggtaccaaaagcaatcatgcatttcctggtaaaccacacaaaacgtgagctgcataacgtcttcatcaagaagctttacagggagaacttgtttgaagaaatgttgcaagagccagatgagatagcagttaagaggaaacgcacacaagagactctccacgttcttcagcaagcttacaggacactagatgagttgccactggaagcagattcggtgtcagcaggaatgtcaaaacatcaggagttactgacatcttcaaagtattcgacaagcagctcatactcggcatctccaagtacgacaagaagatcgagaagagcaggagatcaacaccaaaatggatacggattctaacatgatccaaatatctcgaatatctctcgactgtgataacgcatttcattcatttaatggctctttcaggttttggtattaaattatgtgttggtcatatgaagaatttatataggaaaccagtacacagtgtgggttttggtccttttggactctgcattggttgacttgataagggagtgaaaggtgatatagttttttttt

SEQ ID NO: 89152 - protein, 519 aa, Arabidopsis thaliana
  peptide (1)..(519): Ceres Seq. ID no. 12715872
ARKSRVIDLLFFPVLSSLLHELNFFKTLATLIHSKSDPTMTIEEVSGETPPSTPPSSSTPSPSSSTTNAAPLGSSVIPIVNKLQDIFAQLGSQSTIALPQVVVVGSQSSGKSSVLEALVGRDFLPRGNDICTRRPLVLQLLQTKSRANGGSDDEWGEFRHLPETRFYDFSEIRREIEAETNRLVGENKGVADTQIRLKISSPNVLNITLVDLPGITKVPVGDQPSDIEARIRTMILSYIKQDTCLILAVTPANTDLANSDALQIASIVDPDGHRTIGVITKLDIMDKGTDARKLLLGNVVPLRLGYVGVVNRCQEDILLNRTVKEALLAEEKFFRSHPVYHGLADRLGVPQLAKKLNQILVQHIKVLLPDLKSRISNALVATAKEHQSYGELTESRAGQGALLLNFLSKYCEAYSSLLEGKSEEMSTSELSGGARIHYIFQSIFVKSLEEVDPCEDLTDDDIRTAIQNATGPRSALFVPDVPFEVLVRRQISRLLDPSLQCARFIFEELIKVSVFLVCC

SEQ ID NO: 89153 - protein, 480 aa, Arabidopsis thaliana
  peptide (1)..(480): Ceres Seq. ID no. 12715873
MTIEEVSGETPPSTPPSSSTPSPSSSTTNAAPLGSSVIPIVNKLQDIFAQLGSQSTIALPQVVVVGSQSSGKSSVLEALVGRDFLPRGNDICTRRPLVLQLLQTKSRANGGSDDEWGEFRHLPETRFYDFSEIRREIEAETNRLVGENKGVADTQIRLKISSPNVLNITLVDLPGITKVPVGDQPSDIEARIRTMILSYIKQDTCLILAVTPANTDLANSDALQIASIVDPDGHRTIGVITKLDIMDKGTDARKLLLGNVVPLRLGYVGVVNRCQEDILLNRTVKEALLAEEKFFRSHPVYHGLADRLGVPQLAKKLNQILVQHIKVLLPDLKSRISNALVATAKEHQSYGELTESRAGQGALLLNFLSKYCEAYSSLLEGKSEEMSTSELSGGARIHYIFQSIFVKSLEEVDPCEDLTDDDIRTAIQNATGPRSALFVPDVPFEVLVRRQISRLLDPSLQCARFIFEELIKVSVFLVCC

SEQ ID NO: 89154 - protein, 332 aa, Arabidopsis thaliana
  peptide (1)..(332): Ceres Seq. ID no. 12715874
MMNELQRFPVLRKRMDEVIGDFLREGLEPSEAMIGDIIDMEMDYINTSHPNFIGGTKAVEAAMHQVKSSRIPHPVARPKQDTVEPDRTSSSTSQVKSRSFLGRQANGIVTDQGVVSADAEKAQPAANASDTRWGIPSIFRGGDTRAVTKDSLLNKPFSEAVEDMSHNLSMIYLKEPPAVLRPTETHSEQEAVEIQITKLLLRSYYDIVRKNIEDSVPKAIMHFLVNHTKRELHNVFIKKLYRENLFEEMLQEPDEIAVKRKRTQETLHVLQQAYRTLDELPLEADSVSAGMSKHQELLTSSKYSTSSSYSASPSTTRRSRRAGDQHQNGYGF

SEQ ID NO: 89155 - DNA, 1586 bp, Arabidopsis thaliana
  misc_feature (1)..(1586): Ceres Seq. ID no. 12715879
  misc_feature (1)..(1586): Ortholog of  Ceres SEQ ID NO 15171805 as cited in SEQ ID NO 57433
  misc_feature (1)..(1586): Ortholog of  Ceres SEQ ID NO 13596743 as cited in SEQ ID NO 62731
tttgctctgcaaatttgtctgaaaaaatctttgtgcgaagcaggaaaaatgtcgtcgacccatcagttagtttcttcgatgatctcttcttcctcatccactttcttagccccttcaaattttaatctcagaactcgaaatgcttgcttacccatggcaaaacgggtcaatacttgcaaatgtgttgctacgccgcaagagaagatcgagtataagaccaaagtgtcacggaattcaaacatgtccaaacttcaggctggatacctattcccggagattgcaagaagaaggtctgcacacttgttgaaatatccagatgcacaagttataagtcttggaataggcgacacaactgagccaattcctgaagtgatcacttctgctatggcaaagaaagctcatgagttgtcaacaatagagggatatagtggttatggtgctgaacaaggtgcaaagccactgagagctgctattgcgaaaacattctacggtggccttggcataggggatgatgacgtttttgtttctgatggagctaaatgtgatatctcacgtctccaggttatgtttggttccaatgttacaattgctgttcaggatccttcatatccggcttatgtggactccagtgttattatgggtcagactgggcaatttaacactgatgtgcaaaagtatggaaacatcgagtacatgagatgcactccagagaatggcttctttcccgacttgtccaccgttggcaggacagatataattttcttctgttccccaaataaccctacgggtgctgctgccacgagagagcaactaacgcagttagttgagtttgcaaagaagaacggttctataatagtgtatgattccgcctatgcaatgtacatgtctgatgataacccacgatccatcttcgaaatccctggagcagaggaggtcgctatggagacagcttcgttcagcaaatatgctggtttcactggagttcgacttggttggactgtcatcccgaaaaagctactctattcagacggtttccctgttgccaaagacttcaatcggattatctgcacttgtttcaatggtgcatctaatatctctcaagctggtgctcttgcttgccttacacccgaaggacttgaggcaatgcataaggtgattggattctataaagaaaacacaaacataatcattgacacattcacatctctcgggtatgatgtatatggaggaaagaatgcgccttacgtatgggttcacttcccgaaccaaagctcatgggatgtgtttgctgagattctggagaagactcatgtggttacaactccaggaagtgggtttggaccagggggtgaagggttcgttcgtgtcagtgcctttggtcacagagagaacatcttagaggcatgtcgaagattcaagcagctttacaaatgaagaaccttgtttgtaatcgttcctcatcatcatcaccctctttaatgacatgatttgagttaaaataatgtcgtttccattgttttctggaatttgtagaagacacttttgacaccagtgtttcaagcaatttggcaaagtattttaacaac

SEQ ID NO: 89156 - protein, 477 aa, Arabidopsis thaliana
  peptide (1)..(477): Ceres Seq. ID no. 12715880
FALQICLKKSLCEAGKMSSTHQLVSSMISSSSSTFLAPSNFNLRTRNACLPMAKRVNTCKCVATPQEKIEYKTKVSRNSNMSKLQAGYLFPEIARRRSAHLLKYPDAQVISLGIGDTTEPIPEVITSAMAKKAHELSTIEGYSGYGAEQGAKPLRAAIAKTFYGGLGIGDDDVFVSDGAKCDISRLQVMFGSNVTIAVQDPSYPAYVDSSVIMGQTGQFNTDVQKYGNIEYMRCTPENGFFPDLSTVGRTDIIFFCSPNNPTGAAATREQLTQLVEFAKKNGSIIVYDSAYAMYMSDDNPRSIFEIPGAEEVAMETASFSKYAGFTGVRLGWTVIPKKLLYSDGFPVAKDFNRIICTCFNGASNISQAGALACLTPEGLEAMHKVIGFYKENTNIIIDTFTSLGYDVYGGKNAPYVWVHFPNQSSWDVFAEILEKTHVVTTPGSGFGPGGEGFVRVSAFGHRENILEACRRFKQLYK

SEQ ID NO: 89157 - protein, 461 aa, Arabidopsis thaliana [sequence omitted]

SEQ ID NO: 89158 - protein, 451 aa, Arabidopsis thaliana; identical to SEQ ID NO: 76835
  peptide (1)..(451): Ceres Seq. ID no. 12715882

SEQ ID NO: 89159 - DNA, 737 bp, Arabidopsis thaliana
  misc_feature (1)..(737): Ceres Seq. ID no. 12715887
  misc_feature (1)..(737): Ortholog of  Ceres SEQ ID NO 13622393 as cited in SEQ ID NO 1256
gatctatcaaagttcgaagagaccgacgcaaaagggacagaaacggagaaggagaaagaggcagagatgggagtagagatccaatcgccgcaggaacagagctcttacaccgttgagcagctcgtcgcccttaatcctttcaaccctgaaatcctgcctgatctcgaaaactacgttaacgttacatcgcaaacgtatagtctggaagtaaacctatgcttgcttcggctctatcagtttgagcctgagcgcatgaacactcatatcgtggctcgaatcttggtcaaggctcttatggctatgccaactccagacttcagcctttgcctcttcttgattcaccttcttagcttaagctaccaaaaggttccaagatcagtgctggctgaggctgttaacatggatggtgcatctctagacaaattcatcgagcagcaagtgactaacagtggatggattgttgagaaagagggtggaagtattgtcttaccacaaaatgaatttaaccatccggagctcaagaaaaatacaggtgagaatgttcccttggaacacattgcccgcatcttccccatccttggttgaaccaattcatgagaacactgcaaattttccttttgtctcttgttatcttgtgatgtacacttttaagacaccgtaatgtgaattttggcaatggccttcctctttgcaatttgacagattttcttaaaaatctagtagaccgagactttgcc

SEQ ID NO: 89160 - protein, 194 aa, Arabidopsis thaliana
  peptide (1)..(194): Ceres Seq. ID no. 12715888
DLSKFEETDAKGTETEKEKEAEMGVEIQSPQEQSSYTVEQLVALNPFNPEILPDLENYVNVTSQTYSLEVNLCLLRLYQFEPERMNTHIVARILVKALMAMPTPDFSLCLFLIHLLSLSYQKVPRSVLAEAVNMDGASLDKFIEQQVTNSGWIVEKEGGSIVLPQNEFNHPELKKNTGENVPLEHIARIFPILG

SEQ ID NO: 89161 - protein, 172 aa, Arabidopsis thaliana
  peptide (1)..(172): Ceres Seq. ID no. 12715889
MGVEIQSPQEQSSYTVEQLVALNPFNPEILPDLENYVNVTSQTYSLEVNLCLLRLYQFEPERMNTHIVARILVKALMAMPTPDFSLCLFLIHLLSLSYQKVPRSVLAEAVNMDGASLDKFIEQQVTNSGWIVEKEGGSIVLPQNEFNHPELKKNTGENVPLEHIARIFPILG

SEQ ID NO: 89162 - protein, 110 aa, Arabidopsis thaliana
  peptide (1)..(110): Ceres Seq. ID no. 12715890
MNTHIVARILVKALMAMPTPDFSLCLFLIHLLSLSYQKVPRSVLAEAVNMDGASLDKFIEQQVTNSGWIVEKEGGSIVLPQNEFNHPELKKNTGENVPLEHIARIFPILG

SEQ ID NO: 89163 - DNA, 1501 bp, Arabidopsis thaliana
  misc_feature (1)..(1501): Ceres Seq. ID no. 12715895
  misc_feature (1)..(1501): Ortholog of  Ceres SEQ ID NO 15171805 as cited in SEQ ID NO 57433
  misc_feature (1)..(1501): Ortholog of  Ceres SEQ ID NO 13596743 as cited in SEQ ID NO 62731
tttgctctgcaaatttgtctgaaaaaatctttgtgcgaagcaggaaaaatgtcgtcgacccatcagttagtttcttcgatgatctcttcttcctcatccactttcttagccccttcaaattttaatctcagaactcgaaatgcttgcttacccatggcaaaacgggtcaatacttgcaaatttcaggctggatacctattcccggagattgcaagaagaaggtctgcacacttgttgaaatatccagatgcacaagttataagtcttggaataggcgacacaactgagccaattcctgaagtgatcacttctgctatggcaaagaaagctcatgagttgtcaacaatagagggatatagtggttatggtgctgaacaaggtgcaaagccactgagagctgctattgcgaaaacattctacggtggccttggcataggggatgatgacgtttttgtttctgatggagctaaatgtgatatctcacgtctccaggttatgtttggttccaatgttacaattgctgttcaggatccttcatatccggcttatgtggactccagtgttattatgggtcagactgggcaatttaacactgatgtgcaaaagtatggaaacatcgagtacatgagatgcactccagagaatggcttctttcccgacttgtccaccgttggcaggacagatataattttcttctgttccccaaataaccctacgggtgctgctgccacgagagagcaactaacgcagttagttgagtttgcaaagaagaacggttctataatagtgtatgattccgcctatgcaatgtacatgtctgatgataacccacgatccatcttcgaaatccctggagcagaggaggtcgctatggagacagcttcgttcagcaaatatgctggtttcactggagttcgacttggttggactgtcatcccgaaaaagctactctattcagacggtttccctgttgccaaagacttcaatcggattatctgcacttgtttcaatggtgcatctaatatctctcaagctggtgctcttgcttgccttacacccgaaggacttgaggcaatgcataaggtgattggattctataaagaaaacacaaacataatcattgacacattcacatctctcgggtatgatgtatatggaggaaagaatgcgccttacgtatgggttcacttcccgaaccaaagctcatgggatgtgtttgctgagattctggagaagactcatgtggttacaactccaggaagtgggtttggaccagggggtgaagggttcgttcgtgtcagtgcctttggtcacagagagaacatcttagaggcatgtcgaagattcaagcagctttacaaatgaagaaccttgtttgtaatcgttcctcatcatcatcaccctctttaatgacatgatttgagttaaaataatgtcgtttccattgttttctggaatttgtagaagacacttttgacaccagtgtttcaagcaatttggc

SEQ ID NO: 89164 - protein, 454 aa, Arabidopsis thaliana
  peptide (1)..(454): Ceres Seq. ID no. 12715896
FALQICLKKSLCEAGKMSSTHQLVSSMISSSSSTFLAPSNFNLRTRNACLPMAKRVNTCKFQAGYLFPEIARRRSAHLLKYPDAQVISLGIGDTTEPIPEVITSAMAKKAHELSTIEGYSGYGAEQGAKPLRAAIAKTFYGGLGIGDDDVFVSDGAKCDISRLQVMFGSNVTIAVQDPSYPAYVDSSVIMGQTGQFNTDVQKYGNIEYMRCTPENGFFPDLSTVGRTDIIFFCSPNNPTGAAATREQLTQLVEFAKKNGSIIVYDSAYAMYMSDDNPRSIFEIPGAEEVAMETASFSKYAGFTGVRLGWTVIPKKLLYSDGFPVAKDFNRIICTCFNGASNISQAGALACLTPEGLEAMHKVIGFYKENTNIIIDTFTSLGYDVYGGKNAPYVWVHFPNQSSWDVFAEILEKTHVVTTPGSGFGPGGEGFVRVSAFGHRENILEACRRFKQLYK

SEQ ID NO: 89165 - protein, 438 aa, Arabidopsis thaliana
  peptide (1)..(438): Ceres Seq. ID no. 12715897
MSSTHQLVSSMISSSSSTFLAPSNFNLRTRNACLPMAKRVNTCKFQAGYLFPEIARRRSAHLLKYPDAQVISLGIGDTTEPIPEVITSAMAKKAHELSTIEGYSGYGAEQGAKPLRAAIAKTFYGGLGIGDDDVFVSDGAKCDISRLQVMFGSNVTIAVQDPSYPAYVDSSVIMGQTGQFNTDVQKYGNIEYMRCTPENGFFPDLSTVGRTDIIFFCSPNNPTGAAATREQLTQLVEFAKKNGSIIVYDSAYAMYMSDDNPRSIFEIPGAEEVAMETASFSKYAGFTGVRLGWTVIPKKLLYSDGFPVAKDFNRIICTCFNGASNISQAGALACLTPEGLEAMHKVIGFYKENTNIIIDTFTSLGYDVYGGKNAPYVWVHFPNQSSWDVFAEILEKTHVVTTPGSGFGPGGEGFVRVSAFGHRENILEACRRFKQLYK

SEQ ID NO: 89166 - protein, 428 aa, Arabidopsis thaliana
  peptide (1)..(428): Ceres Seq. ID no. 12715898
MISSSSSTFLAPSNFNLRTRNACLPMAKRVNTCKFQAGYLFPEIARRRSAHLLKYPDAQVISLGIGDTTEPIPEVITSAMAKKAHELSTIEGYSGYGAEQGAKPLRAAIAKTFYGGLGIGDDDVFVSDGAKCDISRLQVMFGSNVTIAVQDPSYPAYVDSSVIMGQTGQFNTDVQKYGNIEYMRCTPENGFFPDLSTVGRTDIIFFCSPNNPTGAAATREQLTQLVEFAKKNGSIIVYDSAYAMYMSDDNPRSIFEIPGAEEVAMETASFSKYAGFTGVRLGWTVIPKKLLYSDGFPVAKDFNRIICTCFNGASNISQAGALACLTPEGLEAMHKVIGFYKENTNIIIDTFTSLGYDVYGGKNAPYVWVHFPNQSSWDVFAEILEKTHVVTTPGSGFGPGGEGFVRVSAFGHRENILEACRRFKQLYK

SEQ ID NO: 89167 - DNA, 1645 bp, Arabidopsis thaliana
  misc_feature (1)..(1645): Ceres Seq. ID no. 12715909
  misc_feature (1)..(1645): Ortholog of  Ceres SEQ ID NO 15174599 as cited in SEQ ID NO 53646
  misc_feature (1)..(1645): Ortholog of  Ceres SEQ ID NO 15174646 as cited in SEQ ID NO 54499
gtactctgttgcattatttctctcactcaaacgtatatacaaacataaattatgtcgacagaaatggaggtcgttagtgttcttaagtaccttgacaacaaatccatattggtcgttggaagctgctgggttcttagcaaatatctttgtggagaagatattaagggtggcaccaaacgtgaagaaactctatctccttctaagagcatcaaaaggaaaatctgctacccagaggtttaacgacgagattttgaagaaagatttgttcaaggtgctgaaggagaagtatggtcccaatctaaatcaacttacatcagagaaaatcactattgtcgacggagacatttgccttgaggatttaggtcttcaagacttcgacttggctcatgagatgatccaccaagttgatgccattgttaatttagctgcaactactaagtttgatgaaagatacgatgtagctcttgggatcaacacattgggtgctctcaatgtcttgaactttgccaagagatgtgcaaaggttaagatccttgttcatgtatcaacagcttacgtgtgcggagaaaaatctggcttgataatggaaacaccgtaccgtatgggtgagacgttgaatggaaccaccggtttagacatcaactacgagaaaaaattggttcaggagaaacttgaccagctccgagtaatcggagccgctcctgaaaccatcacggaaaccatgaaggatctcggactcagacgggcaaagatgtacggatggccaaacacatatgtgttcaccaaagcaatgggggagatgatggtagggacaaaaagagaaaatctgtcacttgtgttgcttcgtccttcaattattaccagcacattcaaagaaccatttcctggttggactgagggcatcaggactattgatagtttagctgttggatatggcaaaggcaaactcacgtgcttcctctgtgatcttgatgctgtttctgatgtgatgccggcagatatggtagtaaattcgattcttgtatcaatggccgctcaagccggtaaacaagaagagattatttaccatgtgggttcttcacttagaaatccgatgaaaaattcaaagtttcctgaattagcgtatcggtatttctcaatcaaaccgtggaccaacaaagaagggaaggtcgttaaggtcggggccattgagatcctgagttctatgcgtagtttccatagatacatgaccatacgctacttgattgcattgaagggacttgaattggtaaacataatactttgcaagttgtttgagaaggaatttcagtatttcaataagaaaataaattttatattccggcttgttgatctctatcagccttacctctttttctatggaatatttgatgattcaaacacagaaaaattgcgaaaaatggtatcgaagacgggagtcgaaaacgagatgttttatttcgatccaaaggttctcgattgggacgactattttttgaacacacatgttattgggctgcttaagtatgtcttctaataattttagttgtataatctttatcttattttactacaacgagtataaattatgtggacactatcgttctccttaatccgttttcatacggctatgtttcgaaatttggtt

SEQ ID NO: 89168 - protein, 510 aa, Arabidopsis thaliana
  peptide (1)..(510): Ceres Seq. ID no. 12715910
YSVALFLSLKRIYKHKLCRQKWRSLVFLSTLTTNPYWSLEAAGFLANIFVEKILRVAPNVKKLYLLLRASKGKSATQRFNDEILKKDLFKVLKEKYGPNLNQLTSEKITIVDGDICLEDLGLQDFDLAHEMIHQVDAIVNLAATTKFDERYDVALGINTLGALNVLNFAKRCAKVKILVHVSTAYVCGEKSGLIMETPYRMGETLNGTTGLDINYEKKLVQEKLDQLRVIGAAPETITETMKDLGLRRAKMYGWPNTYVFTKAMGEMMVGTKRENLSLVLLRPSIITSTFKEPFPGWTEGIRTIDSLAVGYGKGKLTCFLCDLDAVSDVMPADMVVNSILVSMAAQAGKQEEIIYHVGSSLRNPMKNSKFPELAYRYFSIKPWTNKEGKVVKVGAIEILSSMRSFHRYMTIRYLIALKGLELVNIILCKLFEKEFQYFNKKINFIFRLVDLYQPYLFFYGIFDDSNTEKLRKMVSKTGVENEMFYFDPKVLDWDDYFLNTHVIGLLKYVF

SEQ ID NO: 89169 - protein, 380 aa, Arabidopsis thaliana; identical to SEQ ID NO: 27534
  peptide (1)..(380): Ceres Seq. ID no. 12715911

SEQ ID NO: 89170 - protein, 316 aa, Arabidopsis thaliana
  peptide (1)..(316): Ceres Seq. ID no. 12715912
METPYRMGETLNGTTGLDINYEKKLVQEKLDQLRVIGAAPETITETMKDLGLRRAKMYGWPNTYVFTKAMGEMMVGTKRENLSLVLLRPSIITSTFKEPFPGWTEGIRTIDSLAVGYGKGKLTCFLCDLDAVSDVMPADMVVNSILVSMAAQAGKQEEIIYHVGSSLRNPMKNSKFPELAYRYFSIKPWTNKEGKVVKVGAIEILSSMRSFHRYMTIRYLIALKGLELVNIILCKLFEKEFQYFNKKINFIFRLVDLYQPYLFFYGIFDDSNTEKLRKMVSKTGVENEMFYFDPKVLDWDDYFLNTHVIGLLKYVF

SEQ ID NO: 89171 - DNA, 1055 bp, Arabidopsis thaliana
  misc_feature (1)..(1055): Ceres Seq. ID no. 12715924
  misc_feature (1)..(1055): Ortholog of  Ceres SEQ ID NO 14304689 as cited in SEQ ID NO 53265
  misc_feature (1)..(1055): Ortholog of  Ceres SEQ ID NO 14307820 as cited in SEQ ID NO 53938
  misc_feature (1)..(1055): Ortholog of  Ceres SEQ ID NO 15177137 as cited in SEQ ID NO 55030
  misc_feature (1)..(1055): Ortholog of  Ceres SEQ ID NO 14302407 as cited in SEQ ID NO 66891
  misc_feature (1)..(1055): Ortholog of  Ceres SEQ ID NO 13599557 as cited in SEQ ID NO 0
aaacactagtataaaaaattgaacccgttaaccggcgacccgaaacaatgacccggtccgtcagtttccctctcttcctcttcgccgttgtactctccctctcttcttctctcctcgccgacgatcccaaaccaatccgccgtgaggtctacgaaggaggtaagatatacgacatcagccatcgttacacgccggagattccagcttgggaatcttcggaaggattgggaaagacgttcctgcgattagccgcgagtatgaagaatggatcattcgctaacgtatcggagatgaaactatctgttcactctggaactcacgtggatgctccaggtcacttttgggataattattacgatgctggttttgatactgattcgcttgatctccaagtcctaaatggtcctgctttgttggttgatgttccgagagataagaacattactgctgaggtaatggaatcacttcatatacaaagaggagttcgtcgtgtgctctttagaacatccaacaccgacaagcggcttatgtttaagaaagagtttgattcaagctttgctgggttcatgaccgatggggctaaatggttggttgagaatacagacatcaaacttattgggcttgattatctttcatttgctgcttttgaggaatcacctgcaacacacagggttatacttaaaggacgggatataatcccagtggaagcgctgaagctggatggtgtggaggtaggaacatactcgcttcattgcttaccgctgagattagttggagcggaaggagcaccgacaagatgcattctcatcaagtgattcagttcttcttcttcttcttctgtgtaagttgttcagtataccaaactgataatgaataatatgcttcttactttacaagatctcagaacccatgaagcagatgtgatgattcagttgtaaaaggaagcatacctttataaacgtgtgaatgtattatgtatgacagtatatttgtaattctgaaggacatgataataaacctagactgaaacaaacgaataatataaccacttgcag

SEQ ID NO: 89172 - protein, 255 aa, Arabidopsis thaliana; identical to SEQ ID NO: 28120
  peptide (1)..(255): Ceres Seq. ID no. 12715925

SEQ ID NO: 89173 - protein, 185 aa, Arabidopsis thaliana; identical to SEQ ID NO: 28121
  peptide (1)..(185): Ceres Seq. ID no. 12715926

SEQ ID NO: 89174 - protein, 174 aa, Arabidopsis thaliana; identical to SEQ ID NO: 28122
  peptide (1)..(174): Ceres Seq. ID no. 12715927

SEQ ID NO: 89175 - DNA, 1075 bp, Arabidopsis thaliana
  misc_feature (1)..(1075): Ceres Seq. ID no. 12715936
  misc_feature (1)..(1075): Ortholog of  Ceres SEQ ID NO 15169972 as cited in SEQ ID NO 51692
aagtgacatcgtcggaggagaaaaggtagtgccaatattagccggcgattcagatggagacggtggtcgataaagatgttctgaagtcttccggggctgagcttcttcccgacggacgtcgaggtttacgcatccatgactgggagatcgaaaccctccgcggcacgattctcacttctctcgctgtcgaagagtgggaaaaaaagcttaagacatctcacttacctgaaatggtttttggcgagaatgcattagtccttaaacacttaggtagcaacactaagattcattttaatgcgtttgacgcactagctggttggaagcaggaagggcttccacctgttgaagttcctgctgcagcacaatggaaattcaggagcaagccgtctcagcaggtgatactagattatgattacacgtttacaacgccatactgtggaagtgaagtagttgagaaagacaaagaaacggttgaggcaaaagctaatccaaagggggaagctactcttcagtgggagaactgtgaagatcagattgatttggctgctctctcacttaaagaacctattctcttctatgatgaggtagttttgtatgaagatgaactggctgacaatggagtgtcacttctgactgtgaaagtgagagtcatgccaagctcatggttcctcctcttgcgattttggctgagagttgatggtgtgcttatgagattgagagagacgagaatgcattataggtttggcgaagatgaggcaccaactgttcttcgtgaaaactgttggagagaagcaacatttcagtctctatctgcgaaagggtatccagttgacttagcagtctggagcgacccgagctccatcagtcagaggcttccagtgattaagcatacgacacagaaactgaagatccctagtaaagtttaagctgtttataaagttgcaaattatatctaaaagagcgtaccgatgagctttctttacagccaaacaaactacttactattgaatttgttaatgtaaggagttactccactgacttattgtggtggtttcatatgaacattcaaaccctt

SEQ ID NO: 89176 - protein, 290 aa, Arabidopsis thaliana; identical to SEQ ID NO: 80566
  peptide (1)..(290): Ceres Seq. ID no. 12715937

SEQ ID NO: 89177 - protein, 231 aa, Arabidopsis thaliana; identical to SEQ ID NO: 80567
  peptide (1)..(231): Ceres Seq. ID no. 12715938

SEQ ID NO: 89178 - DNA, 708 bp, Arabidopsis thaliana
  misc_feature (1)..(708): Ceres Seq. ID no. 12715939
  misc_feature (1)..(708): Ortholog of  Ceres SEQ ID NO 14307883 as cited in SEQ ID NO 67277
ctgacttcgccgaatgtgtgtcgatctccggcgaagtaataagtcgtaataaccctaaaaatcttgccctctttttcgccgccggctaaagctatgaaggtttttaatcttgaccgtggaaacactctctctgtttccctcttctccggtgtcaccaactccaaggagctcttgaattcaatgcttgacggaagtctgaagctggaggtctcatttctcaatgcatcacttattccagacatttttcctctattggctgctgctcagaaagcacttatctccaaatcacgcgattccttatcaaccagaactcttcattctgagcttgtctacaattactcaggatctaagcacaatcattgaaacgatgtgggatttctgagaacactacttacattctagctgcccggttcaatgcttctcccgttgagatggaggaggtggcgaaattgatcaacgggaaggagattgatttggaggaattgaagacacatgcaaatcaagccaatatactaaagcattacaagataactagccaagagctcggaatttcctctctgggagatgccattgtttgtcgaatagctgcacgcgatgctttgtaggagtagacatcttttctttatgtcttttgtcaccaattatagttttctcctttataaacaacgttgacacttacgtttataattcagaccaatgttgggtttc

SEQ ID NO: 89179 - protein, 89 aa, Arabidopsis thaliana
  peptide (1)..(89): Ceres Seq. ID no. 12715940
MKVFNLDRGNTLSVSLFSGVTNSKELLNSMLDGSLKLEVSFLNASLIPDIFPLLAAAQKALISKSRDSLSTRTLHSELVYNYSGSKHNH

SEQ ID NO: 89180 - protein, 60 aa, Arabidopsis thaliana
  peptide (1)..(60): Ceres Seq. ID no. 12715941
MLDGSLKLEVSFLNASLIPDIFPLLAAAQKALISKSRDSLSTRTLHSELVYNYSGSKHNH

SEQ ID NO: 89181 - protein, 57 aa, Arabidopsis thaliana
  peptide (1)..(57): Ceres Seq. ID no. 12715942
MEEVAKLINGKEIDLEELKTHANQANILKHYKITSQELGISSLGDAIVCRIAARDAL

SEQ ID NO: 89182 - DNA, 1204 bp, Arabidopsis thaliana
  misc_feature (1)..(1204): Ceres Seq. ID no. 12715964
  misc_feature (1)..(1204): Ortholog of  Ceres SEQ ID NO 12617887 as cited in SEQ ID NO 65526
acacttagctttctgttattcaattcttcacaaagtttctaaaagcttttctcttgttattcaacaacttggcaccgagcttcgtaacgccgtgtgtgtgttctacttgattctccgagctcttgatactgttgaggatgacacaagcgtaccagtggagatcaaagttccaattctgatagctttccaccgtcatatatacgatggtgactggcatttttcatgtggtacaaaagagtataaacttctaatggaccaatttcaccatgtttctgcagcttttctgaaacttgaaaaagggtatcaagaggctattgaagatataactaaaagaatgggtgcaggaatggccaagttcatttgcaaggaggtagaaacaattgatgactatgatgaatactgccattatgctgcaggacttgttggtttaggtttgtcaaaaatcttcattgcttcggaattagaaatactgactccagattggaagcagatttcaaattctacaggtttatttctgcagaaaacaaacattatcaaagattatcttgaagacattaatgagagaccaaagtcgcgcatgttttggcctcgtgagatttggggaaaatatgttgacaaacttgaggacttcaaaaatgaggagaaagctacaaaagcagtgcagtgtttgaatgaaatggtcactaatgcattgaatcatgttgaagattgtttgaaatccttggcttcactgcgtgatcctgcaatatttcagtcttgcgccatccctcagatcgtggcgattggaacacttgcgttatgctataacaatgtacaagtgtttagaggtgtcgtgagattgagacgaggtctaatagctaaagtcattgatcgcacaaagacaatggatgatgtctacggtgcgttctatgatttttcttgcatgctacaaacaaaggttgacaataacgatccaaatgctatgaaaacattaaaccgactcgaaaccatcaagaaattttgcaaagaaaatggaggacttcacaaaagaaaatcttatgttaacgatgaaacacaatccaaggctatctttgttgtaatgtttgtgcttctactggccatagtcgttgtatatctcaaagcaaaccaatgtaagtgactctgattttgtgaagtcatcatgaacataatttctagcttttttgaaatgtttgatcaaatcttg

SEQ ID NO: 89183 - protein, 378 aa, Arabidopsis thaliana
  peptide (1)..(378): Ceres Seq. ID no. 12715965
HLAFCYSILHKVSKSFSLVIQQLGTELRNAVCVFYLILRALDTVEDDTSVPVEIKVPILIAFHRHIYDGDWHFSCGTKEYKLLMDQFHHVSAAFLKLEKGYQEAIEDITKRMGAGMAKFICKEVETIDDYDEYCHYAAGLVGLGLSKIFIASELEILTPDWKQISNSTGLFLQKTNIIKDYLEDINERPKSRMFWPREIWGKYVDKLEDFKNEEKATKAVQCLNEMVTNALNHVEDCLKSLASLRDPAIFQSCAIPQIVAIGTLALCYNNVQVFRGVVRLRRGLIAKVIDRTKTMDDVYGAFYDFSCMLQTKVDNNDPNAMKTLNRLETIKKFCKENGGLHKRKSYVNDETQSKAIFVVMFVLLLAIVVVYLKANQCK

SEQ ID NO: 89184 - protein, 295 aa, Arabidopsis thaliana; identical to SEQ ID NO: 89097
  peptide (1)..(295): Ceres Seq. ID no. 12715966

SEQ ID NO: 89185 - protein, 267 aa, Arabidopsis thaliana; identical to SEQ ID NO: 89098
  peptide (1)..(267): Ceres Seq. ID no. 12715967

SEQ ID NO: 89186 - DNA, 603 bp, Arabidopsis thaliana
  misc_feature (1)..(603): Ceres Seq. ID no. 12715999
  misc_feature (1)..(603): Ortholog of  Ceres SEQ ID NO 13599102 as cited in SEQ ID NO 1347
  misc_feature (1)..(603): Ortholog of  Ceres SEQ ID NO 15176238 as cited in SEQ ID NO 55058
  misc_feature (1)..(603): Ortholog of  Ceres SEQ ID NO 13598630 as cited in SEQ ID NO 65440
atgtataaagacttgaacatcaatatagtgtgtcctggaaaagattcaactcttggggttgagagtgttggcacagttcctgcatcactcgtgacttatgcttccattctagcaattcaaccagacttaatcattaatgcgggaaccgctggtggctttaaggccaaaggagcatgtattagcgatgtttatgttgtctctactgttgctttccatgacagaagaatacctgttcctgtccttgatatatatggtgttggtatgcggaacaccttccccacacccaaccttataaaggagctgaacctaaaggtgggaagattatccactggcgattctatggatatgtctccacatgacgaagaatccatcacagcaaatgatgctacagttaaagatatggagggagcagcagtggcctatgtggctgatatctttaaagtgcctacgattctaataaaaggtgtgactgatattgtggatggcaatagaccaacttctgaagaatttttggagaacttagctgcagtcactgccaaacttgatgagtcacttaccaaagtgattgacttcatcagtgggaaatgtctctcagacctctaa

SEQ ID NO: 89187 - protein, 200 aa, Arabidopsis thaliana
  peptide (1)..(200): Ceres Seq. ID no. 12716000
MYKDLNINIVCPGKDSTLGVESVGTVPASLVTYASILAIQPDLIINAGTAGGFKAKGACISDVYVVSTVAFHDRRIPVPVLDIYGVGMRNTFPTPNLIKELNLKVGRLSTGDSMDMSPHDEESITANDATVKDMEGAAVAYVADIFKVPTILIKGVTDIVDGNRPTSEEFLENLAAVTAKLDESLTKVIDFISGKCLSDL

SEQ ID NO: 89188 - protein, 113 aa, Arabidopsis thaliana
  peptide (1)..(113): Ceres Seq. ID no. 12716001
MRNTFPTPNLIKELNLKVGRLSTGDSMDMSPHDEESITANDATVKDMEGAAVAYVADIFKVPTILIKGVTDIVDGNRPTSEEFLENLAAVTAKLDESLTKVIDFISGKCLSDL

SEQ ID NO: 89189 - DNA, 2784 bp, Arabidopsis thaliana
  misc_feature (1)..(2784): Ceres Seq. ID no. 12716041
  misc_feature (1)..(2784): Ortholog of  Ceres SEQ ID NO 12586556 as cited in SEQ ID NO 64667
  misc_feature (1)..(2784): Ortholog of  Ceres SEQ ID NO 13660894 as cited in SEQ ID NO 67475
atggctgcgactctgctgtctcaatgctaccgtatctacaattccgatgcgtgcaagtgtgtttcttctgagaatcaccagacgacggggaagcgaaatgggaatcgaaatctcgaattcgactcgggaatttcgaaaccagcacggctagtacttcgagaccgatacaaggtaactaagcaggtcaatgatcctgcgctgactagggctttacgtggtttcgctgattcccgtcttatggaggatgcactccaactgttcgatgaaatgaacaaagctgatgcttttctgtggaatgtgatgattaaaggtttcactagctgtgggttgtacattgaagcagttcaattttatagcagaatggtgtttgcaggggtcaaagctgatacctttacttatcctttcgtgattaaatcggttgcgggaatttcctcattggaagaagggaagaagattcatgcgatggtgattaagcttgggtttgtttcagatgtttacgtctgtaattctcttatatctttatacatgaagcttgggtgtgcttgggatgcagagaaagtgttcgaagaaatgcctgagagagacattgtttcgtggaattccatgatttctggatatcttgcgcttggagatggctttagctcgttgatgctgtttaaagaaatgctgaaatgtgggtttaaaccggacaggttcagtaccatgagtgctcttggtgcttgttctcatgtgtatagtccaaaaatgggaaaagagatacattgccacgctgttcgaagtaggattgaaactggtgatgttatggtaatgacatcaattcttgacatgtacagtaaatatggtgaagtgagttatgcggagaggatatttaacggtatgatccagaggaacatcgtagcttggaacgttatgatagggtgttatgctagaaatggccgagtcactgatgctttcctctgctttcagaaaatgtcagagcaaaatgggttgcagccagatgttatcacatcgattaatctgcttcctgcttctgcgatcttagagggtagaacgattcacgggtatgctatgaggagaggctttcttccccatatggtattggaaactgctctgattgatatgtatggagaatgtgggcagttaaaatcagctgaggttatatttgatcgaatggctgaaaagaatgtgatctcatggaactcgattattgctgcctatgtgcagaacgggaagaactattcagccttggagctatttcaagagctctgggattcatcgcttgtacctgattccacaacaattgctagtattctaccagcttatgcagaatctctatccttgagtgaaggtagagaaatccatgcttatattgttaagtctagatactggtcaaacaccatcatcttgaattcacttgttcacatgtatgccatgtgtggtgaccttgaggatgcaagaaaatgtttcaaccacatcttgttaaaggatgttgtttcatggaacagcatcatcatggcatatgcagtacatggttttgggagaatttcggtttggttattctctgagatgattgcttctagagtaaatccaaacaagagcacctttgcttcactattagcagcatgtagcatttctggtatggttgatgaaggatgggaatatttcgagtcgatgaaaagagaatacgggatagatcctggaatagagcattatgggtgcatgctggatctcattggccgtacaggaaacttcagcgcagccaagagattccttgaagaaatgccatttgtgccaacagctaggatttggggatcgttgttaaacgcaagcagaaaccacaaggacataaccatagctgaatttgcggcagaacagatatttaagatggaacacgataacacgggatgttatgtcttgcttttgaacatgtatgcagaagctggaagatgggaagatgtaaataggattaagcttctcatggagagcaaaggcatatccagaacatcaagtcgcagtactgttgaggcgaagggcaaaagtcatgtgttcacaaatggagacagatcccacgtggcgacgaacaagatctatgaagtcttagatgtcgtctcgaggatggttggagaagaagacatttatgttcactgtgtctcgaggttgagaccagagactctagttaagagcagaagcaattcaccaagaagacattcgaaaatgtcacgagttcttggaaaaagcttcgagattgacgagaagagagatcgttgtgggagattccaagatttttcatcacttctccaatggtcgctgctcgtgtggaaattactggtgaaaacacagattgtggctaaagtagcttcaccggcaattttctcatccagaaaagggtataggcttctttggcctgaaggaggcaaccttggagagaacctgcaaatatttctcgtctcgatcaaagctttgcgacagatcacagatgtgctttcgatctctcgtgacaacatcttctatcaatcgagttcaagttatgtctcccttatttcacacgatccaagatcttgccaccgaaacgctttcaccggaggattcttcgacggcgatcacggagaaggatgcgaggaagacgatggcgaagagactgatggtgaaattgacgatcagttagcagattcgttgtttgatggttttagagtacgagtcgcctccggaggaagaagacgaatttgtgtttcatcgatcatcatcaccacaaccctaggtttgtgttttcctaattttttttaa

SEQ ID NO: 89190 - protein, 927 aa, Arabidopsis thaliana
  peptide (1)..(927): Ceres Seq. ID no. 12716042
MAATLLSQCYRIYNSDACKCVSSENHQTTGKRNGNRNLEFDSGISKPARLVLRDRYKVTKQVNDPALTRALRGFADSRLMEDALQLFDEMNKADAFLWNVMIKGFTSCGLYIEAVQFYSRMVFAGVKADTFTYPFVIKSVAGISSLEEGKKIHAMVIKLGFVSDVYVCNSLISLYMKLGCAWDAEKVFEEMPERDIVSWNSMISGYLALGDGFSSLMLFKEMLKCGFKPDRFSTMSALGACSHVYSPKMGKEIHCHAVRSRIETGDVMVMTSILDMYSKYGEVSYAERIFNGMIQRNIVAWNVMIGCYARNGRVTDAFLCFQKMSEQNGLQPDVITSINLLPASAILEGRTIHGYAMRRGFLPHMVLETALIDMYGECGQLKSAEVIFDRMAEKNVISWNSIIAAYVQNGKNYSALELFQELWDSSLVPDSTTIASILPAYAESLSLSEGREIHAYIVKSRYWSNTIILNSLVHMYAMCGDLEDARKCFNHILLKDVVSWNSIIMAYAVHGFGRISVWLFSEMIASRVNPNKSTFASLLAACSISGMVDEGWEYFESMKREYGIDPGIEHYGCMLDLIGRTGNFSAAKRFLEEMPFVPTARIWGSLLNASRNHKDITIAEFAAEQIFKMEHDNTGCYVLLLNMYAEAGRWEDVNRIKLLMESKGISRTSSRSTVEAKGKSHVFTNGDRSHVATNKIYEVLDVVSRMVGEEDIYVHCVSRLRPETLVKSRSNSPRRHSKMSRVLGKSFEIDEKRDRCGRFQDFSSLLQWSLLVWKLLVKTQIVAKVASPAIFSSRKGYRLLWPEGGNLGENLQIFLVSIKALRQITDVLSISRDNIFYQSSSSYVSLISHDPRSCHRNAFTGGFFDGDHGEGCEEDDGEETDGEIDDQLADSLFDGFRVRVASGGRRRICVSSIIITTTLGLCFPNFF

SEQ ID NO: 89191 - protein, 848 aa, Arabidopsis thaliana
  peptide (1)..(848): Ceres Seq. ID no. 12716043
MEDALQLFDEMNKADAFLWNVMIKGFTSCGLYIEAVQFYSRMVFAGVKADTFTYPFVIKSVAGISSLEEGKKIHAMVIKLGFVSDVYVCNSLISLYMKLGCAWDAEKVFEEMPERDIVSWNSMISGYLALGDGFSSLMLFKEMLKCGFKPDRFSTMSALGACSHVYSPKMGKEIHCHAVRSRIETGDVMVMTSILDMYSKYGEVSYAERIFNGMIQRNIVAWNVMIGCYARNGRVTDAFLCFQKMSEQNGLQPDVITSINLLPASAILEGRTIHGYAMRRGFLPHMVLETALIDMYGECGQLKSAEVIFDRMAEKNVISWNSIIAAYVQNGKNYSALELFQELWDSSLVPDSTTIASILPAYAESLSLSEGREIHAYIVKSRYWSNTIILNSLVHMYAMCGDLEDARKCFNHILLKDVVSWNSIIMAYAVHGFGRISVWLFSEMIASRVNPNKSTFASLLAACSISGMVDEGWEYFESMKREYGIDPGIEHYGCMLDLIGRTGNFSAAKRFLEEMPFVPTARIWGSLLNASRNHKDITIAEFAAEQIFKMEHDNTGCYVLLLNMYAEAGRWEDVNRIKLLMESKGISRTSSRSTVEAKGKSHVFTNGDRSHVATNKIYEVLDVVSRMVGEEDIYVHCVSRLRPETLVKSRSNSPRRHSKMSRVLGKSFEIDEKRDRCGRFQDFSSLLQWSLLVWKLLVKTQIVAKVASPAIFSSRKGYRLLWPEGGNLGENLQIFLVSIKALRQITDVLSISRDNIFYQSSSSYVSLISHDPRSCHRNAFTGGFFDGDHGEGCEEDDGEETDGEIDDQLADSLFDGFRVRVASGGRRRICVSSIIITTTLGLCFPNFF

SEQ ID NO: 89192 - protein, 838 aa, Arabidopsis thaliana
  peptide (1)..(838): Ceres Seq. ID no. 12716044
MNKADAFLWNVMIKGFTSCGLYIEAVQFYSRMVFAGVKADTFTYPFVIKSVAGISSLEEGKKIHAMVIKLGFVSDVYVCNSLISLYMKLGCAWDAEKVFEEMPERDIVSWNSMISGYLALGDGFSSLMLFKEMLKCGFKPDRFSTMSALGACSHVYSPKMGKEIHCHAVRSRIETGDVMVMTSILDMYSKYGEVSYAERIFNGMIQRNIVAWNVMIGCYARNGRVTDAFLCFQKMSEQNGLQPDVITSINLLPASAILEGRTIHGYAMRRGFLPHMVLETALIDMYGECGQLKSAEVIFDRMAEKNVISWNSIIAAYVQNGKNYSALELFQELWDSSLVPDSTTIASILPAYAESLSLSEGREIHAYIVKSRYWSNTIILNSLVHMYAMCGDLEDARKCFNHILLKDVVSWNSIIMAYAVHGFGRISVWLFSEMIASRVNPNKSTFASLLAACSISGMVDEGWEYFESMKREYGIDPGIEHYGCMLDLIGRTGNFSAAKRFLEEMPFVPTARIWGSLLNASRNHKDITIAEFAAEQIFKMEHDNTGCYVLLLNMYAEAGRWEDVNRIKLLMESKGISRTSSRSTVEAKGKSHVFTNGDRSHVATNKIYEVLDVVSRMVGEEDIYVHCVSRLRPETLVKSRSNSPRRHSKMSRVLGKSFEIDEKRDRCGRFQDFSSLLQWSLLVWKLLVKTQIVAKVASPAIFSSRKGYRLLWPEGGNLGENLQIFLVSIKALRQITDVLSISRDNIFYQSSSSYVSLISHDPRSCHRNAFTGGFFDGDHGEGCEEDDGEETDGEIDDQLADSLFDGFRVRVASGGRRRICVSSIIITTTLGLCFPNFF

SEQ ID NO: 89193 - DNA, 1089 bp, Arabidopsis thaliana
  misc_feature (1)..(1089): Ceres Seq. ID no. 12716049
  misc_feature (1)..(1089): Ortholog of  Ceres SEQ ID NO 14304148 as cited in SEQ ID NO 57313
  misc_feature (1)..(1089): Ortholog of  Ceres SEQ ID NO 13598513 as cited in SEQ ID NO 64102
  misc_feature (1)..(1089): Ortholog of  Ceres SEQ ID NO 14302224 as cited in SEQ ID NO 64268
atggaagaaagtaaaaggaatttattagatgaagaagcgaaagcttctttagacatatggagatatgtttttgggtttgcagatattgcagctgcaaagtgtgccattgatctcaaaataccagaagccattgaaaaccatccttcgtcacagcccgtgacactatccgaactctcctctgccgtctctgcttctccttcacatctccgccgtataatgcggtttcttgtgcaccaaggactcttcaaagaagtccccacaaaagatggtttagccactggctacactaacacgccactctctcgccgtatgatgatcacaaaacctcctttgcttctcttggaaacaagtcccgagatgcttgctccatggttgaagctgagctcagtcgtttcttcgccggtcaatgtttcaactccaccgccgtttgatgcagtgcatggtaaggacttgtgggcgttcgcacaggataatctgtgccacagccagctgatcaacgaggccatggcttgtgatgcaaggcgcgtggtgccacgtgtagctggagcttgtcaaggcttgtttgacggcgtggctacggtggttgacgtaggaggaggtaccggagagacgatgggaatacttgtaaaggagtttccttggatcaaaggatttaactttgaccttcctcatgttattgaagttgctcaagtcttggacggtgttgagaatgttgagggcgatatgtttgattctattccggcaagcgacgctgttatcatcaagtgggtgttacacgattggggagacaaagattgcataaagatattgaagaattgcaaagaagctgttctaccaaatatcggcaaagtgttgatagtggagtgtgttatcggagagaagaaaaacacgatgatagcggaagaaagagatgacaagttagagcacgtgagattgcagcttgacatggtgatgatggttcacacaagcacaggcaaagaacgaactttgaaagaatgggactttgttcttacagaagctggctttgctcgatatgaggttagagactttgatgatgttcagtctcttatcatcgcatatcgatcttaa

SEQ ID NO: 89194 - protein, 362 aa, Arabidopsis thaliana
  peptide (1)..(362): Ceres Seq. ID no. 12716050
MEESKRNLLDEEAKASLDIWRYVFGFADIAAAKCAIDLKIPEAIENHPSSQPVTLSELSSAVSASPSHLRRIMRFLVHQGLFKEVPTKDGLATGYTNTPLSRRMMITKPPLLLLETSPEMLAPWLKLSSVVSSPVNVSTPPPFDAVHGKDLWAFAQDNLCHSQLINEAMACDARRVVPRVAGACQGLFDGVATVVDVGGGTGETMGILVKEFPWIKGFNFDLPHVIEVAQVLDGVENVEGDMFDSIPASDAVIIKWVLHDWGDKDCIKILKNCKEAVLPNIGKVLIVECVIGEKKNTMIAEERDDKLEHVRLQLDMVMMVHTSTGKERTLKEWDFVLTEAGFARYEVRDFDDVQSLIIAYRS

SEQ ID NO: 89195 - protein, 290 aa, Arabidopsis thaliana
  peptide (1)..(290): Ceres Seq. ID no. 12716051
MRFLVHQGLFKEVPTKDGLATGYTNTPLSRRMMITKPPLLLLETSPEMLAPWLKLSSVVSSPVNVSTPPPFDAVHGKDLWAFAQDNLCHSQLINEAMACDARRVVPRVAGACQGLFDGVATVVDVGGGTGETMGILVKEFPWIKGFNFDLPHVIEVAQVLDGVENVEGDMFDSIPASDAVIIKWVLHDWGDKDCIKILKNCKEAVLPNIGKVLIVECVIGEKKNTMIAEERDDKLEHVRLQLDMVMMVHTSTGKERTLKEWDFVLTEAGFARYEVRDFDDVQSLIIAYRS

SEQ ID NO: 89196 - protein, 259 aa, Arabidopsis thaliana
  peptide (1)..(259): Ceres Seq. ID no. 12716052
MMITKPPLLLLETSPEMLAPWLKLSSVVSSPVNVSTPPPFDAVHGKDLWAFAQDNLCHSQLINEAMACDARRVVPRVAGACQGLFDGVATVVDVGGGTGETMGILVKEFPWIKGFNFDLPHVIEVAQVLDGVENVEGDMFDSIPASDAVIIKWVLHDWGDKDCIKILKNCKEAVLPNIGKVLIVECVIGEKKNTMIAEERDDKLEHVRLQLDMVMMVHTSTGKERTLKEWDFVLTEAGFARYEVRDFDDVQSLIIAYRS

SEQ ID NO: 89197 - DNA, 1353 bp, Arabidopsis thaliana
  misc_feature (1)..(1353): Ceres Seq. ID no. 12716053
  misc_feature (1)..(1353): Ortholog of  Ceres SEQ ID NO 14306569 as cited in SEQ ID NO 53008
atggaagaagacactggtatcgacgaagctaagacatacacggtggagaagagcgagaaagtggagccggagaaggacggactgagtcaattcagagacgaggaaaaatcacttggtgcggatatggaagatttacatgatgagactgtgcgagaaaccctaggcaaggatcaggttcaaggtgttcgagaaaattcctctgtggaaccaaatgttgaagatgtattagaagtgaatgagactgatagcgtcaaggaaactgttgtaagtgcgattgtgccggttgatgaagtggaagagaatcgtcaggtagaaacatctccttctctggctgcatcgtcagactcattgacagtgacgccatgtctatctttggatcctgcaactgcttcaaccgcacaagatttaccactggtttcagttccaactaaacaagagcaaagatcagattcgccggtggttaacagattgtcggttactcctgttcctaggacaccggctcgtgatggttataattggagaaaatatggacagaagcaggttaagagtcccaagggctcacggagttactacaggtgtacatacactgaatgttgtgctaaaaaaattgaatgctccaatgattcaggcaatgtggtagagattgttaacaaaggtttacatactcatgaacctccccggaagactagcttctccccgagagagattagagttacaacagctatccggcctgtttcagaggatgatacagtagtagaagagctatcaattgttcctagcggttcagatccgtctgcttctactaaagaatacatctgtgagtcgcaaacactcgttgaccggaaaagacactgtgagaacgaagctgtggaggaaccagagccaaaacgaaggcaaagttcagattctgtctccaaacctggaaagaaaaacaaattcgtagtacacgcagctggtgatgttggtatctgtggtgatggatacaggtggcgtaaatacgggcagaaaatggtgaaaggaaatcctcatccaaggaactactaccgatgcacttcagcgggatgtccagttcgtaaacacattgagacagcagtcgagaacacaaaagcagtaataatcacatacaaaggagtacacaaccacgacatgccggtgcctaagaaacgccatggtcctccaagctcaatgctcgtagctgcagccgctccaacatcaatgagaaccaggacagacgatcaggtgaacattccgacttcaagccagtgctcggtggggcgagaaagtgagaagcagagtaaagaagcattggacgttggtggagagaaagtgatggaatcactaggactttgttga

SEQ ID NO: 89198 - protein, 450 aa, Arabidopsis thaliana
  peptide (1)..(450): Ceres Seq. ID no. 12716054
MEEDTGIDEAKTYTVEKSEKVEPEKDGLSQFRDEEKSLGADMEDLHDETVRETLGKDQVQGVRENSSVEPNVEDVLEVNETDSVKETVVSAIVPVDEVEENRQVETSPSLAASSDSLTVTPCLSLDPATASTAQDLPLVSVPTKQEQRSDSPVVNRLSVTPVPRTPARDGYNWRKYGQKQVKSPKGSRSYYRCTYTECCAKKIECSNDSGNVVEIVNKGLHTHEPPRKTSFSPREIRVTTAIRPVSEDDTVVEELSIVPSGSDPSASTKEYICESQTLVDRKRHCENEAVEEPEPKRRQSSDSVSKPGKKNKFVVHAAGDVGICGDGYRWRKYGQKMVKGNPHPRNYYRCTSAGCPVRKHIETAVENTKAVIITYKGVHNHDMPVPKKRHGPPSSMLVAAAAPTSMRTRTDDQVNIPTSSQCSVGRESEKQSKEALDVGGEKVMESLGLC

SEQ ID NO: 89199 - protein, 409 aa, Arabidopsis thaliana
  peptide (1)..(409): Ceres Seq. ID no. 12716055
MEDLHDETVRETLGKDQVQGVRENSSVEPNVEDVLEVNETDSVKETVVSAIVPVDEVEENRQVETSPSLAASSDSLTVTPCLSLDPATASTAQDLPLVSVPTKQEQRSDSPVVNRLSVTPVPRTPARDGYNWRKYGQKQVKSPKGSRSYYRCTYTECCAKKIECSNDSGNVVEIVNKGLHTHEPPRKTSFSPREIRVTTAIRPVSEDDTVVEELSIVPSGSDPSASTKEYICESQTLVDRKRHCENEAVEEPEPKRRQSSDSVSKPGKKNKFVVHAAGDVGICGDGYRWRKYGQKMVKGNPHPRNYYRCTSAGCPVRKHIETAVENTKAVIITYKGVHNHDMPVPKKRHGPPSSMLVAAAAPTSMRTRTDDQVNIPTSSQCSVGRESEKQSKEALDVGGEKVMESLGLC

SEQ ID NO: 89200 - DNA, 1708 bp, Arabidopsis thaliana
  misc_feature (1)..(1708): Ceres Seq. ID no. 12716089
  misc_feature (1)..(1708): Ortholog of  Ceres SEQ ID NO 13590904 as cited in SEQ ID NO 66072
aaccttgtagatggtatattctttgaggatattttgatttacttttacttgttcttttgagagagacttcaataaagtttaagtttatatcttttttttttctatttatatttccttgtccccatgtgatttcatttatccccttttcttggaatttacaagcttaatcaaccgagaggcatatcatcaataaggattaaacctgtgtggaaattttgttacaatctactctgtattgaaacttgtttcggtatagtttcctcgtatcaaaggttataccaccatctctctggtatcaggtttctgatcagaagcagcttaaagagcatagtggtgttgcagtttagatggcagtatcagctgattaccaagttaagtttcctgaaagtggtgatctctactctatactagcagctgaagggattgagtttcttttgtcgcatagtggagaggtgccgttggaatatattcatggtaagacgatttgtctcttcttctctgcaatctggtgcaggccctgcaaggacttcactccagagctgataaaactctacgaaaatcttcagaaccgaggagaagaactcgagatcatctttgtctcatttgatcatgatatgacttcattctatgaacatttctggtgcatgccatggcttgcagttcccttcaatttaagcctactcaacaaattaagggacaagtacggaatttctcgtatcccgtcactggttcctctatattcagatgaaatctcagtcgctgaagatgtaattggtctaattgaagactatggttctgaagcctttcctttcactaaaaagcgaaaagaagaactcaaagccatcgatgactccaaacgccttggaggacagttggagaaactccttactcacgagtcccgaaattacgttgttgccagaaatggaagcaaggtgctagtttctaaacttgtgggaaagaccatagggttgtactttggtgcacactggtgtccgcctttccgatctttcacttctcaactcgtagatgtgtacaatgagctggcgactacagataaaggctcctttgaagtcatcttaatttcaacagacagagactcaagagagtttaacatcaacatgaccaacatgccatggcttgcaataccttatgaggacagaacaagacaagatctttgtagaatcttcaacgtcaaactcatacctgcattggtcatcataggacccgaagagaaaacagtgaccacaaacgcgagagagatggtatcattgtatggatcaaggagttttccgttcacggaatcaaggattgttgagttaaaagcttgtttgaagaaggaaggtgattcacttccaaggaaagtgaaagataacaagcatgaacacgagctaaaactggatatggcgaaagcttatgtgtgtgatttctgtaagaagcaaggcaggttttgggcgttttcttgcaatgcttgtgattatgatcttcatcctacatgtgtggaagaagaagaagcattattggtttagcaaaagagacggtcgtcgtgatttgtctgaaagattttgtaatattagtagacaaagaatcgtgatatgtaatgttgtcatgtaaaactcaaagttgaggaattaggatcaacattgtaattatatcttctgtttgtacaattaacatgcttatttcattaataaaattatattctgttttt

SEQ ID NO: 89201 - protein, 392 aa, Arabidopsis thaliana; identical to SEQ ID NO: 22646
  peptide (1)..(392): Ceres Seq. ID no. 12716090

SEQ ID NO: 89202 - protein, 303 aa, Arabidopsis thaliana; identical to SEQ ID NO: 22647
  peptide (1)..(303): Ceres Seq. ID no. 12716091

SEQ ID NO: 89203 - protein, 293 aa, Arabidopsis thaliana; identical to SEQ ID NO: 22648
  peptide (1)..(293): Ceres Seq. ID no. 12716092

SEQ ID NO: 89204 - DNA, 1139 bp, Arabidopsis thaliana
  misc_feature (1)..(1139): Ceres Seq. ID no. 12716093
  misc_feature (1)..(1139): Ortholog of  Ceres SEQ ID NO 14308225 as cited in SEQ ID NO 59062
  misc_feature (1)..(1139): Ortholog of  Ceres SEQ ID NO 15176615 as cited in SEQ ID NO 0
ctcattaagatacatctcgagaagcagagcagagagaaagagattccgagagagagagagaaggagggagagaaggagcttagtggtctcattaccattaccagctccatacgaaccgaaacgacgccgttcgctcaacccttttctctgcaatctctcttcctcccacgagtttctcagcttttctcggatcatctaattaagagaggagatcttgtctcacggtgggattgatttttctcttcacgaagatcgtgttccaggcaattaactgcagaaaatggtgatgtgggtctttggctatggctctcttgtgtggaacccaggatttcactacgatgagaaagtgttaggtttcatcaagggatataaacgtgtctttgatcttgcttgcattgatcatagaggtacaccagaacaccctgcaagaacttgcaccctcgagaaagctgaagaagccatatgctggggtactgcattctgtgtccgtggaggaccagaaaaagaacgtctggctatggagtacttggaacgtagagagtgtgaatatgatctcaagacaagtgtagacttttacaaggaagatgatcctctaaagccagctgtaactggagtgatagtattcacttctactcctgacaaggtctccaacaagtattatctcggacctgcgccattagaagacatggcaagacaaatcgcgacagccaatggaccatgtggtaacaacagagattatctcttcctgctcgagaaggcaatgcacgacattgggcatgaggaggactatgttatagagctggcaaacgaggtgaggaaggttctggccgagtcctcgactaagaaggtgacaccggtgaaggaatcaagagcaagccgtgtagctaacaagtcgaagaacaatgtccccacggctcatcagatactacctcatcatccagaagctgttgccactacaatataactcttgtagttttcttcttaattggctttagagatgagtgaaatcaggtcttttttttaataataataacaaagtaagtttgttttctgagtagagaagtgtaatctttgtgtgtttcgaactttgttgtcttgtgtgttgtcctaacgagtgcctacttgtgcaccttttgaag

SEQ ID NO: 89205 - protein, 227 aa, Arabidopsis thaliana
  peptide (1)..(227): Ceres Seq. ID no. 12716094
MVMWVFGYGSLVWNPGFHYDEKVLGFIKGYKRVFDLACIDHRGTPEHPARTCTLEKAEEAICWGTAFCVRGGPEKERLAMEYLERRECEYDLKTSVDFYKEDDPLKPAVTGVIVFTSTPDKVSNKYYLGPAPLEDMARQIATANGPCGNNRDYLFLLEKAMHDIGHEEDYVIELANEVRKVLAESSTKKVTPVKESRASRVANKSKNNVPTAHQILPHHPEAVATTI

SEQ ID NO: 89206 - protein, 225 aa, Arabidopsis thaliana
  peptide (1)..(225): Ceres Seq. ID no. 12716095
MWVFGYGSLVWNPGFHYDEKVLGFIKGYKRVFDLACIDHRGTPEHPARTCTLEKAEEAICWGTAFCVRGGPEKERLAMEYLERRECEYDLKTSVDFYKEDDPLKPAVTGVIVFTSTPDKVSNKYYLGPAPLEDMARQIATANGPCGNNRDYLFLLEKAMHDIGHEEDYVIELANEVRKVLAESSTKKVTPVKESRASRVANKSKNNVPTAHQILPHHPEAVATTI

SEQ ID NO: 89207 - protein, 148 aa, Arabidopsis thaliana
  peptide (1)..(148): Ceres Seq. ID no. 12716096
MEYLERRECEYDLKTSVDFYKEDDPLKPAVTGVIVFTSTPDKVSNKYYLGPAPLEDMARQIATANGPCGNNRDYLFLLEKAMHDIGHEEDYVIELANEVRKVLAESSTKKVTPVKESRASRVANKSKNNVPTAHQILPHHPEAVATTI

SEQ ID NO: 89208 - DNA, 1042 bp, Arabidopsis thaliana
  misc_feature (1)..(1042): Ceres Seq. ID no. 12716097
  misc_feature (1)..(1042): Ortholog of  Ceres SEQ ID NO 13594474 as cited in SEQ ID NO 51277
  misc_feature (1)..(1042): Ortholog of  Ceres SEQ ID NO 12635560 as cited in SEQ ID NO 0
aaaaccaaaaaaaagaaaggagagaggccgacttggggtataagccagagttcttcttctttttcaagcttcttcttctcatcagtcatcaccggaatctaatttatactcgcaaaactcagcgattcgtttcgtttctgacaagtttccaattctacagcaatggatctcaatctcgatgcacctcactccatgggaacgaccatcatcggcgtcacttacaatggaggtgtcgtcctcggagccgactcacgtaccagcaccggtatgtacgtagcgaatcgagcttctgataagattacacaactgacagataatgtctacgtctgccgctctggatcggctgctgattctcaagttgtatctgactatgtccgctacttccttcaccagcatacaattcagcatggacaacccgcaactgttaaggtttctgccaaccttatcaggatgctcgcatataataacaagaacatgctccaaactggtctcatcgttggaggatgggataaatatgagggtgggaagatctacgggatcccactcggtggaactgtagtcgagcaaccgtttgccattggaggctctggttcgagctatctctacgggttcttcgaccaggcttggaaagataacatgaccaaagaagaagcagagcaacttgttgtgaaggcggtttcactagccatcgcccgtgatggagccagtggtggtgtcgtacggactgtcataatcaactcagagggagtgacgagaaacttttaccctggagataagttgcagctttggcacgaagaattggagccccaaaactcactcttagacattctgaacgctgctggtcctgaaccaatggccatgtgatctgcaaacaacgatcattatcttactctgttgggcaaacattttagatatttcattacagtttccagtgtctttaagactttaaactctgtttgaggttctgttgtaatgaatgacccgatctttctgttttaaacggatatcgtgtttcttatggctatggttttaattcctctgt

SEQ ID NO: 89209 - protein, 233 aa, Arabidopsis thaliana; identical to SEQ ID NO: 25662
  peptide (1)..(233): Ceres Seq. ID no. 12716098

SEQ ID NO: 89210 - protein, 223 aa, Arabidopsis thaliana; identical to SEQ ID NO: 25663
  peptide (1)..(223): Ceres Seq. ID no. 12716099

SEQ ID NO: 89211 - protein, 198 aa, Arabidopsis thaliana; identical to SEQ ID NO: 25664
  peptide (1)..(198): Ceres Seq. ID no. 12716100

SEQ ID NO: 89212 - DNA, 1177 bp, Arabidopsis thaliana
  misc_feature (1)..(1177): Ceres Seq. ID no. 12716125
  misc_feature (1)..(1177): Ortholog of  Ceres SEQ ID NO 15171366 as cited in SEQ ID NO 51578
  misc_feature (1)..(1177): Ortholog of  Ceres SEQ ID NO 14306949 as cited in SEQ ID NO 54919
  misc_feature (1)..(1177): Ortholog of  Ceres SEQ ID NO 14308536 as cited in SEQ ID NO 55469
  misc_feature (1)..(1177): Ortholog of  Ceres SEQ ID NO 15175723 as cited in SEQ ID NO 57875
  misc_feature (1)..(1177): Ortholog of  Ceres SEQ ID NO 14314909 as cited in SEQ ID NO 58002
  misc_feature (1)..(1177): Ortholog of  Ceres SEQ ID NO 15179772 as cited in SEQ ID NO 64248
atcacaaccatttctctctctcgtcttcgtcttcttcttcttcaacgttcctctccaaaatcctcagaccaagaaatcatcatggccgtcgatctaatgcgtttccctaagatagatgatcaaacggctattcaggaagctgcatcgcaaggtttacaaagtatggaacatctgatccgtgtcctctctaaccgtcccgaacaacaacacaacgttgactgctccgagatcactgacttcaccgtttctaaattcaaaaccgtcatttctctccttaaccgtactggtcacgctcggttcagacgcggaccggttcactccacttcctctgccgcatctcagaaactacagagtcagatcgttaaaaatactcaacctgaggctccgatagtgagaacaactacgaatcaccctcaaatcgttcctccaccgtctagtgtaacactcgatttctctaaaccaagcatcttcggcaccaaagctaagagcgccgagctggaattctccaaagaaaacttcagtgtttctttaaactcctcattcatgtcgtcggcgataaccggagacggcagcgtctccaatggaaaaatcttccttgcttctgctccgttgcagcctgttaactcttccggaaaaccaccgttggctggtcatccttacagaaagagatgtctcgagcatgagcactcagagagtttctccggaaaagtctccggctccgcctacggaaagtgccattgcaagaaaagcaggaaaaatcggatgaagagaaccgtgagagtaccggcgataagtgcaaagatcgccgatattccaccggacgaatattcgtggaggaagtacggacaaaaaccgatcaagggctcaccacacccacgtggttactacaagtgcagtacattcagaggatgtccagcgaggaaacacgtggaacgagcattagatgatccagcgatgcttattgtgacatacgaaggagagcaccgtcataaccaatccgcgatgcaggagaatatttcttcttcaggcattaatgatttagtgtttgcctcggcttgacttttttttgtactatttgttttttgattttttgagtactttagatggattgaaatttgtaaatttttttattaagaaatcaatttaaatagagaaaaattagtggtggtgcaatgtt

SEQ ID NO: 89213 - protein, 352 aa, Arabidopsis thaliana
  peptide (1)..(352): Ceres Seq. ID no. 12716126
ITTISLSRLRLLLLQRSSPKSSDQEIIMAVDLMRFPKIDDQTAIQEAASQGLQSMEHLIRVLSNRPEQQHNVDCSEITDFTVSKFKTVISLLNRTGHARFRRGPVHSTSSAASQKLQSQIVKNTQPEAPIVRTTTNHPQIVPPPSSVTLDFSKPSIFGTKAKSAELEFSKENFSVSLNSSFMSSAITGDGSVSNGKIFLASAPLQPVNSSGKPPLAGHPYRKRCLEHEHSESFSGKVSGSAYGKCHCKKSRKNRMKRTVRVPAISAKIADIPPDEYSWRKYGQKPIKGSPHPRGYYKCSTFRGCPARKHVERALDDPAMLIVTYEGEHRHNQSAMQENISSSGINDLVFASA

SEQ ID NO: 89214 - protein, 325 aa, Arabidopsis thaliana; identical to SEQ ID NO: 28793
  peptide (1)..(325): Ceres Seq. ID no. 12716127

SEQ ID NO: 89215 - protein, 320 aa, Arabidopsis thaliana; identical to SEQ ID NO: 28794
  peptide (1)..(320): Ceres Seq. ID no. 12716128

SEQ ID NO: 89216 - DNA, 1572 bp, Arabidopsis thaliana
  misc_feature (1)..(1572): Ceres Seq. ID no. 12716133
  misc_feature (1)..(1572): Ortholog of  Ceres SEQ ID NO 13648124 as cited in SEQ ID NO 20362
atgaacaacccgacactcttttctcctaaaagtccacactttttccagcctcttcttcccggtttcaagagccacatcaacattcctgtgaagttcttctccaagtatatcaaggggaaacacgaaggaaagaccgtaaaattgagatcagattcttcgaagagaacatggaaagtgaagattgagggccatacgctcaccgacggttggaaagagtttgtggaggcacatgatcttcgaatcagtgacttcgtcatcttcaaacacaaaggagacatgttcttcgatgtcactgctttaggatccagttgctgtgaggtccaatacgcaccatcttgtagtcacggtgaaaacgaagagagtgatgaaattggggaatcttcaagaaaggagaaagaaattgaggagaatatagaaacagaacccgatcagttttcatcagatctaacatgttttagccaatctgtgaccacttcaaacctaatgagagattcagtgggtgtgcccagagatttcgcaaagcgatatggtttcaacataggaaggcatgagatagttttgatgaacgaagaaggaaagccatgggaatcagaagttataagttataagtctggtaaagttattgtagctggaggttggaaaagtctctgcactgaaagtaaattagaagttggagattcttgtacatttaaactgcttcacaacgccaaaatgcccgtgtttcggctctgcagcaagctcccaaaggctggagcagaggctcggccactcaagagagctcgagtccaaagatggagccaagagagtagatcgaagcatgacgtgagggagaagatagctgaagaaggagaaccttctcgtcgcaatcgcacatctaacaagtctactggtgatcaaggaaagttgcagcaaacgcaatcttgctttatctttgatcatgtggctaagattggaacctacgagaggatacactggttgtctcttccaaggaattttgttaggtccgatggtctgattaaaggaagtaacaagattgttctaatgaatgaaggagcaaggacatggacgcttattctgaagtttagggattcacgtagatcgttttacagtaggggtggctggagaagtttctgccgtgagaatgggcttaaacctggagattctgtcacgtttaaactggagagtagcaacacaaaaacgcctctactccttttctccattgcagaatcaaagagtgcttccacaaaagataggacccgatttctgacactaactgtcacaccatccagtatccgcagttccagactttatctttcgaagaagtttattagtgttaacaagatggaaagggcaggagggaagaagataactctattggacaagaatggagaagagtggccagtgaccttactgatggataaaagatatacaaggatggttttgggttcagggttgagagaattctgcaatgctattggcgttaaggcatatgaatctgtggtgttggagttggtttgggaagagacaacaactcttcctatgttcaaattctgctccaagatcaagacttga

SEQ ID NO: 89217 - protein, 523 aa, Arabidopsis thaliana
  peptide (1)..(523): Ceres Seq. ID no. 12716134
MNNPTLFSPKSPHFFQPLLPGFKSHINIPVKFFSKYIKGKHEGKTVKLRSDSSKRTWKVKIEGHTLTDGWKEFVEAHDLRISDFVIFKHKGDMFFDVTALGSSCCEVQYAPSCSHGENEESDEIGESSRKEKEIEENIETEPDQFSSDLTCFSQSVTTSNLMRDSVGVPRDFAKRYGFNIGRHEIVLMNEEGKPWESEVISYKSGKVIVAGGWKSLCTESKLEVGDSCTFKLLHNAKMPVFRLCSKLPKAGAEARPLKRARVQRWSQESRSKHDVREKIAEEGEPSRRNRTSNKSTGDQGKLQQTQSCFIFDHVAKIGTYERIHWLSLPRNFVRSDGLIKGSNKIVLMNEGARTWTLILKFRDSRRSFYSRGGWRSFCRENGLKPGDSVTFKLESSNTKTPLLLFSIAESKSASTKDRTRFLTLTVTPSSIRSSRLYLSKKFISVNKMERAGGKKITLLDKNGEEWPVTLLMDKRYTRMVLGSGLREFCNAIGVKAYESVVLELVWEETTTLPMFKFCSKIKT

SEQ ID NO: 89218 - protein, 431 aa, Arabidopsis thaliana
  peptide (1)..(431): Ceres Seq. ID no. 12716135
MFFDVTALGSSCCEVQYAPSCSHGENEESDEIGESSRKEKEIEENIETEPDQFSSDLTCFSQSVTTSNLMRDSVGVPRDFAKRYGFNIGRHEIVLMNEEGKPWESEVISYKSGKVIVAGGWKSLCTESKLEVGDSCTFKLLHNAKMPVFRLCSKLPKAGAEARPLKRARVQRWSQESRSKHDVREKIAEEGEPSRRNRTSNKSTGDQGKLQQTQSCFIFDHVAKIGTYERIHWLSLPRNFVRSDGLIKGSNKIVLMNEGARTWTLILKFRDSRRSFYSRGGWRSFCRENGLKPGDSVTFKLESSNTKTPLLLFSIAESKSASTKDRTRFLTLTVTPSSIRSSRLYLSKKFISVNKMERAGGKKITLLDKNGEEWPVTLLMDKRYTRMVLGSGLREFCNAIGVKAYESVVLELVWEETTTLPMFKFCSKIKT

SEQ ID NO: 89219 - protein, 362 aa, Arabidopsis thaliana
  peptide (1)..(362): Ceres Seq. ID no. 12716136
MRDSVGVPRDFAKRYGFNIGRHEIVLMNEEGKPWESEVISYKSGKVIVAGGWKSLCTESKLEVGDSCTFKLLHNAKMPVFRLCSKLPKAGAEARPLKRARVQRWSQESRSKHDVREKIAEEGEPSRRNRTSNKSTGDQGKLQQTQSCFIFDHVAKIGTYERIHWLSLPRNFVRSDGLIKGSNKIVLMNEGARTWTLILKFRDSRRSFYSRGGWRSFCRENGLKPGDSVTFKLESSNTKTPLLLFSIAESKSASTKDRTRFLTLTVTPSSIRSSRLYLSKKFISVNKMERAGGKKITLLDKNGEEWPVTLLMDKRYTRMVLGSGLREFCNAIGVKAYESVVLELVWEETTTLPMFKFCSKIKT

SEQ ID NO: 89220 - DNA, 1836 bp, Arabidopsis thaliana
  misc_feature (1)..(1836): Ceres Seq. ID no. 12716177
  misc_feature (1)..(1836): Ortholog of  Ceres SEQ ID NO 12625388 as cited in SEQ ID NO 63299
  misc_feature (1)..(1836): Ortholog of  Ceres SEQ ID NO 15179860 as cited in SEQ ID NO 66716
gttaatctttttcttcaatctctcgatctgatcgttatcgaaaccgcgcgattctaaccaagtccaggtgacaaatcagctctgctaaaatactcacaaagtctcgtgatcatattttgtggatcacatcattgtcttatttttggaattgcttatcctcgcactagttcactgatttgagatctgtgcagttaattttgtgctccatagcgattccatggcttctttaatgttatctctcggttccacttctctgttaccgcgcgagattaacaaggataagctaaagcttggaacttctgcttcgaacccgttcctaaaagcaaagtcttttagcagagtgactatgacggttgcagtgaagccttctcgtttcgagggtataactatggctccaccagaccctattcttggagtcagtgaagcattcaaagctgacactaacgggatgaaactcaatcttggtgttggtgcttatcgtactgaggaactccagccttatgtgcttaatgttgttaaaaaggcggagaatttgatgttggagagaggagataacaaagagtatcttccaattgaggggttggcagcattcaacaaggctactgctgagttgctatttggagctggtcatcctgttattaaggaacaaagagtagcaacaattcagggtctttcgggaacaggttcactgcgattagcagcggctcttatagagcgttatttccctggagcaaaagttgtgatctcatcaccaacctggggtaatcacaagaatatcttcaatgatgccaaagttccgtggtccgaataccgctactatgatccaaaaacaattggtttggattttgagggaatgatagcagatataaaggaagctccagaaggatccttcatcttgcttcacggatgtgctcacaacccaactggaattgacccaacaccagaacagtgggtaaaaattgctgatgtcattcaggaaaagaaccatatcccatttttcgatgttgcataccagggctttgctagtggaagccttgatgaagatgcagcatctgtgagattatttgctgagcggggaatggagttttttgttgctcagtcatatagtaaaaatttaggtttgtatgcagaaagaattggggcaatcaatgtcgtgtgctcctcagctgatgctgctacaagggtcaagagccagttgaaaaggattgctcggcctatgtactcgaatccaccagttcatggggcgagaatcgtggccaatgtagtgggtgatgtaactatgttcagtgaatggaaagcagagatggaaatgatggcaggaagaataaagacggttagacaagagctgtatgatagcctcgtttcaaaagacaagagcgggaaggactggtccttcattctgaagcaaattggcatgttctctttcaccggcctaaacaaagctcagagcgataacatgacggacaaatggcatgtgtatatgactaaagacgggaggatatcattggccggattatctctggccaaatgcgagtatcttgctgatgcgatcatcgactcataccataacgtaagctgagcttccatctcagtagatgacaataagaaacagttttatataccctttttagcttcttcttgatctttgattgaaaccagatggctaaattaataagctagcatcacactatgattgctagacaattttcaaggaaacttttgatttgatcgtgtttgacaggccttgttgtattgggagactcccatcgagttatagaagaacttgttacgattgtattttacataatttcacaactatacttgaccggaagagtt

SEQ ID NO: 89221 - protein, 453 aa, Arabidopsis thaliana; identical to SEQ ID NO: 39108
  peptide (1)..(453): Ceres Seq. ID no. 12716178

SEQ ID NO: 89222 - protein, 449 aa, Arabidopsis thaliana; identical to SEQ ID NO: 39109
  peptide (1)..(449): Ceres Seq. ID no. 12716179

SEQ ID NO: 89223 - protein, 410 aa, Arabidopsis thaliana; identical to SEQ ID NO: 39110
  peptide (1)..(410): Ceres Seq. ID no. 12716180

SEQ ID NO: 89224 - DNA, 2373 bp, Arabidopsis thaliana
  misc_feature (1)..(2373): Ceres Seq. ID no. 12716265
  misc_feature (1)..(2373): Ortholog of  Ceres SEQ ID NO 13600310 as cited in SEQ ID NO 5086
atgccacttcgcaaccagaatcgcgctcctttacctagtccaaacgtcaaaaaggaagcgctctcaagtattccttttgacaagcgaaggaaggagacgcaaggtactggaagaagacaagtgctttcgacagtgaacagacaagatgcgaacagcgatgtgggaagcacagaggagtgtggtaaagttgagtttacaaaagatgaagtgttggctttgcttaacgagagagctaaagctggaaaatttgataccaagggtaagattgagcaaatgacggatattatcaagaagcttaaggtctgtgttagatggtaccaacaagtggatgaaactcatgttcaagacaaggaaaatctttcttcttctcttcaatctgcagagaaaagatacagtgataaagagttggatgcaaagaccaaagaggaagagctacgagcaactataacagagatgaaggagaacatagaatcacttcaggaaaagctgtccaaggagaagttgagtaaactggatgcaattgaaaatcacagaagagaaaaagattgtagagttgtagctgagaagcttcaggtttctctcagagaagagcttgacaaagttaaagaggaaaaaatggctgcgaagcagaaggtgacgtctctagaagatatgtacaagaggctgcaagagtacaacacaagtttgcaacaatataacaccaaactccagactgatcttgaagtagctagagaggctcacactcgtgctgaaaaagaaaagtcaagtatactggagaatcttactacactaagaggtcacagtaaatcactacaagatcaattagcatcgagccgggtttcacaagatgaagcggtaaaacaaaaggattcattgctgatggaagttaataaccttcaaagcgagctgcaacaagtccgtgatgatcgtgatcgccatgttgtacagtcacaaaagctggctggtgagatactgatgtataaggagagtgttggaaagtcatctcatgagttggacattcttatagccaaatcaggatctttagaggaaacatgttcgttgcaaaaagagcgtattaaaatgttggagcaggaattagcttttgctaaggaaaagcttaagatggtggatttatctatgtctcatacaatgacagaatttgaggagcagaaacaatgtatgcatgaactgcaagatcgccttgcagacacggagcgtcaactttttgaaggagagttattaaggaaaaagcttcataacaccattcttgaactcaaaggaaacatacgcgtgttctgccgagtgcgccccttgctaccagatgatggaggacgccaagaggccagtgttattgcctatcctacatcaactgaatctcttggtagaggcattgatgtggtccaaagtggtaacaaacatcctttcactttcgacaaggtcttcgaccacggagcttctcaggaggaagtattctttgaaatatctcaacttgtgcagagcgcattggatggctacaaggtttgtatttttgcctacggtcagacaggttctggcaaaacctataccatgatgggcaggcctgaaacaccagaacagaaaggactgatccctcgatcactcgaacaaatattcaaaaccagccaaagtcttagtacacaaggctggaaatacaagatgcaggtctcaatgttggagatatataatgagtccatcagagacttgttgtctacaagccgaacgattgctatagaatctgtgcgggcagacagtagcacatctggaagacaatatacaatcacacatgatgttaatggaaacactcatgttagcgacctgacaatagtagatgtatgcagcattggacaaatttcctcacttttgcaacaagctgctcagagcaggtctgttgggaagacgcatatgaatgaacaatcatcaagaagtcatttcgtgtttactcttaggatttctggtgtgaatgagagcactgaacagcaagtacaaggtgttcttaacctaattgatcttgctggaagtgagcgactttcaaggagcggggcaaccggagaccggttaaaggagacacaggctataaacaaaagcttgtctgcattgagtgatgttatatttgcattggcaaagaaagaggatcatgtacctttcagaaactcaaagttaacatatctgctccagccatgtttaggaggggactcaaagaccttaatgtttgtgaacatatcacctgatccatcttcaactggagagtctctatgctctcttcggtttgctgctagagttaatgcatgtgagattggaatacctcgcagacaaacttccgcaaaactcctcgactctcgcctaagttacggttaa

SEQ ID NO: 89225 - protein, 790 aa, Arabidopsis thaliana
  peptide (1)..(790): Ceres Seq. ID no. 12716266
MPLRNQNRAPLPSPNVKKEALSSIPFDKRRKETQGTGRRQVLSTVNRQDANSDVGSTEECGKVEFTKDEVLALLNERAKAGKFDTKGKIEQMTDIIKKLKVCVRWYQQVDETHVQDKENLSSSLQSAEKRYSDKELDAKTKEEELRATITEMKENIESLQEKLSKEKLSKLDAIENHRREKDCRVVAEKLQVSLREELDKVKEEKMAAKQKVTSLEDMYKRLQEYNTSLQQYNTKLQTDLEVAREAHTRAEKEKSSILENLTTLRGHSKSLQDQLASSRVSQDEAVKQKDSLLMEVNNLQSELQQVRDDRDRHVVQSQKLAGEILMYKESVGKSSHELDILIAKSGSLEETCSLQKERIKMLEQELAFAKEKLKMVDLSMSHTMTEFEEQKQCMHELQDRLADTERQLFEGELLRKKLHNTILELKGNIRVFCRVRPLLPDDGGRQEASVIAYPTSTESLGRGIDVVQSGNKHPFTFDKVFDHGASQEEVFFEISQLVQSALDGYKVCIFAYGQTGSGKTYTMMGRPETPEQKGLIPRSLEQIFKTSQSLSTQGWKYKMQVSMLEIYNESIRDLLSTSRTIAIESVRADSSTSGRQYTITHDVNGNTHVSDLTIVDVCSIGQISSLLQQAAQSRSVGKTHMNEQSSRSHFVFTLRISGVNESTEQQVQGVLNLIDLAGSERLSRSGATGDRLKETQAINKSLSALSDVIFALAKKEDHVPFRNSKLTYLLQPCLGGDSKTLMFVNISPDPSSTGESLCSLRFAARVNACEIGIPRRQTSAKLLDSRLSYG

SEQ ID NO: 89226 - protein, 699 aa, Arabidopsis thaliana
  peptide (1)..(699): Ceres Seq. ID no. 12716267
MTDIIKKLKVCVRWYQQVDETHVQDKENLSSSLQSAEKRYSDKELDAKTKEEELRATITEMKENIESLQEKLSKEKLSKLDAIENHRREKDCRVVAEKLQVSLREELDKVKEEKMAAKQKVTSLEDMYKRLQEYNTSLQQYNTKLQTDLEVAREAHTRAEKEKSSILENLTTLRGHSKSLQDQLASSRVSQDEAVKQKDSLLMEVNNLQSELQQVRDDRDRHVVQSQKLAGEILMYKESVGKSSHELDILIAKSGSLEETCSLQKERIKMLEQELAFAKEKLKMVDLSMSHTMTEFEEQKQCMHELQDRLADTERQLFEGELLRKKLHNTILELKGNIRVFCRVRPLLPDDGGRQEASVIAYPTSTESLGRGIDVVQSGNKHPFTFDKVFDHGASQEEVFFEISQLVQSALDGYKVCIFAYGQTGSGKTYTMMGRPETPEQKGLIPRSLEQIFKTSQSLSTQGWKYKMQVSMLEIYNESIRDLLSTSRTIAIESVRADSSTSGRQYTITHDVNGNTHVSDLTIVDVCSIGQISSLLQQAAQSRSVGKTHMNEQSSRSHFVFTLRISGVNESTEQQVQGVLNLIDLAGSERLSRSGATGDRLKETQAINKSLSALSDVIFALAKKEDHVPFRNSKLTYLLQPCLGGDSKTLMFVNISPDPSSTGESLCSLRFAARVNACEIGIPRRQTSAKLLDSRLSYG

SEQ ID NO: 89227 - protein, 639 aa, Arabidopsis thaliana
  peptide (1)..(639): Ceres Seq. ID no. 12716268
MKENIESLQEKLSKEKLSKLDAIENHRREKDCRVVAEKLQVSLREELDKVKEEKMAAKQKVTSLEDMYKRLQEYNTSLQQYNTKLQTDLEVAREAHTRAEKEKSSILENLTTLRGHSKSLQDQLASSRVSQDEAVKQKDSLLMEVNNLQSELQQVRDDRDRHVVQSQKLAGEILMYKESVGKSSHELDILIAKSGSLEETCSLQKERIKMLEQELAFAKEKLKMVDLSMSHTMTEFEEQKQCMHELQDRLADTERQLFEGELLRKKLHNTILELKGNIRVFCRVRPLLPDDGGRQEASVIAYPTSTESLGRGIDVVQSGNKHPFTFDKVFDHGASQEEVFFEISQLVQSALDGYKVCIFAYGQTGSGKTYTMMGRPETPEQKGLIPRSLEQIFKTSQSLSTQGWKYKMQVSMLEIYNESIRDLLSTSRTIAIESVRADSSTSGRQYTITHDVNGNTHVSDLTIVDVCSIGQISSLLQQAAQSRSVGKTHMNEQSSRSHFVFTLRISGVNESTEQQVQGVLNLIDLAGSERLSRSGATGDRLKETQAINKSLSALSDVIFALAKKEDHVPFRNSKLTYLLQPCLGGDSKTLMFVNISPDPSSTGESLCSLRFAARVNACEIGIPRRQTSAKLLDSRLSYG

SEQ ID NO: 89228 - DNA, 1320 bp, Arabidopsis thaliana
  misc_feature (1)..(1320): Ceres Seq. ID no. 12716284
  misc_feature (1)..(1320): Ortholog of  Ceres SEQ ID NO 12612314 as cited in SEQ ID NO 51420
atggcgtcaaatctcttcacaaaaatcccttcactctctgcaattttctcggtttacacatctctatctgccttcacgatcctcttcaaaaccattctctatgagttcattcccgtcaatatccgtgactttatcatctccaaattcacagactacttttctttttatctcaactccaatttcacgttcatcatcgaggaacagagcgattacgttatgaatcagactttccgtgcagcccaagtttacttgccgactcttctctccagaatcaccaccagaagtctcctcgtcagttcgagcgacctcaagaatccgatggctaaaccgaaattcggaatcccagtcaaagccaaaatcatcgatgaattcgaagggattcgtcttgaatggacacttctctctaaggagtttagggacaagattatgtcagattacttcacatacattgcaaaatcatcggtgaagatattgacacataaagaaaatctcaatatctacaattacaatccagactgtctgagatgggaatcagcaatcttccaacaccacaccacatttgaaaccttagcaatggagcctgagctcaagaacacattgatccgtgacctagacgctttctccaatggaaaagacttcttcaaaaccgtgggacgagcttggaaacgcggttatcttctttacggtccacctggaaccggaaaatcatcgcttgttgctgcaattgctaattttatgaactatagtatctatgatcttcagattcagagcgttaaagatgatgcaatgcttagacagattcttacctcaaccgagaaccgctccattcttctcattgaagatcttgattgcagtggagcagatactacttgtagaaaggaaaataaagatgaaacagagtatggtgagaatcagaacaagaagaagaagaaggatcctaaggtaactctgtctgggctactaaactttgtagacgggttatggtcaagctgtgtagaagagaggatcatcatattcacaacgaaccataaggagaaactcgatccggcattgctgagaccaggaaggatggatgttcacatcctcatggattattgcacgcctattgttttcaagaaacttgctgcattgtatcttgaaatcgaagaacacgagttgtttgaccctattgagaagatgttccttgaggtgaaagcaactccagctgagatcacagagaagcttatggtaagcaaggatccggatgttacgcttaagggtcttgttgagtttcttgaatccaagaagatgaccaaggagagtgttgattctgaaatttaa

SEQ ID NO: 89229 - protein, 439 aa, Arabidopsis thaliana
  peptide (1)..(439): Ceres Seq. ID no. 12716285
MASNLFTKIPSLSAIFSVYTSLSAFTILFKTILYEFIPVNIRDFIISKFTDYFSFYLNSNFTFIIEEQSDYVMNQTFRAAQVYLPTLLSRITTRSLLVSSSDLKNPMAKPKFGIPVKAKIIDEFEGIRLEWTLLSKEFRDKIMSDYFTYIAKSSVKILTHKENLNIYNYNPDCLRWESAIFQHHTTFETLAMEPELKNTLIRDLDAFSNGKDFFKTVGRAWKRGYLLYGPPGTGKSSLVAAIANFMNYSIYDLQIQSVKDDAMLRQILTSTENRSILLIEDLDCSGADTTCRKENKDETEYGENQNKKKKKDPKVTLSGLLNFVDGLWSSCVEERIIIFTTNHKEKLDPALLRPGRMDVHILMDYCTPIVFKKLAALYLEIEEHELFDPIEKMFLEVKATPAEITEKLMVSKDPDVTLKGLVEFLESKKMTKESVDSEI

SEQ ID NO: 89230 - protein, 367 aa, Arabidopsis thaliana
  peptide (1)..(367): Ceres Seq. ID no. 12716286
MNQTFRAAQVYLPTLLSRITTRSLLVSSSDLKNPMAKPKFGIPVKAKIIDEFEGIRLEWTLLSKEFRDKIMSDYFTYIAKSSVKILTHKENLNIYNYNPDCLRWESAIFQHHTTFETLAMEPELKNTLIRDLDAFSNGKDFFKTVGRAWKRGYLLYGPPGTGKSSLVAAIANFMNYSIYDLQIQSVKDDAMLRQILTSTENRSILLIEDLDCSGADTTCRKENKDETEYGENQNKKKKKDPKVTLSGLLNFVDGLWSSCVEERIIIFTTNHKEKLDPALLRPGRMDVHILMDYCTPIVFKKLAALYLEIEEHELFDPIEKMFLEVKATPAEITEKLMVSKDPDVTLKGLVEFLESKKMTKESVDSEI

SEQ ID NO: 89231 - protein, 333 aa, Arabidopsis thaliana
  peptide (1)..(333): Ceres Seq. ID no. 12716287
MAKPKFGIPVKAKIIDEFEGIRLEWTLLSKEFRDKIMSDYFTYIAKSSVKILTHKENLNIYNYNPDCLRWESAIFQHHTTFETLAMEPELKNTLIRDLDAFSNGKDFFKTVGRAWKRGYLLYGPPGTGKSSLVAAIANFMNYSIYDLQIQSVKDDAMLRQILTSTENRSILLIEDLDCSGADTTCRKENKDETEYGENQNKKKKKDPKVTLSGLLNFVDGLWSSCVEERIIIFTTNHKEKLDPALLRPGRMDVHILMDYCTPIVFKKLAALYLEIEEHELFDPIEKMFLEVKATPAEITEKLMVSKDPDVTLKGLVEFLESKKMTKESVDSEI

SEQ ID NO: 89232 - DNA, 897 bp, Arabidopsis thaliana
  misc_feature (1)..(897): Ceres Seq. ID no. 12716632
  misc_feature (1)..(897): Ortholog of  Ceres SEQ ID NO 13595651 as cited in SEQ ID NO 56804
atgaataagaatctgggtgtttcgtattcttctttccctcaaattcatctctttaagggttctactccactgcgtgttcgaacattcgtcgtctcgagtcgtaaaaattcaggaactggtttggcaagtgaggataagaaattgttgctggaacgatatggttatgatgctaatgatgactttgggtctcaatctaagaaggcgagaaggaaagaagagaaaatgagtggaaggaatagtcaacaagtagaagaagttgttgttgtacagccaagaacaactcataggttactgcaggttcttgcaggaacggcgaaacgaaagaaattgctttctcttaagggaatggatgtgagacctatgatggaagttgttaaaggagcagcttttggaattctccaggctgctggtggttgtccaacgtctctgcgtcctggtaggtggttggatttgtatagtggtacagggtctgttgggattgaagcaatcagtcgaggatgttctgaggcacattttgttgagatggatccttgggttgtttcaaatgttctacaaccaaacttggaacacactgggtttgttgatgcttcggttatacacactgctcgagttgaaaacttcctggaacgtgctgataaattagtaggtaaggatggagtgtttgattatatcagcgttacgccaccttacatggaggttgattatgaggttctgatggatcagattgctaagtcaccagcgattggggaaaatacttttattttggtcgagtacccatcacgaacaacaatgcttgattcatgtggatgccttgaaaagatgactgatagaaggtttggccggacacatctagctatatatggaccaaaatgggctcagaagccaagaaaatcttaa

SEQ ID NO: 89233 - protein, 298 aa, Arabidopsis thaliana; identical to SEQ ID NO: 45097
  peptide (1)..(298): Ceres Seq. ID no. 12716633

SEQ ID NO: 89234 - protein, 224 aa, Arabidopsis thaliana
  peptide (1)..(224): Ceres Seq. ID no. 12716634
MSGRNSQQVEEVVVVQPRTTHRLLQVLAGTAKRKKLLSLKGMDVRPMMEVVKGAAFGILQAAGGCPTSLRPGRWLDLYSGTGSVGIEAISRGCSEAHFVEMDPWVVSNVLQPNLEHTGFVDASVIHTARVENFLERADKLVGKDGVFDYISVTPPYMEVDYEVLMDQIAKSPAIGENTFILVEYPSRTTMLDSCGCLEKMTDRRFGRTHLAIYGPKWAQKPRKS

SEQ ID NO: 89235 - protein, 183 aa, Arabidopsis thaliana
  peptide (1)..(183): Ceres Seq. ID no. 12716635
MDVRPMMEVVKGAAFGILQAAGGCPTSLRPGRWLDLYSGTGSVGIEAISRGCSEAHFVEMDPWVVSNVLQPNLEHTGFVDASVIHTARVENFLERADKLVGKDGVFDYISVTPPYMEVDYEVLMDQIAKSPAIGENTFILVEYPSRTTMLDSCGCLEKMTDRRFGRTHLAIYGPKWAQKPRKS

SEQ ID NO: 89236 - DNA, 2982 bp, Arabidopsis thaliana
  misc_feature (1)..(2982): Ceres Seq. ID no. 12716642
  misc_feature (1)..(2982): Ortholog of  Ceres SEQ ID NO 13638292 as cited in SEQ ID NO 57738
atggggccttctgcccatctcgtctacgctataggagttatcatcatggcaacaatggttgcggcatatgagccatacacagatagctcacctccaccatactctgtgccacttcccaaagtggaatacaaatctcctccattaccagatgtttacagttctccaccaccaccactagaatactctccagcgcctaaagttgattataaatctccaccaccaccatactattcaccatctcctaaagttgagtacaagtctcctccaccaccatatgtctacaactctccaccaccaccatattactctccatccccaaaggtagactacaagtctcctccaccaccatatgtttacagttcgccaccaccaccaatctattcaccatctcctaaggtagactacaaatctcctccaccaccatatgtttacagttccccaccaccaccatactattcgccatcccctaaggtggagtacaaatctccaccatcaccgtatgtttacaactctccaccaccatcatattattcaccatcccctaaggtagattacaaatctcctccaccaccatatgtttatagttctccaccaccaccatattactctccatcccctaaggttgtatacaagtctcctcctccaccatatgtttacagttctccaccaccaccatactactcaccatcacctaaggtagactacaagtctccaccaccaccatacgtctacagctcaccaccaccaccatactactcaccttctcctaagatagtctacaaatctcccccaccaccgtacgtctacagctccccaccacccccatactactcaccttcccctaaggtagactacaaatctcccccaccaccgtatgtctacagttctccaccaccaccatactactctccatcccctaaggttgtatacaagtctcctcctccaccatatgtttacagttccccaccaccaccatactactcaccaaccccgaaggtagactacaaatctcctcctccaccatatgtttacagttctccaccaccaccatactactcaccatcacctaaggtagactacaagtctccaccaccaccatacgtctacagctcaccaccaccaccatactactcaccttctcctaagatagtctacaaatctcccccaccaccgtacgtctacagctccccaccacccccatactacacaccttcaccaaaggttgtatacaagtctcctcctccaccatatgtttacagttccccaccaccaccatactactcaccatcccctaaggtagactacaaatctcctcctccaccatatgtttacagttctcctccaccaccatactactcgccatctccaaaggttgtatacaaatctcctcctccaccatatgtttacagttctcctccaccaccatactattcaccatcccctaaggtagactacaagtctcctccaccaccatatgtttacagttctccaccaccaccgtactactctccttcaccaaaggttttatacaagtctcccccaccaccgtatgtctacagttctccaccaccaccatactactctccttctcctaaggtagtctacaagtctcccccaccaccgtatgtttacagttctccaccacctccatactactctccttctcctaaggtagtctacaagtctcccccaccaccgtatgtctacagttctccaccaccaccatactactctccttctcctaaggtagtctacaagtctcccccaccaccatacgtttacagttctccaccaccaccatactactccccttctcctaaagtatactacaagtctcctccatcaccataccacgcaccatcccctaaggttctatacaaatctccaccacaccctcatgtatgtgtctgtccaccacctcctccatgttattctccatctccaaaggtacactacaagtctcccccaccaccgtatgtctacagttctccaccaccaccatattactctccttcccctaaggtacactacaagtctcccccaccaccgtatgtctatagttctccaccaccaccatactactctccttctcctaaggtagtctacaagtctcccccaccaccgtatgtttacagttctccaccacctccatactattctccttctcctaaggtagtctacaagtctcccccaccaccgtatgtctacagttctccaccaccaccatactactctccttctcctaaggtagtctacaagtctcccccaccaccatacgtttacagttctccaccaccaccatattattctccttctcctaaggtagtctacaagtctcctccaccaccgtatgtctacagttctccaccaccaccatactactctccttctcctaaggtagtctacaagtctcccccaccaccgtacgtctacagctcaccaccaccaccatactactctccttctcctaaagtagtttacaagtctcccccaccaccgtacgtctacagctcaccaccaccaccatactactcaccttcccctaaggtagactacaaatctcccccaccaccgtacgtctacagctcaccaccaccaccatactactcaccttcccctaaagtagactacaaatctcctccaccaccgtacgtctatagctcaccaccaccaccatactactcaccttccccgaaggtagactacaaatctcccccaccaccgtatgtctacagctcacccccaccaccatactactcacctgcccctaaggtagattacaaatctccaccaccaccatacgtctatagttcaccaccaccaccatactactcaccttcccctaaggttgactacaaatctcctccaccaccatactactcaccttcccctaaggttgactacaaatctcctccaccaccatatgtctacagttctccaccaccaccatcatactcaccttctccaaaaactgagtactaa

SEQ ID NO: 89237 - protein, 993 aa, Arabidopsis thaliana
  peptide (1)..(993): Ceres Seq. ID no. 12716643
MGPSAHLVYAIGVIIMATMVAAYEPYTDSSPPPYSVPLPKVEYKSPPLPDVYSSPPPPLEYSPAPKVDYKSPPPPYYSPSPKVEYKSPPPPYVYNSPPPPYYSPSPKVDYKSPPPPYVYSSPPPPIYSPSPKVDYKSPPPPYVYSSPPPPYYSPSPKVEYKSPPSPYVYNSPPPSYYSPSPKVDYKSPPPPYVYSSPPPPYYSPSPKVVYKSPPPPYVYSSPPPPYYSPSPKVDYKSPPPPYVYSSPPPPYYSPSPKIVYKSPPPPYVYSSPPPPYYSPSPKVDYKSPPPPYVYSSPPPPYYSPSPKVVYKSPPPPYVYSSPPPPYYSPTPKVDYKSPPPPYVYSSPPPPYYSPSPKVDYKSPPPPYVYSSPPPPYYSPSPKIVYKSPPPPYVYSSPPPPYYTPSPKVVYKSPPPPYVYSSPPPPYYSPSPKVDYKSPPPPYVYSSPPPPYYSPSPKVVYKSPPPPYVYSSPPPPYYSPSPKVDYKSPPPPYVYSSPPPPYYSPSPKVLYKSPPPPYVYSSPPPPYYSPSPKVVYKSPPPPYVYSSPPPPYYSPSPKVVYKSPPPPYVYSSPPPPYYSPSPKVVYKSPPPPYVYSSPPPPYYSPSPKVYYKSPPSPYHAPSPKVLYKSPPHPHVCVCPPPPPCYSPSPKVHYKSPPPPYVYSSPPPPYYSPSPKVHYKSPPPPYVYSSPPPPYYSPSPKVVYKSPPPPYVYSSPPPPYYSPSPKVVYKSPPPPYVYSSPPPPYYSPSPKVVYKSPPPPYVYSSPPPPYYSPSPKVVYKSPPPPYVYSSPPPPYYSPSPKVVYKSPPPPYVYSSPPPPYYSPSPKVVYKSPPPPYVYSSPPPPYYSPSPKVDYKSPPPPYVYSSPPPPYYSPSPKVDYKSPPPPYVYSSPPPPYYSPSPKVDYKSPPPPYVYSSPPPPYYSPAPKVDYKSPPPPYVYSSPPPPYYSPSPKVDYKSPPPPYYSPSPKVDYKSPPPPYVYSSPPPPSYSPSPKTEY

SEQ ID NO: 89238 - protein, 978 aa, Arabidopsis thaliana
  peptide (1)..(978): Ceres Seq. ID no. 12716644
MATMVAAYEPYTDSSPPPYSVPLPKVEYKSPPLPDVYSSPPPPLEYSPAPKVDYKSPPPPYYSPSPKVEYKSPPPPYVYNSPPPPYYSPSPKVDYKSPPPPYVYSSPPPPIYSPSPKVDYKSPPPPYVYSSPPPPYYSPSPKVEYKSPPSPYVYNSPPPSYYSPSPKVDYKSPPPPYVYSSPPPPYYSPSPKVVYKSPPPPYVYSSPPPPYYSPSPKVDYKSPPPPYVYSSPPPPYYSPSPKIVYKSPPPPYVYSSPPPPYYSPSPKVDYKSPPPPYVYSSPPPPYYSPSPKVVYKSPPPPYVYSSPPPPYYSPTPKVDYKSPPPPYVYSSPPPPYYSPSPKVDYKSPPPPYVYSSPPPPYYSPSPKIVYKSPPPPYVYSSPPPPYYTPSPKVVYKSPPPPYVYSSPPPPYYSPSPKVDYKSPPPPYVYSSPPPPYYSPSPKVVYKSPPPPYVYSSPPPPYYSPSPKVDYKSPPPPYVYSSPPPPYYSPSPKVLYKSPPPPYVYSSPPPPYYSPSPKVVYKSPPPPYVYSSPPPPYYSPSPKVVYKSPPPPYVYSSPPPPYYSPSPKVVYKSPPPPYVYSSPPPPYYSPSPKVYYKSPPSPYHAPSPKVLYKSPPHPHVCVCPPPPPCYSPSPKVHYKSPPPPYVYSSPPPPYYSPSPKVHYKSPPPPYVYSSPPPPYYSPSPKVVYKSPPPPYVYSSPPPPYYSPSPKVVYKSPPPPYVYSSPPPPYYSPSPKVVYKSPPPPYVYSSPPPPYYSPSPKVVYKSPPPPYVYSSPPPPYYSPSPKVVYKSPPPPYVYSSPPPPYYSPSPKVVYKSPPPPYVYSSPPPPYYSPSPKVDYKSPPPPYVYSSPPPPYYSPSPKVDYKSPPPPYVYSSPPPPYYSPSPKVDYKSPPPPYVYSSPPPPYYSPAPKVDYKSPPPPYVYSSPPPPYYSPSPKVDYKSPPPPYYSPSPKVDYKSPPPPYVYSSPPPPSYSPSPKTEY

SEQ ID NO: 89239 - protein, 975 aa, Arabidopsis thaliana
  peptide (1)..(975): Ceres Seq. ID no. 12716645
MVAAYEPYTDSSPPPYSVPLPKVEYKSPPLPDVYSSPPPPLEYSPAPKVDYKSPPPPYYSPSPKVEYKSPPPPYVYNSPPPPYYSPSPKVDYKSPPPPYVYSSPPPPIYSPSPKVDYKSPPPPYVYSSPPPPYYSPSPKVEYKSPPSPYVYNSPPPSYYSPSPKVDYKSPPPPYVYSSPPPPYYSPSPKVVYKSPPPPYVYSSPPPPYYSPSPKVDYKSPPPPYVYSSPPPPYYSPSPKIVYKSPPPPYVYSSPPPPYYSPSPKVDYKSPPPPYVYSSPPPPYYSPSPKVVYKSPPPPYVYSSPPPPYYSPTPKVDYKSPPPPYVYSSPPPPYYSPSPKVDYKSPPPPYVYSSPPPPYYSPSPKIVYKSPPPPYVYSSPPPPYYTPSPKVVYKSPPPPYVYSSPPPPYYSPSPKVDYKSPPPPYVYSSPPPPYYSPSPKVVYKSPPPPYVYSSPPPPYYSPSPKVDYKSPPPPYVYSSPPPPYYSPSPKVLYKSPPPPYVYSSPPPPYYSPSPKVVYKSPPPPYVYSSPPPPYYSPSPKVVYKSPPPPYVYSSPPPPYYSPSPKVVYKSPPPPYVYSSPPPPYYSPSPKVYYKSPPSPYHAPSPKVLYKSPPHPHVCVCPPPPPCYSPSPKVHYKSPPPPYVYSSPPPPYYSPSPKVHYKSPPPPYVYSSPPPPYYSPSPKVVYKSPPPPYVYSSPPPPYYSPSPKVVYKSPPPPYVYSSPPPPYYSPSPKVVYKSPPPPYVYSSPPPPYYSPSPKVVYKSPPPPYVYSSPPPPYYSPSPKVVYKSPPPPYVYSSPPPPYYSPSPKVVYKSPPPPYVYSSPPPPYYSPSPKVDYKSPPPPYVYSSPPPPYYSPSPKVDYKSPPPPYVYSSPPPPYYSPSPKVDYKSPPPPYVYSSPPPPYYSPAPKVDYKSPPPPYVYSSPPPPYYSPSPKVDYKSPPPPYYSPSPKVDYKSPPPPYVYSSPPPPSYSPSPKTEY

SEQ ID NO: 89240 - DNA, 1434 bp, Arabidopsis thaliana
  misc_feature (1)..(1434): Ceres Seq. ID no. 12716650
  misc_feature (1)..(1434): Ortholog of  Ceres SEQ ID NO 12612314 as cited in SEQ ID NO 51420
atgatgatgggaaatacatttggttcaagtttggcgagtttattcttcttgtgggcaactattcaacaaatcttcccaaaccatctcagaatcgccattaaagagtttcttatctccacaatacaacaactctcatttgtccagagattttccgacagattcatcaacttcttttcgccttatgtcgaaatcagcttctctcaatacgaagattatcaattcaatcacgcatttgcagccattgagacttaccttggggcaaaagcaactgataaagccaagcatctaagagcaagccaagttaaagagagtaaaggtttggtcttgaaacgagacgagactaaagtccgagatgagtatgaaggaggtactgtctggtgggagatggaaaccgactccacaggatatagaacattcaaactcactttccatagacgctcgcgagatattgtaaccgactcttacataaaatatgtttttgaagaaggcaaatcgattcaagccaagagcaagcagatgaagttgttcacaaataatccgagttctcactggggcactagcaagaagagtttttggagatatattgattttgagcatcccgcaagttttcacacgctagctatggatacaaagaagaaagaggagatcttgaatgatcttgctgcgtttagcaatggtaaagagtattacaagaaaataggtaaagcttggaagaggggttacttgctacatggaccaccagggaccggtaaatcaacaatgatcgctgcaatggcgaatcatttaaactatagtatctatgatcttgaactcacggctatacgtaacaactcggagttgaggaagctactcactgctacttctagcaagtcgatcatcgtgattgaagatatagattgttctttggatcttacgggaaagagaaagaaagagaaaaacttgatgacctcgagagaagatggagaacaaggtaccgaagaagacaagagttttgtaacactctcggggcttttgaacttcattgatggcatttggtctgcttgtggacaagagaggattattatcttcactacgaatcactttgagaaacttgacccggctttgatcaggagagggagaatggacatgcatattgagttgtcatactgttctttcgaggcgtttaagattctcgccaagaactatcttgatcttgatactcatcctctattcaagaagatcgaatcattattgaaggaaacgaagatcgcaccagctgatgttgctgagaacttgatgaagaagaatactgaaatagatgctgatggatctcttaaagatctaattcaagctctggaggggaagaagaagattcatggagctcaagtagatgaaccgaaggacaaatataccaagaagttttataaagcattttgcatgtcatctaaagcctga

SEQ ID NO: 89241 - protein, 477 aa, Arabidopsis thaliana
  peptide (1)..(477): Ceres Seq. ID no. 12716651
MMMGNTFGSSLASLFFLWATIQQIFPNHLRIAIKEFLISTIQQLSFVQRFSDRFINFFSPYVEISFSQYEDYQFNHAFAAIETYLGAKATDKAKHLRASQVKESKGLVLKRDETKVRDEYEGGTVWWEMETDSTGYRTFKLTFHRRSRDIVTDSYIKYVFEEGKSIQAKSKQMKLFTNNPSSHWGTSKKSFWRYIDFEHPASFHTLAMDTKKKEEILNDLAAFSNGKEYYKKIGKAWKRGYLLHGPPGTGKSTMIAAMANHLNYSIYDLELTAIRNNSELRKLLTATSSKSIIVIEDIDCSLDLTGKRKKEKNLMTSREDGEQGTEEDKSFVTLSGLLNFIDGIWSACGQERIIIFTTNHFEKLDPALIRRGRMDMHIELSYCSFEAFKILAKNYLDLDTHPLFKKIESLLKETKIAPADVAENLMKKNTEIDADGSLKDLIQALEGKKKIHGAQVDEPKDKYTKKFYKAFCMSSKA

SEQ ID NO: 89242 - protein, 476 aa, Arabidopsis thaliana
  peptide (1)..(476): Ceres Seq. ID no. 12716652
MMGNTFGSSLASLFFLWATIQQIFPNHLRIAIKEFLISTIQQLSFVQRFSDRFINFFSPYVEISFSQYEDYQFNHAFAAIETYLGAKATDKAKHLRASQVKESKGLVLKRDETKVRDEYEGGTVWWEMETDSTGYRTFKLTFHRRSRDIVTDSYIKYVFEEGKSIQAKSKQMKLFTNNPSSHWGTSKKSFWRYIDFEHPASFHTLAMDTKKKEEILNDLAAFSNGKEYYKKIGKAWKRGYLLHGPPGTGKSTMIAAMANHLNYSIYDLELTAIRNNSELRKLLTATSSKSIIVIEDIDCSLDLTGKRKKEKNLMTSREDGEQGTEEDKSFVTLSGLLNFIDGIWSACGQERIIIFTTNHFEKLDPALIRRGRMDMHIELSYCSFEAFKILAKNYLDLDTHPLFKKIESLLKETKIAPADVAENLMKKNTEIDADGSLKDLIQALEGKKKIHGAQVDEPKDKYTKKFYKAFCMSSKA

SEQ ID NO: 89243 - protein, 475 aa, Arabidopsis thaliana; identical to SEQ ID NO: 73765
  peptide (1)..(475): Ceres Seq. ID no. 12716653

SEQ ID NO: 89244 - DNA, 921 bp, Arabidopsis thaliana
  misc_feature (1)..(921): Ceres Seq. ID no. 12716713
  misc_feature (1)..(921): Ortholog of  Ceres SEQ ID NO 15175368 as cited in SEQ ID NO 60071
  misc_feature (1)..(921): Ortholog of  Ceres SEQ ID NO 13528157 as cited in SEQ ID NO 60102
  misc_feature (1)..(921): Ortholog of  Ceres SEQ ID NO 15225423 as cited in SEQ ID NO 64689
  misc_feature (1)..(921): Ortholog of  Ceres SEQ ID NO 15179340 as cited in SEQ ID NO 0
atggatatgactccaaaatcaccagaacccgaatccgaaactccgacccggatccaaccagctaaaccaatctctttcagtaacggaatcatcaaacgccaccaccaccaccaccacaacaacaacaaagtcacttacaaagaatgtctcaagaaccacgcggcggcgattggtggtcacgcgcttgacggttgcggcgaatttatgccgtctccttcgtcaacaccttccgatccaacttctctcaagtgtgcagcttgtggttgtcaccgtaacttccaccgccgtgaaactgacgattcctccgccgttccaccaccgtctcttcttccatcttcaacaacaaccgccgcaattgagtatcagcctcatcaccgtcatcatcctcctcctccgctagctcctccgttaccacgtagtcctaattcatcttctccgccgcctatctcttcctcctacatgcttttagctctctccggtaataataaaaccgcaccgttctcagatctaaacttcgccgccgcggctaaccatctctccgccacgcctggctcgaggaagcgattcaggacgaagtttagctcaaatcagaaagagaagatgcatgaattcgccgatcgaatcggttggaagattcagaaacgtgacgaagacgaagttcgtgatttttgccgtgagatcggagttgataaaggtgttctcaaagtttggatgcataataacaaaaactccttcaaattctccggcggaggagcaaccaccgtgcagagaaacgataacggtatcggcggcgagaacagtaacgatgatggagttcgcggtttagctaacgacggtgacggtggtggtgggagatttgagagtgatagtggaggagctgatggtggcggaaacgtaaacgcctcgtcgtcttcgtcgtga

SEQ ID NO: 89245 - protein, 306 aa, Arabidopsis thaliana; identical to SEQ ID NO: 49016
  peptide (1)..(306): Ceres Seq. ID no. 12716714

SEQ ID NO: 89246 - protein, 304 aa, Arabidopsis thaliana; identical to SEQ ID NO: 49017
  peptide (1)..(304): Ceres Seq. ID no. 12716715

SEQ ID NO: 89247 - protein, 238 aa, Arabidopsis thaliana
  peptide (1)..(238): Ceres Seq. ID no. 12716716
MPSPSSTPSDPTSLKCAACGCHRNFHRRETDDSSAVPPPSLLPSSTTTAAIEYQPHHRHHPPPPLAPPLPRSPNSSSPPPISSSYMLLALSGNNKTAPFSDLNFAAAANHLSATPGSRKRFRTKFSSNQKEKMHEFADRIGWKIQKRDEDEVRDFCREIGVDKGVLKVWMHNNKNSFKFSGGGATTVQRNDNGIGGENSNDDGVRGLANDGDGGGGRFESDSGGADGGGNVNASSSSS

SEQ ID NO: 89248 - DNA, 924 bp, Arabidopsis thaliana
  misc_feature (1)..(924): Ceres Seq. ID no. 12716736
  misc_feature (1)..(924): Ortholog of  Ceres SEQ ID NO 13595983 as cited in SEQ ID NO 68329
atggattcttcgccagtttctgctcgattcgatatattcgagatttatcgtagattctgtgctattcgatcaggacaacaattgtgtaataagaaaccctgtgatggcgaagaatctcaaagatttaacttgtctaaagaagcaataactcagctcttatatctagtagagaataagtttcaagctaggaactcgatttttgatgaattgtttaagttgatgtcacggctagacttaatggcaagttgttttgtatctcggttctttagttttcgggtggactttacggagtttacttgcttttacgattttgttttctttatgtgccgcgagaatgggcaaaagaatataactataagtagagctattactgcatggaaacttgttttggctgggagatttaggttacttaaccgctggtgtgactttatcgagaaaaatcaacggcacaatatttcagaagatacttggcaacaagtcttggcgtttagtcgttgtgtacatgagaatctagaaggatatgactctgaaggtgcatggcctgtcctaatagatgactttgtcgagcatatgtacagtattttaggaccgaataaggacactagcttgttctgcaaatgtggtgacacagaatctgaatcatgcctctatcaagaagatgagcatcacaaagattatcgccgcccacacacgggtttaagaaacattccaggtttaaagagaaaaacatcgaagaagaatgacgaagaagaagaagatgaagatgaagaagtgttagaaacccaaaactcttcttctttgctaaacttcaaacgaatcaaaaccagcaacagtccaaggtgttcatcaaagtccccttgttcaatcgagcgaagtctttcacaaggttttgcgagtcttttatcgactggagataaaccatga

SEQ ID NO: 89249 - protein, 307 aa, Arabidopsis thaliana
  peptide (1)..(307): Ceres Seq. ID no. 12716737
MDSSPVSARFDIFEIYRRFCAIRSGQQLCNKKPCDGEESQRFNLSKEAITQLLYLVENKFQARNSIFDELFKLMSRLDLMASCFVSRFFSFRVDFTEFTCFYDFVFFMCRENGQKNITISRAITAWKLVLAGRFRLLNRWCDFIEKNQRHNISEDTWQQVLAFSRCVHENLEGYDSEGAWPVLIDDFVEHMYSILGPNKDTSLFCKCGDTESESCLYQEDEHHKDYRRPHTGLRNIPGLKRKTSKKNDEEEEDEDEEVLETQNSSSLLNFKRIKTSNSPRCSSKSPCSIERSLSQGFASLLSTGDKP

SEQ ID NO: 89250 - protein, 234 aa, Arabidopsis thaliana
  peptide (1)..(234): Ceres Seq. ID no. 12716738
MSRLDLMASCFVSRFFSFRVDFTEFTCFYDFVFFMCRENGQKNITISRAITAWKLVLAGRFRLLNRWCDFIEKNQRHNISEDTWQQVLAFSRCVHENLEGYDSEGAWPVLIDDFVEHMYSILGPNKDTSLFCKCGDTESESCLYQEDEHHKDYRRPHTGLRNIPGLKRKTSKKNDEEEEDEDEEVLETQNSSSLLNFKRIKTSNSPRCSSKSPCSIERSLSQGFASLLSTGDKP

SEQ ID NO: 89251 - protein, 228 aa, Arabidopsis thaliana
  peptide (1)..(228): Ceres Seq. ID no. 12716739
MASCFVSRFFSFRVDFTEFTCFYDFVFFMCRENGQKNITISRAITAWKLVLAGRFRLLNRWCDFIEKNQRHNISEDTWQQVLAFSRCVHENLEGYDSEGAWPVLIDDFVEHMYSILGPNKDTSLFCKCGDTESESCLYQEDEHHKDYRRPHTGLRNIPGLKRKTSKKNDEEEEDEDEEVLETQNSSSLLNFKRIKTSNSPRCSSKSPCSIERSLSQGFASLLSTGDKP

SEQ ID NO: 89252 - DNA, 936 bp, Arabidopsis thaliana
  misc_feature (1)..(936): Ceres Seq. ID no. 12716751
  misc_feature (1)..(936): Ortholog of  Ceres SEQ ID NO 13661768 as cited in SEQ ID NO 61427
atgtcttcattctgtttatcaaaacacctcattttagttcctatcttggtcatgatggcacaactgctccttatccgaaacgttttgtccttgaacatgaacaatccgtacttgtaccataaatgctcagccaatcaaggggagtacaagctaggaagcctctacaaaaaatccctcgattctggcatccaacaattgtcgaaagataatgaagtttttcgtggcggtttcgtctatatggaccacaccgatcctaatggaactcgttttaaagaatcagagaagagagaagatgaaagagatttctgtgtgaataatatcccaatacgttttgagcctgaagtaagggtctacatcacctttcaatgccgtggagacatttacgggtcccactgtcgctcttgctttgccactgcccgggctgagctttttaagagatgtccgagagataaggcggcaataatatggtacgatcaatgttttctcgagttttcttcgatcagtactggagggaagatcaattacgatgacaatatctgtattgataccgcaagggcaaggccgaatgcgaaaactcataccggtgatgattcagttttggagtttttgagactcttcgaaaatctgacaaatatagccgtcactaaaagaaataacttcgtaaaagatgtggagaaaccggcactatatgcggcaggagagaaaaggttcggaaataagaagatctatgtaatggttcagtgtacgcatgacttaactcctagggcttgtgtggagtgtgtgaatcataatgtccggcaatttcaagattgctatgaagataaaccagtaggtttgaaaaaaggtgctagagttttgggtaggagctgtaactttaggtttgagcgttacccttttgttaacgccaagaccagtcctaactatttgaagttctaa

SEQ ID NO: 89253 - protein, 311 aa, Arabidopsis thaliana
  peptide (1)..(311): Ceres Seq. ID no. 12716752
MSSFCLSKHLILVPILVMMAQLLLIRNVLSLNMNNPYLYHKCSANQGEYKLGSLYKKSLDSGIQQLSKDNEVFRGGFVYMDHTDPNGTRFKESEKREDERDFCVNNIPIRFEPEVRVYITFQCRGDIYGSHCRSCFATARAELFKRCPRDKAAIIWYDQCFLEFSSISTGGKINYDDNICIDTARARPNAKTHTGDDSVLEFLRLFENLTNIAVTKRNNFVKDVEKPALYAAGEKRFGNKKIYVMVQCTHDLTPRACVECVNHNVRQFQDCYEDKPVGLKKGARVLGRSCNFRFERYPFVNAKTSPNYLKF

SEQ ID NO: 89254 - protein, 294 aa, Arabidopsis thaliana
  peptide (1)..(294): Ceres Seq. ID no. 12716753
MMAQLLLIRNVLSLNMNNPYLYHKCSANQGEYKLGSLYKKSLDSGIQQLSKDNEVFRGGFVYMDHTDPNGTRFKESEKREDERDFCVNNIPIRFEPEVRVYITFQCRGDIYGSHCRSCFATARAELFKRCPRDKAAIIWYDQCFLEFSSISTGGKINYDDNICIDTARARPNAKTHTGDDSVLEFLRLFENLTNIAVTKRNNFVKDVEKPALYAAGEKRFGNKKIYVMVQCTHDLTPRACVECVNHNVRQFQDCYEDKPVGLKKGARVLGRSCNFRFERYPFVNAKTSPNYLKF

SEQ ID NO: 89255 - protein, 293 aa, Arabidopsis thaliana
  peptide (1)..(293): Ceres Seq. ID no. 12716754
MAQLLLIRNVLSLNMNNPYLYHKCSANQGEYKLGSLYKKSLDSGIQQLSKDNEVFRGGFVYMDHTDPNGTRFKESEKREDERDFCVNNIPIRFEPEVRVYITFQCRGDIYGSHCRSCFATARAELFKRCPRDKAAIIWYDQCFLEFSSISTGGKINYDDNICIDTARARPNAKTHTGDDSVLEFLRLFENLTNIAVTKRNNFVKDVEKPALYAAGEKRFGNKKIYVMVQCTHDLTPRACVECVNHNVRQFQDCYEDKPVGLKKGARVLGRSCNFRFERYPFVNAKTSPNYLKF

SEQ ID NO: 89256 - DNA, 504 bp, Arabidopsis thaliana
  misc_feature (1)..(504): Ceres Seq. ID no. 12716784
  misc_feature (1)..(504): Ortholog of  Ceres SEQ ID NO 13596163 as cited in SEQ ID NO 60864
  misc_feature (1)..(504): Ortholog of  Ceres SEQ ID NO 15226347 as cited in SEQ ID NO 61639
atggacctcgaggcaagaaaccttccacccaatgttaaatccagtctccttgtcaaattaagggaatacaaatctgatcttaacaatttcaagacggaagtgaagagaatcacatctggaaacttaaacgctactgctcgagatgagttactagaagctggtatggctgacacattgacggcttcagctgatcaaagatcaagattgatgatgtcaacagaccatttaggccgaaccacagacagaatcaaggacagtaggagaacgatactggagacagaagagcttggtgtttcaatccttcaggatttgcacgggcagagacagtctctcttacgggcccatgaaacgcttcatggagtcgatgataacgtcggaaagagcaagaaaatattgacaacaatgactaggagaatgaatagaaacaaatggaccatcggtgcgataatcacagtccttgtcctcgccattatctttatcttgtacttcaaactcaccaggtga

SEQ ID NO: 89257 - protein, 167 aa, Arabidopsis thaliana
  peptide (1)..(167): Ceres Seq. ID no. 12716785
MDLEARNLPPNVKSSLLVKLREYKSDLNNFKTEVKRITSGNLNATARDELLEAGMADTLTASADQRSRLMMSTDHLGRTTDRIKDSRRTILETEELGVSILQDLHGQRQSLLRAHETLHGVDDNVGKSKKILTTMTRRMNRNKWTIGAIITVLVLAIIFILYFKLTR

SEQ ID NO: 89258 - protein, 113 aa, Arabidopsis thaliana
  peptide (1)..(113): Ceres Seq. ID no. 12716786
MADTLTASADQRSRLMMSTDHLGRTTDRIKDSRRTILETEELGVSILQDLHGQRQSLLRAHETLHGVDDNVGKSKKILTTMTRRMNRNKWTIGAIITVLVLAIIFILYFKLTR

SEQ ID NO: 89259 - protein, 98 aa, Arabidopsis thaliana
  peptide (1)..(98): Ceres Seq. ID no. 12716787
MMSTDHLGRTTDRIKDSRRTILETEELGVSILQDLHGQRQSLLRAHETLHGVDDNVGKSKKILTTMTRRMNRNKWTIGAIITVLVLAIIFILYFKLTR

SEQ ID NO: 89260 - DNA, 783 bp, Arabidopsis thaliana
  misc_feature (1)..(783): Ceres Seq. ID no. 12716831
  misc_feature (1)..(783): Ortholog of  Ceres SEQ ID NO 13594163 as cited in SEQ ID NO 60426
atgtcgggacaaagaagattggatggcaagatcgtaattataacaggcggggctagtgggatcggagctgaagcagcgaggttgttcacggaccatggagctaaagttgtcatcgttgacttacaagaggagcttggtcaaaacgtcgccgtttcgatcgggctagacaaagcaagtttttaccgttgcgatataacggatgagacggaagttgagaacgccgttaagttcaccgttgaaaaacacggaaagcttgacgttctgtttagtaacgccggggtcatggaaccgcatggaagcattcttgatttggatcttgaggcgtttgatcgaacgatggccgtcaacgttcgcggtgcggctgcgtttataaaacatgcagcgcgttcgatggtggctagtggaactcgtggctccattgtttgtacaacgagtgtgacggctgagattggtggtccgggacctcacagttacacagcgtcgaaacacgcgcttctcgggttggttcgatcagcgtgtggcgggttggggaagtacgggattagagtcaacggtgttgcaccgtatggagtagcaacggggttaactagctacaacgaggaaactgtgaagatggttgaggattactgttcagccacggcgattctcaaaggtgttgtacttaaagctcgacatgtggcagatgcagctttgtttttggcttctgatgattcggtttatattagtggtcaaaacttgggggttgacggcggttatagcgtcgttaagctgacatcgaattaa

SEQ ID NO: 89261 - protein, 260 aa, Arabidopsis thaliana
  peptide (1)..(260): Ceres Seq. ID no. 12716832
MSGQRRLDGKIVIITGGASGIGAEAARLFTDHGAKVVIVDLQEELGQNVAVSIGLDKASFYRCDITDETEVENAVKFTVEKHGKLDVLFSNAGVMEPHGSILDLDLEAFDRTMAVNVRGAAAFIKHAARSMVASGTRGSIVCTTSVTAEIGGPGPHSYTASKHALLGLVRSACGGLGKYGIRVNGVAPYGVATGLTSYNEETVKMVEDYCSATAILKGVVLKARHVADAALFLASDDSVYISGQNLGVDGGYSVVKLTSN

SEQ ID NO: 89262 - protein, 166 aa, Arabidopsis thaliana
  peptide (1)..(166): Ceres Seq. ID no. 12716833
MEPHGSILDLDLEAFDRTMAVNVRGAAAFIKHAARSMVASGTRGSIVCTTSVTAEIGGPGPHSYTASKHALLGLVRSACGGLGKYGIRVNGVAPYGVATGLTSYNEETVKMVEDYCSATAILKGVVLKARHVADAALFLASDDSVYISGQNLGVDGGYSVVKLTSN

SEQ ID NO: 89263 - protein, 148 aa, Arabidopsis thaliana
  peptide (1)..(148): Ceres Seq. ID no. 12716834
MAVNVRGAAAFIKHAARSMVASGTRGSIVCTTSVTAEIGGPGPHSYTASKHALLGLVRSACGGLGKYGIRVNGVAPYGVATGLTSYNEETVKMVEDYCSATAILKGVVLKARHVADAALFLASDDSVYISGQNLGVDGGYSVVKLTSN

SEQ ID NO: 89264 - DNA, 1794 bp, Arabidopsis thaliana
  misc_feature (1)..(1794): Ceres Seq. ID no. 12716936
  misc_feature (1)..(1794): Ortholog of  Ceres SEQ ID NO 13593889 as cited in SEQ ID NO 53305
  misc_feature (1)..(1794): Ortholog of  Ceres SEQ ID NO 13581959 as cited in SEQ ID NO 56156
  misc_feature (1)..(1794): Ortholog of  Ceres SEQ ID NO 15171809 as cited in SEQ ID NO 57329
gggaagcgacgactgactcttcttcctcctcctcctccacctcttgtttaggttcttagcactgaaatttgatcagaaggtgttgacggtgtagagcttcacgaaacataaactttcatttcttctagcttcttgatttgctcttaaaggtgcatgttgaagtgattgaaagcgatttacatgtgacttgcagctcggtcagacattatacattacactcaacacgagattggaaaggatgcttgagaatccaaagttcgatttgcacgctgttggcaatcacaacaacgacaacaattactatgccttcacccaagacttttatcaaaagctcggggaagaaggtacaaacatgtctgttgacagtatgcagacaagtaatgctggagggtctgtgtcaatgtctgtcgataacagtagcgttggttcgagtgatgctcttattggccatcctggtttgaagcctatgcgccatccctactctctctcggatggccaaagcgtatttcggccaggaaaagttactcatgcacttaacgatgatgccttagcacaagcgttgatggatagtaagtatccaaccgagggactggtgaactatgaagagtggacaatagatctgaggaaactacatatgggtcctgcttttgctcaaggggcttttggaaagttatacagagggacttacaacggagaagatgtagccattaagctactcgagaggtcagatagcaaccctgaaaaggcacaagccctcgaacagcagtttcagcaggaagtttctatgcttgcatttttgaagcatcctaacatcgttaggtttattggtgcgtgcattaaaccgatggtgtggtgcatcgtgactgaatatgcaaaaggagggtctgtcagacagtttctgactaagagacaaaaccgagctgtgcctttgaagttagctgttatgcaggcgttggatgttgccaggggtatggcttacgtccatgagcgcaactttatacaccgggatctaaagtcagataacctcctcatatcagctgatcggtccatcaagattgctgattttggtgttgcaagaattgaagttcaaaccgaagggatgacaccagagactggaacttacagatggatggcaccagagatgatccagcacagaccctacactcaaaaagtggacgtgtatagttttggaatcgtgctgtgggagttgattacaggtctgttaccgttccagaacatgacggcggttcaggctgcatttgcagtggtgaacagaggagtccgtccaacagtcccagcagattgtcttcctgtgcttggagagatcatgacacgttgctgggatgcggaccctgaagtccgtccttgttttgcagagattgtcaatcttctggaggcggcggaaactgagataatgacgaatgtgagaaaagcccgtttcagatgttgcatgacgcaaccaatgacagtcgactaatctgttgtgaagaaagagagaggagaagaagaggaatgaacaaagaagagaacataaaagaaaaaaacagagagagagagagagaaagcaagaagggctttagatatatgtaagtttgtgtgtgtatctatctatctatatatatatatccgattgtatctcttttctcaagataggagaagtaacccaaccattttagactactgattttctagatttttgtattaagaaagaacaacgaaaaaattagatgtacggtgattgtctcaagtgtttggtttagttttccttgaatttgatgatgcatacttttctcc

SEQ ID NO: 89265 - protein, 412 aa, Arabidopsis thaliana; identical to SEQ ID NO: 43168
  peptide (1)..(412): Ceres Seq. ID no. 12716937

SEQ ID NO: 89266 - protein, 374 aa, Arabidopsis thaliana; identical to SEQ ID NO: 43169
  peptide (1)..(374): Ceres Seq. ID no. 12716938

SEQ ID NO: 89267 - protein, 369 aa, Arabidopsis thaliana; identical to SEQ ID NO: 43170
  peptide (1)..(369): Ceres Seq. ID no. 12716939

SEQ ID NO: 89268 - DNA, 2179 bp, Arabidopsis thaliana
  misc_feature (1)..(2179): Ceres Seq. ID no. 12716983
  misc_feature (1)..(2179): Ortholog of  Ceres SEQ ID NO 15225419 as cited in SEQ ID NO 0
tttctcttctctgtctttttcagcttctgaagttacttgtttcagttcccgatgatcaattcttagtttttttggcttgttttcttcgtctctctttcatcaggcctttggagttttgtgttaccattttcgctcgcgtcattactggtgttagggttttcttcaaaagcttcttaatccgtcgaaattgctcttttctctccctcattacagagataaatggcttcaaagattattgctggcaagccggatgataccgagtatgaaatcattgaaggtgagtctgagagcgctttagcagcggggacaagcccttggatgaattcatcaacgttgaagcttcgacatcgaattggaagaggtcccttcggtgatgtttggctggctactcatcatcagtcaactgaggactatgatgagcatcatgaagtggccatcaaaatgctttatcccatcaaggaagatcaaagaagggttgtggtagataagtttgaagatctcttctctaaatgtcaaggactagagaatgtctgtctgctcaggggagtctctagtatcaatggaaagatatgtgtcgtcatgaaattctacgagggctctcttggtgacaagatggctcggcttaaaggaggaaagctttcactgccagatgttttgagatacggggttgatctggctacagggatcctggagttgcactcaaaagggtttctcattctcaatctcaagccctctaactttcttctcagtgataacgacaaggccatcctcggggatgttgggatcccttatctccttcttagtatccctttaccaagttctgatatgacagagagacttggaactccaaactatatggcaccagaacagtggcaaccggatgtcagaggtcccatgtcctttgagactgattcttggggatttggttgcagcattgttgaaatgctgactggtgtacaaccttggtctgggagatctgccgatgaaatatatgatttggtggtgagaaagcaagaaaagcttagtatccccagtagcataccgcctcctctcgagaacctacttcggggttgctttatgtatgatcttcgaagccgaccttcgatgactgacatcttactcgtcttaaagagcttgcagaactcggaggaggaacaggtcaggagaggcattgatagtagagaaatcaggaagagctcggctactcttggttatacagaatggtttctttcaaaggatcatctgcaagtgcgcgacaccgtgcgttcaagaaagcctgccaattcgtgtaagcatgagaacatggatgtgccagaaggaatggtggttggtttagaacgtgactccacagacccagatggatttgtgctagttaaagtccatggtgtacatgatccattaagggttcacgtatctgttcttgaacgggtaactaacggcttagcttctggagattgggtgcgtctgaaggtcaggaaagacaagaggcactctccggttggtgttctccattcaattgaccgtgagggaaatgtagctgttggatttattgggttgccaactctctggaaagggacatcatcgcagcttcagatggctaaagtatacagtgtgggtcaatttgtgaaactcaaagccaatgttgtcatcccgagattcaaatggatgcgtaaaggtagaggtatttgggcaactggcaggatctctcaggttctaccaaacggttgccttgaagtggacttccctggaatgttaccttttggagaggaacatggaagctatcttgcagatccggctgaagtagagattgtgaatttcaatacatgtcaaggagctgtggaaaaatatcaacatctggaggattttcattgggctgtgagacctttgcttattgctatgggtctattgacagcgatgaagttagggatctgtgtcaggaagaaaataggaaggtcaaaggatgggaaacaacgcgatggctcgactggacaaggtgactgtaagattccggatggtaagggctctgacaaatctaaatggcttgtgttcttttaggtctgctatgagacacagaccttgtctggtccatatattatactgttctagtcataataacgtttcatgtacataatgacgtttttcttttttgctctttaaaattaccaaaaagctttcacgc

SEQ ID NO: 89269 - protein, 611 aa, Arabidopsis thaliana; identical to SEQ ID NO: 45166
  peptide (1)..(611): Ceres Seq. ID no. 12716984

SEQ ID NO: 89270 - protein, 578 aa, Arabidopsis thaliana; identical to SEQ ID NO: 45167
  peptide (1)..(578): Ceres Seq. ID no. 12716985

SEQ ID NO: 89271 - protein, 537 aa, Arabidopsis thaliana; identical to SEQ ID NO: 45168
  peptide (1)..(537): Ceres Seq. ID no. 12716986

SEQ ID NO: 89272 - DNA, 948 bp, Arabidopsis thaliana
  misc_feature (1)..(948): Ceres Seq. ID no. 12717108
  misc_feature (1)..(948): Ortholog of  Ceres SEQ ID NO 14311857 as cited in SEQ ID NO 51473
  misc_feature (1)..(948): Ortholog of  Ceres SEQ ID NO 14303094 as cited in SEQ ID NO 66388
atggttggtggtggaaacaggagagatgagggatcgatgccgattcagaacaccaacttgtttgctgctttggatacttcgaggaagaagaagaagtctgataaggctggtaagagcaaagcttcctctaagagagaagattcacagaaggagcctgagccacaggttttctgggcacctacgcctctcaaagcaaaggcttgggctgatatcgatagcgatgatgaagatgatgattattacgctaccactgctccacctcagtccctgtggagcacttctgaagcctcccattcagatgctaaagacgttcccgctgaggaaattgaaagcgaagaagacactcttgatgatggagatgatgatgatgtggaggaagatcacgagcagggaacagagacacaagttcatccagaagcagagcctgaggtgaaaaaggctcctgaagttcgtgctcctcctaaggaggcagagaggcaactttccaagaaagagaggaaaaagaaggaacttgctgagcttgaggctttgctagcagattttggagttgcaaccaaagatgagaatggtcaacaagactctcaagataagggggagaagaaagaagtgaatgatgagggagagaagaaggagaacacaaccggagaatcaaaggcctcaaagaagaagaaaaagaaggacaaacagaaggagctaaaagaatcccagagtgaagtgaagagcaactcggatgctgcaagtgagtccgctgagcaggaggagtcttcttcttccatcgacgtcaaagaacggctaaagaagattgcatcaatgaagaagaagaaatcaagcaaggaggttgatggtgcttcaacagctgctgcaaaggaagcagctgcgaggaaggcaaagttggccgcagcgaagaaaaaagaaaagaaaaactacaatcagcaacctgtgaggtga

SEQ ID NO: 89273 - protein, 315 aa, Arabidopsis thaliana
  peptide (1)..(315): Ceres Seq. ID no. 12717109
MVGGGNRRDEGSMPIQNTNLFAALDTSRKKKKSDKAGKSKASSKREDSQKEPEPQVFWAPTPLKAKAWADIDSDDEDDDYYATTAPPQSLWSTSEASHSDAKDVPAEEIESEEDTLDDGDDDDVEEDHEQGTETQVHPEAEPEVKKAPEVRAPPKEAERQLSKKERKKKELAELEALLADFGVATKDENGQQDSQDKGEKKEVNDEGEKKENTTGESKASKKKKKKDKQKELKESQSEVKSNSDAASESAEQEESSSSIDVKERLKKIASMKKKKSSKEVDGASTAAAKEAAARKAKLAAAKKKEKKNYNQQPVR

SEQ ID NO: 89274 - protein, 303 aa, Arabidopsis thaliana
  peptide (1)..(303): Ceres Seq. ID no. 12717110
MPIQNTNLFAALDTSRKKKKSDKAGKSKASSKREDSQKEPEPQVFWAPTPLKAKAWADIDSDDEDDDYYATTAPPQSLWSTSEASHSDAKDVPAEEIESEEDTLDDGDDDDVEEDHEQGTETQVHPEAEPEVKKAPEVRAPPKEAERQLSKKERKKKELAELEALLADFGVATKDENGQQDSQDKGEKKEVNDEGEKKENTTGESKASKKKKKKDKQKELKESQSEVKSNSDAASESAEQEESSSSIDVKERLKKIASMKKKKSSKEVDGASTAAAKEAAARKAKLAAAKKKEKKNYNQQPVR

SEQ ID NO: 89275 - DNA, 1881 bp, Arabidopsis thaliana
  misc_feature (1)..(1881): Ceres Seq. ID no. 12717111
  misc_feature (1)..(1881): Ortholog of  Ceres SEQ ID NO 14303348 as cited in SEQ ID NO 59561
atgaaggaagacgagcgaaccgaaaaggctatccggagtttattgaagcttcctgagaaccggagatgcatcaattgcaatagtctgggtccacaatatgtatgctcaactttctggacttttgtctgcgttaactgcagcggaatccaccgagaattcacacatcgtgttaaatctgtatcaatggccaagttcacagcagacgaagttagtgcacttcgcgcaggaggaaacgagcgagccagacaaatttattttaaagaatgggatgctcaccgtgatggttaccccgatcgcagtaatattttcaagctccgagatttcatcaggagtgtttatgtggacaaaagatacagtagcagtgacaagatctcacagcagaaatcggatgtcacagaagattacagggaaagtaagaagaccagtgcacatgttctcggatctagaagtttacactctgtggataaatctgacatcgaaagatctagtgctgctgggaggagtggaagtgaatctctaaggttttattttgatgacaagaaccataaacaacaacatgttacgcataatccaaggtctagaggtttaccaaagagtcctattcgctttgagatagtcgatgataggtttagagacgatgggagtgttaagagatatgatgcacgtaaagattcaagaggaagctccaaatcacttgacctctcaagtaacaaagacatgccaagctttcccattgtacgccataccagcgaactcaatattgtaaaagttgagaaaaagaaggatccagtgaataatcagatgactgcatcatctgagaaaatggaaattcctagaagtttaattgatgatgtaccagtttcagaactatctgatgaaggcattattaagaattcaagtgaaattcctgcatctctaaagaccactgaggagccagctcctaattctttggaagctttgttgtttggatcctctgttccttctgttgtccctggaacaaacaactatgaactatggaacacaagtgatatttcctctactgaaaactataccgcagttaacctcgggacccagacaatgccaggaataccagacagtgttacctcttttgccacatcaccaacaactgcacatgctcattccggttcttcaggtccagtggtacctgttgctcctgataacttaaatacaaaagagacggctacacttgcaaataaccagacaacactggctatcacagattatgctcatggagttggatctgagcatcatcaagatgatgagacacaatctagcataagaaaggcgcttcctgaggaccttttcactggaggcttctcatttgcccctcagcaagttcatggtcaacatcatggcatgggatatggcatgcaatattatcaatatcctgtggctatgggagccttaacatatacagcaaaagcagcaaatccctttgatcttagctatgatgatacagctccaaaccaaacaccacaatttcctactatggcatatgtgcaaggaggaggcttacctcacgtgtcatctccaatagggtattcagattcttcaagtccagctgcagattccattggactgatgacctctcagtcaccttttcatgcaaccgctttatccccaaactctccagctcttgcatcccatctttcccctggtgcactaatggggcagcaatcacaggtgaatatgtccccatcattcaggcaagagtatagtggtcttggtacagaaggaaatacgttcaacggagtacatacatttcatcaagcaaacaatggatatccttctgcaaacccaaatgcttatagcttgttctattggccatttgacaatcagattttagtgtgcatgtgttaa

SEQ ID NO: 89276 - protein, 626 aa, Arabidopsis thaliana
  peptide (1)..(626): Ceres Seq. ID no. 12717112
MKEDERTEKAIRSLLKLPENRRCINCNSLGPQYVCSTFWTFVCVNCSGIHREFTHRVKSVSMAKFTADEVSALRAGGNERARQIYFKEWDAHRDGYPDRSNIFKLRDFIRSVYVDKRYSSSDKISQQKSDVTEDYRESKKTSAHVLGSRSLHSVDKSDIERSSAAGRSGSESLRFYFDDKNHKQQHVTHNPRSRGLPKSPIRFEIVDDRFRDDGSVKRYDARKDSRGSSKSLDLSSNKDMPSFPIVRHTSELNIVKVEKKKDPVNNQMTASSEKMEIPRSLIDDVPVSELSDEGIIKNSSEIPASLKTTEEPAPNSLEALLFGSSVPSVVPGTNNYELWNTSDISSTENYTAVNLGTQTMPGIPDSVTSFATSPTTAHAHSGSSGPVVPVAPDNLNTKETATLANNQTTLAITDYAHGVGSEHHQDDETQSSIRKALPEDLFTGGFSFAPQQVHGQHHGMGYGMQYYQYPVAMGALTYTAKAANPFDLSYDDTAPNQTPQFPTMAYVQGGGLPHVSSPIGYSDSSSPAADSIGLMTSQSPFHATALSPNSPALASHLSPGALMGQQSQVNMSPSFRQEYSGLGTEGNTFNGVHTFHQANNGYPSANPNAYSLFYWPFDNQILVCMC

SEQ ID NO: 89277 - protein, 565 aa, Arabidopsis thaliana
  peptide (1)..(565): Ceres Seq. ID no. 12717113
MAKFTADEVSALRAGGNERARQIYFKEWDAHRDGYPDRSNIFKLRDFIRSVYVDKRYSSSDKISQQKSDVTEDYRESKKTSAHVLGSRSLHSVDKSDIERSSAAGRSGSESLRFYFDDKNHKQQHVTHNPRSRGLPKSPIRFEIVDDRFRDDGSVKRYDARKDSRGSSKSLDLSSNKDMPSFPIVRHTSELNIVKVEKKKDPVNNQMTASSEKMEIPRSLIDDVPVSELSDEGIIKNSSEIPASLKTTEEPAPNSLEALLFGSSVPSVVPGTNNYELWNTSDISSTENYTAVNLGTQTMPGIPDSVTSFATSPTTAHAHSGSSGPVVPVAPDNLNTKETATLANNQTTLAITDYAHGVGSEHHQDDETQSSIRKALPEDLFTGGFSFAPQQVHGQHHGMGYGMQYYQYPVAMGALTYTAKAANPFDLSYDDTAPNQTPQFPTMAYVQGGGLPHVSSPIGYSDSSSPAADSIGLMTSQSPFHATALSPNSPALASHLSPGALMGQQSQVNMSPSFRQEYSGLGTEGNTFNGVHTFHQANNGYPSANPNAYSLFYWPFDNQILVCMC

SEQ ID NO: 89278 - protein, 387 aa, Arabidopsis thaliana
  peptide (1)..(387): Ceres Seq. ID no. 12717114
MPSFPIVRHTSELNIVKVEKKKDPVNNQMTASSEKMEIPRSLIDDVPVSELSDEGIIKNSSEIPASLKTTEEPAPNSLEALLFGSSVPSVVPGTNNYELWNTSDISSTENYTAVNLGTQTMPGIPDSVTSFATSPTTAHAHSGSSGPVVPVAPDNLNTKETATLANNQTTLAITDYAHGVGSEHHQDDETQSSIRKALPEDLFTGGFSFAPQQVHGQHHGMGYGMQYYQYPVAMGALTYTAKAANPFDLSYDDTAPNQTPQFPTMAYVQGGGLPHVSSPIGYSDSSSPAADSIGLMTSQSPFHATALSPNSPALASHLSPGALMGQQSQVNMSPSFRQEYSGLGTEGNTFNGVHTFHQANNGYPSANPNAYSLFYWPFDNQILVCMC

SEQ ID NO: 89279 - DNA, 1656 bp, Arabidopsis thaliana
  misc_feature (1)..(1656): Ceres Seq. ID no. 12717172
  misc_feature (1)..(1656): Ortholog of  Ceres SEQ ID NO 15170956 as cited in SEQ ID NO 55034
atggagaatatgtttcgtttgatggatcaagatcaggatttaactaataaccggtgcatttgggtcaacggaccggtcatcgtcggagctggaccgtcggggttagcgacggcggcttgtctccatgaacaaaacgttcctttcgttgttctcgagagagcagattgtattgcttctctatggcaaaaacgtacttacgatcgtctcaagcttcaccttcctaagcagttttgtcaattaccgaaaatgcccttccctgaggacttcccggagtacccgacgaagcgtcagttcatcgactaccttgagtcttacgctacccggttcgagatcaaccctaagttcaacgagtgtgtgcagactgctcggttcgatgagaccagtggcttgtggcgagtcaagaccgtgtcgaagagtgagtcgactcagaccgaggtcgagtatatttgccggtggcttgtggtggctacgggagaaaatgcggagagagtgatgccggagattgatggtctttctgagttttccggtgaggtgattcacgcttgtgattacaagtccggcgagaaattcgccgggaaaaaagttctcgtcgttggttgtggaaactccggcatggaagtttctcttgacctagcaaaccatttcgctaagccttccatggtcgtgagaagctctcttcacgtgatgccgagggaagtaatgggtaaatcaacgtttgagcttgcaatgaagatgttaagatggtttcctctatggttagtcgacaagatattgttggttttaagttggatggttcttggaaacatcgagaaatacggtttgaaacgaccagagatgggtccaatggagctaaaaagcgtgaaaggcaagacaccggtgcttgacatcggagctatagagaagatccggttaggaaagatcaacgtggttccagggatcaaaaggtttaacggaaacaaagtcgaacttgtcaatggagaacaactagacgtagactcagttgttctagctactggttaccgcagcaacgtcccatattggctacaagagaatgagttctttgcaaagaatggtttcccaaagacagtagctgacaacaatggttggaaaggaaggacaggattgtatgcggttgggtttacgaggaaagggctctcaggtgcgtcaatggacgcggttaagatcgcacaagacataggctctgtttggcaacttgaaacaaaacaacccacgaaacgctcaaggggttctcttcgaaggaaaaaaaagattagagttttaggacagagatcactgacaaaagagaagagccctctcctgaagacccaaagcgaatcaaagggtgttgtgcgtgtttttttgttacctcctccacttagtgttttgggcgttttgtgtaaacagaggaagatgtggccttttgttttctacttttttacaatctttttttttacatacatttttaacaattattttttgggggtgggttctttgatttttttgtacaagtttatgttaacatctatattgtatacacttttctatttttttttaagccaaatatattttgatttcaatttaccatctttctatagtcttgccaacctctcttactttccacttactgaacaaatcaccatgttttttagacagtag

SEQ ID NO: 89280 - protein, 551 aa, Arabidopsis thaliana
  peptide (1)..(551): Ceres Seq. ID no. 12717173
MENMFRLMDQDQDLTNNRCIWVNGPVIVGAGPSGLATAACLHEQNVPFVVLERADCIASLWQKRTYDRLKLHLPKQFCQLPKMPFPEDFPEYPTKRQFIDYLESYATRFEINPKFNECVQTARFDETSGLWRVKTVSKSESTQTEVEYICRWLVVATGENAERVMPEIDGLSEFSGEVIHACDYKSGEKFAGKKVLVVGCGNSGMEVSLDLANHFAKPSMVVRSSLHVMPREVMGKSTFELAMKMLRWFPLWLVDKILLVLSWMVLGNIEKYGLKRPEMGPMELKSVKGKTPVLDIGAIEKIRLGKINVVPGIKRFNGNKVELVNGEQLDVDSVVLATGYRSNVPYWLQENEFFAKNGFPKTVADNNGWKGRTGLYAVGFTRKGLSGASMDAVKIAQDIGSVWQLETKQPTKRSRGSLRRKKKIRVLGQRSLTKEKSPLLKTQSESKGVVRVFLLPPPLSVLGVLCKQRKMWPFVFYFFTIFFFTYIFNNYFLGVGSLIFLYKFMLTSILYTLFYFFLSQIYFDFNLPSFYSLANLSYFPLTEQITMFFRQ

SEQ ID NO: 89281 - protein, 548 aa, Arabidopsis thaliana
  peptide (1)..(548): Ceres Seq. ID no. 12717174
MFRLMDQDQDLTNNRCIWVNGPVIVGAGPSGLATAACLHEQNVPFVVLERADCIASLWQKRTYDRLKLHLPKQFCQLPKMPFPEDFPEYPTKRQFIDYLESYATRFEINPKFNECVQTARFDETSGLWRVKTVSKSESTQTEVEYICRWLVVATGENAERVMPEIDGLSEFSGEVIHACDYKSGEKFAGKKVLVVGCGNSGMEVSLDLANHFAKPSMVVRSSLHVMPREVMGKSTFELAMKMLRWFPLWLVDKILLVLSWMVLGNIEKYGLKRPEMGPMELKSVKGKTPVLDIGAIEKIRLGKINVVPGIKRFNGNKVELVNGEQLDVDSVVLATGYRSNVPYWLQENEFFAKNGFPKTVADNNGWKGRTGLYAVGFTRKGLSGASMDAVKIAQDIGSVWQLETKQPTKRSRGSLRRKKKIRVLGQRSLTKEKSPLLKTQSESKGVVRVFLLPPPLSVLGVLCKQRKMWPFVFYFFTIFFFTYIFNNYFLGVGSLIFLYKFMLTSILYTLFYFFLSQIYFDFNLPSFYSLANLSYFPLTEQITMFFRQ

SEQ ID NO: 89282 - protein, 544 aa, Arabidopsis thaliana
  peptide (1)..(544): Ceres Seq. ID no. 12717175
MDQDQDLTNNRCIWVNGPVIVGAGPSGLATAACLHEQNVPFVVLERADCIASLWQKRTYDRLKLHLPKQFCQLPKMPFPEDFPEYPTKRQFIDYLESYATRFEINPKFNECVQTARFDETSGLWRVKTVSKSESTQTEVEYICRWLVVATGENAERVMPEIDGLSEFSGEVIHACDYKSGEKFAGKKVLVVGCGNSGMEVSLDLANHFAKPSMVVRSSLHVMPREVMGKSTFELAMKMLRWFPLWLVDKILLVLSWMVLGNIEKYGLKRPEMGPMELKSVKGKTPVLDIGAIEKIRLGKINVVPGIKRFNGNKVELVNGEQLDVDSVVLATGYRSNVPYWLQENEFFAKNGFPKTVADNNGWKGRTGLYAVGFTRKGLSGASMDAVKIAQDIGSVWQLETKQPTKRSRGSLRRKKKIRVLGQRSLTKEKSPLLKTQSESKGVVRVFLLPPPLSVLGVLCKQRKMWPFVFYFFTIFFFTYIFNNYFLGVGSLIFLYKFMLTSILYTLFYFFLSQIYFDFNLPSFYSLANLSYFPLTEQITMFFRQ

SEQ ID NO: 89283 - DNA, 1209 bp, Arabidopsis thaliana
  misc_feature (1)..(1209): Ceres Seq. ID no. 12717180
  misc_feature (1)..(1209): Ortholog of  Ceres SEQ ID NO 14307456 as cited in SEQ ID NO 54480
aagcgtggcaagtttaggatcacaggtcaatagagtgaaaaatgatcccaaactgaaaagagatgtcatcttctgaaacaggggaagttgcagagaatctagcgagaccaatggctactctggtctcgtctcaaacttacatctaccattgtcatattagtaaacaagctctttatcaggcaaaagaatcatactctcatcgtagaatttcccgtcataatcacagagaaagactcgatttttctcatagaaaccatagattgacaataactagaaagcagcaacctttgtctttcaacaccgtgtgttttgccgcagacgagccctccgaaatcagtgctgatgctagaatccgtagtgaggttctgtctccgttcagatcagtccgtatgttcttctacctcgcctttatagcaagcggttcattaggaggactaatagccacttctaggctcataggtgccctggcgaatccggctagatcaggtgaagttcttgagatcgttaagggtttgggagttgacattggtgctgcttctctctttgcgttcctatacttcaacgaaaacaagaccaagaacgcgcaaatggctaggctctcgagggaagagaatcttggcaaactcaaaatgagagtcgaagagaacaataaggtaatctccgtaggtgatctgagaggggttgctaggcttgtgatctgtgctggtcctgcggagtttattgaagaagcgtttaagagaagtaaagagtatacacaagggctcgtggagagaggtgtggttgtggtggcttatgctacggatgggaattcaccggttttggagtttgatgaaactgacattgcggatgaagaaatgagccagagaaggaagaaactgtggcgggtgactccggtttttgtcccggaatgggaaaagtggttaaatgagcagaagaagcttgccaatgtttcctcagactctccagtgtatttgtctctgcgtttggatgggcgtgtaagggcaagtggagtgggttatcctccatggcaagccttcgttgcacagcttcctccggttaagggaatgtggaccggtcttcttgacggtatggatggtagagtgtaaatactctaatacttagggataaagtcatatgttttttagtctcctataaattttataaaatgtatagttatgaaaagattttgacttcaaaattattattttc

SEQ ID NO: 89284 - protein, 347 aa, Arabidopsis thaliana
  peptide (1)..(347): Ceres Seq. ID no. 12717181
MSSSETGEVAENLARPMATLVSSQTYIYHCHISKQALYQAKESYSHRRISRHNHRERLDFSHRNHRLTITRKQQPLSFNTVCFAADEPSEISADARIRSEVLSPFRSVRMFFYLAFIASGSLGGLIATSRLIGALANPARSGEVLEIVKGLGVDIGAASLFAFLYFNENKTKNAQMARLSREENLGKLKMRVEENNKVISVGDLRGVARLVICAGPAEFIEEAFKRSKEYTQGLVERGVVVVAYATDGNSPVLEFDETDIADEEMSQRRKKLWRVTPVFVPEWEKWLNEQKKLANVSSDSPVYLSLRLDGRVRASGVGYPPWQAFVAQLPPVKGMWTGLLDGMDGRV

SEQ ID NO: 89285 - protein, 331 aa, Arabidopsis thaliana
  peptide (1)..(331): Ceres Seq. ID no. 12717182
MATLVSSQTYIYHCHISKQALYQAKESYSHRRISRHNHRERLDFSHRNHRLTITRKQQPLSFNTVCFAADEPSEISADARIRSEVLSPFRSVRMFFYLAFIASGSLGGLIATSRLIGALANPARSGEVLEIVKGLGVDIGAASLFAFLYFNENKTKNAQMARLSREENLGKLKMRVEENNKVISVGDLRGVARLVICAGPAEFIEEAFKRSKEYTQGLVERGVVVVAYATDGNSPVLEFDETDIADEEMSQRRKKLWRVTPVFVPEWEKWLNEQKKLANVSSDSPVYLSLRLDGRVRASGVGYPPWQAFVAQLPPVKGMWTGLLDGMDGRV

SEQ ID NO: 89286 - protein, 238 aa, Arabidopsis thaliana
  peptide (1)..(238): Ceres Seq. ID no. 12717183
MFFYLAFIASGSLGGLIATSRLIGALANPARSGEVLEIVKGLGVDIGAASLFAFLYFNENKTKNAQMARLSREENLGKLKMRVEENNKVISVGDLRGVARLVICAGPAEFIEEAFKRSKEYTQGLVERGVVVVAYATDGNSPVLEFDETDIADEEMSQRRKKLWRVTPVFVPEWEKWLNEQKKLANVSSDSPVYLSLRLDGRVRASGVGYPPWQAFVAQLPPVKGMWTGLLDGMDGRV

SEQ ID NO: 89287 - DNA, 2748 bp, Arabidopsis thaliana
  misc_feature (1)..(2748): Ceres Seq. ID no. 12717220
  misc_feature (1)..(2748): Ortholog of  Ceres SEQ ID NO 13654989 as cited in SEQ ID NO 63117
  misc_feature (1)..(2748): Ortholog of  Ceres SEQ ID NO 13584744 as cited in SEQ ID NO 69137
atgggagctcactctgtttttctcatccttttttccgtcattgccattgccattgtagtacatggccaaggccaagcaggtttcatcagcatagattgtgggtcaccccctaatattaactatgtagacactgatactggtatcagttacacctgggatgcacctttcatcaacgctggagtaaatctgaacgtctctgaagaatacggttacccgaaaaacccggttttgcctttcccgcttgctgatgtaagatcttttcctcaaggaaacaggaactgttacaccttaaccccctccgatggaaaagggaatctttatctcatcagagcttcgtttatgtatggaaactacgatggtaaaaatgctttacctgagtttgatctctacgtaaacgtgaatttctggacctcggtgaaactcagaaatgcttctgagaacgtcatcaaggagatcctcagctttgcagagtcagatacaatatatgtttgccttgtgaacaaaggtaaaggaactccttttatttcagcgttggagcttcgaccaatgaacagctccatctatggaactgagtttggaagaaatgtctcattggtactctatcaaagatgggatacaggatatttgaatggaacaggacggtaccaaaaggatacatatgatcgtatttggtctccgtactctccagtgtcttggaatacaactatgactactgggtatatcgatatttttcagtctggttataggccaccagatgaagttattaagacagctgcttcgcctaaaagtgacgatgaaccattggaactgtcttggacatcaagcgatccagatactcggttttatgcgtacctttattttgcagaacttgaaaatctcaagaggaatgagagcagagaaatcaagatattctggaatgggtcgcctgtttcaggagcttttaacccctctcctgagtattcaatgacagtgtctaactcacgagctttcactggtaaagatcactggatttctgttcagaagaccgcagagtcaacgcgtccaccaatactcaatgctattgagattttttcagcacaatctctggatgaattttacaccagaattgacgatgttcaagccatagaaagcataaaatcaacgtataaagtgaataagatttggactggtgatccttgctctcccagactcttcccttgggaagctacaacacttctagttatcaaatcaagtccctttttgctgatgagcttgtttctgtattttgctgcgagaagaaatcttagttcaagtggattacatggaccaatagcgttcgcatttagaaatctctcccttcttgagtcattggatttatcaaacaacaacctcaaaggaattgtgccggaatttttggctgatctaaaatatctgaagtccctgaatttgaaaggaaataacttgactgggtttatcccaagatctcttaggaaaagagcaacggctaatggacttgcactcagtgtcgatgaacaaaacatttgtcactcacgttcatgtcgggacgggaacagaatcatggtgccaatagttgtatccacattagtgattattctcattgccgccttggctatcatatgcatcatgcgaagggaaagcaaaataagagcatattcaggaccacttctgccttcgggaaagagaaggttcacatatagtgaagtctctagtattacaaacaacttcaataaagtgattggtaaaggagggtttggtattgtgtaccttggttcccttgaagatggaactgaaattgctgtaaagatgatcaacgattcttcttttggaaaatctaaaggatcttcatcatcatcatcatcatcccaggtctccaaagaattccaagtcgaggcggagcttcttttgacagtccatcaccggaacttagcttcgtttgttggatactgcgatgatggtcgcagtatggctctcatctacgagtacatggccaatggcaacttgcaagattatctttcaaaggatcttagttgggaaaagagactccatatagccatagactctgcacaagggttggagtatcttcatcatggctgcaggccaccaatagtacacagagacgttaaaacagcaaacattcttttaaacgataacttggaagccaagatcgctgatttcgggctttctaaggtcttccctgaggatgatctcagccacgttgtgactgctgtcatgggcactcctggctatgtcgatcctgagtactacaacacgtttaagctaaacgagaagagcgacgtgtacagctttgggatcgtcctccttgaactcataaccggcaagagatccataatgaaaactgacgacggagaaaaaatgaacgttgttcactacgtcgagcctttcctcaaaatgggagacatagatggtgtcgtggatccacggcttcacggcgacttctcctcaaactcggcttggaaatttgtggaagtggcaatgtcttgcgtcagagacagaggaaccaacagaccaaacacaaaccagatcgtgtctgacttgaaacagtgcttagctgccgagctagctcgtgagccaaaaagcaatcatgagaagaaggaagtagtgaaagagaagtacacgaagaccaagtcgacggttcagaattatagcagcaatgaatataatagctcatctggatcggtttcactttcttttggagattactccacgtttggcccaatggcaaggtag

SEQ ID NO: 89288 - protein, 915 aa, Arabidopsis thaliana
  peptide (1)..(915): Ceres Seq. ID no. 12717221
MGAHSVFLILFSVIAIAIVVHGQGQAGFISIDCGSPPNINYVDTDTGISYTWDAPFINAGVNLNVSEEYGYPKNPVLPFPLADVRSFPQGNRNCYTLTPSDGKGNLYLIRASFMYGNYDGKNALPEFDLYVNVNFWTSVKLRNASENVIKEILSFAESDTIYVCLVNKGKGTPFISALELRPMNSSIYGTEFGRNVSLVLYQRWDTGYLNGTGRYQKDTYDRIWSPYSPVSWNTTMTTGYIDIFQSGYRPPDEVIKTAASPKSDDEPLELSWTSSDPDTRFYAYLYFAELENLKRNESREIKIFWNGSPVSGAFNPSPEYSMTVSNSRAFTGKDHWISVQKTAESTRPPILNAIEIFSAQSLDEFYTRIDDVQAIESIKSTYKVNKIWTGDPCSPRLFPWEATTLLVIKSSPFLLMSLFLYFAARRNLSSSGLHGPIAFAFRNLSLLESLDLSNNNLKGIVPEFLADLKYLKSLNLKGNNLTGFIPRSLRKRATANGLALSVDEQNICHSRSCRDGNRIMVPIVVSTLVIILIAALAIICIMRRESKIRAYSGPLLPSGKRRFTYSEVSSITNNFNKVIGKGGFGIVYLGSLEDGTEIAVKMINDSSFGKSKGSSSSSSSSQVSKEFQVEAELLLTVHHRNLASFVGYCDDGRSMALIYEYMANGNLQDYLSKDLSWEKRLHIAIDSAQGLEYLHHGCRPPIVHRDVKTANILLNDNLEAKIADFGLSKVFPEDDLSHVVTAVMGTPGYVDPEYYNTFKLNEKSDVYSFGIVLLELITGKRSIMKTDDGEKMNVVHYVEPFLKMGDIDGVVDPRLHGDFSSNSAWKFVEVAMSCVRDRGTNRPNTNQIVSDLKQCLAAELAREPKSNHEKKEVVKEKYTKTKSTVQNYSSNEYNSSSGSVSLSFGDYSTFGPMAR

SEQ ID NO: 89289 - protein, 802 aa, Arabidopsis thaliana
  peptide (1)..(802): Ceres Seq. ID no. 12717222
MYGNYDGKNALPEFDLYVNVNFWTSVKLRNASENVIKEILSFAESDTIYVCLVNKGKGTPFISALELRPMNSSIYGTEFGRNVSLVLYQRWDTGYLNGTGRYQKDTYDRIWSPYSPVSWNTTMTTGYIDIFQSGYRPPDEVIKTAASPKSDDEPLELSWTSSDPDTRFYAYLYFAELENLKRNESREIKIFWNGSPVSGAFNPSPEYSMTVSNSRAFTGKDHWISVQKTAESTRPPILNAIEIFSAQSLDEFYTRIDDVQAIESIKSTYKVNKIWTGDPCSPRLFPWEATTLLVIKSSPFLLMSLFLYFAARRNLSSSGLHGPIAFAFRNLSLLESLDLSNNNLKGIVPEFLADLKYLKSLNLKGNNLTGFIPRSLRKRATANGLALSVDEQNICHSRSCRDGNRIMVPIVVSTLVIILIAALAIICIMRRESKIRAYSGPLLPSGKRRFTYSEVSSITNNFNKVIGKGGFGIVYLGSLEDGTEIAVKMINDSSFGKSKGSSSSSSSSQVSKEFQVEAELLLTVHHRNLASFVGYCDDGRSMALIYEYMANGNLQDYLSKDLSWEKRLHIAIDSAQGLEYLHHGCRPPIVHRDVKTANILLNDNLEAKIADFGLSKVFPEDDLSHVVTAVMGTPGYVDPEYYNTFKLNEKSDVYSFGIVLLELITGKRSIMKTDDGEKMNVVHYVEPFLKMGDIDGVVDPRLHGDFSSNSAWKFVEVAMSCVRDRGTNRPNTNQIVSDLKQCLAAELAREPKSNHEKKEVVKEKYTKTKSTVQNYSSNEYNSSSGSVSLSFGDYSTFGPMAR

SEQ ID NO: 89290 - protein, 733 aa, Arabidopsis thaliana
  peptide (1)..(733): Ceres Seq. ID no. 12717223
MNSSIYGTEFGRNVSLVLYQRWDTGYLNGTGRYQKDTYDRIWSPYSPVSWNTTMTTGYIDIFQSGYRPPDEVIKTAASPKSDDEPLELSWTSSDPDTRFYAYLYFAELENLKRNESREIKIFWNGSPVSGAFNPSPEYSMTVSNSRAFTGKDHWISVQKTAESTRPPILNAIEIFSAQSLDEFYTRIDDVQAIESIKSTYKVNKIWTGDPCSPRLFPWEATTLLVIKSSPFLLMSLFLYFAARRNLSSSGLHGPIAFAFRNLSLLESLDLSNNNLKGIVPEFLADLKYLKSLNLKGNNLTGFIPRSLRKRATANGLALSVDEQNICHSRSCRDGNRIMVPIVVSTLVIILIAALAIICIMRRESKIRAYSGPLLPSGKRRFTYSEVSSITNNFNKVIGKGGFGIVYLGSLEDGTEIAVKMINDSSFGKSKGSSSSSSSSQVSKEFQVEAELLLTVHHRNLASFVGYCDDGRSMALIYEYMANGNLQDYLSKDLSWEKRLHIAIDSAQGLEYLHHGCRPPIVHRDVKTANILLNDNLEAKIADFGLSKVFPEDDLSHVVTAVMGTPGYVDPEYYNTFKLNEKSDVYSFGIVLLELITGKRSIMKTDDGEKMNVVHYVEPFLKMGDIDGVVDPRLHGDFSSNSAWKFVEVAMSCVRDRGTNRPNTNQIVSDLKQCLAAELAREPKSNHEKKEVVKEKYTKTKSTVQNYSSNEYNSSSGSVSLSFGDYSTFGPMAR

SEQ ID NO: 89291 - DNA, 1494 bp, Arabidopsis thaliana
  misc_feature (1)..(1494): Ceres Seq. ID no. 12717228
  misc_feature (1)..(1494): Ortholog of  Ceres SEQ ID NO 14311509 as cited in SEQ ID NO 51398
  misc_feature (1)..(1494): Ortholog of  Ceres SEQ ID NO 14307702 as cited in SEQ ID NO 54703
  misc_feature (1)..(1494): Ortholog of  Ceres SEQ ID NO 15176361 as cited in SEQ ID NO 55438
atgaacaagagtaatcctgctggttcggtgactggttcggatataatagacgccaagatcgaagaacatcaactttgtggatccaagaagtgtcctagctgcggccacaagctcgaaggcaaaccagattgggttggtttaccagcaggagtgaaatttgacccaacggatcaagaattgatagaacatttagaagcgaaagtgttagctaaagacttcaaatctcaccctctcattgacgaattcatcccaaccattgaaggcgaagacggcatttgctacactcatcccgagaaacttcctggagtgactagagatggtttaagccgacacttctttcatagaccatcaaaggcgtacacgacgggaacaagaaagcgaagaaagattcaaacagaatgtgacaataatttgcaaggaagtagtagctccggtgagacgaggtggcataagaccggtaagacaagaccggttatggtaaacggtaagcaaaaaggttgtaagaagattttggttttgtataccaattttggtaagaatcgaaaaccggagaaaaccaattgggtaatgcatcaatatcatttggggacacatgaggaagagaaagaaggagaacttgttgtgtctaagatcttttatcaaactcagcctaggcaatgcaactggtcgtcttctacatcgagcttgaacgctataggtggtggcggcggtgaagcgagtagcggcggaggcggcggagagtatcatatgaggagagatagtgggactactagtggtgggagttgttcttcgtctagagaaattattaatgttaatcctccgaatcgatccgatgaaataggcggcgttggtggtggcgttatggccgtagcagctgcggctgcggcggttgcagctgggcttccgagttatgcaatggatcagctcagctttgttccgtttatgaaaagctttgatgaggtggcgaggagggaaactcctcagactgggcacgctacatgtgaggatgtaatggcagaacaacatcgtcatcgtcatcaaccatcatcatcaacatcacatcatatggctcatgatcatcaccatcatcatcatcaacaacaacaacaacggcatcatgcattcaacataagccagcctacacatccgatatcaaccattatttctccatctacttcgcttcaccatgcctccattaatattcttgacgataatccttatcatgttcatagaatcttgctccccaatgaaaattaccagacacaacagcaactacgtcaagaaggagaagaagaacataatgatgggaagatgggaggaaggtcagcttccggattggaagaactcataatgggctgcacttcttctaccactcatcatgatgtaaaagatgggtcatcatcaatggggaaccaacaagaagcagaatggttgaagtactcaacgttttggccagcccctgactcttctgacaaccaagatcatcatgggtaa

SEQ ID NO: 89292 - protein, 497 aa, Arabidopsis thaliana
  peptide (1)..(497): Ceres Seq. ID no. 12717229
MNKSNPAGSVTGSDIIDAKIEEHQLCGSKKCPSCGHKLEGKPDWVGLPAGVKFDPTDQELIEHLEAKVLAKDFKSHPLIDEFIPTIEGEDGICYTHPEKLPGVTRDGLSRHFFHRPSKAYTTGTRKRRKIQTECDNNLQGSSSSGETRWHKTGKTRPVMVNGKQKGCKKILVLYTNFGKNRKPEKTNWVMHQYHLGTHEEEKEGELVVSKIFYQTQPRQCNWSSSTSSLNAIGGGGGEASSGGGGGEYHMRRDSGTTSGGSCSSSREIINVNPPNRSDEIGGVGGGVMAVAAAAAAVAAGLPSYAMDQLSFVPFMKSFDEVARRETPQTGHATCEDVMAEQHRHRHQPSSSTSHHMAHDHHHHHHQQQQQRHHAFNISQPTHPISTIISPSTSLHHASINILDDNPYHVHRILLPNENYQTQQQLRQEGEEEHNDGKMGGRSASGLEELIMGCTSSTTHHDVKDGSSSMGNQQEAEWLKYSTFWPAPDSSDNQDHHG

SEQ ID NO: 89293 - protein, 339 aa, Arabidopsis thaliana; identical to SEQ ID NO: 71328
  peptide (1)..(339): Ceres Seq. ID no. 12717230

SEQ ID NO: 89294 - protein, 308 aa, Arabidopsis thaliana; identical to SEQ ID NO: 71329
  peptide (1)..(308): Ceres Seq. ID no. 12717231

SEQ ID NO: 89295 - DNA, 979 bp, Arabidopsis thaliana
  misc_feature (1)..(979): Ceres Seq. ID no. 12717396
  misc_feature (1)..(979): Ortholog of  Ceres SEQ ID NO 14311912 as cited in SEQ ID NO 51609
  misc_feature (1)..(979): Ortholog of  Ceres SEQ ID NO 14307377 as cited in SEQ ID NO 54487
  misc_feature (1)..(979): Ortholog of  Ceres SEQ ID NO 14312933 as cited in SEQ ID NO 58936
ctctcgtcgaaagcaaaacagtctcctttctctatcttctgctcatatcagccattgacacagttgctttgggtttccctcaaacggcgccgattgtctggattttgaccactgatggccttagatcaatcttttgaagatgctgctttacttggagaactctatggagaaggtgcattttgtttcaagagcaagaaacctgaacccattacagtctcggttccttctgatgatactgatgattcgaattttgactgcaatatttgcttagactcggtgcaagaacctgttgtgactctctgtggtcacctcttttgctggccttgtattcacaaatggcttgatgtacagagcttctcaacaagtgatgaataccaaagacatagacagtgtcctgtttgtaaatctaaagtttctcattctactttggttcctttgtatggtagaggccgttgtactactcaggaggaaggtaaaaacagtgtgcctaaaagacccgtaggaccggtttatcggcttgaaatgccgaattcaccttatgcaagtactgatctgcggttatcacaacgggttcatttcaatagcccacaggaaggttactaccctgtctcaggggtgatgagctcgaacagtttatcatactctgctgttttggatccggtgatggtgatggttggagaaatggtagctacgaggttgtttggaacacgagtgatggatagatttgcgtatccggacacttacaatctcgcagggactagcgggccgaggatgagaaggcggataatgcaggcagataaatcgctgggaagaatcttcttcttctttatgtgttgtgttgttctgtgtcttctcttgttttaggttttcatagctagcttggttctgctactgttcagtttcttcaggtgtaaggaaaacatagtcaaagaaatgtacatttgtgttggaaacaaatcaaagttgcttaatgttgagg

SEQ ID NO: 89296 - protein, 249 aa, Arabidopsis thaliana; identical to SEQ ID NO: 37218
  peptide (1)..(249): Ceres Seq. ID no. 12717397

SEQ ID NO: 89297 - DNA, 876 bp, Arabidopsis thaliana
  misc_feature (1)..(876): Ceres Seq. ID no. 12717411
  misc_feature (1)..(876): Ortholog of  Ceres SEQ ID NO 15168500 as cited in SEQ ID NO 57041
atggagaagaatcaatctgatgatgatggaacggctctgatctttcttggaacaggctgctccggtgcagttcccgatttcagatgcttactccagccgtcagatcctccttgccatgtctgttctcagtccctctctttacttcctcaccttaaccctaactacagatgcaatacatcgctcttgattgattattgcagcaaggaagaagatggtagacataagtacatacttattgatgttggcaagagttttagagagcaaatcattctaactcatgagcacgcagatgcggttcatggcttagatgaaattcgatctcttcaacctcgtggtgcaactattgttgataccgatccacttcccgtctttctatctcaatttacaatggagagtattgctacaaggtttccttatttggttgaaaagaaggtaaaagaagtacctagacgagtttcacttcttgactggaaaaacatcgaagagaattgtgacgaaccattcgctgcctcgggcttatctttcacgcctcttccggtgatgcatggagaggactacattgctttaggtttcctcttcggcgataaaagtaaagtggcttatatatcagacgtatcacggattccaccgagtaccgagtatgctatttccaaagctggggctggacagttagatcttcttatcctggatacaaatataccgtggaaggctcttgagatcttaaagaggctatgtccaaagagagcgcttttaacgggtatgacacacgagtttgatcaccatgaatacaatgagatacttgcagaatggtctctaagggaaggaatccatgtacagcttgctcatgacggattacggcttccaatagacctatga

SEQ ID NO: 89298 - protein, 291 aa, Arabidopsis thaliana
  peptide (1)..(291): Ceres Seq. ID no. 12717412
MEKNQSDDDGTALIFLGTGCSGAVPDFRCLLQPSDPPCHVCSQSLSLLPHLNPNYRCNTSLLIDYCSKEEDGRHKYILIDVGKSFREQIILTHEHADAVHGLDEIRSLQPRGATIVDTDPLPVFLSQFTMESIATRFPYLVEKKVKEVPRRVSLLDWKNIEENCDEPFAASGLSFTPLPVMHGEDYIALGFLFGDKSKVAYISDVSRIPPSTEYAISKAGAGQLDLLILDTNIPWKALEILKRLCPKRALLTGMTHEFDHHEYNEILAEWSLREGIHVQLAHDGLRLPIDL

SEQ ID NO: 89299 - protein, 162 aa, Arabidopsis thaliana
  peptide (1)..(162): Ceres Seq. ID no. 12717413
MESIATRFPYLVEKKVKEVPRRVSLLDWKNIEENCDEPFAASGLSFTPLPVMHGEDYIALGFLFGDKSKVAYISDVSRIPPSTEYAISKAGAGQLDLLILDTNIPWKALEILKRLCPKRALLTGMTHEFDHHEYNEILAEWSLREGIHVQLAHDGLRLPIDL

SEQ ID NO: 89300 - DNA, 1533 bp, Arabidopsis thaliana
  misc_feature (1)..(1533): Ceres Seq. ID no. 12717542
  misc_feature (1)..(1533): Ortholog of  Ceres SEQ ID NO 13594037 as cited in SEQ ID NO 55666
  misc_feature (1)..(1533): Ortholog of  Ceres SEQ ID NO 13657707 as cited in SEQ ID NO 66407
atggtggttattggtgttagcaaagaatattgtgatgacaaacactcatgtcaaaactttttgttggagcttaagacagcttcctcgtcactctcggagattagacgtcgtgacttattgatcatcgttttgaagaattccgtgcggaagatcgacatggctatgattggtgtgatggaagatacaaaacaacatgaggagatggagaatgataagctatgtttgaaggaggacacaaatctatttgaggagatgatggagtcggcaaaagataggatgatccgttcagtggaggaactcttaggaggagaattcccttatcttggatcttacgaaaacatccacacttggctcagtggcgttcttactagctacatcacatgtatcgacgaaattggtgacggtgcctataaacgtcgggtcgagccacagcttcaagacctcatttctaaggcaaaggtagctttggctctttttatctccatttcgccgagagacaacaccgaacttaactcggtggttcccaatagcccgtcttggttatctcatgttgacaagaaagatctatatctcaatgctgaggctctaaaaaagattgccgatgttgtggtcgcgaaagatgggaccggaaagtacaacacagtgaatgcggccattgcagcagcacctcaacacagccacaagagattcatcatctatataaagacaggcatttatgatgaaatcgtcgccattgagaatacgaaacccaatttaactcttataggtgatggtcaagattcaaccatcatcacgggcaatttaagcgctagcaatgttagaagaacgttctacactgcaacttttgcttctaatggtaaaggattcatcggagtagacatgtgcttccgaaacacggtcgggccggcaaaaggaccagctgttgccctccgtgtgagtggtgatatgtccgtcatttacagatgtcgtgtcgagggatatcaggatgccttgtatcctcacatagaccgccagttttatagggagtgctttattaccggtactgtagatttcatttgtggaaacgcagcggcggtatttcaattctgccagattgtagcaagacagcctaatatggggcaaagcaatttcataaccgctcaatcacgcgagactaaggacgacaaatcgggcttctcaattcaaaactgcaacatcacagcaagttcggatctagatacagcaaccgtaaaaacgtatcttggaaggccttggaggatattttcaacagtcgcggttctgcagtctttcatcggtgatttagttgatcccgcaggctggactccttgggaaggagaaactggtctgtcaactctccactaccgcgaatatcaaaataggggtccgggagctgtgactagcagaagggtgaagtggtcgggctttaaagttatgaaagatcctaaacaggctacagaattcactgtagccaagctcttagatggagaaacttggctaaaagaaagtcgaattccatataaaagtggattgtaa

SEQ ID NO: 89301 - protein, 510 aa, Arabidopsis thaliana
  peptide (1)..(510): Ceres Seq. ID no. 12717543
MVVIGVSKEYCDDKHSCQNFLLELKTASSSLSEIRRRDLLIIVLKNSVRKIDMAMIGVMEDTKQHEEMENDKLCLKEDTNLFEEMMESAKDRMIRSVEELLGGEFPYLGSYENIHTWLSGVLTSYITCIDEIGDGAYKRRVEPQLQDLISKAKVALALFISISPRDNTELNSVVPNSPSWLSHVDKKDLYLNAEALKKIADVVVAKDGTGKYNTVNAAIAAAPQHSHKRFIIYIKTGIYDEIVAIENTKPNLTLIGDGQDSTIITGNLSASNVRRTFYTATFASNGKGFIGVDMCFRNTVGPAKGPAVALRVSGDMSVIYRCRVEGYQDALYPHIDRQFYRECFITGTVDFICGNAAAVFQFCQIVARQPNMGQSNFITAQSRETKDDKSGFSIQNCNITASSDLDTATVKTYLGRPWRIFSTVAVLQSFIGDLVDPAGWTPWEGETGLSTLHYREYQNRGPGAVTSRRVKWSGFKVMKDPKQATEFTVAKLLDGETWLKESRIPYKSGL

SEQ ID NO: 89302 - protein, 458 aa, Arabidopsis thaliana
  peptide (1)..(458): Ceres Seq. ID no. 12717544
MAMIGVMEDTKQHEEMENDKLCLKEDTNLFEEMMESAKDRMIRSVEELLGGEFPYLGSYENIHTWLSGVLTSYITCIDEIGDGAYKRRVEPQLQDLISKAKVALALFISISPRDNTELNSVVPNSPSWLSHVDKKDLYLNAEALKKIADVVVAKDGTGKYNTVNAAIAAAPQHSHKRFIIYIKTGIYDEIVAIENTKPNLTLIGDGQDSTIITGNLSASNVRRTFYTATFASNGKGFIGVDMCFRNTVGPAKGPAVALRVSGDMSVIYRCRVEGYQDALYPHIDRQFYRECFITGTVDFICGNAAAVFQFCQIVARQPNMGQSNFITAQSRETKDDKSGFSIQNCNITASSDLDTATVKTYLGRPWRIFSTVAVLQSFIGDLVDPAGWTPWEGETGLSTLHYREYQNRGPGAVTSRRVKWSGFKVMKDPKQATEFTVAKLLDGETWLKESRIPYKSGL

SEQ ID NO: 89303 - protein, 456 aa, Arabidopsis thaliana
  peptide (1)..(456): Ceres Seq. ID no. 12717545
MIGVMEDTKQHEEMENDKLCLKEDTNLFEEMMESAKDRMIRSVEELLGGEFPYLGSYENIHTWLSGVLTSYITCIDEIGDGAYKRRVEPQLQDLISKAKVALALFISISPRDNTELNSVVPNSPSWLSHVDKKDLYLNAEALKKIADVVVAKDGTGKYNTVNAAIAAAPQHSHKRFIIYIKTGIYDEIVAIENTKPNLTLIGDGQDSTIITGNLSASNVRRTFYTATFASNGKGFIGVDMCFRNTVGPAKGPAVALRVSGDMSVIYRCRVEGYQDALYPHIDRQFYRECFITGTVDFICGNAAAVFQFCQIVARQPNMGQSNFITAQSRETKDDKSGFSIQNCNITASSDLDTATVKTYLGRPWRIFSTVAVLQSFIGDLVDPAGWTPWEGETGLSTLHYREYQNRGPGAVTSRRVKWSGFKVMKDPKQATEFTVAKLLDGETWLKESRIPYKSGL

SEQ ID NO: 89304 - DNA, 3426 bp, Arabidopsis thaliana
  misc_feature (1)..(3426): Ceres Seq. ID no. 12717577
  misc_feature (1)..(3426): Ortholog of  Ceres SEQ ID NO 15168935 as cited in SEQ ID NO 209
atgggaagactaactaacccctccgtccaacgcctctggtctatgtttccctttttatcaaacagatgtaatctaagaggcaaagccttaggctcagacttgggaaaaggctgtttccagttcaagttcgactatgaagaggatctactgaaagtcttggataacagaccttaccattatgaccagtggatggttattttgcagcgttgggaacctattatctctgagtcattcccttgtaagatccccttctggatagagcttcaaggacttcccaaacacttttggcaacctgaaatgctaaagaccattggagaggaactaggtgaaatcttagacatggaaataacctcttctgcagccaaactcagagtccttgtggatggactccaacccctcacaaaggaaactattgtggattttcgtgatggtagtgaaactacagtcttcttggtctacaaaaacctcaaaaatcactgccaccattgcttccggctgtctcatgaaactaaactctgtcctggcttaacagagtcaagaggaaaagactctgtatctgttcaaccagctgtctcgcaagattctcgaggtggttccagaaactattacacccctaaagataacttcactgctcccagactgagtcaccacgattgtgaaagaactcattattctcaggaagtctccaacagacagcgaaattcccacccttctagtccagtgctctccaatcacttctctgctgatagagggcgcacgcagagagagaggcgcggtccactagtggaagttaccctctggcagttcctaagggtagtaagctggaactgttgtgggctggggaatcccatgacagtccagagaatcaaggaaatccgtaaaaagattttccctgacttactattcctcatggagacaaaaaattcatctgaaacggtcctccaatctctccaatggcttgattacccttctcatcatcttgtaccgccagaatctccagctgcaggaggtcttggtctcttctggaaatcaagtgtagaagtggaaattattcactcttctctgcattatattgacactaaaatcaaggcaaaaggaagaactttctactcaacttttctctatggtgaaccggatagaaccaaaagactccaaatctggaatgcccttcaagagttgagttcctctagagaaggcccttggttcattactggagatttcaatgatattgtcaatagtgctgaaaaatctggaggtcctgatcgcccagaaggctctttcacagacctgagatcctttatgtcttcttgtgatctctatgacctgaaacatacagggaatttcttatcttggcgaggcagaagacattcccatcttgtaaggtgcagattagacagggcaatggccaatagtgactggataatagcctacccttcaggacgcagtgaatacctcagatttgaaggctctgatcaccgtccgctggttacttcctttgaccatgtccagaaaaaaaccaagaatattttcagatatgaccggaccctgaaagataatcctgaaatttcaaagctgatgaatgagacctggaaatctaatcctagtgctaaagtggattatcgactacacctgtgtagggctgctctcttaaactggagtaaagaacatcatttgaacagccaaaaagagatcctatctctccgggtccaactggaagaagctctgacagatgatgctgcaacccaggattctgtggatctcctgaaccaaaatctcttgttggcttatagaaaagaagagactttctggaagcaacgaagcagaaatctctggctggctctcggggataagaattcttgtttctttcatgctgcaacaaacagtcgtcgagcaatcaatactatctctgtaattgaaaactctgcaggcactagtgtctatgaagattctgaaatcattgagaccatatcagattacttccaggatatttttacctctcaagagggagatagaacttctgtggtagctgaggcgctttctccttgcattactactgatatgaacaacacactcatctctttgccaactgttgctgagattaaacaggcgtgcctatcaattcaccctgacaaagccccgggacgtgatggcttctctgcaagttttttccaatctaattggtctacagttagcgaggaaatcactgctgaggttcaggcctttttcatctccgaaatcctgccacagaaaataaatcacacacatgtcaggctcattcccaaaatccctgcccctcaaaaagtatctgattatcgaccaattgctctctgctctgtgtactacaagatcatagctaagctattagcaaagagacttcagcctattctacattcttgtatttctgagaatcaatctgcttttgtcccccagagagcaatatctgacaatgtacttattacacatgaggctctccactacttaaaaaactcaggggctctagttaattgctacatggcagttaaaactgacatgagtaaagcctatgacagaaagaagaaagacctgttcacagccatagtggatcgtattaaacaaagagctctcagttggtcctcaaggtttttatcttctgcaggaaaactcactatgctcaaatcagtcctctcgactatgcctacttacacaatgtcgtgtttccaactcccactatctctgtgcaagcgcatccagtctacattgactcgcttctggtgggattcaaaacctgatcaaagaaaaatgagttggatctcttggcagaaaatgacattatcttttaaaagtggaggattggggtttagagatgttcaaaccttcaataaagctctccttgcaaagctctcttggcgactgctacagaacccttcatgcctgctagctaagctcctactagggaagtactgcaaacactcaacccttttggactgtaaggtttcaaattcagcttcccatggttggagaagcatctgtctaggcagagatgtcctcagtttacagcttggacgtcttattggcaatgcagatcgctgggcttggttgcctacaagctctggcctttatgcagctaattctgggtattttgaagccctcaaggagactgcctccttggaaaaccctcctaaccatgatttagtgaaaaatttcaattggagatctaacatttggggacttcaaacttcaccgaaaactaagctttacctgtgggttccaaccttctccttaggcatatctctgacacggcaaagtgcccacgatgtgagcaagcagaatcgactctccatctgttctttcactgctcctttgcacgcaggatctgggatttggctcccttctcaatcagacccaatttcgatggaatcaggtcatttaaagagggacttgtcctag

SEQ ID NO: 89305 - protein, 1141 aa, Arabidopsis thaliana
  peptide (1)..(1141): Ceres Seq. ID no. 12717578
MGRLTNPSVQRLWSMFPFLSNRCNLRGKALGSDLGKGCFQFKFDYEEDLLKVLDNRPYHYDQWMVILQRWEPIISESFPCKIPFWIELQGLPKHFWQPEMLKTIGEELGEILDMEITSSAAKLRVLVDGLQPLTKETIVDFRDGSETTVFLVYKNLKNHCHHCFRLSHETKLCPGLTESRGKDSVSVQPAVSQDSRGGSRNYYTPKDNFTAPRLSHHDCERTHYSQEVSNRQRNSHPSSPVLSNHFSADRGRTQRERRGPLVEVTLWQFLRVVSWNCCGLGNPMTVQRIKEIRKKIFPDLLFLMETKNSSETVLQSLQWLDYPSHHLVPPESPAAGGLGLFWKSSVEVEIIHSSLHYIDTKIKAKGRTFYSTFLYGEPDRTKRLQIWNALQELSSSREGPWFITGDFNDIVNSAEKSGGPDRPEGSFTDLRSFMSSCDLYDLKHTGNFLSWRGRRHSHLVRCRLDRAMANSDWIIAYPSGRSEYLRFEGSDHRPLVTSFDHVQKKTKNIFRYDRTLKDNPEISKLMNETWKSNPSAKVDYRLHLCRAALLNWSKEHHLNSQKEILSLRVQLEEALTDDAATQDSVDLLNQNLLLAYRKEETFWKQRSRNLWLALGDKNSCFFHAATNSRRAINTISVIENSAGTSVYEDSEIIETISDYFQDIFTSQEGDRTSVVAEALSPCITTDMNNTLISLPTVAEIKQACLSIHPDKAPGRDGFSASFFQSNWSTVSEEITAEVQAFFISEILPQKINHTHVRLIPKIPAPQKVSDYRPIALCSVYYKIIAKLLAKRLQPILHSCISENQSAFVPQRAISDNVLITHEALHYLKNSGALVNCYMAVKTDMSKAYDRKKKDLFTAIVDRIKQRALSWSSRFLSSAGKLTMLKSVLSTMPTYTMSCFQLPLSLCKRIQSTLTRFWWDSKPDQRKMSWISWQKMTLSFKSGGLGFRDVQTFNKALLAKLSWRLLQNPSCLLAKLLLGKYCKHSTLLDCKVSNSASHGWRSICLGRDVLSLQLGRLIGNADRWAWLPTSSGLYAANSGYFEALKETASLENPPNHDLVKNFNWRSNIWGLQTSPKTKLYLWVPTFSLGISLTRQSAHDVSKQNRLSICSFTAPLHAGSGIWLPSQSDPISMESGHLKRDLS

SEQ ID NO: 89306 - protein, 1127 aa, Arabidopsis thaliana
  peptide (1)..(1127): Ceres Seq. ID no. 12717579
MFPFLSNRCNLRGKALGSDLGKGCFQFKFDYEEDLLKVLDNRPYHYDQWMVILQRWEPIISESFPCKIPFWIELQGLPKHFWQPEMLKTIGEELGEILDMEITSSAAKLRVLVDGLQPLTKETIVDFRDGSETTVFLVYKNLKNHCHHCFRLSHETKLCPGLTESRGKDSVSVQPAVSQDSRGGSRNYYTPKDNFTAPRLSHHDCERTHYSQEVSNRQRNSHPSSPVLSNHFSADRGRTQRERRGPLVEVTLWQFLRVVSWNCCGLGNPMTVQRIKEIRKKIFPDLLFLMETKNSSETVLQSLQWLDYPSHHLVPPESPAAGGLGLFWKSSVEVEIIHSSLHYIDTKIKAKGRTFYSTFLYGEPDRTKRLQIWNALQELSSSREGPWFITGDFNDIVNSAEKSGGPDRPEGSFTDLRSFMSSCDLYDLKHTGNFLSWRGRRHSHLVRCRLDRAMANSDWIIAYPSGRSEYLRFEGSDHRPLVTSFDHVQKKTKNIFRYDRTLKDNPEISKLMNETWKSNPSAKVDYRLHLCRAALLNWSKEHHLNSQKEILSLRVQLEEALTDDAATQDSVDLLNQNLLLAYRKEETFWKQRSRNLWLALGDKNSCFFHAATNSRRAINTISVIENSAGTSVYEDSEIIETISDYFQDIFTSQEGDRTSVVAEALSPCITTDMNNTLISLPTVAEIKQACLSIHPDKAPGRDGFSASFFQSNWSTVSEEITAEVQAFFISEILPQKINHTHVRLIPKIPAPQKVSDYRPIALCSVYYKIIAKLLAKRLQPILHSCISENQSAFVPQRAISDNVLITHEALHYLKNSGALVNCYMAVKTDMSKAYDRKKKDLFTAIVDRIKQRALSWSSRFLSSAGKLTMLKSVLSTMPTYTMSCFQLPLSLCKRIQSTLTRFWWDSKPDQRKMSWISWQKMTLSFKSGGLGFRDVQTFNKALLAKLSWRLLQNPSCLLAKLLLGKYCKHSTLLDCKVSNSASHGWRSICLGRDVLSLQLGRLIGNADRWAWLPTSSGLYAANSGYFEALKETASLENPPNHDLVKNFNWRSNIWGLQTSPKTKLYLWVPTFSLGISLTRQSAHDVSKQNRLSICSFTAPLHAGSGIWLPSQSDPISMESGHLKRDLS

SEQ ID NO: 89307 - protein, 1078 aa, Arabidopsis thaliana
  peptide (1)..(1078): Ceres Seq. ID no. 12717580
MVILQRWEPIISESFPCKIPFWIELQGLPKHFWQPEMLKTIGEELGEILDMEITSSAAKLRVLVDGLQPLTKETIVDFRDGSETTVFLVYKNLKNHCHHCFRLSHETKLCPGLTESRGKDSVSVQPAVSQDSRGGSRNYYTPKDNFTAPRLSHHDCERTHYSQEVSNRQRNSHPSSPVLSNHFSADRGRTQRERRGPLVEVTLWQFLRVVSWNCCGLGNPMTVQRIKEIRKKIFPDLLFLMETKNSSETVLQSLQWLDYPSHHLVPPESPAAGGLGLFWKSSVEVEIIHSSLHYIDTKIKAKGRTFYSTFLYGEPDRTKRLQIWNALQELSSSREGPWFITGDFNDIVNSAEKSGGPDRPEGSFTDLRSFMSSCDLYDLKHTGNFLSWRGRRHSHLVRCRLDRAMANSDWIIAYPSGRSEYLRFEGSDHRPLVTSFDHVQKKTKNIFRYDRTLKDNPEISKLMNETWKSNPSAKVDYRLHLCRAALLNWSKEHHLNSQKEILSLRVQLEEALTDDAATQDSVDLLNQNLLLAYRKEETFWKQRSRNLWLALGDKNSCFFHAATNSRRAINTISVIENSAGTSVYEDSEIIETISDYFQDIFTSQEGDRTSVVAEALSPCITTDMNNTLISLPTVAEIKQACLSIHPDKAPGRDGFSASFFQSNWSTVSEEITAEVQAFFISEILPQKINHTHVRLIPKIPAPQKVSDYRPIALCSVYYKIIAKLLAKRLQPILHSCISENQSAFVPQRAISDNVLITHEALHYLKNSGALVNCYMAVKTDMSKAYDRKKKDLFTAIVDRIKQRALSWSSRFLSSAGKLTMLKSVLSTMPTYTMSCFQLPLSLCKRIQSTLTRFWWDSKPDQRKMSWISWQKMTLSFKSGGLGFRDVQTFNKALLAKLSWRLLQNPSCLLAKLLLGKYCKHSTLLDCKVSNSASHGWRSICLGRDVLSLQLGRLIGNADRWAWLPTSSGLYAANSGYFEALKETASLENPPNHDLVKNFNWRSNIWGLQTSPKTKLYLWVPTFSLGISLTRQSAHDVSKQNRLSICSFTAPLHAGSGIWLPSQSDPISMESGHLKRDLS

SEQ ID NO: 89308 - DNA, 2607 bp, Arabidopsis thaliana
  misc_feature (1)..(2607): Ceres Seq. ID no. 12717677
  misc_feature (1)..(2607): Ortholog of  Ceres SEQ ID NO 12466413 as cited in SEQ ID NO 20470
  misc_feature (1)..(2607): Ortholog of  Ceres SEQ ID NO 12586556 as cited in SEQ ID NO 64667
  misc_feature (1)..(2607): Ortholog of  Ceres SEQ ID NO 13660894 as cited in SEQ ID NO 67475
atgatcagaacttcgtctgtgttgaactccaccaagtacttcaactctcacattaaccatttatcatctcatggcgatcacaagcaagttctctcaacattctcttccatgctcgccaataaactcttacctgatacttttactttccctagtcttctcaaagcttgtgcttctcttcagcgcctctcttttggtctctcgattcaccagcaggttctcgttaatgggttctcttcagatttctacatatcatcttcattggtcaatctttatgcgaaatttggactcttggctcatgctcggaaagtgttcgaggaaatgcgtgagagagatgtggtgcactggactgcgatgattgggtgttactcacgcgctggaattgttggagaagcttgttcgttggtgaacgagatgagatttcaggggatcaaaccgggtccggttacgttgttggaaatgttgagtggggttttagagattacgcagttacagtgtttacatgactttgctgtgatttatggttttgattgtgatatagctgtgatgaactctatgttgaatttgtattgcaagtgtgatcatgttggagatgctaaggatttatttgatcagatggagcaacgagatatggtttcatggaacacaatgatttcagggtatgcttctgttggtaatatgtctgaaatcttgaagcttttgtacagaatgagaggtgatggtttaagacctgatcagcagacatttggagcatcactttcagtgagtggaacaatgtgtgatcttgaaatgggaagaatgttgcactgccaaattgtaaaaactggttttgatgtagatatgcatctcaagacggcattgataacaatgtacttgaagtgtggaaaggaggaagcttcatatcgggtactcgaaacgattcccaataaggatgttgtttgctggacagtcatgatatcaggacttatgcggttgggtagagcagaaaaggcactgattgttttctcggaaatgttacaatcaggatcagacctgtcgagtgaagcaatagctagtgttgtagcatcttgtgctcaattgggttcctttgatcttggcgcttcagtccatggctatgtactgaggcatggatatacactagacactcctgcgttgaactctttgatcacaatgtatgcaaagtgcggtcatttggataaaagtttagttatctttgaacggatgaatgaaagagacttagtttcgtggaatgcgattatctccggatatgcccagaacgtagatctgtgtaaggccttgttattgtttgaagaaatgaagttcaaaaccgtgcaacaagttgattcatttactgttgtctcacttttacaagcctgttcatctgctggagctctccctgtagggaaactgatccactgtattgtaatcagaagctttatcaggccatgttccttggttgatacagctctagttgatatgtattcgaaatgtggctacttagaagctgcacagaggtgtttcgattcgatctcgtggaaagatgttgtttcatggggcatactcattgcagggtatggttttcatggtaaaggggatattgctttggaaatttactcagagtttcttcactctggaatggagccgaaccacgtgatatttcttgcagttctctcatcttgcagccataatggaatggttcaacaaggtttgaaaatattcagttcaatggtcagagattttggtgttgaaccgaatcacgaacaccttgcttgtgtggttgatcttctatgtagagctaaaagaatagaagacgcattcaagttctacaaagagaactttaccagaccttcgattgatgtcttgggtataatactcgatgcttgccgtgcaaatgggaaaacagaggtcgaagatataatttgtgaggatatgatcgagttgaagccaggggacgctggacattacgtaaaactaggacattcttttgctgcgatgaagagatgggacgatgtgagtgaatcatggaatcagatgaggtctctcggcttgaaaaagctcccgggatggagcaaaatcgagatgaacgggaaaaccacaacatttttcatgaatcatacatcacattcagatgatacagtgtctctattaaaacttcttagcagggaaatgatgcagtttggaccgtctctgtattggcatctcaatgagaccattgcagattctctccactcctcttgtcctccttgtgtatgtgattgttcttctcagcctctcctctccattcccgacgattgcatgaggcacgaggaagggagtgaagagagcgagagtagttttactgaaatggtagctgaagagctgaagctaagagaagcacaagctcaagaagacgaatggcgtgcagataggttgctgctagatgctaagaaagcggcgtctcagtatcagaaagaggctgataaatgcagtatggggatggaaacatgtgagctagcaagagagaaagcagaagcagctctagatgaacagagaagactttcttacatgtgggagcttcgagctcggcaaggaggatggaaagaaggaactgttgcttctgatgttatctaa

SEQ ID NO: 89309 - protein, 868 aa, Arabidopsis thaliana
  peptide (1)..(868): Ceres Seq. ID no. 12717678
MIRTSSVLNSTKYFNSHINHLSSHGDHKQVLSTFSSMLANKLLPDTFTFPSLLKACASLQRLSFGLSIHQQVLVNGFSSDFYISSSLVNLYAKFGLLAHARKVFEEMRERDVVHWTAMIGCYSRAGIVGEACSLVNEMRFQGIKPGPVTLLEMLSGVLEITQLQCLHDFAVIYGFDCDIAVMNSMLNLYCKCDHVGDAKDLFDQMEQRDMVSWNTMISGYASVGNMSEILKLLYRMRGDGLRPDQQTFGASLSVSGTMCDLEMGRMLHCQIVKTGFDVDMHLKTALITMYLKCGKEEASYRVLETIPNKDVVCWTVMISGLMRLGRAEKALIVFSEMLQSGSDLSSEAIASVVASCAQLGSFDLGASVHGYVLRHGYTLDTPALNSLITMYAKCGHLDKSLVIFERMNERDLVSWNAIISGYAQNVDLCKALLLFEEMKFKTVQQVDSFTVVSLLQACSSAGALPVGKLIHCIVIRSFIRPCSLVDTALVDMYSKCGYLEAAQRCFDSISWKDVVSWGILIAGYGFHGKGDIALEIYSEFLHSGMEPNHVIFLAVLSSCSHNGMVQQGLKIFSSMVRDFGVEPNHEHLACVVDLLCRAKRIEDAFKFYKENFTRPSIDVLGIILDACRANGKTEVEDIICEDMIELKPGDAGHYVKLGHSFAAMKRWDDVSESWNQMRSLGLKKLPGWSKIEMNGKTTTFFMNHTSHSDDTVSLLKLLSREMMQFGPSLYWHLNETIADSLHSSCPPCVCDCSSQPLLSIPDDCMRHEEGSEESESSFTEMVAEELKLREAQAQEDEWRADRLLLDAKKAASQYQKEADKCSMGMETCELAREKAEAALDEQRRLSYMWELRARQGGWKEGTVASDVI

SEQ ID NO: 89310 - protein, 832 aa, Arabidopsis thaliana
  peptide (1)..(832): Ceres Seq. ID no. 12717679
MLANKLLPDTFTFPSLLKACASLQRLSFGLSIHQQVLVNGFSSDFYISSSLVNLYAKFGLLAHARKVFEEMRERDVVHWTAMIGCYSRAGIVGEACSLVNEMRFQGIKPGPVTLLEMLSGVLEITQLQCLHDFAVIYGFDCDIAVMNSMLNLYCKCDHVGDAKDLFDQMEQRDMVSWNTMISGYASVGNMSEILKLLYRMRGDGLRPDQQTFGASLSVSGTMCDLEMGRMLHCQIVKTGFDVDMHLKTALITMYLKCGKEEASYRVLETIPNKDVVCWTVMISGLMRLGRAEKALIVFSEMLQSGSDLSSEAIASVVASCAQLGSFDLGASVHGYVLRHGYTLDTPALNSLITMYAKCGHLDKSLVIFERMNERDLVSWNAIISGYAQNVDLCKALLLFEEMKFKTVQQVDSFTVVSLLQACSSAGALPVGKLIHCIVIRSFIRPCSLVDTALVDMYSKCGYLEAAQRCFDSISWKDVVSWGILIAGYGFHGKGDIALEIYSEFLHSGMEPNHVIFLAVLSSCSHNGMVQQGLKIFSSMVRDFGVEPNHEHLACVVDLLCRAKRIEDAFKFYKENFTRPSIDVLGIILDACRANGKTEVEDIICEDMIELKPGDAGHYVKLGHSFAAMKRWDDVSESWNQMRSLGLKKLPGWSKIEMNGKTTTFFMNHTSHSDDTVSLLKLLSREMMQFGPSLYWHLNETIADSLHSSCPPCVCDCSSQPLLSIPDDCMRHEEGSEESESSFTEMVAEELKLREAQAQEDEWRADRLLLDAKKAASQYQKEADKCSMGMETCELAREKAEAALDEQRRLSYMWELRARQGGWKEGTVASDVI

SEQ ID NO: 89311 - protein, 762 aa, Arabidopsis thaliana
  peptide (1)..(762): Ceres Seq. ID no. 12717680
MRERDVVHWTAMIGCYSRAGIVGEACSLVNEMRFQGIKPGPVTLLEMLSGVLEITQLQCLHDFAVIYGFDCDIAVMNSMLNLYCKCDHVGDAKDLFDQMEQRDMVSWNTMISGYASVGNMSEILKLLYRMRGDGLRPDQQTFGASLSVSGTMCDLEMGRMLHCQIVKTGFDVDMHLKTALITMYLKCGKEEASYRVLETIPNKDVVCWTVMISGLMRLGRAEKALIVFSEMLQSGSDLSSEAIASVVASCAQLGSFDLGASVHGYVLRHGYTLDTPALNSLITMYAKCGHLDKSLVIFERMNERDLVSWNAIISGYAQNVDLCKALLLFEEMKFKTVQQVDSFTVVSLLQACSSAGALPVGKLIHCIVIRSFIRPCSLVDTALVDMYSKCGYLEAAQRCFDSISWKDVVSWGILIAGYGFHGKGDIALEIYSEFLHSGMEPNHVIFLAVLSSCSHNGMVQQGLKIFSSMVRDFGVEPNHEHLACVVDLLCRAKRIEDAFKFYKENFTRPSIDVLGIILDACRANGKTEVEDIICEDMIELKPGDAGHYVKLGHSFAAMKRWDDVSESWNQMRSLGLKKLPGWSKIEMNGKTTTFFMNHTSHSDDTVSLLKLLSREMMQFGPSLYWHLNETIADSLHSSCPPCVCDCSSQPLLSIPDDCMRHEEGSEESESSFTEMVAEELKLREAQAQEDEWRADRLLLDAKKAASQYQKEADKCSMGMETCELAREKAEAALDEQRRLSYMWELRARQGGWKEGTVASDVI

SEQ ID NO: 89312 - DNA, 801 bp, Arabidopsis thaliana
  misc_feature (1)..(801): Ceres Seq. ID no. 12717834
  misc_feature (1)..(801): Ortholog of  Ceres SEQ ID NO 13654285 as cited in SEQ ID NO 68661
atggatcccaagaacctaaatcgtcaccaagtaccaaatttcttgaacccaccaccaccaccgcgaaatcagggtttggtagatgatgatgctgcttctgctgttgtttccgacgagaatcgcaaaccaacaactgagattaaagatttccagatcgtggtctctgcttccgacaaagaaccaaacaagaagagtcagaatcagaaccagcttggtcctaagagaagctctaacaaagacagacacactaaagtcgaaggtagaggtcgacgaattcggatgcctgctctttgtgctgctaggatttttcaattgactagagaattgggtcataaatctgatggtgaaactatccagtggctgcttcaacaagctgagccatcgattattgcagctactggttcaggaactataccggcctctgctttagcttcttcagctgcaacctctaaccatcatcaagctgggtttggttctggtgtgccaaccactggtttaatgagtgaaggagctggttatagaattgggtttcctggttttgattttcctggtgttggtcatatgagttttgcatctattttgggtgggaatcataatcagatgcctggacttgagttaggcttgtctcaagaagggaatgttggtgttttgaatcctcagtcttttactcagatttatcaacagatgggtcaggctcaggctcaagctcaaggtagggttcttcaccatatgcatcataaccatgaagaacatcagcaagagagtggtgagaaagatgattctcaaggctcaggtcgttaa

SEQ ID NO: 89313 - protein, 266 aa, Arabidopsis thaliana
  peptide (1)..(266): Ceres Seq. ID no. 12717835
MDPKNLNRHQVPNFLNPPPPPRNQGLVDDDAASAVVSDENRKPTTEIKDFQIVVSASDKEPNKKSQNQNQLGPKRSSNKDRHTKVEGRGRRIRMPALCAARIFQLTRELGHKSDGETIQWLLQQAEPSIIAATGSGTIPASALASSAATSNHHQAGFGSGVPTTGLMSEGAGYRIGFPGFDFPGVGHMSFASILGGNHNQMPGLELGLSQEGNVGVLNPQSFTQIYQQMGQAQAQAQGRVLHHMHHNHEEHQQESGEKDDSQGSGR

SEQ ID NO: 89314 - protein, 173 aa, Arabidopsis thaliana
  peptide (1)..(173): Ceres Seq. ID no. 12717836
MPALCAARIFQLTRELGHKSDGETIQWLLQQAEPSIIAATGSGTIPASALASSAATSNHHQAGFGSGVPTTGLMSEGAGYRIGFPGFDFPGVGHMSFASILGGNHNQMPGLELGLSQEGNVGVLNPQSFTQIYQQMGQAQAQAQGRVLHHMHHNHEEHQQESGEKDDSQGSGR

SEQ ID NO: 89315 - DNA, 702 bp, Arabidopsis thaliana
  misc_feature (1)..(702): Ceres Seq. ID no. 12717867
  misc_feature (1)..(702): Ortholog of  Ceres SEQ ID NO 12609146 as cited in SEQ ID NO 52118
  misc_feature (1)..(702): Ortholog of  Ceres SEQ ID NO 14316158 as cited in SEQ ID NO 52413
  misc_feature (1)..(702): Ortholog of  Ceres SEQ ID NO 13638136 as cited in SEQ ID NO 58644
  misc_feature (1)..(702): Ortholog of  Ceres SEQ ID NO 12587035 as cited in SEQ ID NO 63605
atggaggatcggttctccactatcaccaatcttcatggagatcgtaaacaggcaatatttggagtctatgttggtcatggaggagttaaagcggctgagtgtccagctaagaacttagataagaacattgtagaagaagtagttgacacaacgtttcttaaggaggaaggttttaagggtggttcatcctgtgtcacggctttggttagcgaagggagccttgttgtgtcaaacgccggtgactgtcgtgctgttatgagtgtaggaggtgtagctaaagttttattttctgatcattgtccgtctagagatgatgaacggaaaagaattgaaaccacgggaggatatgttgatatgtttcacggatccttagttgtgccaagaggaatcggagatgctcaacttaagaaatgggttatagctgaaccagagacaaagatctcgagagttgagcatgaccatgagttcttaatcttggcatcacatggtttatgggataaggtgagtaaccaagaagcagtagacattgctcgtcccttctgcttacgaaccgagaagccattgttgttagcagcttgtaagaagcttgttgatctctcggcttcacgaggctcgtttgatgatatcagtgtgatgttgatcccattgcggccagttcgtatagaaaagagaggcatcttagaagatatcttatttagctag

SEQ ID NO: 89316 - protein, 233 aa, Arabidopsis thaliana
  peptide (1)..(233): Ceres Seq. ID no. 12717868
MEDRFSTITNLHGDRKQAIFGVYVGHGGVKAAECPAKNLDKNIVEEVVDTTFLKEEGFKGGSSCVTALVSEGSLVVSNAGDCRAVMSVGGVAKVLFSDHCPSRDDERKRIETTGGYVDMFHGSLVVPRGIGDAQLKKWVIAEPETKISRVEHDHEFLILASHGLWDKVSNQEAVDIARPFCLRTEKPLLLAACKKLVDLSASRGSFDDISVMLIPLRPVRIEKRGILEDILFS

SEQ ID NO: 89317 - protein, 148 aa, Arabidopsis thaliana
  peptide (1)..(148): Ceres Seq. ID no. 12717869
MSVGGVAKVLFSDHCPSRDDERKRIETTGGYVDMFHGSLVVPRGIGDAQLKKWVIAEPETKISRVEHDHEFLILASHGLWDKVSNQEAVDIARPFCLRTEKPLLLAACKKLVDLSASRGSFDDISVMLIPLRPVRIEKRGILEDILFS

SEQ ID NO: 89318 - DNA, 411 bp, Arabidopsis thaliana
  misc_feature (1)..(411): Ceres Seq. ID no. 12717908
  misc_feature (1)..(411): Ortholog of  Ceres SEQ ID NO 13648014 as cited in SEQ ID NO 20332
atgaaacaattgttagtctttctatttgtttttagcatttgcatgctagaccatgtatcaggcggcggaatcaggatctcgaacgaactcaaaaacaagaaacttctttggatgcggtgttattccaaagatgacgtattaggtccaaagataataccaatcggacaacattatgaaaatctttttgatattaacttttggcatacaacccgttttatgtgtactttgagacaaggtcctaactttagacactatcagaactttacagcattcaagcttttcgctatggcagatgaaggaggtctatgggattggagagcaagagaaaatgggatctatttaaaaaaagaagctggcgagaaagttttaaacccagtttggatgcataaagagtatgattggatttattaa

SEQ ID NO: 89319 - protein, 136 aa, Arabidopsis thaliana
  peptide (1)..(136): Ceres Seq. ID no. 12717909
MKQLLVFLFVFSICMLDHVSGGGIRISNELKNKKLLWMRCYSKDDVLGPKIIPIGQHYENLFDINFWHTTRFMCTLRQGPNFRHYQNFTAFKLFAMADEGGLWDWRARENGIYLKKEAGEKVLNPVWMHKEYDWIY

SEQ ID NO: 89320 - protein, 122 aa, Arabidopsis thaliana
  peptide (1)..(122): Ceres Seq. ID no. 12717910
MLDHVSGGGIRISNELKNKKLLWMRCYSKDDVLGPKIIPIGQHYENLFDINFWHTTRFMCTLRQGPNFRHYQNFTAFKLFAMADEGGLWDWRARENGIYLKKEAGEKVLNPVWMHKEYDWIY

SEQ ID NO: 89321 - protein, 99 aa, Arabidopsis thaliana
  peptide (1)..(99): Ceres Seq. ID no. 12717911
MRCYSKDDVLGPKIIPIGQHYENLFDINFWHTTRFMCTLRQGPNFRHYQNFTAFKLFAMADEGGLWDWRARENGIYLKKEAGEKVLNPVWMHKEYDWIY

SEQ ID NO: 89322 - DNA, 1173 bp, Arabidopsis thaliana
  misc_feature (1)..(1173): Ceres Seq. ID no. 12717958
  misc_feature (1)..(1173): Ortholog of  Ceres SEQ ID NO 14310896 as cited in SEQ ID NO 53480
  misc_feature (1)..(1173): Ortholog of  Ceres SEQ ID NO 13660685 as cited in SEQ ID NO 67678
atggcggagtctgcgatccgaaccatcgtcgaatcaattcactcatcgccgacgcaagccgtcgtgtatctctccggcggtgcctctcagtctttaggttggttaatgtcagttcctggagcttcgaacacacttctcgaagccgtggttccgtattccatgatctctatggttcaattactcggcagggttccgaaccaacactgtagccaatcaatggcgaatgaaatggctttgttagcttataatcgtgctcttaagctttctaagccaggatgtgcggttcttggtgttggttttactggaacgttagcaacttctcgtccaaagcgtggggatcataggttctttttgtcgataagagcttccaaccggatatgggaaacttcagttactctaacaaagggaaaacgaagccgagaggaagaagataaagtggcaagctctgtactgattcaggctatggctaaggcatgccaagtttctgagacacttgactctggcttgactgattctgaggtgcttaatgagtctgtaatccagtttagtgaagaagaagaactagaacagcttatagatggacaaatatgctctaagatctatccattttctaaagcagaatcatacgggtcggataaagatagaaagattatactgcctggttcttttaacccattacatgacggtgatctcaagctgttggaagctgctatgagtgtttctgaggaaggagggtatccatgttttgaaatatctgcactgaatgcagacaaaccatcgcttacagttacagagattaaagatcgtgtcaaacaatttgaagtacttgaaaagacggtaatagtttcaaatcagcctttcttctacaagaaagctgaactcttcccaggaagcagttttgtaattggtgctgatactgcagcaaggattgttaatccaaagtactatgaaggaagccacaaaaggatgttggaggtactaggtgattgcaaacgaacaggttgcaagttccttgttggtggccgtaatgtagatagtgtattcaaggttcttgacgatcatgagattccaaaggaaataagtacaatgtttacctcaatttcagcagatacattccgtatggatatatcctctacagagctaagaaagaaccaaggaggtgttatttcataa

SEQ ID NO: 89323 - protein, 390 aa, Arabidopsis thaliana
  peptide (1)..(390): Ceres Seq. ID no. 12717959
MAESAIRTIVESIHSSPTQAVVYLSGGASQSLGWLMSVPGASNTLLEAVVPYSMISMVQLLGRVPNQHCSQSMANEMALLAYNRALKLSKPGCAVLGVGFTGTLATSRPKRGDHRFFLSIRASNRIWETSVTLTKGKRSREEEDKVASSVLIQAMAKACQVSETLDSGLTDSEVLNESVIQFSEEEELEQLIDGQICSKIYPFSKAESYGSDKDRKIILPGSFNPLHDGDLKLLEAAMSVSEEGGYPCFEISALNADKPSLTVTEIKDRVKQFEVLEKTVIVSNQPFFYKKAELFPGSSFVIGADTAARIVNPKYYEGSHKRMLEVLGDCKRTGCKFLVGGRNVDSVFKVLDDHEIPKEISTMFTSISADTFRMDISSTELRKNQGGVIS

SEQ ID NO: 89324 - protein, 355 aa, Arabidopsis thaliana
  peptide (1)..(355): Ceres Seq. ID no. 12717960
MSVPGASNTLLEAVVPYSMISMVQLLGRVPNQHCSQSMANEMALLAYNRALKLSKPGCAVLGVGFTGTLATSRPKRGDHRFFLSIRASNRIWETSVTLTKGKRSREEEDKVASSVLIQAMAKACQVSETLDSGLTDSEVLNESVIQFSEEEELEQLIDGQICSKIYPFSKAESYGSDKDRKIILPGSFNPLHDGDLKLLEAAMSVSEEGGYPCFEISALNADKPSLTVTEIKDRVKQFEVLEKTVIVSNQPFFYKKAELFPGSSFVIGADTAARIVNPKYYEGSHKRMLEVLGDCKRTGCKFLVGGRNVDSVFKVLDDHEIPKEISTMFTSISADTFRMDISSTELRKNQGGVIS

SEQ ID NO: 89325 - protein, 337 aa, Arabidopsis thaliana
  peptide (1)..(337): Ceres Seq. ID no. 12717961
MISMVQLLGRVPNQHCSQSMANEMALLAYNRALKLSKPGCAVLGVGFTGTLATSRPKRGDHRFFLSIRASNRIWETSVTLTKGKRSREEEDKVASSVLIQAMAKACQVSETLDSGLTDSEVLNESVIQFSEEEELEQLIDGQICSKIYPFSKAESYGSDKDRKIILPGSFNPLHDGDLKLLEAAMSVSEEGGYPCFEISALNADKPSLTVTEIKDRVKQFEVLEKTVIVSNQPFFYKKAELFPGSSFVIGADTAARIVNPKYYEGSHKRMLEVLGDCKRTGCKFLVGGRNVDSVFKVLDDHEIPKEISTMFTSISADTFRMDISSTELRKNQGGVIS

SEQ ID NO: 89326 - DNA, 924 bp, Arabidopsis thaliana
  misc_feature (1)..(924): Ceres Seq. ID no. 12717974
  misc_feature (1)..(924): Ortholog of  Ceres SEQ ID NO 13591776 as cited in SEQ ID NO 20695
  misc_feature (1)..(924): Ortholog of  Ceres SEQ ID NO 13595072 as cited in SEQ ID NO 55971
attctcacttacttcttttctttttttgtgttcttgtttagaagaagcaatggccacttcagcaatccaacactcttctttcgctggccaaacgaccctaaagccatccaacgatctcctccgcaaaatcggagcctccaatggcggtggccgcatcatcatgcgtcgtaccgtcaagtctactcctcagagcatctggtacggaccagaccgtcccaaatacctaggaccattttccgaaaacacaccatcatacctaaccggagaataccctggagactacggttgggacaccgctggtctctcagccgatccagaaacattcgcaaagaatcgtgagctcgaagtgatccacagtagatgggcaatgttgggagctttaggctgcaccttccctgaaattctctcaaaaaacggagtcaaattcggtgaagccgtgtggttcaaggcaggatctcaaatcttctcagaaggagggcttgactacctcggaaaccctaacttgatccacgcgcaaagcatattagctatatgggcgtgtcaagttgtgctaatgggattcattgaagggtacagaatcggaggtggtcctcttggggaagggcttgacccgctttacccgggcggggccttcgacccgttgaacttagcggaggatccagaagcgttttcagagttgaaagtgaaggagcttaaaaacggtcgtcttgctatgttctcaatgtttggattctttgtccaagccatagttaccggtaaaggtccgatcgaaaatctgttcgatcacattgcagaccctgtggctaacaatgcttgggcttacgccaccaacttcgtccccggaaaatagagtttgatcggataatttatgtaaattatatcttttaaacatttatcaatgcattaaagttatccctatatttg

SEQ ID NO: 89327 - protein, 282 aa, Arabidopsis thaliana
  peptide (1)..(282): Ceres Seq. ID no. 12717975
FSLTSFLFLCSCLEEAMATSAIQHSSFAGQTTLKPSNDLLRKIGASNGGGRIIMRRTVKSTPQSIWYGPDRPKYLGPFSENTPSYLTGEYPGDYGWDTAGLSADPETFAKNRELEVIHSRWAMLGALGCTFPEILSKNGVKFGEAVWFKAGSQIFSEGGLDYLGNPNLIHAQSILAIWACQVVLMGFIEGYRIGGGPLGEGLDPLYPGGAFDPLNLAEDPEAFSELKVKELKNGRLAMFSMFGFFVQAIVTGKGPIENLFDHIADPVANNAWAYATNFVPGK

SEQ ID NO: 89328 - protein, 266 aa, Arabidopsis thaliana
  peptide (1)..(266): Ceres Seq. ID no. 12717976
MATSAIQHSSFAGQTTLKPSNDLLRKIGASNGGGRIIMRRTVKSTPQSIWYGPDRPKYLGPFSENTPSYLTGEYPGDYGWDTAGLSADPETFAKNRELEVIHSRWAMLGALGCTFPEILSKNGVKFGEAVWFKAGSQIFSEGGLDYLGNPNLIHAQSILAIWACQVVLMGFIEGYRIGGGPLGEGLDPLYPGGAFDPLNLAEDPEAFSELKVKELKNGRLAMFSMFGFFVQAIVTGKGPIENLFDHIADPVANNAWAYATNFVPGK

SEQ ID NO: 89329 - protein, 229 aa, Arabidopsis thaliana
  peptide (1)..(229): Ceres Seq. ID no. 12717977
MRRTVKSTPQSIWYGPDRPKYLGPFSENTPSYLTGEYPGDYGWDTAGLSADPETFAKNRELEVIHSRWAMLGALGCTFPEILSKNGVKFGEAVWFKAGSQIFSEGGLDYLGNPNLIHAQSILAIWACQVVLMGFIEGYRIGGGPLGEGLDPLYPGGAFDPLNLAEDPEAFSELKVKELKNGRLAMFSMFGFFVQAIVTGKGPIENLFDHIADPVANNAWAYATNFVPGK

SEQ ID NO: 89330 - DNA, 886 bp, Arabidopsis thaliana
  misc_feature (1)..(886): Ceres Seq. ID no. 12718005
  misc_feature (1)..(886): Ortholog of  Ceres SEQ ID NO 12610334 as cited in SEQ ID NO 56235
  misc_feature (1)..(886): Ortholog of  Ceres SEQ ID NO 13654825 as cited in SEQ ID NO 62409
acacacaatccaatcaaaacacacagagagaagaaaaactcagaagaaaagccaaagagtgaaacaaaaatggcgtcgacgactctctcaatcgcaacaacaatccgttcctcatcttatcctactctcgcttccatcaatcacttcccttcccgaaccaccaccatcgaattcccctctcgcttcggtggtggttcatcatccacattgacccaccgtgcaacccatctccgtccaatcgccgccgtcgaagctccggagaaaatcgagaagatcggatccgaaatctcatccctaaccctcgaagaagctcgtatcctcgtcgactatctccaagacaaattcggtgtctccccactctctttagcccccgcagcagcggcggttgctgctccagccgacggtggcgcggcggctgtagtggaggagcaaacagagttcgatgtggttatcaatgaagttccgagtagttctcgtattgcagtaattaaagctgttagggctttgactagcttggcgttgaaggaagctaaggagctaatcgaaggattaccaaagaagtttaaagaaggtatcactaaagatgaagctgaagaagctaagaagactcttgaagaagctggtgctaaagtctccattgcttaaggtttttataaaaaaaaaaaaagaagttgttatcttttctggaatttgattggtcttttgtgttgtttagtatagtttgcgtctggaattgttgagaaattgttgtaatttgaatcacatttggtttcccattagctgatttcgccattgatgtgagctttttggtagctgcacataacatgtttgttgaaatgcctaaatgaggcaaatcactcgtagttgcttaacatgaaacagagtt

SEQ ID NO: 89331 - protein, 214 aa, Arabidopsis thaliana; identical to SEQ ID NO: 29117
  peptide (1)..(214): Ceres Seq. ID no. 12718006

SEQ ID NO: 89332 - protein, 191 aa, Arabidopsis thaliana; identical to SEQ ID NO: 21067
  peptide (1)..(191): Ceres Seq. ID no. 12718007

SEQ ID NO: 89333 - DNA, 1410 bp, Arabidopsis thaliana
  misc_feature (1)..(1410): Ceres Seq. ID no. 12718139
  misc_feature (1)..(1410): Ortholog of  Ceres SEQ ID NO 13595351 as cited in SEQ ID NO 55934
  misc_feature (1)..(1410): Ortholog of  Ceres SEQ ID NO 13639645 as cited in SEQ ID NO 57488
atggtggtgtttcagacaggctacgctggtaatcacgtgatcatgagatatgctctaaacttaggagtaagcaagctcgtcttcccactttaccgcaccatcgtcgctttctctgttcttgctccctctgcttacttccttgaaaaaaaagaaagaccggcgatgaaaatcagttttctgattcaattcttccttcttggactcgttggaataacgttaaaccaaggattttacatctttggattggacaatacctcaccaacattcgcatcagcaactgaaaatgttgttcctgctgtttcattcctcatggcagcgttgctcggaatagagaaggtggaatggaagaggaaagatggtatagccaaagtggtggggacaattgtatctgtcgcaggctctttggttataacactctataaaggaccaaccatttaccaaccgagtctgaatatagtgaaccaaactattaaacctgaagaagcagaggaagaaaacaagaactggacgttgggatgtctctgtttgatgggtcactgtttatgttggtcaagttggattgtgttacaatcaccattgcttaaaaagtacccagctcgcttctccttcgtctcctattcttgctttttcgcagtgatacagttctttggaatttcggcttatttcgagagagatctagagaggtggaagataatatcaggaggcgaattatacgcgttactctacactggtttagttggttcagcaatggtgtttgcaatacaaatatatgtagtggaaagaggaggacctctgtttgtatcagcgtatttgcctcttcaaactttgattgctgctgttttagctactttagctcttggtgaacacttttaccttggaggattgataggtgcaatactaatcatgagtggactatacttagttgtgatgggaaagagttgggagaatcaagctctttgccaacaacaacaacacatgatttcttcagcagcatcagattttggtgatgaagaagactaccataataataaaccaagatctcctattaagggagcgaatcttgaattcgaatccaaatcaaatgacaatggaaatgtgaaaatcgcaccaaacgaccaaagtttcctcacaattcttgacgacataaagtcttccaaatctccggctgttattaactatggagcttcttggtgtggagtttgtagccagattcttcctgcattccgaaagctcagcaacagtttctcgaagctcaagtttgtttatgcagatatcgacgagtgccctgaaaccactcgtcacatccgttacacacccacgtttcagttttacagagacggcgagaaagtcgatgagatgtttggagctggtgaacagaggctccatgatcgtctttggcttcactcttga

SEQ ID NO: 89334 - protein, 469 aa, Arabidopsis thaliana
  peptide (1)..(469): Ceres Seq. ID no. 12718140
MVVFQTGYAGNHVIMRYALNLGVSKLVFPLYRTIVAFSVLAPSAYFLEKKERPAMKISFLIQFFLLGLVGITLNQGFYIFGLDNTSPTFASATENVVPAVSFLMAALLGIEKVEWKRKDGIAKVVGTIVSVAGSLVITLYKGPTIYQPSLNIVNQTIKPEEAEEENKNWTLGCLCLMGHCLCWSSWIVLQSPLLKKYPARFSFVSYSCFFAVIQFFGISAYFERDLERWKIISGGELYALLYTGLVGSAMVFAIQIYVVERGGPLFVSAYLPLQTLIAAVLATLALGEHFYLGGLIGAILIMSGLYLVVMGKSWENQALCQQQQHMISSAASDFGDEEDYHNNKPRSPIKGANLEFESKSNDNGNVKIAPNDQSFLTILDDIKSSKSPAVINYGASWCGVCSQILPAFRKLSNSFSKLKFVYADIDECPETTRHIRYTPTFQFYRDGEKVDEMFGAGEQRLHDRLWLHS

SEQ ID NO: 89335 - protein, 455 aa, Arabidopsis thaliana
  peptide (1)..(455): Ceres Seq. ID no. 12718141
MRYALNLGVSKLVFPLYRTIVAFSVLAPSAYFLEKKERPAMKISFLIQFFLLGLVGITLNQGFYIFGLDNTSPTFASATENVVPAVSFLMAALLGIEKVEWKRKDGIAKVVGTIVSVAGSLVITLYKGPTIYQPSLNIVNQTIKPEEAEEENKNWTLGCLCLMGHCLCWSSWIVLQSPLLKKYPARFSFVSYSCFFAVIQFFGISAYFERDLERWKIISGGELYALLYTGLVGSAMVFAIQIYVVERGGPLFVSAYLPLQTLIAAVLATLALGEHFYLGGLIGAILIMSGLYLVVMGKSWENQALCQQQQHMISSAASDFGDEEDYHNNKPRSPIKGANLEFESKSNDNGNVKIAPNDQSFLTILDDIKSSKSPAVINYGASWCGVCSQILPAFRKLSNSFSKLKFVYADIDECPETTRHIRYTPTFQFYRDGEKVDEMFGAGEQRLHDRLWLHS

SEQ ID NO: 89336 - protein, 415 aa, Arabidopsis thaliana
  peptide (1)..(415): Ceres Seq. ID no. 12718142
MKISFLIQFFLLGLVGITLNQGFYIFGLDNTSPTFASATENVVPAVSFLMAALLGIEKVEWKRKDGIAKVVGTIVSVAGSLVITLYKGPTIYQPSLNIVNQTIKPEEAEEENKNWTLGCLCLMGHCLCWSSWIVLQSPLLKKYPARFSFVSYSCFFAVIQFFGISAYFERDLERWKIISGGELYALLYTGLVGSAMVFAIQIYVVERGGPLFVSAYLPLQTLIAAVLATLALGEHFYLGGLIGAILIMSGLYLVVMGKSWENQALCQQQQHMISSAASDFGDEEDYHNNKPRSPIKGANLEFESKSNDNGNVKIAPNDQSFLTILDDIKSSKSPAVINYGASWCGVCSQILPAFRKLSNSFSKLKFVYADIDECPETTRHIRYTPTFQFYRDGEKVDEMFGAGEQRLHDRLWLHS

SEQ ID NO: 89337 - DNA, 1269 bp, Arabidopsis thaliana
  misc_feature (1)..(1269): Ceres Seq. ID no. 12718151
  misc_feature (1)..(1269): Ortholog of  Ceres SEQ ID NO 13594209 as cited in SEQ ID NO 59089
  misc_feature (1)..(1269): Ortholog of  Ceres SEQ ID NO 13502874 as cited in SEQ ID NO 66298
  misc_feature (1)..(1269): Ortholog of  Ceres SEQ ID NO 12614124 as cited in SEQ ID NO 68392
atgttcttttatctttatttatcatcatcagctaaagaagttctcaagactcatgacctagagacatgcactcgacctaagatggtcacgaccggtttgttttcttacaacttcaaagacattggtttcactcaatatggagaggaatggggagagatgaaaaagcttatagggcttgagctctttagtccaaaaacgcaaaagtcttttaggtatatcagagaggaagagagtgacttgctggtcaagaaaatttcaaaatctgctcaaacacaaaccctagtggatttgggaaaaccccttttctccttcactgccggtattatatttagacttgcgtttggacagaacttccgtaagtgcgattttatcgatagggagagagtcgaagagctggtggtagagtcagagaccaacgtaggcaccttggcattttctgacttcttccccacgggtctcggatggcttatagaccggctctctggtcaaagttcgaggatgaacaaagtcttttccaaactcaccaatttatttgaacatgtgattgatgatcatttaaagactgaacaacatcaagatcactcaaacctcatcagtgccatgttgaatatgatcaataaacccaccaatataggctctttcaagatcacttccgatcatctcaaaggagtcatgtcggatgtgtttttagcgggagtgaacgcgggagtgatcacaatgatatggacgatgacagagctaaccagacatccaagaattcgagcaacactcggttccaacaaagagagaatcacagaagaagatctagagaaagttgagtacctaaagatggtgatcgaggaaacattcagactacacccacctgctccactcttgctcccaagattaacaatgtccgacgtcacaattcaaggctacaacattcccaaaaacaccatgattgagatcaacacttataccataggtcgtgatccaaaatgttggactaaccctgaagaattcattcctgagaggttttccaacacctctataaactacaagggtcagcatttcgagctcttgccctttggagctggtcgtaggagctgtcccggaatgtccttgggaatcaccattcttgagctaggccttcttaaccttctttatttctttgattggcgtttgcccaatggaatgaccattgctgacattgacatggaagaagttggagctttaaacatagctaagaaagtacctcttgagctcgtaccaactcttcatcattcgtga

SEQ ID NO: 89338 - protein, 422 aa, Arabidopsis thaliana
  peptide (1)..(422): Ceres Seq. ID no. 12718152
MFFYLYLSSSAKEVLKTHDLETCTRPKMVTTGLFSYNFKDIGFTQYGEEWGEMKKLIGLELFSPKTQKSFRYIREEESDLLVKKISKSAQTQTLVDLGKPLFSFTAGIIFRLAFGQNFRKCDFIDRERVEELVVESETNVGTLAFSDFFPTGLGWLIDRLSGQSSRMNKVFSKLTNLFEHVIDDHLKTEQHQDHSNLISAMLNMINKPTNIGSFKITSDHLKGVMSDVFLAGVNAGVITMIWTMTELTRHPRIRATLGSNKERITEEDLEKVEYLKMVIEETFRLHPPAPLLLPRLTMSDVTIQGYNIPKNTMIEINTYTIGRDPKCWTNPEEFIPERFSNTSINYKGQHFELLPFGAGRRSCPGMSLGITILELGLLNLLYFFDWRLPNGMTIADIDMEEVGALNIAKKVPLELVPTLHHS

SEQ ID NO: 89339 - protein, 395 aa, Arabidopsis thaliana
  peptide (1)..(395): Ceres Seq. ID no. 12718153
MVTTGLFSYNFKDIGFTQYGEEWGEMKKLIGLELFSPKTQKSFRYIREEESDLLVKKISKSAQTQTLVDLGKPLFSFTAGIIFRLAFGQNFRKCDFIDRERVEELVVESETNVGTLAFSDFFPTGLGWLIDRLSGQSSRMNKVFSKLTNLFEHVIDDHLKTEQHQDHSNLISAMLNMINKPTNIGSFKITSDHLKGVMSDVFLAGVNAGVITMIWTMTELTRHPRIRATLGSNKERITEEDLEKVEYLKMVIEETFRLHPPAPLLLPRLTMSDVTIQGYNIPKNTMIEINTYTIGRDPKCWTNPEEFIPERFSNTSINYKGQHFELLPFGAGRRSCPGMSLGITILELGLLNLLYFFDWRLPNGMTIADIDMEEVGALNIAKKVPLELVPTLHHS

SEQ ID NO: 89340 - protein, 370 aa, Arabidopsis thaliana
  peptide (1)..(370): Ceres Seq. ID no. 12718154
MKKLIGLELFSPKTQKSFRYIREEESDLLVKKISKSAQTQTLVDLGKPLFSFTAGIIFRLAFGQNFRKCDFIDRERVEELVVESETNVGTLAFSDFFPTGLGWLIDRLSGQSSRMNKVFSKLTNLFEHVIDDHLKTEQHQDHSNLISAMLNMINKPTNIGSFKITSDHLKGVMSDVFLAGVNAGVITMIWTMTELTRHPRIRATLGSNKERITEEDLEKVEYLKMVIEETFRLHPPAPLLLPRLTMSDVTIQGYNIPKNTMIEINTYTIGRDPKCWTNPEEFIPERFSNTSINYKGQHFELLPFGAGRRSCPGMSLGITILELGLLNLLYFFDWRLPNGMTIADIDMEEVGALNIAKKVPLELVPTLHHS

SEQ ID NO: 89341 - DNA, 1191 bp, Arabidopsis thaliana
  misc_feature (1)..(1191): Ceres Seq. ID no. 12718160
  misc_feature (1)..(1191): Ortholog of  Ceres SEQ ID NO 13593967 as cited in SEQ ID NO 56966
atgcagactccaaaatcaaggccaggatcattggagctgccacaaaagaagtctcctttaccagctcccaaagttgttaggagactcaaaccaagcggagcagaatccgatccaaaaaccaagacaatatcgaaaactcaaatcccgaaagtagtagctgatcgtcgctctgcaagaatccctctcaatgagattcagaagaagcggacgggaaggataccggaactggaatctacgatatctcagcttcaagaagagcttaagaaggcaaaagaagagctaaacagatcagaagcattgaaaagagaagctcaagaagaagctgaagatgccaagcatcagttaatggatatcaatgcctcggaagattcaagaattgaggagctgcgtaaactctcgcaggagcgagacaagacatggcagtctgaacttgaagctatgcagagacaacacggaatggattctaccgctctgtcttctgccattaacgaagttcagaaactgaaatcgaagctctttgagtccgagtctgagttagagcagtctaagtatgaggtaaggtctttagagaaactcgtcagacagctcgaggaagaaagagtaaacagtagagactcttcatcatcaatggaagtggaagagctgaaagaagcaatgaatctttcaaggcaagagataacacaattgaaatctgcagttgaagcagcagagacaaggtatcaagaagagtatatacagagcacattgcagataagaagcgcatacgaacaaacagaggcggttaaatcaagatattcacagagagaagcagagttaacggaagaattgaacagaaccaaagatgaaatcgaaggtttgcgcaaagagttaatggagaaggtgaaagaagacgaatctacgggcgatttgaagaagctagaatcggatttgatggaagtgagagggagtttaatggataaagagatggagttgcagattctaaggagtgcaatggagaagaaagtggaaaccgcaaacacggaagccatggaagctgagcttaaaagagtgaagattcaatgtgagcaatggaggaaagctgctgagacggcagcttctatactgaacaatgatgaggaaagaacagattctattgagactagcaaaatgttgaagaagtttggtgtgttactcaagaaaaaccataagtaa

SEQ ID NO: 89342 - protein, 396 aa, Arabidopsis thaliana; identical to SEQ ID NO: 49913
  peptide (1)..(396): Ceres Seq. ID no. 12718161

SEQ ID NO: 89343 - protein, 281 aa, Arabidopsis thaliana; identical to SEQ ID NO: 49914
  peptide (1)..(281): Ceres Seq. ID no. 12718162

SEQ ID NO: 89344 - protein, 250 aa, Arabidopsis thaliana; identical to SEQ ID NO: 49915
  peptide (1)..(250): Ceres Seq. ID no. 12718163

SEQ ID NO: 89345 - DNA, 1890 bp, Arabidopsis thaliana
  misc_feature (1)..(1890): Ceres Seq. ID no. 12718164
  misc_feature (1)..(1890): Ortholog of  Ceres SEQ ID NO 13654989 as cited in SEQ ID NO 63117
  misc_feature (1)..(1890): Ortholog of  Ceres SEQ ID NO 13655640 as cited in SEQ ID NO 63844
atgtctctctttctctccttcttcatttcaatcttgctctgtttcttcaatggagctacgacgacacagtttgatttctccacgctagccataagcaacctcaaactcctcggtgatgcacgtttaagcaatggaatcgttggcctcacacgtgacctctctgtacctaattccggcgccggaaaagtcttatactctaacccaatcagattccgacaacctggaactcactttccgacaagcttctcttcttttttctccttctctataaccaatgtcaacccttcttccatcggcggtggtctcgctttcgtcatctctcccgacgcaaactcaatcggcatcgctggtggctctcttggtctaaccggtccaaacggttccggttcaaaatttgtcgccgtcgaattcgatactttaatggatgtagatttcaaggacattaacagtaaccatgttggattcgacgtaaatggcgtagtttcctctgtttccggtgatcttggcaccgtaaacatcgatctcaagagcggcaacaccatcaattcatggatcgaatacgacggattgactcgggtcttcaacgtatcagtctcttactcaaatctgaaaccgaaagttccaattttgtctttccctctcgatttagatcgatacgtgaacgatttcatgttcgttggattctccgggtcaactcagggaagtacagagattcacagtatcgaatggtggagcttcagttcatcattcgggtcgagtctcggatccggatccgggtcacctcctcctcgggctaatttgatgaatccgaaagctaattcggtgaaatctccgccctataaagaactcaaagccggcacaaagaacttcaacgagagtcgtatcatcggacatggagccttcggagtcgtatacagaggaatattaccggagaccggagacatcgtcgccgtcaaacgatgcagccatagctcacaagacaaaaagaacgagtttttatctgaactatcaataatcggaagcttaagacacagaaacctcgtgagattacaaggatggtgtcacgagaaaggtgagattttgttagtctacgatctaatgcctaatggttcgcttgataaagctttgtttgagtcacgattcacgttaccgtgggatcatcggaaaaagatcttgcttggtgttgcatctgctttagcttatttacatagagagtgtgagaatcaggtgattcatagagatgttaagagtagtaatataatgttagatgagagttttaatgccaagcttggagatttcggattggcgagacagattgagcatgataagtcgccggaagcaactgttgccgccgggacgatgggatatttagcgccggagtatcttctgacgggtcgtgcttcggagaagacggatgtgtttagttacggagcggtggttttggaagtggttagtggaagaagaccgattgagaaggacttaaatgtgcaaagacataatgttggggtgaatccgaatttagtagaatgggtgtggggtttgtataaagaagggaaagtttctgcagctgctgattctaggcttgaaggtaagtttgatgaaggtgagatgtggcgggtcttggttgtgggcttggcttgttcgcatccggatccagcatttaggcccactatgaggtcagtggtgcaaatgctgattggtgaggctgatgtaccggttgtgcctaagtctagacccaccatgagttttagcacttcgcatttgttgctgagtttgcaagatactctctctgattgtaataccgtggctttgaactctagtcgatcgtcttcgtggtcggtgcccgaacataacgttatcattcgaagcgacgatgaccatttggtatag

SEQ ID NO: 89346 - protein, 629 aa, Arabidopsis thaliana
  peptide (1)..(629): Ceres Seq. ID no. 12718165
MSLFLSFFISILLCFFNGATTTQFDFSTLAISNLKLLGDARLSNGIVGLTRDLSVPNSGAGKVLYSNPIRFRQPGTHFPTSFSSFFSFSITNVNPSSIGGGLAFVISPDANSIGIAGGSLGLTGPNGSGSKFVAVEFDTLMDVDFKDINSNHVGFDVNGVVSSVSGDLGTVNIDLKSGNTINSWIEYDGLTRVFNVSVSYSNLKPKVPILSFPLDLDRYVNDFMFVGFSGSTQGSTEIHSIEWWSFSSSFGSSLGSGSGSPPPRANLMNPKANSVKSPPYKELKAGTKNFNESRIIGHGAFGVVYRGILPETGDIVAVKRCSHSSQDKKNEFLSELSIIGSLRHRNLVRLQGWCHEKGEILLVYDLMPNGSLDKALFESRFTLPWDHRKKILLGVASALAYLHRECENQVIHRDVKSSNIMLDESFNAKLGDFGLARQIEHDKSPEATVAAGTMGYLAPEYLLTGRASEKTDVFSYGAVVLEVVSGRRPIEKDLNVQRHNVGVNPNLVEWVWGLYKEGKVSAAADSRLEGKFDEGEMWRVLVVGLACSHPDPAFRPTMRSVVQMLIGEADVPVVPKSRPTMSFSTSHLLLSLQDTLSDCNTVALNSSRSSSWSVPEHNVIIRSDDDHLV

SEQ ID NO: 89347 - protein, 489 aa, Arabidopsis thaliana
  peptide (1)..(489): Ceres Seq. ID no. 12718166
MDVDFKDINSNHVGFDVNGVVSSVSGDLGTVNIDLKSGNTINSWIEYDGLTRVFNVSVSYSNLKPKVPILSFPLDLDRYVNDFMFVGFSGSTQGSTEIHSIEWWSFSSSFGSSLGSGSGSPPPRANLMNPKANSVKSPPYKELKAGTKNFNESRIIGHGAFGVVYRGILPETGDIVAVKRCSHSSQDKKNEFLSELSIIGSLRHRNLVRLQGWCHEKGEILLVYDLMPNGSLDKALFESRFTLPWDHRKKILLGVASALAYLHRECENQVIHRDVKSSNIMLDESFNAKLGDFGLARQIEHDKSPEATVAAGTMGYLAPEYLLTGRASEKTDVFSYGAVVLEVVSGRRPIEKDLNVQRHNVGVNPNLVEWVWGLYKEGKVSAAADSRLEGKFDEGEMWRVLVVGLACSHPDPAFRPTMRSVVQMLIGEADVPVVPKSRPTMSFSTSHLLLSLQDTLSDCNTVALNSSRSSSWSVPEHNVIIRSDDDHLV

SEQ ID NO: 89348 - protein, 406 aa, Arabidopsis thaliana
  peptide (1)..(406): Ceres Seq. ID no. 12718167
MFVGFSGSTQGSTEIHSIEWWSFSSSFGSSLGSGSGSPPPRANLMNPKANSVKSPPYKELKAGTKNFNESRIIGHGAFGVVYRGILPETGDIVAVKRCSHSSQDKKNEFLSELSIIGSLRHRNLVRLQGWCHEKGEILLVYDLMPNGSLDKALFESRFTLPWDHRKKILLGVASALAYLHRECENQVIHRDVKSSNIMLDESFNAKLGDFGLARQIEHDKSPEATVAAGTMGYLAPEYLLTGRASEKTDVFSYGAVVLEVVSGRRPIEKDLNVQRHNVGVNPNLVEWVWGLYKEGKVSAAADSRLEGKFDEGEMWRVLVVGLACSHPDPAFRPTMRSVVQMLIGEADVPVVPKSRPTMSFSTSHLLLSLQDTLSDCNTVALNSSRSSSWSVPEHNVIIRSDDDHLV

SEQ ID NO: 89349 - DNA, 1532 bp, Arabidopsis thaliana
  misc_feature (1)..(1532): Ceres Seq. ID no. 12718175
  misc_feature (1)..(1532): Ortholog of  Ceres SEQ ID NO 14311683 as cited in SEQ ID NO 51263
  misc_feature (1)..(1532): Ortholog of  Ceres SEQ ID NO 15177862 as cited in SEQ ID NO 56033
  misc_feature (1)..(1532): Ortholog of  Ceres SEQ ID NO 13661430 as cited in SEQ ID NO 61258
  misc_feature (1)..(1532): Ortholog of  Ceres SEQ ID NO 13590940 as cited in SEQ ID NO 68653
  misc_feature (1)..(1532): Ortholog of  Ceres SEQ ID NO 14301982 as cited in SEQ ID NO 0
gcagaacccttaaaccttatctcttcaccaccagcttctcaaagctttagcctcgagagcaaaattctctcaagctttagccatgtctgcctctgcttcttccctctctgctttcaatcctaaatcccttcctctctgcgtctccagacccgcttccgtctccgtcttacctccttccctctccttcaaacttcactccgaccacctcgtctctatcttcgcttcctccgccctcaaatgctcatcccccgccgagtacccgtcgcgtttcgttagaaacgttgctgtatcttcggattttgaggtggaggaagatgatatgttcgctgacggtgacgattcagcgcctgtggagcgtaactccttctctcctgaccttaagctctttgttggtaacctttcttttaacgttgatagcgctcagcttgctcagctctttgagagcgctggaaatgttgagatggttgaggttatctatgacaaagtgactggccggagcaggggtttcggatttgtgacaatgtcaaccgcagcggaagttgaagcagcagctcaacagttcaatggctatgaatttgaaggcagacctttgagagtcaatgctggccctcctccacctaaaagagaggaatccttctccagaggaccaagaagtggaggttacggttctgagcgtggtggaggttacggttccgagcgtggtggtggttatggttccgagcgtggtggtggttatggttccgagcgtggtggtggatacggttctcaacgtagtggtggtggttacggagggtctcaacgttccagttatggttcggggtcagggtccggttcgggctcaggttcaggaaaccgtctctacgtgggcaacctttcttggggtgttgatgacatggcacttgagaacttgtttaacgagcaaggaaaggtagttgaagctagggttatctacgacagggacagcggtagatccaagggttttggatttgtgacacttagctcttcccaagaggttcagaaggcgatcaattccttgaatggagcagatttggatggaagacaaataagagtctcagaggctgaggctaggccaccaagaggccaattttgagcggtcacacctctttcatattctcaaaaaatgcaaattctggagggttctttgaagcatatagggttagtggaaaatggcggtttcagacagtaactaaaactcactgctggtgcacgctaggctttatccgcctttgatgcatgaaggtcgttaaggaatggtctttttttgagaaagataacaattagattaaagcagagaacccatgtttcttgtctgttcgaatcctgcgagattggttgtagttgaagttgcattttcttcttgtcttttttgttggtattttgacacaatttggctttttggcatatgagagtgactgtagcagtctgttttatttgatgttcgtgatcttcttatgttctgaaaaccagttttcctaaaacttaacaaatttcgatatggaacaagaaatttt

SEQ ID NO: 89350 - protein, 342 aa, Arabidopsis thaliana; identical to SEQ ID NO: 24722
  peptide (1)..(342): Ceres Seq. ID no. 12718176

SEQ ID NO: 89351 - protein, 263 aa, Arabidopsis thaliana; identical to SEQ ID NO: 24723
  peptide (1)..(263): Ceres Seq. ID no. 12718177

SEQ ID NO: 89352 - protein, 216 aa, Arabidopsis thaliana; identical to SEQ ID NO: 24724
  peptide (1)..(216): Ceres Seq. ID no. 12718178

SEQ ID NO: 89353 - DNA, 968 bp, Arabidopsis thaliana
  misc_feature (1)..(968): Ceres Seq. ID no. 12718223
  misc_feature (1)..(968): Ortholog of  Ceres SEQ ID NO 14313662 as cited in SEQ ID NO 54162
  misc_feature (1)..(968): Ortholog of  Ceres SEQ ID NO 14302123 as cited in SEQ ID NO 0
  misc_feature (1)..(968): Ortholog of  Ceres SEQ ID NO 15179452 as cited in SEQ ID NO 0
acgccgctcatttttagggtttcagatataggcagattctcacatttgcaaacatgacgactcagatcagcaagaagagaaagtttgtagcggacggtgtgttctacgctgaattgaatgaggttcttacaagagagctagcagaggatggttactctggtgttgaggttagggttactcctatgaggactgagattatcatcagagctacacgtactcagaatgttctcggtgagaaggggaggagaattagggaattgacttcccttgttcagaagagattcaagtttccagttgacagtgttgagctttatgccgagaaggttaacaacagaggtctctgtgccatcgctcaggctgagtctttacgttacaagcttcttggtggtctcgctgttcgtagggcttgctatggtgtgttgaggtttgttatggagagtggagctaagggatgcgaggttatcgtgagtggaaagcttcgtgctgccagagccaagtctatgaagttcaaagatggctacatggtgtcatctggtcaaccaactaaggaatacatagactctgcagtgagacatgttttgcttagacaaggtgtgttgggaatcaaggtgaaggttatgcttgattgggaccctaagggcatatcaggaccaaagacaccattgcctgatgttgtgatcattcattctcctaaagaagaagaggccatctatgcacctgctcaggttgctgccccggctgctctcgtagcagatgcaccactcacagccgtagattaccctgcgatgatcccagtcgcctaaaagaatcctttgtactagtcgatgtgattttgttttcaactgttcttgctcttttgacagattatagcttctcgtatcttcgaatcagacacgtttcctctgttcttattcgaaaattatctcaagtttccattgttgaaaaagccctttttagtttcataaatc

SEQ ID NO: 89354 - protein, 249 aa, Arabidopsis thaliana; identical to SEQ ID NO: 28293
  peptide (1)..(249): Ceres Seq. ID no. 12718224

SEQ ID NO: 89355 - protein, 206 aa, Arabidopsis thaliana; identical to SEQ ID NO: 28294
  peptide (1)..(206): Ceres Seq. ID no. 12718225

SEQ ID NO: 89356 - DNA, 1258 bp, Arabidopsis thaliana
  misc_feature (1)..(1258): Ceres Seq. ID no. 12718251
  misc_feature (1)..(1258): Ortholog of  Ceres SEQ ID NO 15177654 as cited in SEQ ID NO 59933
  misc_feature (1)..(1258): Ortholog of  Ceres SEQ ID NO 14303600 as cited in SEQ ID NO 64632
  misc_feature (1)..(1258): Ortholog of  Ceres SEQ ID NO 14302776 as cited in SEQ ID NO 66919
atttcgtagcgcgcagagagagagagagagggacgatcttttctataactgaaacactactcgaggccaagttgctttagccgtaatcgtcgtcgtccctcttcccgatattatctcttctctgttcttcgatttcgaaaccctaacctcctctctttaattcgcgttttctggatcgaagatggtggcggctggtaaatccgacctttccttgcccaaaactttcgcctgcagtgccttcgctgcttgcgtcggcgaggtatgcacaattccattggacactgctaaagttaggcttcagctccaaaagtctgctcttgctggtgatgttactctgcctaaatatcgaggattgttgggaactgttggtaccatagcaagggaagaagggttacgttcactatggaaaggtgttgtacctggattgcatcgtcaatgcctatttggaggtcttaggattggaatgtatgagccggtgaaaaacttgtatgttggaaaagactttgtaggtgatgttccattgagcaagaaaattcttgctggtttgacaacaggtgcactgggtatcatggtagcaaatcccactgatcttgtgaaagttaggcttcaggccgaaggaaaactagctgcaggtgcgccaagacggtattctggagcgctgaatgcttattcaacaattgtgagacaggaaggagtccgagctctttggactggtcttggacctaacgtagcaagaaacgctattatcaatgctgctgaattagcgagttacgatcaagtgaaagagacgatcttgaagattccgggtttcactgacaacgttgtcacacatattctatctggactgggagcaggattctttgctgtctgcatcggctctcctgtcgacgtggttaagtcaagaatgatgggagattctggtgcttacaagggcaccattgactgcttcgtcaaaactctgaagagcgacggtcctatggcattttacaagggtttcatccccaactttggacgccttggctcatggaacgtaatcatgtttttgaccctcgaacaggcaaagaagtatgtccgggaactcgatgcgtccaaaagaaactgagacacatagttttaagcagagggaataagagcaacattgttttcttcttcattttcggtgattgagagaggccagaacttggtcgaatattgttttcggaatagagattcagttttcgagtaaaactgtgaaataaaatttctgtggattgctcat

SEQ ID NO: 89357 - protein, 306 aa, Arabidopsis thaliana; identical to SEQ ID NO: 41422
  peptide (1)..(306): Ceres Seq. ID no. 12718252

SEQ ID NO: 89358 - protein, 212 aa, Arabidopsis thaliana; identical to SEQ ID NO: 41423
  peptide (1)..(212): Ceres Seq. ID no. 12718253

SEQ ID NO: 89359 - protein, 177 aa, Arabidopsis thaliana; identical to SEQ ID NO: 41424
  peptide (1)..(177): Ceres Seq. ID no. 12718254

SEQ ID NO: 89360 - DNA, 1809 bp, Arabidopsis thaliana
  misc_feature (1)..(1809): Ceres Seq. ID no. 12718263
  misc_feature (1)..(1809): Ortholog of  Ceres SEQ ID NO 14310037 as cited in SEQ ID NO 20603
atgtcgatatttccttctttccaattgctagagctcaacataatctctgctcaagatctagctcctgtctcacgtaaaatgaagacctacgcggtggcttgggttcactctgaacgcaaactcaccacccgcgtagattacaccggtggtggaaacccaacttggaacgacaagtttgtcttccgagttagcgaggatttcctctacgccgatacttcagccgtcgtggttgaaatctacgctttacattggttccgtgatgttcacgttggcacagtccgtgtcctcattagcaacttaatccctccaaatcgccgacctggataccgaagcaacgaggagtaccgtcgtacaccccctcccggaatgcgattcgtcgcacttcaagttcgcagaccatcaggtcgtcctcaaggaatattaaacatcggtgtgggaatactggacggatcaatgcgtagcatgccactttacaccaatatggactcttctgcagtaggttacagagacttgcttggagaagaagatccaaatctgcagaatttgcatctcaatagcttcaaaggaagctcaaagaatccacaatcaccatcttctaaacaataccaatccgtagtctcgagaccgccaatgctccgtcgtacaaggagcgatacaagttcaatggtcgtttccgatcttctaagcagagttgagcgaagtcgtgtagctaataggaagccagcgagcgcgttgatgagcgcagaatcggaaactgtacctacaacgacgggacacgattcagtgacttcagattccgagctgacgaaatcgatagagtatgcacttccttatcaatccccaaagattccaagtcagggatacgattcatacgagcctgatttcatagatcaatcaccaaatcacaatgtgttgcggccgagaagtgagagacaacacgaacctgatttcatagatcaatcaccttttcgatcaaacgatcgttcacgcaaaactccgagaagatcaacaccaatgatcgagaaaccaagaccgccgagagactatgaccgtacaagcagccgcgcttcaccatatttgtcaagacacggaacgccgttgagatcaaacatcgtcgcgtctactccgatcagatctaacatggtttcatcaagtccaatgagatccaccggcgtcggatcaactccgagaagatctaacatcctcggatcgactccgttacgatccaacatcgtcggatcaactccgattagatctaactacaaggctacaccgatgaaatcgcctatgcaatttggtactccgatgagatctaatttagcaggaagaccggttttaacagaatccgaattaggtccgtcgccatcagaagtagcgcagaaaatggcgaaagagagatcacaagcttacgaaacagagagttcgattcttagtgaatggagcttagacgatgatagtaacatcgaaggtctccgatcgaaacttgagagatggagaacagagcttccgccgctttacgatctgggatcgagtcatcaaagcagcgatgtaggaagcggcgcgatggttgttgctaatgtaggtggaggaaaaagctcgaggaagaaaactccggcggtgaagaagaagcataatcgccgtcacactgaaggaggaggtaacggacttttctcgtgttttagtaatttgtgcggcgtggaatgcacattcgtgtgtggaggcgggtcggatcaagacgggtcaaaaaagaaaggtgggtctgggcgtttgccccgcttgggctctgctgatgatttgagttatttatga

SEQ ID NO: 89361 - protein, 602 aa, Arabidopsis thaliana
  peptide (1)..(602): Ceres Seq. ID no. 12718264
MSIFPSFQLLELNIISAQDLAPVSRKMKTYAVAWVHSERKLTTRVDYTGGGNPTWNDKFVFRVSEDFLYADTSAVVVEIYALHWFRDVHVGTVRVLISNLIPPNRRPGYRSNEEYRRTPPPGMRFVALQVRRPSGRPQGILNIGVGILDGSMRSMPLYTNMDSSAVGYRDLLGEEDPNLQNLHLNSFKGSSKNPQSPSSKQYQSVVSRPPMLRRTRSDTSSMVVSDLLSRVERSRVANRKPASALMSAESETVPTTTGHDSVTSDSELTKSIEYALPYQSPKIPSQGYDSYEPDFIDQSPNHNVLRPRSERQHEPDFIDQSPFRSNDRSRKTPRRSTPMIEKPRPPRDYDRTSSRASPYLSRHGTPLRSNIVASTPIRSNMVSSSPMRSTGVGSTPRRSNILGSTPLRSNIVGSTPIRSNYKATPMKSPMQFGTPMRSNLAGRPVLTESELGPSPSEVAQKMAKERSQAYETESSILSEWSLDDDSNIEGLRSKLERWRTELPPLYDLGSSHQSSDVGSGAMVVANVGGGKSSRKKTPAVKKKHNRRHTEGGGNGLFSCFSNLCGVECTFVCGGGSDQDGSKKKGGSGRLPRLGSADDLSYL

SEQ ID NO: 89362 - protein, 576 aa, Arabidopsis thaliana
  peptide (1)..(576): Ceres Seq. ID no. 12718265
MKTYAVAWVHSERKLTTRVDYTGGGNPTWNDKFVFRVSEDFLYADTSAVVVEIYALHWFRDVHVGTVRVLISNLIPPNRRPGYRSNEEYRRTPPPGMRFVALQVRRPSGRPQGILNIGVGILDGSMRSMPLYTNMDSSAVGYRDLLGEEDPNLQNLHLNSFKGSSKNPQSPSSKQYQSVVSRPPMLRRTRSDTSSMVVSDLLSRVERSRVANRKPASALMSAESETVPTTTGHDSVTSDSELTKSIEYALPYQSPKIPSQGYDSYEPDFIDQSPNHNVLRPRSERQHEPDFIDQSPFRSNDRSRKTPRRSTPMIEKPRPPRDYDRTSSRASPYLSRHGTPLRSNIVASTPIRSNMVSSSPMRSTGVGSTPRRSNILGSTPLRSNIVGSTPIRSNYKATPMKSPMQFGTPMRSNLAGRPVLTESELGPSPSEVAQKMAKERSQAYETESSILSEWSLDDDSNIEGLRSKLERWRTELPPLYDLGSSHQSSDVGSGAMVVANVGGGKSSRKKTPAVKKKHNRRHTEGGGNGLFSCFSNLCGVECTFVCGGGSDQDGSKKKGGSGRLPRLGSADDLSYL

SEQ ID NO: 89363 - protein, 480 aa, Arabidopsis thaliana
  peptide (1)..(480): Ceres Seq. ID no. 12718266
MRFVALQVRRPSGRPQGILNIGVGILDGSMRSMPLYTNMDSSAVGYRDLLGEEDPNLQNLHLNSFKGSSKNPQSPSSKQYQSVVSRPPMLRRTRSDTSSMVVSDLLSRVERSRVANRKPASALMSAESETVPTTTGHDSVTSDSELTKSIEYALPYQSPKIPSQGYDSYEPDFIDQSPNHNVLRPRSERQHEPDFIDQSPFRSNDRSRKTPRRSTPMIEKPRPPRDYDRTSSRASPYLSRHGTPLRSNIVASTPIRSNMVSSSPMRSTGVGSTPRRSNILGSTPLRSNIVGSTPIRSNYKATPMKSPMQFGTPMRSNLAGRPVLTESELGPSPSEVAQKMAKERSQAYETESSILSEWSLDDDSNIEGLRSKLERWRTELPPLYDLGSSHQSSDVGSGAMVVANVGGGKSSRKKTPAVKKKHNRRHTEGGGNGLFSCFSNLCGVECTFVCGGGSDQDGSKKKGGSGRLPRLGSADDLSYL

SEQ ID NO: 89364 - DNA, 1015 bp, Arabidopsis thaliana
  misc_feature (1)..(1015): Ceres Seq. ID no. 12718277
  misc_feature (1)..(1015): Ortholog of  Ceres SEQ ID NO 15176514 as cited in SEQ ID NO 1114
  misc_feature (1)..(1015): Ortholog of  Ceres SEQ ID NO 15173688 as cited in SEQ ID NO 61918
  misc_feature (1)..(1015): Ortholog of  Ceres SEQ ID NO 13662513 as cited in SEQ ID NO 63303
  misc_feature (1)..(1015): Ortholog of  Ceres SEQ ID NO 12616929 as cited in SEQ ID NO 63962
  misc_feature (1)..(1015): Ortholog of  Ceres SEQ ID NO 15225803 as cited in SEQ ID NO 67623
  misc_feature (1)..(1015): Ortholog of  Ceres SEQ ID NO 15174088 as cited in SEQ ID NO 0
aaacctccattaccttcgtctttcttcctcagtcgccctacaatggctttgcctttgtctggcacgcgccacctcacgcgcgctctcctctctaatgtcactcttatggctcctcctcggattccttcctctgttcactacggtggatctcggttaggttgttcgacccggttcttctcaattcgatgtggagctaaccggtcaggttctacttactcgccgcttaactctggctctaactttagtgatcggcctccgacggagatggctcctttgtttccgggatgcgattatgagcactggcttattgttatggataaacctggcggggaaggcgcgactaagcagcagatgattgattgttacattcaaaccctagcgaaagtcgttggaagtgaggaagaggcgaagaagcgaatctacaatgtttcatgtgagaggtatttagggtttggttgtgagattgatgaagagacatccactaagcttgaaggtttaccaggtgttctgtttgtgcttccagattcctatgtggatcctgaaaacaaagattatggagctgagctgtttgttaatggagagatagtccaacgatcaccagagaggcagaggcgggttgagccacagccgcagagagcccaagatagaccgagatacaatgacagaactcgttactctcgccgcagagaaaacacaagatgaactgtaactgaagatggtatacatacacctaagctaagccagtatgaggatgatgatgatgatgatgataatggtggtgaggatgatgttactgccgccacacgagggctctgtattccagtccgttgcagttaatggaccgggcttactttggatattgttgaaattctaagttttgtttctatgtaacaattttatttaataatgtaaattgaggtttcactgttttaggaaattactttgggtagaagattagttttcttttcaagaacaattcatgtgggaaatggtaaatttattttagtaatctttt

SEQ ID NO: 89365 - protein, 233 aa, Arabidopsis thaliana
  peptide (1)..(233): Ceres Seq. ID no. 12718278
KPPLPSSFFLSRPTMALPLSGTRHLTRALLSNVTLMAPPRIPSSVHYGGSRLGCSTRFFSIRCGANRSGSTYSPLNSGSNFSDRPPTEMAPLFPGCDYEHWLIVMDKPGGEGATKQQMIDCYIQTLAKVVGSEEEAKKRIYNVSCERYLGFGCEIDEETSTKLEGLPGVLFVLPDSYVDPENKDYGAELFVNGEIVQRSPERQRRVEPQPQRAQDRPRYNDRTRYSRRRENTR

SEQ ID NO: 89366 - protein, 219 aa, Arabidopsis thaliana; identical to SEQ ID NO: 28131
  peptide (1)..(219): Ceres Seq. ID no. 12718279

SEQ ID NO: 89367 - protein, 198 aa, Arabidopsis thaliana; identical to SEQ ID NO: 28132
  peptide (1)..(198): Ceres Seq. ID no. 12718280

SEQ ID NO: 89368 - DNA, 1666 bp, Arabidopsis thaliana
  misc_feature (1)..(1666): Ceres Seq. ID no. 12718299
  misc_feature (1)..(1666): Ortholog of  Ceres SEQ ID NO 14307682 as cited in SEQ ID NO 54529
ttaccgccgtttcttggccgtagaagatataaatattgatagtcgtatataaaaaaaaaacatataagacaaggtacataagaaaaaaacaatttcgttaaagaaaaaatggctggaggaggaggtggtagcacttctggagaaggtcctagagagctcgatcagacaccgacatgggccgtctccactgtttgtggcgttatcatcttgatctctatcgttctagagctcatgattcacaaaatcggagaggttttcactgaaagaaggaagaaagctttgtacgaagcgcttcaaaagatcaagaacgagcttatggttttgggattcatttctttgttattaacatttggacaaaactacatagcaagtttgtgtgtggcgtcaagatacggccatgcgatgtccttttgtggtccatacgatggtccaagtggtgagtctaagaagccaaagactaccgaacacttagaacgtcgtgttttggctgatgctgctccagctcagtgcaagaagggctatgtaccgcttatatcactcaacgcgttgcatcaagtgcatatcttcatctttttcttggctgtgtttcatgtcatttatagtgctattaccatgatgcttggacgagcaaagattcgtggatggaaagtttgggaggaagaagtcataaatgatcatgaaatgatgaatgacccttcaaggtttaggctcacacatgagacatcatttgttagagagcatgtcaatccttgggccaaaaatagattctcattctacgttatgtgtttctttcgtcaaatgctgagatctgtcagaaaatctgattatttgacaatgcgtcatggtttcataagtgtccatttggcaccgggtatgaagtttaatttccaaaaatacatcaaaagatcattggaagacgacttcaaggtagtcgtgggaataagtcccgagctatgggcctttgtaatgctctttttgctctttgatgttcacgggtggtatgttactgctgtgatcaccatgattcctccacttttgacattagcgataggaaccaagcttcaagccatcatctcagacatggcgttggaaattcaggagagacacgccgtgatacaagggatgccacttgtcaatgtctctgatcgacatttctggtttagtcgtcccgccttagtcctccatatcatccacttcattctcttccagaatgcttttgagatcacctacttcttctggatatggtatgagttcgggttacggtcctgttttcatcaccatttcgcgctaataatcataagggttgctcttggggtgggagtacaatttctctgcagttacatcacacttcctctttacgctctcgtgactcagatgggatcaacgatgaagcgatcggtgtttgatgatcaaacgtcaaaggcattaaagaattggcataaaaatgcaaagaaaaagagcgaaactcctggtcaaacgcagcctccattgcctaatctccgacctaaaaccggcggcgatattgagtctgcttctccggccaatatcacggctagtgttgatgttaaagaaagtgatcaatctcaatctagagacctcttaagcggtccctaaaaaaccaaacgggtcaagacattactttcacttaaccggcttactctaagtc

SEQ ID NO: 89369 - protein, 501 aa, Arabidopsis thaliana
  peptide (1)..(501): Ceres Seq. ID no. 12718300
MAGGGGGSTSGEGPRELDQTPTWAVSTVCGVIILISIVLELMIHKIGEVFTERRKKALYEALQKIKNELMVLGFISLLLTFGQNYIASLCVASRYGHAMSFCGPYDGPSGESKKPKTTEHLERRVLADAAPAQCKKGYVPLISLNALHQVHIFIFFLAVFHVIYSAITMMLGRAKIRGWKVWEEEVINDHEMMNDPSRFRLTHETSFVREHVNPWAKNRFSFYVMCFFRQMLRSVRKSDYLTMRHGFISVHLAPGMKFNFQKYIKRSLEDDFKVVVGISPELWAFVMLFLLFDVHGWYVTAVITMIPPLLTLAIGTKLQAIISDMALEIQERHAVIQGMPLVNVSDRHFWFSRPALVLHIIHFILFQNAFEITYFFWIWYEFGLRSCFHHHFALIIIRVALGVGVQFLCSYITLPLYALVTQMGSTMKRSVFDDQTSKALKNWHKNAKKKSETPGQTQPPLPNLRPKTGGDIESASPANITASVDVKESDQSQSRDLLSGP

SEQ ID NO: 89370 - protein, 460 aa, Arabidopsis thaliana
  peptide (1)..(460): Ceres Seq. ID no. 12718301
MIHKIGEVFTERRKKALYEALQKIKNELMVLGFISLLLTFGQNYIASLCVASRYGHAMSFCGPYDGPSGESKKPKTTEHLERRVLADAAPAQCKKGYVPLISLNALHQVHIFIFFLAVFHVIYSAITMMLGRAKIRGWKVWEEEVINDHEMMNDPSRFRLTHETSFVREHVNPWAKNRFSFYVMCFFRQMLRSVRKSDYLTMRHGFISVHLAPGMKFNFQKYIKRSLEDDFKVVVGISPELWAFVMLFLLFDVHGWYVTAVITMIPPLLTLAIGTKLQAIISDMALEIQERHAVIQGMPLVNVSDRHFWFSRPALVLHIIHFILFQNAFEITYFFWIWYEFGLRSCFHHHFALIIIRVALGVGVQFLCSYITLPLYALVTQMGSTMKRSVFDDQTSKALKNWHKNAKKKSETPGQTQPPLPNLRPKTGGDIESASPANITASVDVKESDQSQSRDLLSGP

SEQ ID NO: 89371 - protein, 432 aa, Arabidopsis thaliana
  peptide (1)..(432): Ceres Seq. ID no. 12718302
MVLGFISLLLTFGQNYIASLCVASRYGHAMSFCGPYDGPSGESKKPKTTEHLERRVLADAAPAQCKKGYVPLISLNALHQVHIFIFFLAVFHVIYSAITMMLGRAKIRGWKVWEEEVINDHEMMNDPSRFRLTHETSFVREHVNPWAKNRFSFYVMCFFRQMLRSVRKSDYLTMRHGFISVHLAPGMKFNFQKYIKRSLEDDFKVVVGISPELWAFVMLFLLFDVHGWYVTAVITMIPPLLTLAIGTKLQAIISDMALEIQERHAVIQGMPLVNVSDRHFWFSRPALVLHIIHFILFQNAFEITYFFWIWYEFGLRSCFHHHFALIIIRVALGVGVQFLCSYITLPLYALVTQMGSTMKRSVFDDQTSKALKNWHKNAKKKSETPGQTQPPLPNLRPKTGGDIESASPANITASVDVKESDQSQSRDLLSGP

SEQ ID NO: 89372 - DNA, 2099 bp, Arabidopsis thaliana
  misc_feature (1)..(2099): Ceres Seq. ID no. 12718303
  misc_feature (1)..(2099): Ortholog of  Ceres SEQ ID NO 12609146 as cited in SEQ ID NO 52118
  misc_feature (1)..(2099): Ortholog of  Ceres SEQ ID NO 13638136 as cited in SEQ ID NO 58644
  misc_feature (1)..(2099): Ortholog of  Ceres SEQ ID NO 13596868 as cited in SEQ ID NO 62806
  misc_feature (1)..(2099): Ortholog of  Ceres SEQ ID NO 15225826 as cited in SEQ ID NO 64774
  misc_feature (1)..(2099): Ortholog of  Ceres SEQ ID NO 13595885 as cited in SEQ ID NO 69265
  misc_feature (1)..(2099): Ortholog of  Ceres SEQ ID NO 13599119 as cited in SEQ ID NO 0
atctatctttctctctcaaagaaagcttttggaaattgtctttcgtcaaattctgttcttcttcttcattaaactcataactttttctgggtttttcgagaatttcttcgaaaggatcttacggtaagagaaaaggaaaattaagagggaataagaagattcatcatcattgtcatctgtggggaatctcagagcttttttttctgtagttttgttatctttctgaattctctacctgcttcaagatttcatttttattcatcgatctttggggtttagtttcaaagctgaattctttgaggtttctgaaatttgcgagctgggtttttgttgaaataggcttctgagttttggttatatttgtggataatcgattacttgatctgacctgagaaaaagtagaaacctttgagtagagctggttctattacaaagttgtgtttgggagcttgctacaagaccattggatttcttcactttcttcatttgttgagtctgctacaagatcaaggatctgttgattttgggtatttgatcaaaatctgaaattgatcttgtggaagtaaggttgctgtagttgtcaaggtctttggtgaagtttgtttctcacaaagtttgatccttgaagttggtctctattgatcttagatctagtgtgaataaaggaagtccttggaaagcagcagacttgaaaacgctatcacaagaggaattgcttcctgaagagactgtctggattgctgatagatttatatgattcagagaagaactcaccgatgagtatggatttttcacctttgttaacggttcttgagggagatttcaacaaggataatacttcttctgcaacagaaattgatactttagagaacttagatgacactaggcagataagtaaaggaaaacctccgaggcacctcacaagcagtgctactaggctgcagcttgcagccaatgcggatgtggatgtttgtaacttggttatgaagtcacttgatgacaaatcagagtttctacctgtataccgatcaggaagttgtgctgagcaaggggcaaaacagttcatggaagatgaacacatttgcatcgatgatcttgttaatcatcttggtgcagctattcaatgctcttctcttggagccttctatggggtatttgatggccacggtggcacagatgcagcacactttgttagaaagaacattctgagattcattgtagaggactcctccttcccactatgcgtaaagaaagcaattaagagtgctttcttaaaagctgattatgaatttgcagatgattcttctcttgacatctcttctgggaccactgcgcttacagcttttatttttggacggaggttgataattgcaaatgctggtgattgccgagcagtactggggagaagaggtagggcaattgagttgtccaaagatcacaaaccaaactgcacagccgagaaagtaagaatagaaaagttaggtggagttgtgtatgacggttacctcaacgggcaactatcagttgcacgtgccattggagactggcacatgaaaggtcccaaaggctctgcttgtccgctaagcccagagccagagttgcaagagacagacctgagtgaagacgacgagttcttgataatgggatgtgatggtctgtgggatgtgatgagcagccagtgcgctgtgacaatagctaggaaggaactgatgattcataatgatccagagagatgctctagagagcttgtgagggaggcccttaaacggaatacatgtgacaatttgacagtgattgttgtgtgcttctctccggatcctccacagaggatagagatccgaatgcagtcacgggtgaggcggagcatatctgcggaagggttaaacctactcaaaggcgtgctcgatggctatccgtgagcatgttatgttgtacgttactttgtgagactattgccaagttagagagagtgtttacaggtttattgacatgttgtgttctgagtatgttgttgttaccaatattagtagtattcaacatccattgagattttagatggatgcatattatcccattgtaaataatttttaacttgttcc

SEQ ID NO: 89373 - protein, 380 aa, Arabidopsis thaliana
  peptide (1)..(380): Ceres Seq. ID no. 12718304
MSMDFSPLLTVLEGDFNKDNTSSATEIDTLENLDDTRQISKGKPPRHLTSSATRLQLAANADVDVCNLVMKSLDDKSEFLPVYRSGSCAEQGAKQFMEDEHICIDDLVNHLGAAIQCSSLGAFYGVFDGHGGTDAAHFVRKNILRFIVEDSSFPLCVKKAIKSAFLKADYEFADDSSLDISSGTTALTAFIFGRRLIIANAGDCRAVLGRRGRAIELSKDHKPNCTAEKVRIEKLGGVVYDGYLNGQLSVARAIGDWHMKGPKGSACPLSPEPELQETDLSEDDEFLIMGCDGLWDVMSSQCAVTIARKELMIHNDPERCSRELVREALKRNTCDNLTVIVVCFSPDPPQRIEIRMQSRVRRSISAEGLNLLKGVLDGYP

SEQ ID NO: 89374 - protein, 378 aa, Arabidopsis thaliana
  peptide (1)..(378): Ceres Seq. ID no. 12718305
MDFSPLLTVLEGDFNKDNTSSATEIDTLENLDDTRQISKGKPPRHLTSSATRLQLAANADVDVCNLVMKSLDDKSEFLPVYRSGSCAEQGAKQFMEDEHICIDDLVNHLGAAIQCSSLGAFYGVFDGHGGTDAAHFVRKNILRFIVEDSSFPLCVKKAIKSAFLKADYEFADDSSLDISSGTTALTAFIFGRRLIIANAGDCRAVLGRRGRAIELSKDHKPNCTAEKVRIEKLGGVVYDGYLNGQLSVARAIGDWHMKGPKGSACPLSPEPELQETDLSEDDEFLIMGCDGLWDVMSSQCAVTIARKELMIHNDPERCSRELVREALKRNTCDNLTVIVVCFSPDPPQRIEIRMQSRVRRSISAEGLNLLKGVLDGYP

SEQ ID NO: 89375 - protein, 311 aa, Arabidopsis thaliana
  peptide (1)..(311): Ceres Seq. ID no. 12718306
MKSLDDKSEFLPVYRSGSCAEQGAKQFMEDEHICIDDLVNHLGAAIQCSSLGAFYGVFDGHGGTDAAHFVRKNILRFIVEDSSFPLCVKKAIKSAFLKADYEFADDSSLDISSGTTALTAFIFGRRLIIANAGDCRAVLGRRGRAIELSKDHKPNCTAEKVRIEKLGGVVYDGYLNGQLSVARAIGDWHMKGPKGSACPLSPEPELQETDLSEDDEFLIMGCDGLWDVMSSQCAVTIARKELMIHNDPERCSRELVREALKRNTCDNLTVIVVCFSPDPPQRIEIRMQSRVRRSISAEGLNLLKGVLDGYP

SEQ ID NO: 89376 - DNA, 2523 bp, Arabidopsis thaliana
  misc_feature (1)..(2523): Ceres Seq. ID no. 12718314
  misc_feature (1)..(2523): Ortholog of  Ceres SEQ ID NO 15174626 as cited in SEQ ID NO 59393
  misc_feature (1)..(2523): Ortholog of  Ceres SEQ ID NO 13656177 as cited in SEQ ID NO 64997
agagcgagagaagaagagaagaaaggttctaggtcttgtttgctttcccctcctgctaatcgaccaagcgaataatctccagctaaccaccgatgaagcgaacaatcaacgaagtcgtcggatctacctccgtcaatactctcgattcctccattgctaagaagcctgtcttcctcaccaaaaaacagcgggaagagttagccctaaaacgccgccaggatcaaatctccgagcaacgtgtccgtcgtgagcaacttggtcgccccgagcccgagacggaagatgtctccaatggagataccaatcgggataaggatcgagatagagatcgggaccgagaccgagaacgtgaccgagatagggagagagatagagggcgagatcgagaccgcgatagggatagagacagggatagggatagagagcgagagagagaccgtgagcgtgaccgtcgtgaacgagatcgtgaaccggatcggagaaatagagaaaaggagagggaagaggaggttaaggctagggagaaggcgcgtgttgagaaattagttgagagagagaaggagaaggaacttgacgccattaaagagcagtatcttggaggtaagaagccgaagaagagagtcattaggccaagcgagaagtttcgtttctcttttgattgggaaaacactgaggatacttctagggatatgaacgttctttaccaaaaccctcatgaagctcagcttctctttgggagagggtttcgtgctggtatggaccgtcgtgagcagaagaaacaagcggctaagcatgagaaagagatgcgagacgagattcgtaagaaagatggtattgtagagaaaccagaggaagctgctgctcagagagtgagagaagaagctgctgatacttatgactcgtttgatatgagggttgacaggcattggagtgataagagattagaggagatgactgaaagggattggcgtattttcagagaagatttcaatatctcttacaagggttcgaggattcctcgtccgatgaggagctgggaagagagtaagcttacttctgagcttttgaaagctgtggagagagctggatacaagaaaccttctcctattcaaatggcagctataccacttggactgcaacagcgtgatgttatcggcattgcagagactggttctggtaagactgctgcttttgttttacccatgttagcttacatctctagattgccaccgatgagcgaagagaatgagactgaggggccttatgctgttgttatggcccctactagagagcttgctcagcagattgaggaggaaactgttaagtttgcgcattatctagggtttagggtgacttctattgtgggtggtcagtcgattgaggaacaggggttgaagataacacaagggtgtgagattgtgattgctactccgggtcgtctgattgattgccttgagaggcgttatgcggtgttgaaccagtgtaactatgtggttcttgatgaggcagatcggatgattgacatgggtttcgagccacaggttgcaggtgtgttagatgcgatgccttcaagtaatttgaaacctgagaacgaagaagaagagcttgatgaaaagaagatttatagaactacatatatgtttagtgctacaatgcctcctggggtagagcggctagctcggaagtacttgaggaacccggttgttgtcaccattggtactgctggaaagactacggatttgatttcgcaacatgttattatgatgaaagaatcagagaaattcttcagattgcagaaactgctcgatgagctcggcgagaagactgccattgtgtttgttaacacaaagaaaaattgtgactcgattgctaagaatctggataaggcagggtaccgtgtcacgaccttgcacggtgggaaatcacaagagcagagagaaatcagcttagaaggattcagagcaaagagatacaacgttcttgttgcaacagatgttgtaggacgtggaattgatattccggatgtggctcatgtcataaactacgacatgcctaaacatatagagatgtacacacatcgtatcggacgtacaggacgtgctgggaaaagtggtgttgcgacttcgttcttgacacttcatgataccgaagtcttctatgatctgaagcagatgcttgttcagagcaacagtgcggtgcctcctgagctggcgagacatgaagcgtccagattcaaaccaggtacggttcctgatagacccccaagacatagtgacactgtctatataaattgagtcgataggctctctggatttgttcttaactttcccagtgacgtttaccttttgggattgatctcatgcgtgtgcttagtcgcatgttttatctttaagattcgtagtttgatagtgaaggaagcagtagcaagtgtaatagttgaaacttgagtacctttttaaaacgatttagtactggtcttgttcaagaaaagtatctttgattctctgcctaatttttccacat

SEQ ID NO: 89377 - protein, 733 aa, Arabidopsis thaliana
  peptide (1)..(733): Ceres Seq. ID no. 12718315
MKRTINEVVGSTSVNTLDSSIAKKPVFLTKKQREELALKRRQDQISEQRVRREQLGRPEPETEDVSNGDTNRDKDRDRDRDRDRERDRDRERDRGRDRDRDRDRDRDRDRERERDRERDRRERDREPDRRNREKEREEEVKAREKARVEKLVEREKEKELDAIKEQYLGGKKPKKRVIRPSEKFRFSFDWENTEDTSRDMNVLYQNPHEAQLLFGRGFRAGMDRREQKKQAAKHEKEMRDEIRKKDGIVEKPEEAAAQRVREEAADTYDSFDMRVDRHWSDKRLEEMTERDWRIFREDFNISYKGSRIPRPMRSWEESKLTSELLKAVERAGYKKPSPIQMAAIPLGLQQRDVIGIAETGSGKTAAFVLPMLAYISRLPPMSEENETEGPYAVVMAPTRELAQQIEEETVKFAHYLGFRVTSIVGGQSIEEQGLKITQGCEIVIATPGRLIDCLERRYAVLNQCNYVVLDEADRMIDMGFEPQVAGVLDAMPSSNLKPENEEEELDEKKIYRTTYMFSATMPPGVERLARKYLRNPVVVTIGTAGKTTDLISQHVIMMKESEKFFRLQKLLDELGEKTAIVFVNTKKNCDSIAKNLDKAGYRVTTLHGGKSQEQREISLEGFRAKRYNVLVATDVVGRGIDIPDVAHVINYDMPKHIEMYTHRIGRTGRAGKSGVATSFLTLHDTEVFYDLKQMLVQSNSAVPPELARHEASRFKPGTVPDRPPRHSDTVYIN

SEQ ID NO: 89378 - protein, 534 aa, Arabidopsis thaliana
  peptide (1)..(534): Ceres Seq. ID no. 12718316
MNVLYQNPHEAQLLFGRGFRAGMDRREQKKQAAKHEKEMRDEIRKKDGIVEKPEEAAAQRVREEAADTYDSFDMRVDRHWSDKRLEEMTERDWRIFREDFNISYKGSRIPRPMRSWEESKLTSELLKAVERAGYKKPSPIQMAAIPLGLQQRDVIGIAETGSGKTAAFVLPMLAYISRLPPMSEENETEGPYAVVMAPTRELAQQIEEETVKFAHYLGFRVTSIVGGQSIEEQGLKITQGCEIVIATPGRLIDCLERRYAVLNQCNYVVLDEADRMIDMGFEPQVAGVLDAMPSSNLKPENEEEELDEKKIYRTTYMFSATMPPGVERLARKYLRNPVVVTIGTAGKTTDLISQHVIMMKESEKFFRLQKLLDELGEKTAIVFVNTKKNCDSIAKNLDKAGYRVTTLHGGKSQEQREISLEGFRAKRYNVLVATDVVGRGIDIPDVAHVINYDMPKHIEMYTHRIGRTGRAGKSGVATSFLTLHDTEVFYDLKQMLVQSNSAVPPELARHEASRFKPGTVPDRPPRHSDTVYIN

SEQ ID NO: 89379 - protein, 512 aa, Arabidopsis thaliana
  peptide (1)..(512): Ceres Seq. ID no. 12718317
MDRREQKKQAAKHEKEMRDEIRKKDGIVEKPEEAAAQRVREEAADTYDSFDMRVDRHWSDKRLEEMTERDWRIFREDFNISYKGSRIPRPMRSWEESKLTSELLKAVERAGYKKPSPIQMAAIPLGLQQRDVIGIAETGSGKTAAFVLPMLAYISRLPPMSEENETEGPYAVVMAPTRELAQQIEEETVKFAHYLGFRVTSIVGGQSIEEQGLKITQGCEIVIATPGRLIDCLERRYAVLNQCNYVVLDEADRMIDMGFEPQVAGVLDAMPSSNLKPENEEEELDEKKIYRTTYMFSATMPPGVERLARKYLRNPVVVTIGTAGKTTDLISQHVIMMKESEKFFRLQKLLDELGEKTAIVFVNTKKNCDSIAKNLDKAGYRVTTLHGGKSQEQREISLEGFRAKRYNVLVATDVVGRGIDIPDVAHVINYDMPKHIEMYTHRIGRTGRAGKSGVATSFLTLHDTEVFYDLKQMLVQSNSAVPPELARHEASRFKPGTVPDRPPRHSDTVYIN

SEQ ID NO: 89380 - DNA, 1214 bp, Arabidopsis thaliana
  misc_feature (1)..(1214): Ceres Seq. ID no. 12718325
  misc_feature (1)..(1214): Ortholog of  Ceres SEQ ID NO 13597234 as cited in SEQ ID NO 64118
acatatttgaaagctttcacggcttctgcgatatttcagctcatctaaatctgcagaatcctatttctttttttccttgagtttctctctctcgccggatataaaccctatttttggtcggaattgttgttcgaattcgaatggggactccggaatttccagatctggggaaacactgctccgtcgatgtttgcaagcaaatcgatttcttgcctttcacctgcgaccgttgcctacaggtgttttgtttggatcatcgaagctatatgaaacatagttgtccaaaaggcgatagagaagatgtgactgtagttatctgcccactctgtgctaaaggagtccgattaaacccaaacgaagacccaaatataacatgggagaaacatgtcaataccgactgtgacccatcaaactacgaaaaagctacaaagaagaagaaatgtcccgttccaagatgcaaggagtacctaactttctccaacaccatcaagtgccgagattgcaatgtcgatcactgcttgaaacatcgttttggacctgatcacacttgccctggaccaagaaaactcccattcatgggtttcttgagtagtagtaccaccagaaaagaagctaagacaacaagacccaacaaagctcatccatcaacttcatcatcttcttcttcttcgagatggtctaatctcctatcttcagcagaagcaggaattagcaggctcggtaatgacattagccagaagctacagttttcgagcagcaaagataatggtatcgtggaggtgtgtccacagtgcggtgcgaaattctcttcggttacttctcttgtggaacatgtagagaaaacacatgagaggaacaagaagcagaatcatggcaatgtcacggtcgatgtctgccctagatgtagcagaggattccgcgatccagtagatcttgtgaaccatatcgaaagagatcaccgaggcacttcgaaagcataggaacatatgcgtttacaagccacacatcacaacataacttgtgaaaggtactcaaacatctttgtatttttcttttcatatttgtactggttttaaacaaccaaaaaaaatgtcacattctttgaaaagtcatggactcatgtccagaagtgtagccagaagtgtagtagactaatgttatcattatccttgggccttggcccttgggctttgggtgatatggttttttcaatg

SEQ ID NO: 89381 - protein, 279 aa, Arabidopsis thaliana
  peptide (1)..(279): Ceres Seq. ID no. 12718326
MGTPEFPDLGKHCSVDVCKQIDFLPFTCDRCLQVFCLDHRSYMKHSCPKGDREDVTVVICPLCAKGVRLNPNEDPNITWEKHVNTDCDPSNYEKATKKKKCPVPRCKEYLTFSNTIKCRDCNVDHCLKHRFGPDHTCPGPRKLPFMGFLSSSTTRKEAKTTRPNKAHPSTSSSSSSSRWSNLLSSAEAGISRLGNDISQKLQFSSSKDNGIVEVCPQCGAKFSSVTSLVEHVEKTHERNKKQNHGNVTVDVCPRCSRGFRDPVDLVNHIERDHRGTSKA

SEQ ID NO: 89382 - protein, 237 aa, Arabidopsis thaliana
  peptide (1)..(237): Ceres Seq. ID no. 12718327
MKHSCPKGDREDVTVVICPLCAKGVRLNPNEDPNITWEKHVNTDCDPSNYEKATKKKKCPVPRCKEYLTFSNTIKCRDCNVDHCLKHRFGPDHTCPGPRKLPFMGFLSSSTTRKEAKTTRPNKAHPSTSSSSSSSRWSNLLSSAEAGISRLGNDISQKLQFSSSKDNGIVEVCPQCGAKFSSVTSLVEHVEKTHERNKKQNHGNVTVDVCPRCSRGFRDPVDLVNHIERDHRGTSKA

SEQ ID NO: 89383 - DNA, 1593 bp, Arabidopsis thaliana
  misc_feature (1)..(1593): Ceres Seq. ID no. 12718332
  misc_feature (1)..(1593): Ortholog of  Ceres SEQ ID NO 15172875 as cited in SEQ ID NO 60423
  misc_feature (1)..(1593): Ortholog of  Ceres SEQ ID NO 13659971 as cited in SEQ ID NO 67565
  misc_feature (1)..(1593): Ortholog of  Ceres SEQ ID NO 13500385 as cited in SEQ ID NO 67583
atgggaaattgttgtggaacggctggatcgttgattcaagataagcagaagaaaggttttaaattgccaaatcctttctcaaacgagtacggcaaccaccacgatggccttaagcttatcgtgttgaaggaaccaacgggtcatgagatcaagcagaaatataaattaggtcgtgagttaggtcgaggagagttcggtgtgacgtatctgtgcaccgagatcgagaccggagagattttcgcatgcaaatcaatcttaaagaagaagctgaaaacgtcgattgatatagaggacgttaagagagaagttgagatcatgaggcaaatgcctgaacatcctaatattgttactttgaaagagacttatgaggatgataaagctgtgcatttggttatggagctttgtgaaggcggtgagcttttcgataggattgttgctagagggcattatacggagagagctgctgcttcggttattaaaacgatcatcgaggttgttcagatgtgtcataagcatggagtaatgcacagagatttaaaacctgagaacttcttgtttgcaaacaagaaggaaactgcatctttgaaggctattgattttggtctctctgttttctttaaaccaggcgagagatttaacgaaattgttgggagtccttactacatggctcctgaggtattaaggaggagttatggacaagaaattgacatttggagcgcaggagtgattctttacatattgctctgtggtgttccacctttttgggcagaaaccgaacatggagtcgcaaaagcaattcttaaatctgtaattgactttaaaagagacccctggcctaaagtttctgataatgcaaaagatctgatcaaaaagatgcttcatcctgatccaaggcgtcgtctaactgctcaacaagtgcttgatcatccgtggatacagaatggtaagaatgcttccaatgtatcattgggtgaaaccgtaagagcaaggcttaagcaattctctgttatgaacaagctcaagaaaagggcactcagggttatcgctgagcatctatcggttgaagaaacatcttgcataaaagaaagattccaagtaatggatacaagcaatagaggaaagattactatcaccgagctaggaatcggattgcagaaactcgggattgttgttcctcaagatgacattcaaatattgatggacgcgggagatgttgataaagatggatatttagacgtcaatgaatttgtagccatatcggtacacatcaggaagttaggcaacgacgagcacttaaagaaagcttttacgttctttgacaaaaacaagagtggttatatcgaaatagaggagttaagagatgctttggcagatgatgttgacactactagtgaagaagttgttgaagccattattcttgatgtcgataccaataaggatgggaaaataagttacgacgaatttgcaacgatgatgaaaacgggaacggattggagaaaagcttcgaggcagtactcgagggacctgtttaagtgtcttagtcttaagctcatgcaagatgggtccttgcagtctaatggagatacaaagtag

SEQ ID NO: 89384 - protein, 530 aa, Arabidopsis thaliana
  peptide (1)..(530): Ceres Seq. ID no. 12718333
MGNCCGTAGSLIQDKQKKGFKLPNPFSNEYGNHHDGLKLIVLKEPTGHEIKQKYKLGRELGRGEFGVTYLCTEIETGEIFACKSILKKKLKTSIDIEDVKREVEIMRQMPEHPNIVTLKETYEDDKAVHLVMELCEGGELFDRIVARGHYTERAAASVIKTIIEVVQMCHKHGVMHRDLKPENFLFANKKETASLKAIDFGLSVFFKPGERFNEIVGSPYYMAPEVLRRSYGQEIDIWSAGVILYILLCGVPPFWAETEHGVAKAILKSVIDFKRDPWPKVSDNAKDLIKKMLHPDPRRRLTAQQVLDHPWIQNGKNASNVSLGETVRARLKQFSVMNKLKKRALRVIAEHLSVEETSCIKERFQVMDTSNRGKITITELGIGLQKLGIVVPQDDIQILMDAGDVDKDGYLDVNEFVAISVHIRKLGNDEHLKKAFTFFDKNKSGYIEIEELRDALADDVDTTSEEVVEAIILDVDTNKDGKISYDEFATMMKTGTDWRKASRQYSRDLFKCLSLKLMQDGSLQSNGDTK

SEQ ID NO: 89385 - protein, 425 aa, Arabidopsis thaliana
  peptide (1)..(425): Ceres Seq. ID no. 12718334
MRQMPEHPNIVTLKETYEDDKAVHLVMELCEGGELFDRIVARGHYTERAAASVIKTIIEVVQMCHKHGVMHRDLKPENFLFANKKETASLKAIDFGLSVFFKPGERFNEIVGSPYYMAPEVLRRSYGQEIDIWSAGVILYILLCGVPPFWAETEHGVAKAILKSVIDFKRDPWPKVSDNAKDLIKKMLHPDPRRRLTAQQVLDHPWIQNGKNASNVSLGETVRARLKQFSVMNKLKKRALRVIAEHLSVEETSCIKERFQVMDTSNRGKITITELGIGLQKLGIVVPQDDIQILMDAGDVDKDGYLDVNEFVAISVHIRKLGNDEHLKKAFTFFDKNKSGYIEIEELRDALADDVDTTSEEVVEAIILDVDTNKDGKISYDEFATMMKTGTDWRKASRQYSRDLFKCLSLKLMQDGSLQSNGDTK

SEQ ID NO: 89386 - protein, 422 aa, Arabidopsis thaliana
  peptide (1)..(422): Ceres Seq. ID no. 12718335
MPEHPNIVTLKETYEDDKAVHLVMELCEGGELFDRIVARGHYTERAAASVIKTIIEVVQMCHKHGVMHRDLKPENFLFANKKETASLKAIDFGLSVFFKPGERFNEIVGSPYYMAPEVLRRSYGQEIDIWSAGVILYILLCGVPPFWAETEHGVAKAILKSVIDFKRDPWPKVSDNAKDLIKKMLHPDPRRRLTAQQVLDHPWIQNGKNASNVSLGETVRARLKQFSVMNKLKKRALRVIAEHLSVEETSCIKERFQVMDTSNRGKITITELGIGLQKLGIVVPQDDIQILMDAGDVDKDGYLDVNEFVAISVHIRKLGNDEHLKKAFTFFDKNKSGYIEIEELRDALADDVDTTSEEVVEAIILDVDTNKDGKISYDEFATMMKTGTDWRKASRQYSRDLFKCLSLKLMQDGSLQSNGDTK

SEQ ID NO: 89387 - DNA, 1098 bp, Arabidopsis thaliana
  misc_feature (1)..(1098): Ceres Seq. ID no. 12718356
  misc_feature (1)..(1098): Ortholog of  Ceres SEQ ID NO 13654989 as cited in SEQ ID NO 63117
  misc_feature (1)..(1098): Ortholog of  Ceres SEQ ID NO 13657138 as cited in SEQ ID NO 65923
  misc_feature (1)..(1098): Ortholog of  Ceres SEQ ID NO 13584744 as cited in SEQ ID NO 69137
atgttttgttgcggtggtgcggatgaggaacccgccggtccgcccgcaaaccagtatgcagcccctcctaacaaagccggaaatcccaattttggcggtgggaatagaggggaaccgaggaatccgaatgcaccgagatcaggagctcctgcaaaggttttgcccatagagatcccttctgttgcattggatgagttgaacagaatggcgggtaacttcggaaacaaggcactgatcggtgaaggttcttatggacgtgtcttctgcggcaagtttaaaggagaagctgttgctatcaagaaacttgatgctagttcttctgaagaacctgactcagatttcacctcacagttatcggtggtatcgcggctcaaacacgaccattttgtggagttgctggggtactgcttggaggcaaataatcgcattctcatttaccagtttgcaactaaaggttctttacatgatgtattacacgggagaaagggagtgcaaggggctgagccaggaccggtgctgaactggaaccaaagggtaaagattgcatatggagcagccaaagggcttgagttccttcacgagaaggtccagccaccaatagtccatagggacgtgaggtcgagcaatgtcttgttgtttgatgactttgtggccaaaatggctgatttcaacttgaccaatgcttcctccgataccgcggctaggcttcattctactcgtgttttgggaacattcggctaccacgctccagagtatgcaatgacaggacagataacgcagaagagtgatgtgtatagttttggtgttgtgctattggagctcttgacaggaagaaaacccgtagatcataccatgcctaaaggccaacaaagtcttgttacttgggcaacaccgagactaagtgaagacaaagtgaaacaatgcatagatcctaagcttaacaatgactttcctcccaaagcagtcgccaagttggcagccgtggcggccttgtgtgttcagtatgaggcagatttccgaccaaacatgaccatcgttgtcaaggcacttcagcctcttctaaactctaaaccggccggtcctgagtctacgtcctaa

SEQ ID NO: 89388 - protein, 365 aa, Arabidopsis thaliana
  peptide (1)..(365): Ceres Seq. ID no. 12718357
MFCCGGADEEPAGPPANQYAAPPNKAGNPNFGGGNRGEPRNPNAPRSGAPAKVLPIEIPSVALDELNRMAGNFGNKALIGEGSYGRVFCGKFKGEAVAIKKLDASSSEEPDSDFTSQLSVVSRLKHDHFVELLGYCLEANNRILIYQFATKGSLHDVLHGRKGVQGAEPGPVLNWNQRVKIAYGAAKGLEFLHEKVQPPIVHRDVRSSNVLLFDDFVAKMADFNLTNASSDTAARLHSTRVLGTFGYHAPEYAMTGQITQKSDVYSFGVVLLELLTGRKPVDHTMPKGQQSLVTWATPRLSEDKVKQCIDPKLNNDFPPKAVAKLAAVAALCVQYEADFRPNMTIVVKALQPLLNSKPAGPESTS

SEQ ID NO: 89389 - protein, 297 aa, Arabidopsis thaliana
  peptide (1)..(297): Ceres Seq. ID no. 12718358
MAGNFGNKALIGEGSYGRVFCGKFKGEAVAIKKLDASSSEEPDSDFTSQLSVVSRLKHDHFVELLGYCLEANNRILIYQFATKGSLHDVLHGRKGVQGAEPGPVLNWNQRVKIAYGAAKGLEFLHEKVQPPIVHRDVRSSNVLLFDDFVAKMADFNLTNASSDTAARLHSTRVLGTFGYHAPEYAMTGQITQKSDVYSFGVVLLELLTGRKPVDHTMPKGQQSLVTWATPRLSEDKVKQCIDPKLNNDFPPKAVAKLAAVAALCVQYEADFRPNMTIVVKALQPLLNSKPAGPESTS

SEQ ID NO: 89390 - DNA, 1143 bp, Arabidopsis thaliana
  misc_feature (1)..(1143): Ceres Seq. ID no. 12718425
  misc_feature (1)..(1143): Ortholog of  Ceres SEQ ID NO 15180663 as cited in SEQ ID NO 1227
  misc_feature (1)..(1143): Ortholog of  Ceres SEQ ID NO 12415963 as cited in SEQ ID NO 0
atggattcaaataatcatctctacgacccgaatcccaccgggtcgggtcttcttcgttttagatcagctccgagctctgttctcgccgcttttgttgacgacgacaagattggtttcgactccgataggttgctttcaagattcgtgacctctaatggcgttaacggagatctgggttcacctaaattcgaggataagtctccggtttcgttaacgaacacctctgtttcatacgccgccactctgccgccaccgccgcagcttgagccgtcgagttttctgggtttgccgccgcattacccgaggcagagtaaagggataatgaactcggttggtttggatcagtttctcggtatcaataatcatcacaccaaaccagttgaatctaatcttctccgtcaaagcagctctccagccggaatgtttactaatctctctgaccaaaacgagttaaagcactttggactcaacaaatctaataagtgtttactatatacttacaaatttgcaggttatggttcaatgaggaatttgatgaattacgaagaagatgaagagagtccatctaattccaatggattaagacgccattgcagtctctcttcaaggccaccttcttcacttggaatgctttctcaaatacctgaaatcgcacccgaaactaattttccatatagccattggaatgatccatccagctttattgataacttatcctcacttaaaagagaagccgaggacgatggaaaattgtttctcggagctcagaacggagagtccgggaatcgtatgcagttactgtcgcatcatttgagcctaccaaagtcatcatcgacagcctcggacatggtttcagtggataagtatcttcagctacaagattctgttccttgtaaaatcagagccaaacgtggttgcgctacacatcctcgaagcatcgctgaacgggtaagaagaacgcggataagcgagcgaatgaggaagttacaagagcttgttcctaacatggacaagcaaaccaacacttcggatatgttggatttagctgtggattacatcaaagatttacaaagacagtataagattttaaacgacaacagagctaactgtaagtgtatgaacaaggagaagaagtcaatatag

SEQ ID NO: 89391 - protein, 380 aa, Arabidopsis thaliana
  peptide (1)..(380): Ceres Seq. ID no. 12718426
MDSNNHLYDPNPTGSGLLRFRSAPSSVLAAFVDDDKIGFDSDRLLSRFVTSNGVNGDLGSPKFEDKSPVSLTNTSVSYAATLPPPPQLEPSSFLGLPPHYPRQSKGIMNSVGLDQFLGINNHHTKPVESNLLRQSSSPAGMFTNLSDQNELKHFGLNKSNKCLLYTYKFAGYGSMRNLMNYEEDEESPSNSNGLRRHCSLSSRPPSSLGMLSQIPEIAPETNFPYSHWNDPSSFIDNLSSLKREAEDDGKLFLGAQNGESGNRMQLLSHHLSLPKSSSTASDMVSVDKYLQLQDSVPCKIRAKRGCATHPRSIAERVRRTRISERMRKLQELVPNMDKQTNTSDMLDLAVDYIKDLQRQYKILNDNRANCKCMNKEKKSI

SEQ ID NO: 89392 - protein, 273 aa, Arabidopsis thaliana
  peptide (1)..(273): Ceres Seq. ID no. 12718427
MNSVGLDQFLGINNHHTKPVESNLLRQSSSPAGMFTNLSDQNELKHFGLNKSNKCLLYTYKFAGYGSMRNLMNYEEDEESPSNSNGLRRHCSLSSRPPSSLGMLSQIPEIAPETNFPYSHWNDPSSFIDNLSSLKREAEDDGKLFLGAQNGESGNRMQLLSHHLSLPKSSSTASDMVSVDKYLQLQDSVPCKIRAKRGCATHPRSIAERVRRTRISERMRKLQELVPNMDKQTNTSDMLDLAVDYIKDLQRQYKILNDNRANCKCMNKEKKSI

SEQ ID NO: 89393 - protein, 240 aa, Arabidopsis thaliana
  peptide (1)..(240): Ceres Seq. ID no. 12718428
MFTNLSDQNELKHFGLNKSNKCLLYTYKFAGYGSMRNLMNYEEDEESPSNSNGLRRHCSLSSRPPSSLGMLSQIPEIAPETNFPYSHWNDPSSFIDNLSSLKREAEDDGKLFLGAQNGESGNRMQLLSHHLSLPKSSSTASDMVSVDKYLQLQDSVPCKIRAKRGCATHPRSIAERVRRTRISERMRKLQELVPNMDKQTNTSDMLDLAVDYIKDLQRQYKILNDNRANCKCMNKEKKSI

SEQ ID NO: 89394 - DNA, 1458 bp, Arabidopsis thaliana
  misc_feature (1)..(1458): Ceres Seq. ID no. 12718491
  misc_feature (1)..(1458): Ortholog of  Ceres SEQ ID NO 13597546 as cited in SEQ ID NO 65017
  misc_feature (1)..(1458): Ortholog of  Ceres SEQ ID NO 13654353 as cited in SEQ ID NO 68318
atggttttagaaccaaacttcgttctctcatgggtcttcttatgcatagctgcaacaatctccagcacacttttcttcttccgcaagaaacatcaccgattcataacaaagaagattcagaagaaaaagaagcttcttcctggagaaatggggcttccatggattggtgaaacaatggatttctacaaagctcagaaaagcaacagagtttttgaggattttgtaaatccaaggatcatcaaacatgggaacatcttcaagacaagaatcatgggatcaccaacaatagtagtcaatggagctgaagccaataggctcatattatccaacgagtttagcttggtggtgagctcgtggccttcatcttctgttcaactaatgggcatgaactgcatcatggctaaacaaggcgagaagcatcgggtcctcagagggattgtagctaatagtcttagctacattgggttagagtccttaatacctaagctctgtgataccgttaagtttcatcatgaaaccgaatggcgaggcaaggaagagattagcctctaccgttcggcaaaagttctcactttcactgtagtatttgagtgtttgtatgggataaaagtggagattgggatgttagaggtctttgagagggttttagaaggtgttttcgctttgccggttgagtttccttgttctaagtttgctagagcaaagaaagcaaggctagagatagagacatttctagttgggaaggtcagggagaagcgaagagaaatggaaaaagagggagctgagaagccaaacacaacgcttttctcgaggctagtagaagagttgatcaaaggtgtgataaccgaagaagaggttgtagataatatggttttgctagtgtttgcagctcatgacacaacctcttacgccatgtccatgactttcaagatgttagctcagcacccaacttgtcgtgacactctccttcaagaacatgctcaaataaaagcaaacaaaggggaaggagaatatcttacagtggaagatgtgaaaaagatgaagtatagttggcaagttgttcgtgaaacaatgcgattatcccctccaatcttcggttctttcagaaaagcagtggctgatattgactatggaggatacacaatccccaaaggctggaagatactctggaccacttatggaactcattataatcctgaaatatttcaagatccaatgagttttgatccaacaagatttgataagccaatacaggcatatacatatctaccatttggaggtggaccaaggctttgtgcaggtcaccaactagccaaaatcagcattctcgttttcatgcattttgttgtgacaggttttgactggtccttagtctacccagatgagacaattagcatggatcctctcccatttccgtcccttggaatgccaatcaaaatttctcccaaggtgtcatag

SEQ ID NO: 89395 - protein, 485 aa, Arabidopsis thaliana
  peptide (1)..(485): Ceres Seq. ID no. 12718492
MVLEPNFVLSWVFLCIAATISSTLFFFRKKHHRFITKKIQKKKKLLPGEMGLPWIGETMDFYKAQKSNRVFEDFVNPRIIKHGNIFKTRIMGSPTIVVNGAEANRLILSNEFSLVVSSWPSSSVQLMGMNCIMAKQGEKHRVLRGIVANSLSYIGLESLIPKLCDTVKFHHETEWRGKEEISLYRSAKVLTFTVVFECLYGIKVEIGMLEVFERVLEGVFALPVEFPCSKFARAKKARLEIETFLVGKVREKRREMEKEGAEKPNTTLFSRLVEELIKGVITEEEVVDNMVLLVFAAHDTTSYAMSMTFKMLAQHPTCRDTLLQEHAQIKANKGEGEYLTVEDVKKMKYSWQVVRETMRLSPPIFGSFRKAVADIDYGGYTIPKGWKILWTTYGTHYNPEIFQDPMSFDPTRFDKPIQAYTYLPFGGGPRLCAGHQLAKISILVFMHFVVTGFDWSLVYPDETISMDPLPFPSLGMPIKISPKVS

SEQ ID NO: 89396 - protein, 436 aa, Arabidopsis thaliana
  peptide (1)..(436): Ceres Seq. ID no. 12718493
MGLPWIGETMDFYKAQKSNRVFEDFVNPRIIKHGNIFKTRIMGSPTIVVNGAEANRLILSNEFSLVVSSWPSSSVQLMGMNCIMAKQGEKHRVLRGIVANSLSYIGLESLIPKLCDTVKFHHETEWRGKEEISLYRSAKVLTFTVVFECLYGIKVEIGMLEVFERVLEGVFALPVEFPCSKFARAKKARLEIETFLVGKVREKRREMEKEGAEKPNTTLFSRLVEELIKGVITEEEVVDNMVLLVFAAHDTTSYAMSMTFKMLAQHPTCRDTLLQEHAQIKANKGEGEYLTVEDVKKMKYSWQVVRETMRLSPPIFGSFRKAVADIDYGGYTIPKGWKILWTTYGTHYNPEIFQDPMSFDPTRFDKPIQAYTYLPFGGGPRLCAGHQLAKISILVFMHFVVTGFDWSLVYPDETISMDPLPFPSLGMPIKISPKVS

SEQ ID NO: 89397 - protein, 427 aa, Arabidopsis thaliana
  peptide (1)..(427): Ceres Seq. ID no. 12718494
MDFYKAQKSNRVFEDFVNPRIIKHGNIFKTRIMGSPTIVVNGAEANRLILSNEFSLVVSSWPSSSVQLMGMNCIMAKQGEKHRVLRGIVANSLSYIGLESLIPKLCDTVKFHHETEWRGKEEISLYRSAKVLTFTVVFECLYGIKVEIGMLEVFERVLEGVFALPVEFPCSKFARAKKARLEIETFLVGKVREKRREMEKEGAEKPNTTLFSRLVEELIKGVITEEEVVDNMVLLVFAAHDTTSYAMSMTFKMLAQHPTCRDTLLQEHAQIKANKGEGEYLTVEDVKKMKYSWQVVRETMRLSPPIFGSFRKAVADIDYGGYTIPKGWKILWTTYGTHYNPEIFQDPMSFDPTRFDKPIQAYTYLPFGGGPRLCAGHQLAKISILVFMHFVVTGFDWSLVYPDETISMDPLPFPSLGMPIKISPKVS

SEQ ID NO: 89398 - DNA, 1680 bp, Arabidopsis thaliana
  misc_feature (1)..(1680): Ceres Seq. ID no. 12718499
  misc_feature (1)..(1680): Ortholog of  Ceres SEQ ID NO 12586556 as cited in SEQ ID NO 64667
  misc_feature (1)..(1680): Ortholog of  Ceres SEQ ID NO 13660894 as cited in SEQ ID NO 67475
atgtctccgacgatcttatccttctccggtgtgacggtgccggcgatgccgtcatcaggttccctctccggcaacacttatctccgattgatagacacacaatgtagtacgatgagagaacttaagcaaatccacgccagtctcatcaaaaccggtttaatttccgatactgttaccgcgagccgtgtcctcgccttctgctgtgcgtctccgtcagacatgaattacgcttatttggtattcactaggatcaatcacaagaacccatttgtctggaacactataatccgtggtttctcacggagctcgtttccagagatggctatttcgattttcattgacatgttgtgttcttctccgtctgtgaagccgcagagattgacttatccttcggtgttcaaagcttatggtagacttggccaagctcgtgatgggaggcaattacatgggatggttattaaagagggacttgaagacgactcgtttatacggaatacgatgttgcatatgtacgtgacttgtgggtgtttgattgaagcttggagaatctttctggggatgataggttttgatgttgttgcttggaattcaatgattatgggttttgcgaaatgtggattgattgatcaggcgcagaacctgtttgatgaaatgccgcagagaaatggagtttcttggaattcgatgattagtgggtttgtgaggaatggtagatttaaggatgcgttggatatgtttcgagagatgcaggagaaagatgtgaaacctgatgggtttacaatggtgagtctgttgaatgcttgtgcgtaccttggagcaagtgagcaagggagatggatacatgagtacatagtgaggaatcggtttgaattgaatagtatagttgttacagcactcatagatatgtactgtaagtgtgggtgcattgaggaaggtctaaatgtgtttgagtgtgctcctaagaagcagttatcgtgttggaattcgatgattcttggtctagctaataacggattcgaggaaagggccatggatttgttctcggagttagagcgttctggcttggaaccagattcagtcagcttcattggtgttttaacagcttgtgctcactccggggaagtacatagagctgatgaatttttcagattgatgaaagaaaaatatatgattgagccatcaataaaacactatactttaatggttaatgtgctgggtggagcggggctcctcgaagaagcagaagcattgataaagaatatgccggtggaagaagacactgttatatggagttctttgctttctgcctgcaggaaaatcggtaatgttgagatggctaaacgagcagcaaaatgtttgaagaagctcgatccagatgaaacgtgtggttatgttctcttgtctaatgcttatgcttcttatggcttgttcgaagaggcagttgagcagaggcttttgatgaaggaaagacaaatggagaaagaagttggctgcagttcgattgaagtggattttgaagttcatgagtttatatcttgtgggggaacgcatcctaaatccgcagagatttacagtttactcgatatcttaaactgggatgtctctacaattaaatcaggtttcgctgaattgtttgatgctacaactaggattggtttcacttatctggcagagaaataa

SEQ ID NO: 89399 - protein, 559 aa, Arabidopsis thaliana
  peptide (1)..(559): Ceres Seq. ID no. 12718500
MSPTILSFSGVTVPAMPSSGSLSGNTYLRLIDTQCSTMRELKQIHASLIKTGLISDTVTASRVLAFCCASPSDMNYAYLVFTRINHKNPFVWNTIIRGFSRSSFPEMAISIFIDMLCSSPSVKPQRLTYPSVFKAYGRLGQARDGRQLHGMVIKEGLEDDSFIRNTMLHMYVTCGCLIEAWRIFLGMIGFDVVAWNSMIMGFAKCGLIDQAQNLFDEMPQRNGVSWNSMISGFVRNGRFKDALDMFREMQEKDVKPDGFTMVSLLNACAYLGASEQGRWIHEYIVRNRFELNSIVVTALIDMYCKCGCIEEGLNVFECAPKKQLSCWNSMILGLANNGFEERAMDLFSELERSGLEPDSVSFIGVLTACAHSGEVHRADEFFRLMKEKYMIEPSIKHYTLMVNVLGGAGLLEEAEALIKNMPVEEDTVIWSSLLSACRKIGNVEMAKRAAKCLKKLDPDETCGYVLLSNAYASYGLFEEAVEQRLLMKERQMEKEVGCSSIEVDFEVHEFISCGGTHPKSAEIYSLLDILNWDVSTIKSGFAELFDATTRIGFTYLAEK

SEQ ID NO: 89400 - protein, 544 aa, Arabidopsis thaliana
  peptide (1)..(544): Ceres Seq. ID no. 12718501
MPSSGSLSGNTYLRLIDTQCSTMRELKQIHASLIKTGLISDTVTASRVLAFCCASPSDMNYAYLVFTRINHKNPFVWNTIIRGFSRSSFPEMAISIFIDMLCSSPSVKPQRLTYPSVFKAYGRLGQARDGRQLHGMVIKEGLEDDSFIRNTMLHMYVTCGCLIEAWRIFLGMIGFDVVAWNSMIMGFAKCGLIDQAQNLFDEMPQRNGVSWNSMISGFVRNGRFKDALDMFREMQEKDVKPDGFTMVSLLNACAYLGASEQGRWIHEYIVRNRFELNSIVVTALIDMYCKCGCIEEGLNVFECAPKKQLSCWNSMILGLANNGFEERAMDLFSELERSGLEPDSVSFIGVLTACAHSGEVHRADEFFRLMKEKYMIEPSIKHYTLMVNVLGGAGLLEEAEALIKNMPVEEDTVIWSSLLSACRKIGNVEMAKRAAKCLKKLDPDETCGYVLLSNAYASYGLFEEAVEQRLLMKERQMEKEVGCSSIEVDFEVHEFISCGGTHPKSAEIYSLLDILNWDVSTIKSGFAELFDATTRIGFTYLAEK

SEQ ID NO: 89401 - protein, 522 aa, Arabidopsis thaliana
  peptide (1)..(522): Ceres Seq. ID no. 12718502
MRELKQIHASLIKTGLISDTVTASRVLAFCCASPSDMNYAYLVFTRINHKNPFVWNTIIRGFSRSSFPEMAISIFIDMLCSSPSVKPQRLTYPSVFKAYGRLGQARDGRQLHGMVIKEGLEDDSFIRNTMLHMYVTCGCLIEAWRIFLGMIGFDVVAWNSMIMGFAKCGLIDQAQNLFDEMPQRNGVSWNSMISGFVRNGRFKDALDMFREMQEKDVKPDGFTMVSLLNACAYLGASEQGRWIHEYIVRNRFELNSIVVTALIDMYCKCGCIEEGLNVFECAPKKQLSCWNSMILGLANNGFEERAMDLFSELERSGLEPDSVSFIGVLTACAHSGEVHRADEFFRLMKEKYMIEPSIKHYTLMVNVLGGAGLLEEAEALIKNMPVEEDTVIWSSLLSACRKIGNVEMAKRAAKCLKKLDPDETCGYVLLSNAYASYGLFEEAVEQRLLMKERQMEKEVGCSSIEVDFEVHEFISCGGTHPKSAEIYSLLDILNWDVSTIKSGFAELFDATTRIGFTYLAEK

SEQ ID NO: 89402 - DNA, 1485 bp, Arabidopsis thaliana
  misc_feature (1)..(1485): Ceres Seq. ID no. 12718507
  misc_feature (1)..(1485): Ortholog of  Ceres SEQ ID NO 14309934 as cited in SEQ ID NO 20583
  misc_feature (1)..(1485): Ortholog of  Ceres SEQ ID NO 13654989 as cited in SEQ ID NO 63117
  misc_feature (1)..(1485): Ortholog of  Ceres SEQ ID NO 13584744 as cited in SEQ ID NO 69137
atgccacctgagagttctttaaacgctgaaatgtccaagaagatatcattttttggtttgaagggtttgaagttgtgggtatgggtatgtttggtagttggagtattcatagttatgattctctgcatcttgtctctatggatcacattccgtcggaaatctagaaggtcttcaagcaagtttcctttcaaccaaataccacatgtgtccaaagatatcagagtcgacagggctgggtttcagaatcctcaccccgaaagtttatatatagaaatgaatgataaatccactggaaaaacgatgatgtctcacttgggaagaaccaagtctagtgataatgacactttgagtcaatgtagctctgtgaatcaccatgagagagcttgtagttctcattctggtgaagaaggaggctttggaagtgctgggagacagtatggaggaggacctgtaacagcatctcctttggttggtttaccagaaatatcccatcttggttggggacactggtttactcttagggatcttgagctagcaaccaaccgttttgctccagtgaatgtgcttggagagggtggttatggagtagtttataggggtaaacttgttaatggtaccgaggttgctgtaaagaagcttctgaacaatctagggcaagctgagaaggaatttcgggtagaagttgaggctattggtcatgtacggcacaagaatcttgttaggcttttaggatattgcatagagggagttcatcggatgcttgtttatgagtatgttaatagtggtaacttagaacaatggctacatggagcaatgcggcaacatggaaatctcacttgggaagcacggatgaaaatcattactggtactgcacaagcgcttgcttacttgcatgaagcaatagaaccaaaagtggtccacagagacataaaagcaagtaatatattgattgatgatgagtttaatgcaaaactctctgactttgggttagccaagctcttggactcgggtgagagtcacatcactaccagagtcatgggtacctttggatatgtagcaccagaatatgctaatacaggtcttttaaacgaaaagagtgatatatatagctttggtgtcttgcttcttgaagctataactggtcgagatccagttgattatggtcgtcctgctaatgaggtgaatcttgttgaatggctaaagatgatggttggaacaagaagagcagaagaagttgtggatccaagacttgaacctagacctagtaaaagtgctttgaaacgtgcactcttggtttcccttagatgtgttgatcctgaagcagagaaacgtcctagaatgagtcaggttgcgcgcatgcttgaatctgatgaacacccttttcacaaggagaggaggaacaaaaggagcaaaaccgcgggcatggagattgttgagaccaaagacgaatctcttggtcctagtggctcagagacaaagccttag

SEQ ID NO: 89403 - protein, 494 aa, Arabidopsis thaliana
  peptide (1)..(494): Ceres Seq. ID no. 12718508
MPPESSLNAEMSKKISFFGLKGLKLWVWVCLVVGVFIVMILCILSLWITFRRKSRRSSSKFPFNQIPHVSKDIRVDRAGFQNPHPESLYIEMNDKSTGKTMMSHLGRTKSSDNDTLSQCSSVNHHERACSSHSGEEGGFGSAGRQYGGGPVTASPLVGLPEISHLGWGHWFTLRDLELATNRFAPVNVLGEGGYGVVYRGKLVNGTEVAVKKLLNNLGQAEKEFRVEVEAIGHVRHKNLVRLLGYCIEGVHRMLVYEYVNSGNLEQWLHGAMRQHGNLTWEARMKIITGTAQALAYLHEAIEPKVVHRDIKASNILIDDEFNAKLSDFGLAKLLDSGESHITTRVMGTFGYVAPEYANTGLLNEKSDIYSFGVLLLEAITGRDPVDYGRPANEVNLVEWLKMMVGTRRAEEVVDPRLEPRPSKSALKRALLVSLRCVDPEAEKRPRMSQVARMLESDEHPFHKERRNKRSKTAGMEIVETKDESLGPSGSETKP

SEQ ID NO: 89404 - protein, 484 aa, Arabidopsis thaliana
  peptide (1)..(484): Ceres Seq. ID no. 12718509
MSKKISFFGLKGLKLWVWVCLVVGVFIVMILCILSLWITFRRKSRRSSSKFPFNQIPHVSKDIRVDRAGFQNPHPESLYIEMNDKSTGKTMMSHLGRTKSSDNDTLSQCSSVNHHERACSSHSGEEGGFGSAGRQYGGGPVTASPLVGLPEISHLGWGHWFTLRDLELATNRFAPVNVLGEGGYGVVYRGKLVNGTEVAVKKLLNNLGQAEKEFRVEVEAIGHVRHKNLVRLLGYCIEGVHRMLVYEYVNSGNLEQWLHGAMRQHGNLTWEARMKIITGTAQALAYLHEAIEPKVVHRDIKASNILIDDEFNAKLSDFGLAKLLDSGESHITTRVMGTFGYVAPEYANTGLLNEKSDIYSFGVLLLEAITGRDPVDYGRPANEVNLVEWLKMMVGTRRAEEVVDPRLEPRPSKSALKRALLVSLRCVDPEAEKRPRMSQVARMLESDEHPFHKERRNKRSKTAGMEIVETKDESLGPSGSETKP

SEQ ID NO: 89405 - protein, 456 aa, Arabidopsis thaliana
  peptide (1)..(456): Ceres Seq. ID no. 12718510
MILCILSLWITFRRKSRRSSSKFPFNQIPHVSKDIRVDRAGFQNPHPESLYIEMNDKSTGKTMMSHLGRTKSSDNDTLSQCSSVNHHERACSSHSGEEGGFGSAGRQYGGGPVTASPLVGLPEISHLGWGHWFTLRDLELATNRFAPVNVLGEGGYGVVYRGKLVNGTEVAVKKLLNNLGQAEKEFRVEVEAIGHVRHKNLVRLLGYCIEGVHRMLVYEYVNSGNLEQWLHGAMRQHGNLTWEARMKIITGTAQALAYLHEAIEPKVVHRDIKASNILIDDEFNAKLSDFGLAKLLDSGESHITTRVMGTFGYVAPEYANTGLLNEKSDIYSFGVLLLEAITGRDPVDYGRPANEVNLVEWLKMMVGTRRAEEVVDPRLEPRPSKSALKRALLVSLRCVDPEAEKRPRMSQVARMLESDEHPFHKERRNKRSKTAGMEIVETKDESLGPSGSETKP

SEQ ID NO: 89406 - DNA, 1584 bp, Arabidopsis thaliana
  misc_feature (1)..(1584): Ceres Seq. ID no. 12718514
  misc_feature (1)..(1584): Ortholog of  Ceres SEQ ID NO 15169466 as cited in SEQ ID NO 66135
atgtcgaccaaactcagtatatttcttcttggcctgattttgttctctgtctcaccattttccggagactgtagaactctttcagggaaacatgagcattactcttcatcccttaacatgtttaattcccaagatacgatgcgtttcagttctgcttcttcttcaacaagcaacgattgcggtttctcctccaaggaacatgatccttccaaggaacataccagagaatcggtgaagcctcaatcaaggattaaacaagaaacaaagagaacaacacattcagttgttgatcttcaaatccaagacctcacaagaattaagacgcttcatgctcggttcaacaaatcgaagaaacagaaaaacgagaaggttaggaagaagattacctcagatatttctttggtgggagctccagaggtttcaccggggaagctgatagcaacacttgagtctggtatgacgctcggttctggtgaatacttcatggacgtgcttgtgggcacaccaccaaaacacttctcattgattcttgacacagggagtgacttaaactggctccaatgccttccttgctacgactgtttccatcaaaacggtatgttttatgatccaaaaacgtccgcttcattcaagaacataacatgcaatgaccctagatgcagccttatctcatcacccgatcctccagtacagtgcgaatcagataaccaatcgtgcccttatttctactggtatggagacaggtcgaacacaactggagatttcgcggttgagactttcaccgttaatctcacgaccactgagggaggaagctcagagtacaaggtgggaaatatgatgtttgggtgtggccattggaaccgaggtctcttcagtggtgcttcaggtctgcttgggttaggaagaggacctctttcgttttcttctcagcttcagtctctctatggccattccttttcctactgtcttgtcgatagaaacagcaacaccaatgtaagcagcaagttgatatttggagaagacaaagatttgctgaaccacacaaatctgaacttcacttcttttgtgaacgggaaggagaattcagtggagacattttactatatacagatcaaatccattctagtcggcggcaaagctctagacatacctgaagaaacatggaatatctcatcagatggtgatggtggaaccatcattgattctggtacaaccttaagctatttcgcagaacctgcatatgagatcatcaaaaacaagtttgcagagaaaatgaaagaaaactacccaatatttagagatttcccggtccttgatccttgcttcaatgtatctggcatagaggagaacaacatccacctacctgagctcgggattgcatttgtagacggcacagtttggaatttccctgctgagaactccttcatttggttgagcgaggatttggtttgcttggcaattctaggaactccaaaatctaccttctcgatcatcggaaactaccagcaacagaatttccatatactctatgatacaaagaggtctaggctagggttcacacccacaaagtgtgcggacatataa

SEQ ID NO: 89407 - protein, 527 aa, Arabidopsis thaliana
  peptide (1)..(527): Ceres Seq. ID no. 12718515
MSTKLSIFLLGLILFSVSPFSGDCRTLSGKHEHYSSSLNMFNSQDTMRFSSASSSTSNDCGFSSKEHDPSKEHTRESVKPQSRIKQETKRTTHSVVDLQIQDLTRIKTLHARFNKSKKQKNEKVRKKITSDISLVGAPEVSPGKLIATLESGMTLGSGEYFMDVLVGTPPKHFSLILDTGSDLNWLQCLPCYDCFHQNGMFYDPKTSASFKNITCNDPRCSLISSPDPPVQCESDNQSCPYFYWYGDRSNTTGDFAVETFTVNLTTTEGGSSEYKVGNMMFGCGHWNRGLFSGASGLLGLGRGPLSFSSQLQSLYGHSFSYCLVDRNSNTNVSSKLIFGEDKDLLNHTNLNFTSFVNGKENSVETFYYIQIKSILVGGKALDIPEETWNISSDGDGGTIIDSGTTLSYFAEPAYEIIKNKFAEKMKENYPIFRDFPVLDPCFNVSGIEENNIHLPELGIAFVDGTVWNFPAENSFIWLSEDLVCLAILGTPKSTFSIIGNYQQQNFHILYDTKRSRLGFTPTKCADI

SEQ ID NO: 89408 - protein, 488 aa, Arabidopsis thaliana
  peptide (1)..(488): Ceres Seq. ID no. 12718516
MFNSQDTMRFSSASSSTSNDCGFSSKEHDPSKEHTRESVKPQSRIKQETKRTTHSVVDLQIQDLTRIKTLHARFNKSKKQKNEKVRKKITSDISLVGAPEVSPGKLIATLESGMTLGSGEYFMDVLVGTPPKHFSLILDTGSDLNWLQCLPCYDCFHQNGMFYDPKTSASFKNITCNDPRCSLISSPDPPVQCESDNQSCPYFYWYGDRSNTTGDFAVETFTVNLTTTEGGSSEYKVGNMMFGCGHWNRGLFSGASGLLGLGRGPLSFSSQLQSLYGHSFSYCLVDRNSNTNVSSKLIFGEDKDLLNHTNLNFTSFVNGKENSVETFYYIQIKSILVGGKALDIPEETWNISSDGDGGTIIDSGTTLSYFAEPAYEIIKNKFAEKMKENYPIFRDFPVLDPCFNVSGIEENNIHLPELGIAFVDGTVWNFPAENSFIWLSEDLVCLAILGTPKSTFSIIGNYQQQNFHILYDTKRSRLGFTPTKCADI

SEQ ID NO: 89409 - protein, 481 aa, Arabidopsis thaliana
  peptide (1)..(481): Ceres Seq. ID no. 12718517
MRFSSASSSTSNDCGFSSKEHDPSKEHTRESVKPQSRIKQETKRTTHSVVDLQIQDLTRIKTLHARFNKSKKQKNEKVRKKITSDISLVGAPEVSPGKLIATLESGMTLGSGEYFMDVLVGTPPKHFSLILDTGSDLNWLQCLPCYDCFHQNGMFYDPKTSASFKNITCNDPRCSLISSPDPPVQCESDNQSCPYFYWYGDRSNTTGDFAVETFTVNLTTTEGGSSEYKVGNMMFGCGHWNRGLFSGASGLLGLGRGPLSFSSQLQSLYGHSFSYCLVDRNSNTNVSSKLIFGEDKDLLNHTNLNFTSFVNGKENSVETFYYIQIKSILVGGKALDIPEETWNISSDGDGGTIIDSGTTLSYFAEPAYEIIKNKFAEKMKENYPIFRDFPVLDPCFNVSGIEENNIHLPELGIAFVDGTVWNFPAENSFIWLSEDLVCLAILGTPKSTFSIIGNYQQQNFHILYDTKRSRLGFTPTKCADI

SEQ ID NO: 89410 - DNA, 1014 bp, Arabidopsis thaliana
  misc_feature (1)..(1014): Ceres Seq. ID no. 12718529
  misc_feature (1)..(1014): Ortholog of  Ceres SEQ ID NO 13590699 as cited in SEQ ID NO 65085
actcaacaaagtaaagaaacaatggcgtattctcttcctacatttccccaagccttaccttgctcgtcaaccaaaacttcttcctccttggctaccttccgatctcctttcttaagattcaatggttccacttccttaatcccctcctctatctccatcacttcacgtggcacatcctccccgaccatcatcccacgtgctgccgcctcagaatccgactctaacgaagccctagccaacacaaccttccacggcctctgctatgtcttgaaagacaacatagacaccgaccagatcatcccagcaggagccgcttgcaccttcccatcgaaccagcaagagcgtgatgagatcgccgctcacgctctctctggtctaccagacttccacaaaacacggttcattgagccaggagagaacagatcaaagtactcaatcataatcggcggcgaaaactttggttgcggatcgtcacgtgaacatgctccggtctgtcttggagcagctggagctaaagccatagttgctgagtcttacgcaagaatctttttccgtaactcggttgctacaggagaggtgtttccgctcgagtcagaggttagagtctgtgaggagtgtaagacaggagatacggtgacgatcgagctgagtgatagtggtggtttattgactaatcacacgaccggtaaaaactataagctgaagtcgatcggtgatgctggaccggttattgatgctggtggtatttttgcttatgcgaggatgatgggaatgattccatcattagcttaatcctcttccataaccatgatggtgttcttgtatgcataactatttgatgaatatttgtgttttagagttttctattttcttaacttttttatgtttgtttgatttggtattgttgttgttacctaaagaataagaaatcaaaagcaaaatagaccgacatgttccaagatatgtgaatatggtgagtgtttactaaattatgcgaatattgttgttgcaacc

SEQ ID NO: 89411 - protein, 263 aa, Arabidopsis thaliana
  peptide (1)..(263): Ceres Seq. ID no. 12718530
TQQSKETMAYSLPTFPQALPCSSTKTSSSLATFRSPFLRFNGSTSLIPSSISITSRGTSSPTIIPRAAASESDSNEALANTTFHGLCYVLKDNIDTDQIIPAGAACTFPSNQQERDEIAAHALSGLPDFHKTRFIEPGENRSKYSIIIGGENFGCGSSREHAPVCLGAAGAKAIVAESYARIFFRNSVATGEVFPLESEVRVCEECKTGDTVTIELSDSGGLLTNHTTGKNYKLKSIGDAGPVIDAGGIFAYARMMGMIPSLA

SEQ ID NO: 89412 - protein, 256 aa, Arabidopsis thaliana
  peptide (1)..(256): Ceres Seq. ID no. 12718531
MAYSLPTFPQALPCSSTKTSSSLATFRSPFLRFNGSTSLIPSSISITSRGTSSPTIIPRAAASESDSNEALANTTFHGLCYVLKDNIDTDQIIPAGAACTFPSNQQERDEIAAHALSGLPDFHKTRFIEPGENRSKYSIIIGGENFGCGSSREHAPVCLGAAGAKAIVAESYARIFFRNSVATGEVFPLESEVRVCEECKTGDTVTIELSDSGGLLTNHTTGKNYKLKSIGDAGPVIDAGGIFAYARMMGMIPSLA

SEQ ID NO: 89413 - DNA, 639 bp, Arabidopsis thaliana
  misc_feature (1)..(639): Ceres Seq. ID no. 12718536
  misc_feature (1)..(639): Ortholog of  Ceres SEQ ID NO 13638292 as cited in SEQ ID NO 57738
atggcgactccggcatggagtcatgccaaggctcaatgggtagtcgccatgttggcgttactcgttggctcggctatggctaccgaaccttattactatagctctcctccaccaccgtatgagtataaatctccacctcctccggttaaatctcctccaccgccttatgaatataaatcaccaccacctccggttaagtctcctccaccaccgtattactatcattcaccgccgccgccagtgaaatcccctccccctccttatgtttacagctctcctcctcctccggtgaagtcccctcctcccccatactactaccattcaccgcctcctccggtgaagtctcctcctcctccatactactaccattcaccacctcctccggtgaaatccccaccaccaccatattactaccattcaccacctcctccggtgaaatccccaccaccaccatactactaccattcacctcctcctcctgtgaaatctcctcctcctccatattattaccactccccacctcctccggtgaaatccccaccaccaccatacctttacagctctccaccaccaccggtaaaatctcccccacctcctgtctacatctacgcttctcccccacctcccacacattactag

SEQ ID NO: 89414 - protein, 212 aa, Arabidopsis thaliana
  peptide (1)..(212): Ceres Seq. ID no. 12718537
MATPAWSHAKAQWVVAMLALLVGSAMATEPYYYSSPPPPYEYKSPPPPVKSPPPPYEYKSPPPPVKSPPPPYYYHSPPPPVKSPPPPYVYSSPPPPVKSPPPPYYYHSPPPPVKSPPPPYYYHSPPPPVKSPPPPYYYHSPPPPVKSPPPPYYYHSPPPPVKSPPPPYYYHSPPPPVKSPPPPYLYSSPPPPVKSPPPPVYIYASPPPPTHY

SEQ ID NO: 89415 - protein, 196 aa, Arabidopsis thaliana
  peptide (1)..(196): Ceres Seq. ID no. 12718538
MLALLVGSAMATEPYYYSSPPPPYEYKSPPPPVKSPPPPYEYKSPPPPVKSPPPPYYYHSPPPPVKSPPPPYVYSSPPPPVKSPPPPYYYHSPPPPVKSPPPPYYYHSPPPPVKSPPPPYYYHSPPPPVKSPPPPYYYHSPPPPVKSPPPPYYYHSPPPPVKSPPPPYLYSSPPPPVKSPPPPVYIYASPPPPTHY

SEQ ID NO: 89416 - protein, 187 aa, Arabidopsis thaliana
  peptide (1)..(187): Ceres Seq. ID no. 12718539
MATEPYYYSSPPPPYEYKSPPPPVKSPPPPYEYKSPPPPVKSPPPPYYYHSPPPPVKSPPPPYVYSSPPPPVKSPPPPYYYHSPPPPVKSPPPPYYYHSPPPPVKSPPPPYYYHSPPPPVKSPPPPYYYHSPPPPVKSPPPPYYYHSPPPPVKSPPPPYLYSSPPPPVKSPPPPVYIYASPPPPTHY

SEQ ID NO: 89417 - DNA, 1479 bp, Arabidopsis thaliana
  misc_feature (1)..(1479): Ceres Seq. ID no. 12718544
  misc_feature (1)..(1479): Ortholog of  Ceres SEQ ID NO 13654583 as cited in SEQ ID NO 68599
atggcggcacttagcttttgcagctcttctcctcctcgaattcttcataaacaatccaaatcgagttttttcccttcttctgcctcttcttctttcacacaaaccgtcggagaattatttgcgaaccccttctctgtctcaagacgatttcgtggcgccgttaactccaccgtagtttccgatgaatcgggaaacgcgaaacttccatcttctccggcgaagaagctaaggaatattatgcaatcccctggtgttcttcagggtccatgttgcttcgatgctcttagtgccaaactcatcgaacgagctgggtttccttactgtatcacctctgcgtctcggcttggtttaccggataagggtctaatttcttatggagaaatggttgatcaaggtcaacaaattactcaatctgtatcaattccggtgattggagacggtggcaatggatacggtaatgccatgaatgttaagagaaccgtcaaaggatatattaaagctggctttgcaggaattatcatcaatgatgaagtttgttgtgaaaatactaagagtgagagaagagtggtttctagagaggaagcagtgatgcgtgttaaagctgcggttgatgcacgtagagagtgtgattcggacattgtaattgtagctcaaactgattcccgtgaagcgatatctctggaggaatcactcattagggcaagagcttttacagatgctggagctgatgttctctccgttgattctcttgtttctagagaagagatgaaagcattctgcaatgtctatccactagttcctaaattggctaatatgcttgaaagcggaggaaaaattccaattctaaacccgctggagctagaagagattggatataagctagtggcgtatccaatttcattgattggagtatctattcaagcaatgcaggacgctctattggcaatcaagggtgggcgaattcctccaccaggaagcatggcgtctttagaagaaattggagagattcttggttttgacacttacgaggaagaagagaagcggtacgctacctcgtcatcagatagaggtgagacatggaagttttcagttgtaacatctttgggaaatgtcaaatcaataactaaatatatgttttatccttttcaagaagtgagcagcagtagcgtctatcgtaatcaacgggtggctaaagatgatccagaacagagagaggacctgattgttgaagtcataacacctgaggtttataatgaaccaagaaaccccttttcgcggatctggtcacgatctttgaggatcaaaatcatcggacgcgatgggtttgagaaactcgatgtcagaattccggtaagtccactttcgagggccatttttcgtgttttatctgagctgatgcaaaacttgtcttatggttggaacaggccggattcttggaaggtgtcacaaacattgttccaggtattcaaaaactcctaa

SEQ ID NO: 89418 - protein, 492 aa, Arabidopsis thaliana
  peptide (1)..(492): Ceres Seq. ID no. 12718545
MAALSFCSSSPPRILHKQSKSSFFPSSASSSFTQTVGELFANPFSVSRRFRGAVNSTVVSDESGNAKLPSSPAKKLRNIMQSPGVLQGPCCFDALSAKLIERAGFPYCITSASRLGLPDKGLISYGEMVDQGQQITQSVSIPVIGDGGNGYGNAMNVKRTVKGYIKAGFAGIIINDEVCCENTKSERRVVSREEAVMRVKAAVDARRECDSDIVIVAQTDSREAISLEESLIRARAFTDAGADVLSVDSLVSREEMKAFCNVYPLVPKLANMLESGGKIPILNPLELEEIGYKLVAYPISLIGVSIQAMQDALLAIKGGRIPPPGSMASLEEIGEILGFDTYEEEEKRYATSSSDRGETWKFSVVTSLGNVKSITKYMFYPFQEVSSSSVYRNQRVAKDDPEQREDLIVEVITPEVYNEPRNPFSRIWSRSLRIKIIGRDGFEKLDVRIPVSPLSRAIFRVLSELMQNLSYGWNRPDSWKVSQTLFQVFKNS

SEQ ID NO: 89419 - protein, 413 aa, Arabidopsis thaliana
  peptide (1)..(413): Ceres Seq. ID no. 12718546
MQSPGVLQGPCCFDALSAKLIERAGFPYCITSASRLGLPDKGLISYGEMVDQGQQITQSVSIPVIGDGGNGYGNAMNVKRTVKGYIKAGFAGIIINDEVCCENTKSERRVVSREEAVMRVKAAVDARRECDSDIVIVAQTDSREAISLEESLIRARAFTDAGADVLSVDSLVSREEMKAFCNVYPLVPKLANMLESGGKIPILNPLELEEIGYKLVAYPISLIGVSIQAMQDALLAIKGGRIPPPGSMASLEEIGEILGFDTYEEEEKRYATSSSDRGETWKFSVVTSLGNVKSITKYMFYPFQEVSSSSVYRNQRVAKDDPEQREDLIVEVITPEVYNEPRNPFSRIWSRSLRIKIIGRDGFEKLDVRIPVSPLSRAIFRVLSELMQNLSYGWNRPDSWKVSQTLFQVFKNS

SEQ ID NO: 89420 - protein, 365 aa, Arabidopsis thaliana
  peptide (1)..(365): Ceres Seq. ID no. 12718547
MVDQGQQITQSVSIPVIGDGGNGYGNAMNVKRTVKGYIKAGFAGIIINDEVCCENTKSERRVVSREEAVMRVKAAVDARRECDSDIVIVAQTDSREAISLEESLIRARAFTDAGADVLSVDSLVSREEMKAFCNVYPLVPKLANMLESGGKIPILNPLELEEIGYKLVAYPISLIGVSIQAMQDALLAIKGGRIPPPGSMASLEEIGEILGFDTYEEEEKRYATSSSDRGETWKFSVVTSLGNVKSITKYMFYPFQEVSSSSVYRNQRVAKDDPEQREDLIVEVITPEVYNEPRNPFSRIWSRSLRIKIIGRDGFEKLDVRIPVSPLSRAIFRVLSELMQNLSYGWNRPDSWKVSQTLFQVFKNS

SEQ ID NO: 89421 - DNA, 1836 bp, Arabidopsis thaliana
  misc_feature (1)..(1836): Ceres Seq. ID no. 12718548
  misc_feature (1)..(1836): Ortholog of  Ceres SEQ ID NO 14312180 as cited in SEQ ID NO 59480
atgaatccatcacaacaacacttaccaaagctatgtcctaagcgcctattcctcttcttcactccattcttattgttctctctctattacatcctcaccactatcaaaaccatcaccatctcttcccaagatcgtcaccatcctccacagcttcatgtaccttccatttcccattactactcccttccagaaacttcagaaaaccgatcgtcaccacctccactactactaccaccaccaccatcatcctcatcatcgttatcttcttactttccactctgtcccaagaacttcaccaactacttgccttgccacgatccatcaacagcacgacagtacagcattgagagacactatcggagagagaggcactgtcctgacatagcccaagagaagttcaggtgtttggtcccaaagcccactggctacaaaacgccttttccatggcctgagagtagaaaatatgcttggtttaggaacgtaccattcaagaggctagctgagttgaaaaagactcagaattgggttagacttgaaggagaccgttttgttttcccaggaggcgggacttctttccccggtggtgtgaaggactatgttgatgtgattctgagtgttttgcctttggcttctgggagtatcaggactgttctcgatattggatgtggagtagcgagttttggagcctttttgctgaactataagattttgacaatgtccattgcaccgagggatatacatgaggctcaagttcagttcgcattagaacgtggactccctgctatgctcggtgttttaagcacttataagctgccttacccgtcgaggtcttttgacatggtccattgttctagatgccttgtcaattggacttcctatgatgggctttacttgatggaggtggatcgtgttttacgtcctgagggatactgggtgttgtctggaccccctgtagcatcaagggttaaatttaagaaccagaagagagattccaaggagttgcagaaccagatggagaaactaaatgatgtttttagaagactttgttgggagaagattgctgaaagttacccggttgtcatctggagaaagccttctaatcatttgcagtgtaggaaaagactaaaagctcttaagtttcctggattatgctcttctagtgaccctgacgctgcgtggtataaagagatggagccgtgcatcactcctcttccagatgttaacgacacaaacaagaccgttctcaaaaactggcctgagagactaaaccatgtgcctcgaatgaaaaccgggtcgatacagggaacaactattgccggcttcaaagctgacacgaacctgtggcaaagaagagttttgtactatgacaccaagtttaagtttctcagcaatggaaaatacagaaacgtcattgatatgaacgcaggattaggtggttttgctgcagctttgatcaaatatccaatgtgggttatgaatgtggttccatttgatcttaaaccgaacacactcggtgttgtgtatgatcgcggtctcattggaacttacatgaactggtgtgaagctttatctacataccctcgaacctatgacctgattcatgccaatggtgtattcagtttgtacttggacaaatgtgacattgttgatatactcttggagatgcagaggattcttagaccagaaggagcagttataatacgagaccgttttgatgttcttgtcaaagtgaaagccataaccaatcaaatgagatggaatgggacaatgtatccagaagataatagtgttttcgatcatggaacaatactaatcgtagataactcaattaaataa

SEQ ID NO: 89422 - protein, 611 aa, Arabidopsis thaliana
  peptide (1)..(611): Ceres Seq. ID no. 12718549
MNPSQQHLPKLCPKRLFLFFTPFLLFSLYYILTTIKTITISSQDRHHPPQLHVPSISHYYSLPETSENRSSPPPLLLPPPPSSSSSLSSYFPLCPKNFTNYLPCHDPSTARQYSIERHYRRERHCPDIAQEKFRCLVPKPTGYKTPFPWPESRKYAWFRNVPFKRLAELKKTQNWVRLEGDRFVFPGGGTSFPGGVKDYVDVILSVLPLASGSIRTVLDIGCGVASFGAFLLNYKILTMSIAPRDIHEAQVQFALERGLPAMLGVLSTYKLPYPSRSFDMVHCSRCLVNWTSYDGLYLMEVDRVLRPEGYWVLSGPPVASRVKFKNQKRDSKELQNQMEKLNDVFRRLCWEKIAESYPVVIWRKPSNHLQCRKRLKALKFPGLCSSSDPDAAWYKEMEPCITPLPDVNDTNKTVLKNWPERLNHVPRMKTGSIQGTTIAGFKADTNLWQRRVLYYDTKFKFLSNGKYRNVIDMNAGLGGFAAALIKYPMWVMNVVPFDLKPNTLGVVYDRGLIGTYMNWCEALSTYPRTYDLIHANGVFSLYLDKCDIVDILLEMQRILRPEGAVIIRDRFDVLVKVKAITNQMRWNGTMYPEDNSVFDHGTILIVDNSIK

SEQ ID NO: 89423 - protein, 373 aa, Arabidopsis thaliana
  peptide (1)..(373): Ceres Seq. ID no. 12718550
MSIAPRDIHEAQVQFALERGLPAMLGVLSTYKLPYPSRSFDMVHCSRCLVNWTSYDGLYLMEVDRVLRPEGYWVLSGPPVASRVKFKNQKRDSKELQNQMEKLNDVFRRLCWEKIAESYPVVIWRKPSNHLQCRKRLKALKFPGLCSSSDPDAAWYKEMEPCITPLPDVNDTNKTVLKNWPERLNHVPRMKTGSIQGTTIAGFKADTNLWQRRVLYYDTKFKFLSNGKYRNVIDMNAGLGGFAAALIKYPMWVMNVVPFDLKPNTLGVVYDRGLIGTYMNWCEALSTYPRTYDLIHANGVFSLYLDKCDIVDILLEMQRILRPEGAVIIRDRFDVLVKVKAITNQMRWNGTMYPEDNSVFDHGTILIVDNSIK

SEQ ID NO: 89424 - protein, 350 aa, Arabidopsis thaliana
  peptide (1)..(350): Ceres Seq. ID no. 12718551
MLGVLSTYKLPYPSRSFDMVHCSRCLVNWTSYDGLYLMEVDRVLRPEGYWVLSGPPVASRVKFKNQKRDSKELQNQMEKLNDVFRRLCWEKIAESYPVVIWRKPSNHLQCRKRLKALKFPGLCSSSDPDAAWYKEMEPCITPLPDVNDTNKTVLKNWPERLNHVPRMKTGSIQGTTIAGFKADTNLWQRRVLYYDTKFKFLSNGKYRNVIDMNAGLGGFAAALIKYPMWVMNVVPFDLKPNTLGVVYDRGLIGTYMNWCEALSTYPRTYDLIHANGVFSLYLDKCDIVDILLEMQRILRPEGAVIIRDRFDVLVKVKAITNQMRWNGTMYPEDNSVFDHGTILIVDNSIK

SEQ ID NO: 89425 - DNA, 1669 bp, Arabidopsis thaliana
  misc_feature (1)..(1669): Ceres Seq. ID no. 12718560
  misc_feature (1)..(1669): Ortholog of  Ceres SEQ ID NO 13654989 as cited in SEQ ID NO 63117
  misc_feature (1)..(1669): Ortholog of  Ceres SEQ ID NO 13657138 as cited in SEQ ID NO 65923
  misc_feature (1)..(1669): Ortholog of  Ceres SEQ ID NO 13584744 as cited in SEQ ID NO 69137
gtagttatttgggattccaaatttttttcattcctaaatttctccacgagctcatcacctcctttcgtctctgcctctcatttgtctacaaacattttttccttttgattcgtctctctggtttattgctcgttgatcgtttgtttctaaattgcattctgatttctgatggatcgtgattttcatcgtcgtggtcaagtggcgaatgatcgtacacaaagcaactttgttcgattggataaaccgagagctgtagacgatcttgatataggcaagagagggaagatgcgtaggtggttgtgctgttcttgtcgtgtacaagaatcttacccatcagctgaaaataaccgattgaaaacccctcctactcgccattacgactatggacgtaacaacaagaaaacaccagctcctgtgaagcctcctgttttgaaggagcctccgcctattgatgtccccgcaatgtcattggttgagctcaaagaaaagactcagaattttggatcaaaggcattgattggagaaggatcctatggaagagtgtactacgcaaactttaatgatgggaaggccgtggctgtgaaaaagcttgataatgcatctgaacccgaaacaaatgtcgagttcttgactcaggtctctaaagtttcgaggctgaaaagtgacaattttgttcagcttcttggttattgtgtagaagggaaccttcgtgtccttgcttatgagtttgccacaatgagatcattgcacgacatcttacacgggagaaagggagtgcaaggagcacaacctggtccaacacttgagtggatgcaacgagtccgagttgcggttgatgcagctaaaggattagaatacttacacgagaaagttcaacctgcggttatacacagagatattcgatctagcaatgtgcttattttcgaagatttcaaagccaagattgctgactttaatctttccaatcaagctcctgatatggctgctcgtcttcattccactagagttttggggaccttcggttatcatgcaccagaatatgcgatgacaggacagttgacacagaagagtgatgtttacagttttggagttgtgcttttggaacttcttaccgggagaaaaccggttgatcatactatgcctcgtggtcaacagagtcttgtcacttgggctactccaaggctgagtgaagacaaagtgaaacaatgtgttgatccaaaactcaaaggagagtatcctcctaaagcagtggcaaagcttgcagcggttgcagcgttgtgtgtgcaatacgaagcagagtttaggccaaacatgagcattgtagtaaaagctcttcaaccgctcttgaggtcagcaacagctgctgctcctccaacacctcaaccttgattcttctttgtggttcttgcttactgattatcatggcttcaaggttttgtcttcactttattctttctatctaccatggaatgtaaatggttattaaggggaggtggtgaggagcaattgggatttcactccatggaaatgatctgtgttaactgctttttgatgggttgattcttatgaaatattctataacttttgtttgttcgtttgaacatataagctgacacttctctttttttaggcaaattcatgggaaaatagcttgaatatacagaaattt

SEQ ID NO: 89426 - protein, 406 aa, Arabidopsis thaliana
  peptide (1)..(406): Ceres Seq. ID no. 12718561
MDRDFHRRGQVANDRTQSNFVRLDKPRAVDDLDIGKRGKMRRWLCCSCRVQESYPSAENNRLKTPPTRHYDYGRNNKKTPAPVKPPVLKEPPPIDVPAMSLVELKEKTQNFGSKALIGEGSYGRVYYANFNDGKAVAVKKLDNASEPETNVEFLTQVSKVSRLKSDNFVQLLGYCVEGNLRVLAYEFATMRSLHDILHGRKGVQGAQPGPTLEWMQRVRVAVDAAKGLEYLHEKVQPAVIHRDIRSSNVLIFEDFKAKIADFNLSNQAPDMAARLHSTRVLGTFGYHAPEYAMTGQLTQKSDVYSFGVVLLELLTGRKPVDHTMPRGQQSLVTWATPRLSEDKVKQCVDPKLKGEYPPKAVAKLAAVAALCVQYEAEFRPNMSIVVKALQPLLRSATAAAPPTPQP

SEQ ID NO: 89427 - protein, 367 aa, Arabidopsis thaliana
  peptide (1)..(367): Ceres Seq. ID no. 12718562
MRRWLCCSCRVQESYPSAENNRLKTPPTRHYDYGRNNKKTPAPVKPPVLKEPPPIDVPAMSLVELKEKTQNFGSKALIGEGSYGRVYYANFNDGKAVAVKKLDNASEPETNVEFLTQVSKVSRLKSDNFVQLLGYCVEGNLRVLAYEFATMRSLHDILHGRKGVQGAQPGPTLEWMQRVRVAVDAAKGLEYLHEKVQPAVIHRDIRSSNVLIFEDFKAKIADFNLSNQAPDMAARLHSTRVLGTFGYHAPEYAMTGQLTQKSDVYSFGVVLLELLTGRKPVDHTMPRGQQSLVTWATPRLSEDKVKQCVDPKLKGEYPPKAVAKLAAVAALCVQYEAEFRPNMSIVVKALQPLLRSATAAAPPTPQP

SEQ ID NO: 89428 - protein, 308 aa, Arabidopsis thaliana
  peptide (1)..(308): Ceres Seq. ID no. 12718563
MSLVELKEKTQNFGSKALIGEGSYGRVYYANFNDGKAVAVKKLDNASEPETNVEFLTQVSKVSRLKSDNFVQLLGYCVEGNLRVLAYEFATMRSLHDILHGRKGVQGAQPGPTLEWMQRVRVAVDAAKGLEYLHEKVQPAVIHRDIRSSNVLIFEDFKAKIADFNLSNQAPDMAARLHSTRVLGTFGYHAPEYAMTGQLTQKSDVYSFGVVLLELLTGRKPVDHTMPRGQQSLVTWATPRLSEDKVKQCVDPKLKGEYPPKAVAKLAAVAALCVQYEAEFRPNMSIVVKALQPLLRSATAAAPPTPQP

SEQ ID NO: 89429 - DNA, 795 bp, Arabidopsis thaliana
  misc_feature (1)..(795): Ceres Seq. ID no. 12718586
  misc_feature (1)..(795): Ortholog of  Ceres SEQ ID NO 15176306 as cited in SEQ ID NO 52784
  misc_feature (1)..(795): Ortholog of  Ceres SEQ ID NO 13582624 as cited in SEQ ID NO 56287
  misc_feature (1)..(795): Ortholog of  Ceres SEQ ID NO 13597264 as cited in SEQ ID NO 63897
  misc_feature (1)..(795): Ortholog of  Ceres SEQ ID NO 13598570 as cited in SEQ ID NO 65434
  misc_feature (1)..(795): Ortholog of  Ceres SEQ ID NO 13656452 as cited in SEQ ID NO 65745
  misc_feature (1)..(795): Ortholog of  Ceres SEQ ID NO 13596238 as cited in SEQ ID NO 68834
  misc_feature (1)..(795): Ortholog of  Ceres SEQ ID NO 15174329 as cited in SEQ ID NO 0
atggctttcacaaaaatctccttagtccttcttctctgcctcttaggtttcttttctgaaactgtcaagtctcaaaactgcggttgcgctccaaacctctgttgcagtcagttcggttactgtggtaccgacgatgcatactgcggtgttggatgccgatcaggtccttgtagaggtagtggaaccccgaccggagggtcggtcggtagcattgtgacacaaggtttctttaacaatattatcaaccaagctggtaatggttgcgcggggaaaagattctacacccgtgactctttcgttaacgccgctaatactttccccaactttgccaattctgttaccagacgtgaaattgctaccatgtttgctcatttcactcacgagaccggacatttctgctacatagaagagattaacggagcaacacgtaactactgccagagcagcaacacacaatacccatgtgcaccgggaaaaggctacttcggtcgtggtccgatccaactatcatggaactacaactacggagcgtgtggtcaaagtctcggtcttgaccttctacgccagcccgaacttgtgggtagcaacccaactgtagctttcaggacgggtttgtggttttggatgaatagcgtaaggccggttctgaaccaagggtttggagccaccattagagctattaatggaatggaatgtaacggtggtaattccggtgcagtcaacgcaaggattggatactatagagactattgtggacagcttggtgtggaccctggtcctaaccttagttgctaa

SEQ ID NO: 89430 - protein, 264 aa, Arabidopsis thaliana
  peptide (1)..(264): Ceres Seq. ID no. 12718587
MAFTKISLVLLLCLLGFFSETVKSQNCGCAPNLCCSQFGYCGTDDAYCGVGCRSGPCRGSGTPTGGSVGSIVTQGFFNNIINQAGNGCAGKRFYTRDSFVNAANTFPNFANSVTRREIATMFAHFTHETGHFCYIEEINGATRNYCQSSNTQYPCAPGKGYFGRGPIQLSWNYNYGACGQSLGLDLLRQPELVGSNPTVAFRTGLWFWMNSVRPVLNQGFGATIRAINGMECNGGNSGAVNARIGYYRDYCGQLGVDPGPNLSC

SEQ ID NO: 89431 - protein, 144 aa, Arabidopsis thaliana
  peptide (1)..(144): Ceres Seq. ID no. 12718588
MFAHFTHETGHFCYIEEINGATRNYCQSSNTQYPCAPGKGYFGRGPIQLSWNYNYGACGQSLGLDLLRQPELVGSNPTVAFRTGLWFWMNSVRPVLNQGFGATIRAINGMECNGGNSGAVNARIGYYRDYCGQLGVDPGPNLSC

SEQ ID NO: 89432 - DNA, 822 bp, Arabidopsis thaliana
  misc_feature (1)..(822): Ceres Seq. ID no. 12718589
  misc_feature (1)..(822): Ortholog of  Ceres SEQ ID NO 15176306 as cited in SEQ ID NO 52784
  misc_feature (1)..(822): Ortholog of  Ceres SEQ ID NO 13582624 as cited in SEQ ID NO 56287
  misc_feature (1)..(822): Ortholog of  Ceres SEQ ID NO 13597264 as cited in SEQ ID NO 63897
  misc_feature (1)..(822): Ortholog of  Ceres SEQ ID NO 13656452 as cited in SEQ ID NO 65745
  misc_feature (1)..(822): Ortholog of  Ceres SEQ ID NO 13596238 as cited in SEQ ID NO 68834
atgaccatcaaaaacgtcattttttccctcttcattctagcaattttggccgagaccgtgttctcgcagaactgcatggatactagttgccctggccttaaggaatgttgcagcagatggggtttctgtggcaccaaagatgaatactgcggatttttttgtttcagtggcccttgcaatatcaagggaaaatcatacggatacgactacaacgttgatgccggtccacgtggtaaaatagaaaccgttatcacatcagcgttgttcgatagcatcatgagcaaagtcgaaagcaactgctcggcaaaaggattctacacttatgaggctttcattactgctttcaaatcttttggagcttacaaaggaaaggtggctaaacgtgagatcgctgctatattggctcatttctcatacggatctaaaagtttttgttacaaagaagaaatatcgaacgagagatattgttcaaagagcaagaagtacccttgtgaaccggggaaaaactactatggtcgtggtttgctacaatcaatcacatggaacgagtattacggtgccggcaagcacctcgggctacctctactgaaggatccagatctggtgtctcgtagtccagaagttgctttcaaattcgcaatgtggttctggaatagaaacgtgcgtcccgctttgtacttaggatttggagaaatcacaaagagagttgatggccgtgaatgtggtaactggcgtcgcgatgatacgaagaacaaagttaagcaatacatagagttctgcgagatgcttggagtaactcctgatcaaggtctcgattgttaa

SEQ ID NO: 89433 - protein, 273 aa, Arabidopsis thaliana
  peptide (1)..(273): Ceres Seq. ID no. 12718590
MTIKNVIFSLFILAILAETVFSQNCMDTSCPGLKECCSRWGFCGTKDEYCGFFCFSGPCNIKGKSYGYDYNVDAGPRGKIETVITSALFDSIMSKVESNCSAKGFYTYEAFITAFKSFGAYKGKVAKREIAAILAHFSYGSKSFCYKEEISNERYCSKSKKYPCEPGKNYYGRGLLQSITWNEYYGAGKHLGLPLLKDPDLVSRSPEVAFKFAMWFWNRNVRPALYLGFGEITKRVDGRECGNWRRDDTKNKVKQYIEFCEMLGVTPDQGLDC

SEQ ID NO: 89434 - protein, 248 aa, Arabidopsis thaliana
  peptide (1)..(248): Ceres Seq. ID no. 12718591
MDTSCPGLKECCSRWGFCGTKDEYCGFFCFSGPCNIKGKSYGYDYNVDAGPRGKIETVITSALFDSIMSKVESNCSAKGFYTYEAFITAFKSFGAYKGKVAKREIAAILAHFSYGSKSFCYKEEISNERYCSKSKKYPCEPGKNYYGRGLLQSITWNEYYGAGKHLGLPLLKDPDLVSRSPEVAFKFAMWFWNRNVRPALYLGFGEITKRVDGRECGNWRRDDTKNKVKQYIEFCEMLGVTPDQGLDC

SEQ ID NO: 89435 - protein, 181 aa, Arabidopsis thaliana
  peptide (1)..(181): Ceres Seq. ID no. 12718592
MSKVESNCSAKGFYTYEAFITAFKSFGAYKGKVAKREIAAILAHFSYGSKSFCYKEEISNERYCSKSKKYPCEPGKNYYGRGLLQSITWNEYYGAGKHLGLPLLKDPDLVSRSPEVAFKFAMWFWNRNVRPALYLGFGEITKRVDGRECGNWRRDDTKNKVKQYIEFCEMLGVTPDQGLDC

SEQ ID NO: 89436 - DNA, 852 bp, Arabidopsis thaliana
  misc_feature (1)..(852): Ceres Seq. ID no. 12718593
  misc_feature (1)..(852): Ortholog of  Ceres SEQ ID NO 15176306 as cited in SEQ ID NO 52784
  misc_feature (1)..(852): Ortholog of  Ceres SEQ ID NO 13582624 as cited in SEQ ID NO 56287
  misc_feature (1)..(852): Ortholog of  Ceres SEQ ID NO 13597264 as cited in SEQ ID NO 63897
  misc_feature (1)..(852): Ortholog of  Ceres SEQ ID NO 13598570 as cited in SEQ ID NO 65434
  misc_feature (1)..(852): Ortholog of  Ceres SEQ ID NO 13656452 as cited in SEQ ID NO 65745
  misc_feature (1)..(852): Ortholog of  Ceres SEQ ID NO 13596238 as cited in SEQ ID NO 68834
  misc_feature (1)..(852): Ortholog of  Ceres SEQ ID NO 15174329 as cited in SEQ ID NO 0
atggctaccctaagagcaatgttgaaaaacgctttcatcctttttctcttcaccttaaccatcatggcaaaaaccgtgttttcgcaacagtgcggtacaaccggatgtgcagccaacttatgttgcagtagatatggatattgtggcaccacagatgcctactgtggtaccgggtgccgaagtggaccttgcagctcctcaaccacacctatcccaccaactcctagcggtggtgcaggcggtctaaacgctgatcctcgtgatacaattgaaaatgttgtcacaccagcattttttgatggtatcatgagcaaagtcggaaatggctgtccagcgaaagggttctacactcgccaggctttcattgcggctgcccaatcgttcgacgcctataaaggaaccgtcgctaagcgtgagattgccgctatgttggctcagttttctcatgaatctggaagtttttgctacaaagaagaaatagctagagggaaatactgctcaccgagcactgcgtacccttgtacaccgggaaaagactactacggccgcggtccaatccaaatcacatggaactacaattacggtgcagctggaaagttcctcggactccctctcttgactgatccagacatggtggctcgtagcccccaagttgcctttcagtgtgccatgtggttctggaacctaaatgttcgtccagtcttggaccaaggctttggagccaccactaggaagatcaatggtggtgaatgcaacggtaggcgtcctgcagccgtgcagagcagagtaaactattacttggagttctgcaggacgcttgggatcactcctggagcaaatcttagttgctaa

SEQ ID NO: 89437 - protein, 283 aa, Arabidopsis thaliana
  peptide (1)..(283): Ceres Seq. ID no. 12718594
MATLRAMLKNAFILFLFTLTIMAKTVFSQQCGTTGCAANLCCSRYGYCGTTDAYCGTGCRSGPCSSSTTPIPPTPSGGAGGLNADPRDTIENVVTPAFFDGIMSKVGNGCPAKGFYTRQAFIAAAQSFDAYKGTVAKREIAAMLAQFSHESGSFCYKEEIARGKYCSPSTAYPCTPGKDYYGRGPIQITWNYNYGAAGKFLGLPLLTDPDMVARSPQVAFQCAMWFWNLNVRPVLDQGFGATTRKINGGECNGRRPAAVQSRVNYYLEFCRTLGITPGANLSC

SEQ ID NO: 89438 - protein, 277 aa, Arabidopsis thaliana
  peptide (1)..(277): Ceres Seq. ID no. 12718595
MLKNAFILFLFTLTIMAKTVFSQQCGTTGCAANLCCSRYGYCGTTDAYCGTGCRSGPCSSSTTPIPPTPSGGAGGLNADPRDTIENVVTPAFFDGIMSKVGNGCPAKGFYTRQAFIAAAQSFDAYKGTVAKREIAAMLAQFSHESGSFCYKEEIARGKYCSPSTAYPCTPGKDYYGRGPIQITWNYNYGAAGKFLGLPLLTDPDMVARSPQVAFQCAMWFWNLNVRPVLDQGFGATTRKINGGECNGRRPAAVQSRVNYYLEFCRTLGITPGANLSC

SEQ ID NO: 89439 - protein, 262 aa, Arabidopsis thaliana
  peptide (1)..(262): Ceres Seq. ID no. 12718596
MAKTVFSQQCGTTGCAANLCCSRYGYCGTTDAYCGTGCRSGPCSSSTTPIPPTPSGGAGGLNADPRDTIENVVTPAFFDGIMSKVGNGCPAKGFYTRQAFIAAAQSFDAYKGTVAKREIAAMLAQFSHESGSFCYKEEIARGKYCSPSTAYPCTPGKDYYGRGPIQITWNYNYGAAGKFLGLPLLTDPDMVARSPQVAFQCAMWFWNLNVRPVLDQGFGATTRKINGGECNGRRPAAVQSRVNYYLEFCRTLGITPGANLSC

SEQ ID NO: 89440 - DNA, 2046 bp, Arabidopsis thaliana
  misc_feature (1)..(2046): Ceres Seq. ID no. 12718604
  misc_feature (1)..(2046): Ortholog of  Ceres SEQ ID NO 13654989 as cited in SEQ ID NO 63117
  misc_feature (1)..(2046): Ortholog of  Ceres SEQ ID NO 13655640 as cited in SEQ ID NO 63844
gctcttagtttctaaaaccgtcgatcaaaaatcatgtctcgtacaatcggctcacgggtcattttcttgatccttgctctcttctgttgtactgaaaactcccgtggcaaactggttatgcagggatccgctggattttttaaaggttacaggacgttgacgagcaccaagaagcacgcatatggtcaagccttcgaggacgagatagtccctttcaagaattcggccaacgatacagttacttctttctctgtcacgttcttctttgctatcgcccctgaggataagcacaaaggcgctcatggtatggccttcgtgatctctcccacaagaggcattactggtgcctccgctgatcagtaccttggaatctttaacaaagcaaacaacggggatagctcaaatcatgtcatcgctgtggagctcgatataaataaagatgaggaatttggcgacattaacgataaccatgttggtatcaacataaacggaatgaggtctatcaaatttgctcctgctggttattatgatcaagaaggtcaatttaaagatctttctttgataagtggaagtctactccgagtcacgattttgtatagccagatggaaaaacagcttaatgtcaccttatcatcaccagaggaggcttattacccgaacaagcctcttctttcattgaaccaagatctatcaccctatattttggagaacatgtatgtgggcttctcagcctcaacggggtctgttagagcaatgcattacatgttgagttggtttgtacatggcggcgttgatgttccaaacctggacttgggaataccaacatttcctccatatcccaaggaaaaatctctggtttatcggattgttttggtgaccagcttggcattggttctctttgttgcgcttgttgcatcagctttaagtatctttttctacaggagacataaaaaggttaaagaggttctagaggaatgggagatccaatgtgggcctcataggtttgcttacaaagaactctttaaagccacaaaaggtttcaaacaacttctaggcaaaggagggtttggtcaggtctttaagggtacacttccaggttctgatgcagagattgccgttaaacgaatttcacatgattcaaaacaaggaatgcaggaattcttggctgagatatcgacaattggtcggcttagacaccagaacctagtcaggcttcagggttattgtaggtacaaggaggaactctacttggtttatgactttatgcccaatggaagtcttgacaagtacctctaccacagagcgaatcaagagcaactcacttggaatcaacgtttcaagatcatcaaagacatagcctctgcactctgctatttgcatcatgaatgggtacaagttgtaattcatcgagacatcaagccggcaaatgtcctgattgaccaccaaatgaatgcaaggctcggggattttgggttggctaagttgtacgatcagggttatgatcctcagacatctagagttgctgggacattctggtacattgcaccggagctcataagaagcggaagagcaaccacagggacagacgtctatgccttcgggctgtttatgctagaagtctcttgcggtaggaggctgatagagcgaagaacagcctccgacgaggtcgtcctagctgaatggacattaaagtgctgggaaaacggagatattctcgaggcagtcaatgatggaatccgtcacgaagacaatagagaacagctcgagcttgttttgaaattgggagtgttgtgttcgcaccaggctgtagcaattaggccagacatgtctaaggtggtccagatcttgggtggtgatctgcagcttccagataatctactcgatatagtcaaagcagagaaggtcagaatgtggtctgagacatctgagagtgtacttggtgttttgacatcacaagggtccattggtaccttgacgttaacggaaccttttacctcccggggacgctgagacgtgatgctgagttcggtcgtgaaatgatatatg

SEQ ID NO: 89441 - protein, 658 aa, Arabidopsis thaliana
  peptide (1)..(658): Ceres Seq. ID no. 12718605
MSRTIGSRVIFLILALFCCTENSRGKLVMQGSAGFFKGYRTLTSTKKHAYGQAFEDEIVPFKNSANDTVTSFSVTFFFAIAPEDKHKGAHGMAFVISPTRGITGASADQYLGIFNKANNGDSSNHVIAVELDINKDEEFGDINDNHVGININGMRSIKFAPAGYYDQEGQFKDLSLISGSLLRVTILYSQMEKQLNVTLSSPEEAYYPNKPLLSLNQDLSPYILENMYVGFSASTGSVRAMHYMLSWFVHGGVDVPNLDLGIPTFPPYPKEKSLVYRIVLVTSLALVLFVALVASALSIFFYRRHKKVKEVLEEWEIQCGPHRFAYKELFKATKGFKQLLGKGGFGQVFKGTLPGSDAEIAVKRISHDSKQGMQEFLAEISTIGRLRHQNLVRLQGYCRYKEELYLVYDFMPNGSLDKYLYHRANQEQLTWNQRFKIIKDIASALCYLHHEWVQVVIHRDIKPANVLIDHQMNARLGDFGLAKLYDQGYDPQTSRVAGTFWYIAPELIRSGRATTGTDVYAFGLFMLEVSCGRRLIERRTASDEVVLAEWTLKCWENGDILEAVNDGIRHEDNREQLELVLKLGVLCSHQAVAIRPDMSKVVQILGGDLQLPDNLLDIVKAEKVRMWSETSESVLGVLTSQGSIGTLTLTEPFTSRGR

SEQ ID NO: 89442 - protein, 630 aa, Arabidopsis thaliana
  peptide (1)..(630): Ceres Seq. ID no. 12718606
MQGSAGFFKGYRTLTSTKKHAYGQAFEDEIVPFKNSANDTVTSFSVTFFFAIAPEDKHKGAHGMAFVISPTRGITGASADQYLGIFNKANNGDSSNHVIAVELDINKDEEFGDINDNHVGININGMRSIKFAPAGYYDQEGQFKDLSLISGSLLRVTILYSQMEKQLNVTLSSPEEAYYPNKPLLSLNQDLSPYILENMYVGFSASTGSVRAMHYMLSWFVHGGVDVPNLDLGIPTFPPYPKEKSLVYRIVLVTSLALVLFVALVASALSIFFYRRHKKVKEVLEEWEIQCGPHRFAYKELFKATKGFKQLLGKGGFGQVFKGTLPGSDAEIAVKRISHDSKQGMQEFLAEISTIGRLRHQNLVRLQGYCRYKEELYLVYDFMPNGSLDKYLYHRANQEQLTWNQRFKIIKDIASALCYLHHEWVQVVIHRDIKPANVLIDHQMNARLGDFGLAKLYDQGYDPQTSRVAGTFWYIAPELIRSGRATTGTDVYAFGLFMLEVSCGRRLIERRTASDEVVLAEWTLKCWENGDILEAVNDGIRHEDNREQLELVLKLGVLCSHQAVAIRPDMSKVVQILGGDLQLPDNLLDIVKAEKVRMWSETSESVLGVLTSQGSIGTLTLTEPFTSRGR

SEQ ID NO: 89443 - protein, 567 aa, Arabidopsis thaliana
  peptide (1)..(567): Ceres Seq. ID no. 12718607
MAFVISPTRGITGASADQYLGIFNKANNGDSSNHVIAVELDINKDEEFGDINDNHVGININGMRSIKFAPAGYYDQEGQFKDLSLISGSLLRVTILYSQMEKQLNVTLSSPEEAYYPNKPLLSLNQDLSPYILENMYVGFSASTGSVRAMHYMLSWFVHGGVDVPNLDLGIPTFPPYPKEKSLVYRIVLVTSLALVLFVALVASALSIFFYRRHKKVKEVLEEWEIQCGPHRFAYKELFKATKGFKQLLGKGGFGQVFKGTLPGSDAEIAVKRISHDSKQGMQEFLAEISTIGRLRHQNLVRLQGYCRYKEELYLVYDFMPNGSLDKYLYHRANQEQLTWNQRFKIIKDIASALCYLHHEWVQVVIHRDIKPANVLIDHQMNARLGDFGLAKLYDQGYDPQTSRVAGTFWYIAPELIRSGRATTGTDVYAFGLFMLEVSCGRRLIERRTASDEVVLAEWTLKCWENGDILEAVNDGIRHEDNREQLELVLKLGVLCSHQAVAIRPDMSKVVQILGGDLQLPDNLLDIVKAEKVRMWSETSESVLGVLTSQGSIGTLTLTEPFTSRGR

SEQ ID NO: 89444 - DNA, 509 bp, Arabidopsis thaliana
  misc_feature (1)..(509): Ceres Seq. ID no. 12718608
  misc_feature (1)..(509): Ortholog of  Ceres SEQ ID NO 13598758 as cited in SEQ ID NO 61555
ctaataaatcaactcgccgggaaaaaatggatcaaacggcggaggagaagatggtgagagagaggattagaaagaaagttaacgaagtcagttctgcgtcgcagtctcttctttctccagtacaagaccacatcaatttcacccttcaaaaggcatatttcaaatgtgcatacgagtgctttgataggacaagaacacacgctgagattagtcgatgtgcagagagttgcagtgttcctatcacaaatgcacagaactactttgataatgagatgtcggtgttccaagagaggttgaatagatctcttgtggtttgtcaagacaagtttgaggttgctaagcaacagaagacgagaagtgaagcggtaaatgatttggagcattgtgtaaaccaaactgttgatgaagctgtgaagactctgcctaatctcgtctcaagaatgaagaaagctttgtcaatcacagactgagctctccaacgattataaagagggactcttttctgatac

SEQ ID NO: 89445 - protein, 155 aa, Arabidopsis thaliana
  peptide (1)..(155): Ceres Seq. ID no. 12718609
NKSTRREKMDQTAEEKMVRERIRKKVNEVSSASQSLLSPVQDHINFTLQKAYFKCAYECFDRTRTHAEISRCAESCSVPITNAQNYFDNEMSVFQERLNRSLVVCQDKFEVAKQQKTRSEAVNDLEHCVNQTVDEAVKTLPNLVSRMKKALSITD

SEQ ID NO: 89446 - protein, 147 aa, Arabidopsis thaliana
  peptide (1)..(147): Ceres Seq. ID no. 12718610
MDQTAEEKMVRERIRKKVNEVSSASQSLLSPVQDHINFTLQKAYFKCAYECFDRTRTHAEISRCAESCSVPITNAQNYFDNEMSVFQERLNRSLVVCQDKFEVAKQQKTRSEAVNDLEHCVNQTVDEAVKTLPNLVSRMKKALSITD

SEQ ID NO: 89447 - protein, 139 aa, Arabidopsis thaliana
  peptide (1)..(139): Ceres Seq. ID no. 12718611
MVRERIRKKVNEVSSASQSLLSPVQDHINFTLQKAYFKCAYECFDRTRTHAEISRCAESCSVPITNAQNYFDNEMSVFQERLNRSLVVCQDKFEVAKQQKTRSEAVNDLEHCVNQTVDEAVKTLPNLVSRMKKALSITD

SEQ ID NO: 89448 - DNA, 763 bp, Arabidopsis thaliana
  misc_feature (1)..(763): Ceres Seq. ID no. 12718640
  misc_feature (1)..(763): Ortholog of  Ceres SEQ ID NO 13659085 as cited in SEQ ID NO 66806
aatctcgatctcgagaaagaaagaaaaaaagagaaggcatggccgcggaagaagcgacggagttctacctgagatactatgtcggtcacaaagggaaatttggacacgagttcctggagttcgagtttagagaggacggtaagctccgttacgccaataactctaactacaagaacgatactattatccgcaaggaggtatttctcacccccgccgtgctcaaggaatgcaagcgtatcgtctccgagagcgagattctgaaagaagacgataacaattggccggaacctgaccgtgttggaaagcaagagctcgagatcgtcttgggtaatgagcatatctcattcgctacatctaagattggatctcttgttgattgccagagcagtaatgatcctgaaggacttcgcatcttctactatcttgttcaggacttgaaatgtcttgttttttcgctcatctctctgcacttcaaaatcaagcctatctagagaagaaaatcagtttgtgacatgtcaagacgcgatgaatttgttgggaacatgaggactttgtgactgaagtttggttgtttttatgtctctggttctctgttttttttttttgttggatttgggtgaaagtgggtatgtaagatgttctacctcaacttttggtccttttttgtgtcaacatcccatgtgaagaacctttcatgaaccacaacctatcttctaaaaaccatatacttgctgttttcttatcacaaatcattcactctccc

SEQ ID NO: 89449 - protein, 162 aa, Arabidopsis thaliana; identical to SEQ ID NO: 23183
  peptide (1)..(162): Ceres Seq. ID no. 12718641

SEQ ID NO: 89450 - protein, 150 aa, Arabidopsis thaliana; identical to SEQ ID NO: 23184
  peptide (1)..(150): Ceres Seq. ID no. 12718642

SEQ ID NO: 89451 - DNA, 1875 bp, Arabidopsis thaliana
  misc_feature (1)..(1875): Ceres Seq. ID no. 12718643
  misc_feature (1)..(1875): Ortholog of  Ceres SEQ ID NO 13600216 as cited in SEQ ID NO 569
atgtcgttctccgattcagagtcatcctctcacggaggaggaggaggagattacaagttctttcgtcagatcagccgcgatcgattgctccacgagatgcttggatctaccaaaaccggggattctaaagcttggaagatactaataatggatagagttacggtcaaagtaatgtctcagtcttgcaagatggctgatatcactgatcaaggcatttcctgtatcatgtttctatccgacatgtctggccgggaacccttgtacaggaaggcatttatctttttcagttccactatccccaaagaattggtcaatcacatcaaaagtgattctagcgttttaccacgcattggtgctttacgcgagggatttctaactgatcatgagcaagcattggaaacgctctatgctgaagatgctgagaattcacgccactttcatatttgtttgaatattatggctactagaattgctaccgtatttgcttccctcaaggaactaccctttgttcggtatcgagctgctaagtccactgcttcgagggacttggttccatcaaagcttgctgctgcaatttgggactgtatctcaaaatataaagccattcccaacttcccccagaccgaaacatgtgagctgctcattgtggatagatcagtggatcagatcgctcctatcatacacgaatggacctatgatgctatgtgccatgatttgcttgacatggaggggaataaacatgtcattgaggttcccagtaaaactggtgggcctccggagaaaaaggagatagtgcttgaagatcatgatccagtgtggcttgagcttcgacacacacatatagcagatgctagcgagcgtttgcatgagaaaatgaccaactttgcttcaaaaaacaaagccgcacaaatgagatcaagggacggtagcgagttgtctacacgagatctacagaaaatagttcaggctttgccgcaatatggagaacaagttgacaaactctccactcatgtagagctagctggaaaaattaatagaataatcagagacacaggacttcgggatcttgggcagctggaacaagatcttgtttttggagatgcaggtgccaaggacgttatcaactttctgaggacgaatcaggacacaaacccggaaaacaaattacggcttttgatgatttatgcaacagtgtaccccgagaagtttgaaggtgacaagggtgtgaagctaatgcaggttataagcaacatgcaattgatagctggatccccagaaaacaaagctaagtccggtagtttctccctcaaatttgacgctggaaagacaaaacaagcaaacaggaaagatcgatctggtgaagaagaaacatggcaactgttccggttttatcccatgatcgaggagctgcttgagaaactcgtgaaaggcgatctatctaaaagcgactatctatgtatgaaccaatcaagtcataaggaggagagtgaagcaagaacaggatctgtcaggaagagttctgctcctacagcggttccagagagaaaagccacccctcattctatgagatcaagacgaactgcaacttgggcgcgtcctcattcttctgacgatggatattccaggcattctattttacataatgatttcttattttttggtccatttgagaggatctttgtattcataattggtggggcaactcgatccgagctccgagtttgccacaagttgacaagcagtttgaggagagaagtggtactaggctccactagtttcgatgatcccccacagtacatcacgaagctgaaattgctgtcggaaaaagacatacaaggggctcctgctcagcccttcaaaccacaatactggtga

SEQ ID NO: 89452 - protein, 624 aa, Arabidopsis thaliana
  peptide (1)..(624): Ceres Seq. ID no. 12718644
MSFSDSESSSHGGGGGDYKFFRQISRDRLLHEMLGSTKTGDSKAWKILIMDRVTVKVMSQSCKMADITDQGISCIMFLSDMSGREPLYRKAFIFFSSTIPKELVNHIKSDSSVLPRIGALREGFLTDHEQALETLYAEDAENSRHFHICLNIMATRIATVFASLKELPFVRYRAAKSTASRDLVPSKLAAAIWDCISKYKAIPNFPQTETCELLIVDRSVDQIAPIIHEWTYDAMCHDLLDMEGNKHVIEVPSKTGGPPEKKEIVLEDHDPVWLELRHTHIADASERLHEKMTNFASKNKAAQMRSRDGSELSTRDLQKIVQALPQYGEQVDKLSTHVELAGKINRIIRDTGLRDLGQLEQDLVFGDAGAKDVINFLRTNQDTNPENKLRLLMIYATVYPEKFEGDKGVKLMQVISNMQLIAGSPENKAKSGSFSLKFDAGKTKQANRKDRSGEEETWQLFRFYPMIEELLEKLVKGDLSKSDYLCMNQSSHKEESEARTGSVRKSSAPTAVPERKATPHSMRSRRTATWARPHSSDDGYSRHSILHNDFLFFGPFERIFVFIIGGATRSELRVCHKLTSSLRREVVLGSTSFDDPPQYITKLKLLSEKDIQGAPAQPFKPQYW

SEQ ID NO: 89453 - protein, 592 aa, Arabidopsis thaliana
  peptide (1)..(592): Ceres Seq. ID no. 12718645
MLGSTKTGDSKAWKILIMDRVTVKVMSQSCKMADITDQGISCIMFLSDMSGREPLYRKAFIFFSSTIPKELVNHIKSDSSVLPRIGALREGFLTDHEQALETLYAEDAENSRHFHICLNIMATRIATVFASLKELPFVRYRAAKSTASRDLVPSKLAAAIWDCISKYKAIPNFPQTETCELLIVDRSVDQIAPIIHEWTYDAMCHDLLDMEGNKHVIEVPSKTGGPPEKKEIVLEDHDPVWLELRHTHIADASERLHEKMTNFASKNKAAQMRSRDGSELSTRDLQKIVQALPQYGEQVDKLSTHVELAGKINRIIRDTGLRDLGQLEQDLVFGDAGAKDVINFLRTNQDTNPENKLRLLMIYATVYPEKFEGDKGVKLMQVISNMQLIAGSPENKAKSGSFSLKFDAGKTKQANRKDRSGEEETWQLFRFYPMIEELLEKLVKGDLSKSDYLCMNQSSHKEESEARTGSVRKSSAPTAVPERKATPHSMRSRRTATWARPHSSDDGYSRHSILHNDFLFFGPFERIFVFIIGGATRSELRVCHKLTSSLRREVVLGSTSFDDPPQYITKLKLLSEKDIQGAPAQPFKPQYW

SEQ ID NO: 89454 - protein, 575 aa, Arabidopsis thaliana
  peptide (1)..(575): Ceres Seq. ID no. 12718646
MDRVTVKVMSQSCKMADITDQGISCIMFLSDMSGREPLYRKAFIFFSSTIPKELVNHIKSDSSVLPRIGALREGFLTDHEQALETLYAEDAENSRHFHICLNIMATRIATVFASLKELPFVRYRAAKSTASRDLVPSKLAAAIWDCISKYKAIPNFPQTETCELLIVDRSVDQIAPIIHEWTYDAMCHDLLDMEGNKHVIEVPSKTGGPPEKKEIVLEDHDPVWLELRHTHIADASERLHEKMTNFASKNKAAQMRSRDGSELSTRDLQKIVQALPQYGEQVDKLSTHVELAGKINRIIRDTGLRDLGQLEQDLVFGDAGAKDVINFLRTNQDTNPENKLRLLMIYATVYPEKFEGDKGVKLMQVISNMQLIAGSPENKAKSGSFSLKFDAGKTKQANRKDRSGEEETWQLFRFYPMIEELLEKLVKGDLSKSDYLCMNQSSHKEESEARTGSVRKSSAPTAVPERKATPHSMRSRRTATWARPHSSDDGYSRHSILHNDFLFFGPFERIFVFIIGGATRSELRVCHKLTSSLRREVVLGSTSFDDPPQYITKLKLLSEKDIQGAPAQPFKPQYW

SEQ ID NO: 89455 - DNA, 1205 bp, Arabidopsis thaliana
  misc_feature (1)..(1205): Ceres Seq. ID no. 12718651
  misc_feature (1)..(1205): Ortholog of  Ceres SEQ ID NO 15177965 as cited in SEQ ID NO 58545
aattccttcttcttcttcttcttcttcttgtctccgatgtcagccatggatgttatgattcactcttcaagctttctcctcccttgcgacgaaactagtacagggacgagatacgctctcgttgttctgaaccagagtttgccacgattcactcctcttctctgggaacatgcaaaacttcgtctctgtgctgatggaggcgctaatcgcatctacgacgaattgcctctcttcttccctaatgaagacgctttggccattcgaaacaggtccaactttctgaagctgtatctctcgctctcttactctttcttcggatttgaagattattattcaaatttagtgatggtttattggaataattagtctaaatttgagctggagatattttttttgtatgagttcatagattcaccttcttcttatctttatgtatattacatagagaaagatttcatgaagaagaacttgtattttaggtataagccggatgttatcaaaggagatatggattctatacgtcgtgacgtcctcgacttttatataaacttgggaactaaggttatagatgaatctcatgatcaagacaccacagatcttgataaatgcattttgtatatccgtcactctactttgaatcaagagacttccggactccagattcttgccactggagcacttggaggaagatttgatcatgaagccggtaatctcaacgtcttatatcgatatccagatacaaggatagtccttttatctgacgattgcctcatccaactccttccaaagactcatcgacatgaaatacatattcagtcttctctagaagggcctcactgtggactcatacccattggaactccatctgctaaaaccacaacctcagggcttcaatgggatctcagcaacactgagatgagatttggtgggttgataagtacatccaacttggttaaagaagagaaaatcacagtcgaatcggattcggatcttctctggactatatccatcaagaaaacaggactttccatacaagaccatacaccttaggcccggtaacaaaacacactttagtatattatacgctactatgatgttcctgatgcaacgaactagttcaacattattgtgttgatttgttgttcactgtactagctaataatacttgtaccattactgtcgttatacattaagatgcttttttc

SEQ ID NO: 89456 - protein, 197 aa, Arabidopsis thaliana
  peptide (1)..(197): Ceres Seq. ID no. 12718652
MKKNLYFRYKPDVIKGDMDSIRRDVLDFYINLGTKVIDESHDQDTTDLDKCILYIRHSTLNQETSGLQILATGALGGRFDHEAGNLNVLYRYPDTRIVLLSDDCLIQLLPKTHRHEIHIQSSLEGPHCGLIPIGTPSAKTTTSGLQWDLSNTEMRFGGLISTSNLVKEEKITVESDSDLLWTISIKKTGLSIQDHTP

SEQ ID NO: 89457 - protein, 180 aa, Arabidopsis thaliana; identical to SEQ ID NO: 43324
  peptide (1)..(180): Ceres Seq. ID no. 12718653

SEQ ID NO: 89458 - protein, 121 aa, Arabidopsis thaliana
  peptide (1)..(121): Ceres Seq. ID no. 12718654
NSFFFFFFFLSPMSAMDVMIHSSSFLLPCDETSTGTRYALVVLNQSLPRFTPLLWEHAKLRLCADGGANRIYDELPLFFPNEDALAIRNRSNFLKLYLSLSYSFFGFEDYYSNLVMVYWNN

SEQ ID NO: 89459 - DNA, 1434 bp, Arabidopsis thaliana
  misc_feature (1)..(1434): Ceres Seq. ID no. 12718658
  misc_feature (1)..(1434): Ortholog of  Ceres SEQ ID NO 13597475 as cited in SEQ ID NO 65105
  misc_feature (1)..(1434): Ortholog of  Ceres SEQ ID NO 14301761 as cited in SEQ ID NO 66790
aaacaaaaatggcggagaaaaagagagtcaagtacttcattgttgatgcattcgctgaatctgccttcaaagggaatccagctgctgtttgctttctagaagacgataacgagagagacgacgcgtggcttcagtctcttgccaccgagttcaatatctccgagacttgtttcctcactccgatcatcggagacttgcctcgcttccgtctccgttggttcactccagtcgctgaggtttccgtgttttcttttggttttggaattcggaattgttcggttgacttgttatcattgacttgatagatcctgataactagaacttgtactcattcactggctcttgtgaatctctctttgctttgctgttattgtgcaggtggatttgtgtggtcatgcaactttagcatctgctcacgttctcttctcaactggtttggttggttcagagacagttgagttcgacacattatcagggattctaacagctaaacatctcaaaaatgatgatgatggagaagaatcaagtatcgaattggatttccctgttgttccaacatatgaagtcaactacattgatgatgatctctctttgttctccaaagccttgaatggagctaccattcttgatgtcaaagccacaaagaaagacctcctcgtaactatatttcaccaactgtctccatttttcctattcttgctatgggaaccaaaatctcgattcttttcgaatggtttgcaggttgtgctttcatcttgggaagctgttattgatttgaagccaagattagatgagatatcgaaatgcccttgtgaaggaatgatggtgactgccgctgcttctgatggatctacttatgatttctgtagtcgctactttgccccgagattcggaatcaatgaggttatcatttagtcttttgctcttagaagattaagagcgagtggtcaaaacagcaaaaacgtgacctcttttgctttctttttactgtgtggctcttcaggaccctgttactggaagtgctcattgtgctttagctcattactggagcctcaggatgaacaagtgtgatttcttcgcctaccaggttctctctctctttctctccacgcagacacttaaaagacaaattctgaagtgattcgtataaagttacctgaagaaagatttggttattattggaatgtgtttaggcttcaagcagaggaggaacgttgaaggtgcacctggacaaagagaagcagagggttctactgagaggcaaagcagtcactgttatggaaggttatgtcttagtgtgattttggctatgatgaaaattcaggctcttgtaaacgatgaaattaataaaagattccatatattctcggatatatataattgtatccattaataaatactcgttttttaagtaacggatagtttcatattttc

SEQ ID NO: 89460 - protein, 99 aa, Arabidopsis thaliana
  peptide (1)..(99): Ceres Seq. ID no. 12718659
TKMAEKKRVKYFIVDAFAESAFKGNPAAVCFLEDDNERDDAWLQSLATEFNISETCFLTPIIGDLPRFRLRWFTPVAEVSVFSFGFGIRNCSVDLLSLT

SEQ ID NO: 89461 - protein, 97 aa, Arabidopsis thaliana; identical to SEQ ID NO: 36732
  peptide (1)..(97): Ceres Seq. ID no. 12718660

SEQ ID NO: 89462 - protein, 69 aa, Arabidopsis thaliana
  peptide (1)..(69): Ceres Seq. ID no. 12718661
MCLGFKQRRNVEGAPGQREAEGSTERQSSHCYGRLCLSVILAMMKIQALVNDEINKRFHIFSDIYNCIH

SEQ ID NO: 89463 - DNA, 1194 bp, Arabidopsis thaliana
  misc_feature (1)..(1194): Ceres Seq. ID no. 12718662
  misc_feature (1)..(1194): Ortholog of  Ceres SEQ ID NO 14316144 as cited in SEQ ID NO 52397
atgatgatgagatttaccaagttggtttggtgtttgatgttcctgcttcgattcggcttcttcacggaggcgattctcgacccagttgatttcttggctctgcaagctattcgtaaatccctcgatgacttgccaggttccaagttcttcgagtcttgggatttcacttctgatccatgcggcttcgctggcgtctactgcaacggagataaagtaatctctctcaatctcggcgatcctagagccggttcacccggtttatcgggtcggatcgacccagcaataggcaaactctctgcactcactgagctctccattgtccccggcagaatcatgggtgcgttaccggcaacaatctctcagctaaaagaccttcgttttctcgcaatcagccggaatttcatctccggcgagattccggcgagtctcggcgaggttcgtggtctcagaacactggatttaagctataatcaattaaccggaactatctctccgtcaatcggatcgttaccggagctctccaatttgattctctgccacaaccacttaaccggatcaataccaccgtttctctcacaaactctaacccgaatcgatctcaaacgcaacagcctcaccggctcaatctcaccggcgtctctccctccgtcgcttcaatacctctcactcgcttggaaccagttaaccggatcggtataccatgttttactccggttgaaccagcttaactaccttgatctcagcttaaaccggttcaccggtacaatccccgctcgagtcttcgccttcccgatcacaaatcttcagttacaacgcaatttcttcttcggtttaattcagccggcgaatcaagtgacgatctccaccgtcgatctcagctacaatcgattctccggtgggatatctccgcttctctcaagcgttgagaatctctacttaaacagcaatcgtttcaccggtgaagtcccggcgagtttcgtggagaggttgttatcggcgaacatacagactctgtatctacagcataatttcttgacgggaatacagattagcccggcggcggaaatcccggtgagcagctcgctgtgtctgcagtataactgtatggtgccgccgttacaaaccccgtgtccgctaaaggccggcccacaaaagactaggcccactacacaatgcaccgagtggcgagggtag

SEQ ID NO: 89464 - protein, 397 aa, Arabidopsis thaliana
  peptide (1)..(397): Ceres Seq. ID no. 12718663
MMMRFTKLVWCLMFLLRFGFFTEAILDPVDFLALQAIRKSLDDLPGSKFFESWDFTSDPCGFAGVYCNGDKVISLNLGDPRAGSPGLSGRIDPAIGKLSALTELSIVPGRIMGALPATISQLKDLRFLAISRNFISGEIPASLGEVRGLRTLDLSYNQLTGTISPSIGSLPELSNLILCHNHLTGSIPPFLSQTLTRIDLKRNSLTGSISPASLPPSLQYLSLAWNQLTGSVYHVLLRLNQLNYLDLSLNRFTGTIPARVFAFPITNLQLQRNFFFGLIQPANQVTISTVDLSYNRFSGGISPLLSSVENLYLNSNRFTGEVPASFVERLLSANIQTLYLQHNFLTGIQISPAAEIPVSSSLCLQYNCMVPPLQTPCPLKAGPQKTRPTTQCTEWRG

SEQ ID NO: 89465 - protein, 396 aa, Arabidopsis thaliana
  peptide (1)..(396): Ceres Seq. ID no. 12718664
MMRFTKLVWCLMFLLRFGFFTEAILDPVDFLALQAIRKSLDDLPGSKFFESWDFTSDPCGFAGVYCNGDKVISLNLGDPRAGSPGLSGRIDPAIGKLSALTELSIVPGRIMGALPATISQLKDLRFLAISRNFISGEIPASLGEVRGLRTLDLSYNQLTGTISPSIGSLPELSNLILCHNHLTGSIPPFLSQTLTRIDLKRNSLTGSISPASLPPSLQYLSLAWNQLTGSVYHVLLRLNQLNYLDLSLNRFTGTIPARVFAFPITNLQLQRNFFFGLIQPANQVTISTVDLSYNRFSGGISPLLSSVENLYLNSNRFTGEVPASFVERLLSANIQTLYLQHNFLTGIQISPAAEIPVSSSLCLQYNCMVPPLQTPCPLKAGPQKTRPTTQCTEWRG

SEQ ID NO: 89466 - protein, 395 aa, Arabidopsis thaliana; identical to SEQ ID NO: 80693
  peptide (1)..(395): Ceres Seq. ID no. 12718665

SEQ ID NO: 89467 - protein, 385 aa, Arabidopsis thaliana; identical to SEQ ID NO: 80694
  peptide (1)..(385): Ceres Seq. ID no. 12718666

SEQ ID NO: 89468 - DNA, 1023 bp, Arabidopsis thaliana
  misc_feature (1)..(1023): Ceres Seq. ID no. 12718950
  misc_feature (1)..(1023): Ortholog of  Ceres SEQ ID NO 14306410 as cited in SEQ ID NO 53870
atgaaaacatttaaggtgtggtcgtacaaagaaggagagcagccactggttcacgatggaccggtaaatgatatctacggaatcgagggacagttcattgacgagcttagttacgtgatgggcggaccaagtggccggtttagagctagccggccagaagaagcccatgccttcttcttacccttctccgttgccaacattgttcactacgtctaccaacccattacctcgccagccgatttcaaccgggcccgtctccaccggatttttaacgattatgtagacgtagtggctcacaagcaccctttttggaaccaaagcaatggtgctgaccatttcatggtctcttgccacgattgggctcccgatgtgccagatagtaaaccagagtttttcaagaacttcatgagaggactatgcaacgccaacacatcggaaggtttcagacgaaacatcgatttctctataccggagattaacattcctaaaaggaagctaaagccaccatttatgggacaaaaccctgagaacaggacgatcttggctttcttcgcaggaagagctcacggatacattagggaagttttgttcagtcactggaagggtaaggataaagacgttcaagtttatgaccacctcacaaagggacaaaactatcatgaattgattggtcatagcaagttttgtctttgtcctagtggctacgaggtggctagtcctagagaggtcgaagccatctactcaggctgcgtcccggttgtcatatcggacaactactcgcttccgttcaacgacgtgcttgattggagcaagttctcggttgagatcccggtcgacaaaattcctgatattaagaagattttgcaagagattccacatgacaaatatttaaggatgtatcgaaatgttatgaaagttagaaggcattttgtggtgaaccgtccggctcaaccatttgatgtgatccacatgattcttcactcggtttggttaaggaggcttaacattaggttgccttcttga

SEQ ID NO: 89469 - protein, 340 aa, Arabidopsis thaliana
  peptide (1)..(340): Ceres Seq. ID no. 12718951
MKTFKVWSYKEGEQPLVHDGPVNDIYGIEGQFIDELSYVMGGPSGRFRASRPEEAHAFFLPFSVANIVHYVYQPITSPADFNRARLHRIFNDYVDVVAHKHPFWNQSNGADHFMVSCHDWAPDVPDSKPEFFKNFMRGLCNANTSEGFRRNIDFSIPEINIPKRKLKPPFMGQNPENRTILAFFAGRAHGYIREVLFSHWKGKDKDVQVYDHLTKGQNYHELIGHSKFCLCPSGYEVASPREVEAIYSGCVPVVISDNYSLPFNDVLDWSKFSVEIPVDKIPDIKKILQEIPHDKYLRMYRNVMKVRRHFVVNRPAQPFDVIHMILHSVWLRRLNIRLPS

SEQ ID NO: 89470 - protein, 301 aa, Arabidopsis thaliana
  peptide (1)..(301): Ceres Seq. ID no. 12718952
MGGPSGRFRASRPEEAHAFFLPFSVANIVHYVYQPITSPADFNRARLHRIFNDYVDVVAHKHPFWNQSNGADHFMVSCHDWAPDVPDSKPEFFKNFMRGLCNANTSEGFRRNIDFSIPEINIPKRKLKPPFMGQNPENRTILAFFAGRAHGYIREVLFSHWKGKDKDVQVYDHLTKGQNYHELIGHSKFCLCPSGYEVASPREVEAIYSGCVPVVISDNYSLPFNDVLDWSKFSVEIPVDKIPDIKKILQEIPHDKYLRMYRNVMKVRRHFVVNRPAQPFDVIHMILHSVWLRRLNIRLPS

SEQ ID NO: 89471 - protein, 227 aa, Arabidopsis thaliana
  peptide (1)..(227): Ceres Seq. ID no. 12718953
MVSCHDWAPDVPDSKPEFFKNFMRGLCNANTSEGFRRNIDFSIPEINIPKRKLKPPFMGQNPENRTILAFFAGRAHGYIREVLFSHWKGKDKDVQVYDHLTKGQNYHELIGHSKFCLCPSGYEVASPREVEAIYSGCVPVVISDNYSLPFNDVLDWSKFSVEIPVDKIPDIKKILQEIPHDKYLRMYRNVMKVRRHFVVNRPAQPFDVIHMILHSVWLRRLNIRLPS

SEQ ID NO: 89472 - DNA, 2008 bp, Arabidopsis thaliana
  misc_feature (1)..(2008): Ceres Seq. ID no. 12719052
  misc_feature (1)..(2008): Ortholog of  Ceres SEQ ID NO 12613725 as cited in SEQ ID NO 68196
gcttctgtggctaacaaagagcaaacaaacacttagaagaaactaagaatactctcatcaaggcgatatagaaaaaaatggagagcaaagggagttggacagtggctgatgccgtagactacaaaggacgacctgccgacaaatccaaaaccggtggttggatcactgccgctctcattcttgggatagaagttgtggagaggctatcaacaatgggaatagcagtgaatttggtaacatatttgatggagacaatgcatctcccaagttcaacctctgccaacattgtcactgatttcatgggcacttccttcctcctatgcttgctcggtggttttctcgctgactccttcctcggccgtttcaaaaccatcggcattttctcaaccattcaagctctgggaactggtgctctagcggtagcaactaagctgccagagctacgtccaccaacatgccatcatggagaagcttgcatacccgcgaccgccttccaaatgacaattctttatgtttcgctttaccttatagcccttggaactggtggtcttaaatctagtatctctggatttgggtctgaccagtttgatgacaaagatcctaaagagaaagctcacatggctttcttcttcaacaggttcttcttctttattagtatggggacattattggctgtgactgttttagtttacatgcaagatgaagtgggaagatcttgggcttatggaatctgcactgtctctatggctatagctattgtaatattcttgtgtgggactaagagataccgttataagaagagccaaggaagtcccgttgtgcaaatatttcaggtcatagcagctgcgttccgaaagaggaaaatggaactacctcaaagcattgtttatctttatgaagataaccctgaaggcattagaattgaacatactgatcagtttcacttgttggacaaggcggccatagttgcagaaggagattttgaacaaacccttgatggagttgcaatcccaaacccttggaagctaagctcagtgaccaaagttgaggaagtaaaaatgatggttaggcttttgcctatttgggcaacaactataattttttggacaacatatgcccaaatgattacattctctgttgagcaagcttcaactatgagacgtaacattggaagctttaagatcccagctggttccctcaccgtgtttttcgttgcggctattctcataactctagctgtctacgaccgtgccataatgcctttttggaagaaatggaaaggaaaaccaggtttctctagcctacaaagaatagctattggattggtcttatcaaccgctggaatggcagctgcagctctagtagagcaaaagcgtttatccgttgcgaaatctagttcacaaaaaacattgcctataagtgtgtttttacttgttccacaattcttcttagtaggagctggggaagcctttatctacactggccaacttgatttcttcataacacaatcgcctaagggaatgaaaactatgagcactggactcttcttgaccactttatcactaggtttctttgtcagcagtttcttggtctcaatcgtcaagagggtcacttcaacttctactgatgtaggatggctggctgataacattaaccacggccgactcgattacttttattggcttttagtcattctcagtggaattaacttcgttgtctatatcatatgtgccttgtggtttaagccaacgaagggtaaagactcagtagagaaggaaaatggcaagggattttcagttgaagactgctgaattttgttttgcaataattgtcttgtgtacaatattatcttgcaacaatgtcgctttccaattatgtttcttgtatattaagcaattggcttgtttttagattcctcccggtctcaaatattgtgtctttaccgtttatgttattcactctttttttttgcatcgtgaaaaataattatttaacgaagtatactttt

SEQ ID NO: 89473 - protein, 577 aa, Arabidopsis thaliana
  peptide (1)..(577): Ceres Seq. ID no. 12719053
MESKGSWTVADAVDYKGRPADKSKTGGWITAALILGIEVVERLSTMGIAVNLVTYLMETMHLPSSTSANIVTDFMGTSFLLCLLGGFLADSFLGRFKTIGIFSTIQALGTGALAVATKLPELRPPTCHHGEACIPATAFQMTILYVSLYLIALGTGGLKSSISGFGSDQFDDKDPKEKAHMAFFFNRFFFFISMGTLLAVTVLVYMQDEVGRSWAYGICTVSMAIAIVIFLCGTKRYRYKKSQGSPVVQIFQVIAAAFRKRKMELPQSIVYLYEDNPEGIRIEHTDQFHLLDKAAIVAEGDFEQTLDGVAIPNPWKLSSVTKVEEVKMMVRLLPIWATTIIFWTTYAQMITFSVEQASTMRRNIGSFKIPAGSLTVFFVAAILITLAVYDRAIMPFWKKWKGKPGFSSLQRIAIGLVLSTAGMAAAALVEQKRLSVAKSSSQKTLPISVFLLVPQFFLVGAGEAFIYTGQLDFFITQSPKGMKTMSTGLFLTTLSLGFFVSSFLVSIVKRVTSTSTDVGWLADNINHGRLDYFYWLLVILSGINFVVYIICALWFKPTKGKDSVEKENGKGFSVEDC

SEQ ID NO: 89474 - protein, 532 aa, Arabidopsis thaliana
  peptide (1)..(532): Ceres Seq. ID no. 12719054
MGIAVNLVTYLMETMHLPSSTSANIVTDFMGTSFLLCLLGGFLADSFLGRFKTIGIFSTIQALGTGALAVATKLPELRPPTCHHGEACIPATAFQMTILYVSLYLIALGTGGLKSSISGFGSDQFDDKDPKEKAHMAFFFNRFFFFISMGTLLAVTVLVYMQDEVGRSWAYGICTVSMAIAIVIFLCGTKRYRYKKSQGSPVVQIFQVIAAAFRKRKMELPQSIVYLYEDNPEGIRIEHTDQFHLLDKAAIVAEGDFEQTLDGVAIPNPWKLSSVTKVEEVKMMVRLLPIWATTIIFWTTYAQMITFSVEQASTMRRNIGSFKIPAGSLTVFFVAAILITLAVYDRAIMPFWKKWKGKPGFSSLQRIAIGLVLSTAGMAAAALVEQKRLSVAKSSSQKTLPISVFLLVPQFFLVGAGEAFIYTGQLDFFITQSPKGMKTMSTGLFLTTLSLGFFVSSFLVSIVKRVTSTSTDVGWLADNINHGRLDYFYWLLVILSGINFVVYIICALWFKPTKGKDSVEKENGKGFSVEDC

SEQ ID NO: 89475 - protein, 521 aa, Arabidopsis thaliana
  peptide (1)..(521): Ceres Seq. ID no. 12719055
METMHLPSSTSANIVTDFMGTSFLLCLLGGFLADSFLGRFKTIGIFSTIQALGTGALAVATKLPELRPPTCHHGEACIPATAFQMTILYVSLYLIALGTGGLKSSISGFGSDQFDDKDPKEKAHMAFFFNRFFFFISMGTLLAVTVLVYMQDEVGRSWAYGICTVSMAIAIVIFLCGTKRYRYKKSQGSPVVQIFQVIAAAFRKRKMELPQSIVYLYEDNPEGIRIEHTDQFHLLDKAAIVAEGDFEQTLDGVAIPNPWKLSSVTKVEEVKMMVRLLPIWATTIIFWTTYAQMITFSVEQASTMRRNIGSFKIPAGSLTVFFVAAILITLAVYDRAIMPFWKKWKGKPGFSSLQRIAIGLVLSTAGMAAAALVEQKRLSVAKSSSQKTLPISVFLLVPQFFLVGAGEAFIYTGQLDFFITQSPKGMKTMSTGLFLTTLSLGFFVSSFLVSIVKRVTSTSTDVGWLADNINHGRLDYFYWLLVILSGINFVVYIICALWFKPTKGKDSVEKENGKGFSVEDC

SEQ ID NO: 89476 - DNA, 2031 bp, Arabidopsis thaliana
  misc_feature (1)..(2031): Ceres Seq. ID no. 12719056
  misc_feature (1)..(2031): Ortholog of  Ceres SEQ ID NO 15177692 as cited in SEQ ID NO 52664
  misc_feature (1)..(2031): Ortholog of  Ceres SEQ ID NO 12467471 as cited in SEQ ID NO 55509
atgagctggaccggaggagattggctatgtggtgcgtgtcagcacgcaaacttcaagaaaagagaatcatgtcaaaaatgcggataccccaaatttggaggggttgatgtgtcaacgtacttgtacaacaggaccgaagttatggctggtgattggtattgtggtgcattgaattgtgggagccacaattacgcgagccgaacaagttgttaccgatgtggaatgatcaaagtcgagtatacggaacagtactatggagctcaaatggttgcttacgggaatgatggcgcagcttgtcctcccggatggaaaactggcgattgggtttgtcctagggtgggatgtggggttcataactacgcaagcagggcagaatgcttcaaatgcaagacaacaagagattatggtgcgtggcgtctaaatggacgagaaagagctaatgaagaatctcttgttttaattatacctttcaacaagtgtttctactttctaacatgcatgacgctttcttacgttgacttgaaatcaattgaaagtttagactcgtgcaaattaactatcttttacaaagataatgagtccgattatgagagctccaccgtcggaccagactcgagccgccgtacgagttggctgagcagctctttcacggctagccctagttgtagctccatatctcatctaagtaaccatggtctcaacagctataaccaatcaaagcctcacaaagccaaccaagtcgcatgggaagctatggccaggctccgtcggtgctgcggccgtgcggtagggttagaacattttcggcttttaaagaggttgggaagtggtgacatcggaagtgtgtacctctgccaaatacgtggaagtcccgagacggcgttttatgctatgaaagttgtggataaggaagctgttgcggtgaagaaaaagcttggaagggcagagatggagaagaagattttagggatgcttgatcatcctttttgccctacattgtacgcagcttttgaggcttctcattactcttttctcgtcatggagtattgtcccggcggtgatctctacgccgtccgcctccgccaaccgtctaaacgtttcactatctcctccacaaggttttacgcagcagaaactctagtggccttagagtatctccacatgatgggaattgtgtatagagacctaaagccagagaacgtgttgatcagagaagatggtcatgtaatgctctcagatttcgatctctccttcaaatgtgacgtcgttccacaattcctcagcgacaacgaccgtgaccgtggccatcaagaagacgatgacgacatcagcattcgccgtaaatgctctacaccttcttgcacgacaactccattaaaccccgtcatctcctgcttctctcccacttctagcagaagaagaaagaagaatgttgttaccacaacaatacacgaaaacgcagctgacatctctggtggatgtccatcaatatttgccgaaccaatcaatgctcgctctaagtcattcgtgggaacacatgagtacttggcacccgaagtaatctcagggcaagggcatgggagtgcagtagattggtggacttacgggatatttctatacgagatgatatttggtaggacaccgtttaaaggcgataacaacgagaagacgttagtaaacattctgaaagcacccttgacattcccaaaggttatagtgaatagccccaaagagtacgaagatatggtgaatgctcaagatcttattataaaattactggtgaagaaccctaagaagaggttagggagtctcaaaggctctattgagatcaaaagacatgagttttttgaaggtgttaactgggcactaatcaggtcaataaagccaccttgggttcctaaagaagagactagtcacaagactaaaggtgataatcgcagcgttaattattatcttccaccaaggtttatgatgagtaggaaagaaagaaatgagccttaccatgtgtctaattattttgattatttttaa

SEQ ID NO: 89477 - protein, 676 aa, Arabidopsis thaliana
  peptide (1)..(676): Ceres Seq. ID no. 12719057
MSWTGGDWLCGACQHANFKKRESCQKCGYPKFGGVDVSTYLYNRTEVMAGDWYCGALNCGSHNYASRTSCYRCGMIKVEYTEQYYGAQMVAYGNDGAACPPGWKTGDWVCPRVGCGVHNYASRAECFKCKTTRDYGAWRLNGRERANEESLVLIIPFNKCFYFLTCMTLSYVDLKSIESLDSCKLTIFYKDNESDYESSTVGPDSSRRTSWLSSSFTASPSCSSISHLSNHGLNSYNQSKPHKANQVAWEAMARLRRCCGRAVGLEHFRLLKRLGSGDIGSVYLCQIRGSPETAFYAMKVVDKEAVAVKKKLGRAEMEKKILGMLDHPFCPTLYAAFEASHYSFLVMEYCPGGDLYAVRLRQPSKRFTISSTRFYAAETLVALEYLHMMGIVYRDLKPENVLIREDGHVMLSDFDLSFKCDVVPQFLSDNDRDRGHQEDDDDISIRRKCSTPSCTTTPLNPVISCFSPTSSRRRKKNVVTTTIHENAADISGGCPSIFAEPINARSKSFVGTHEYLAPEVISGQGHGSAVDWWTYGIFLYEMIFGRTPFKGDNNEKTLVNILKAPLTFPKVIVNSPKEYEDMVNAQDLIIKLLVKNPKKRLGSLKGSIEIKRHEFFEGVNWALIRSIKPPWVPKEETSHKTKGDNRSVNYYLPPRFMMSRKERNEPYHVSNYFDYF

SEQ ID NO: 89478 - protein, 629 aa, Arabidopsis thaliana
  peptide (1)..(629): Ceres Seq. ID no. 12719058
MAGDWYCGALNCGSHNYASRTSCYRCGMIKVEYTEQYYGAQMVAYGNDGAACPPGWKTGDWVCPRVGCGVHNYASRAECFKCKTTRDYGAWRLNGRERANEESLVLIIPFNKCFYFLTCMTLSYVDLKSIESLDSCKLTIFYKDNESDYESSTVGPDSSRRTSWLSSSFTASPSCSSISHLSNHGLNSYNQSKPHKANQVAWEAMARLRRCCGRAVGLEHFRLLKRLGSGDIGSVYLCQIRGSPETAFYAMKVVDKEAVAVKKKLGRAEMEKKILGMLDHPFCPTLYAAFEASHYSFLVMEYCPGGDLYAVRLRQPSKRFTISSTRFYAAETLVALEYLHMMGIVYRDLKPENVLIREDGHVMLSDFDLSFKCDVVPQFLSDNDRDRGHQEDDDDISIRRKCSTPSCTTTPLNPVISCFSPTSSRRRKKNVVTTTIHENAADISGGCPSIFAEPINARSKSFVGTHEYLAPEVISGQGHGSAVDWWTYGIFLYEMIFGRTPFKGDNNEKTLVNILKAPLTFPKVIVNSPKEYEDMVNAQDLIIKLLVKNPKKRLGSLKGSIEIKRHEFFEGVNWALIRSIKPPWVPKEETSHKTKGDNRSVNYYLPPRFMMSRKERNEPYHVSNYFDYF

SEQ ID NO: 89479 - protein, 602 aa, Arabidopsis thaliana
  peptide (1)..(602): Ceres Seq. ID no. 12719059
MIKVEYTEQYYGAQMVAYGNDGAACPPGWKTGDWVCPRVGCGVHNYASRAECFKCKTTRDYGAWRLNGRERANEESLVLIIPFNKCFYFLTCMTLSYVDLKSIESLDSCKLTIFYKDNESDYESSTVGPDSSRRTSWLSSSFTASPSCSSISHLSNHGLNSYNQSKPHKANQVAWEAMARLRRCCGRAVGLEHFRLLKRLGSGDIGSVYLCQIRGSPETAFYAMKVVDKEAVAVKKKLGRAEMEKKILGMLDHPFCPTLYAAFEASHYSFLVMEYCPGGDLYAVRLRQPSKRFTISSTRFYAAETLVALEYLHMMGIVYRDLKPENVLIREDGHVMLSDFDLSFKCDVVPQFLSDNDRDRGHQEDDDDISIRRKCSTPSCTTTPLNPVISCFSPTSSRRRKKNVVTTTIHENAADISGGCPSIFAEPINARSKSFVGTHEYLAPEVISGQGHGSAVDWWTYGIFLYEMIFGRTPFKGDNNEKTLVNILKAPLTFPKVIVNSPKEYEDMVNAQDLIIKLLVKNPKKRLGSLKGSIEIKRHEFFEGVNWALIRSIKPPWVPKEETSHKTKGDNRSVNYYLPPRFMMSRKERNEPYHVSNYFDYF

SEQ ID NO: 89480 - DNA, 1569 bp, Arabidopsis thaliana
  misc_feature (1)..(1569): Ceres Seq. ID no. 12719096
  misc_feature (1)..(1569): Ortholog of  Ceres SEQ ID NO 13599900 as cited in SEQ ID NO 531
  misc_feature (1)..(1569): Ortholog of  Ceres SEQ ID NO 13659971 as cited in SEQ ID NO 67565
  misc_feature (1)..(1569): Ortholog of  Ceres SEQ ID NO 13500385 as cited in SEQ ID NO 67583
atcaaatcctctaaagtttcgttctttgttctaagttttctgaaggagtgatatttgtttgtggtgtggttagagaaatgaatcggagacagcaagtgaaacgtagagtaggtaaatatgaagttggaagaacaattggagaaggaacgtttgctaaagttaagtttgctagaaactctgaaactggagaacctgttgctctcaagattcttgataaagagaaagttctcaagcataaaatggctgaacagattagaagagagatagctactatgaagttgataaaacatccaaatgttgttcaattatatgaggtgatggcaagtaagacgaaaatatttatcatcttggagtatgttacaggaggagaactctttgataagattgtaaatgatgggcggatgaaagaagatgaggcgcggagatatttccaacagcttatacatgctgtggactactgtcatagcagaggggtctaccatagagacctcaagcctgaaaatttactattggactcctatggaaacctcaagatctcagattttggattaagtgctttgtcccaacaagtcagggatgatggactcttgcatacatcgtgtggaacaccaaactacgttgctcctgaggttctcaatgatagaggctatgatggagcaacagctgacatgtggtcatgcggtgttgtactctatgtcctgcttgcaggttacttaccttttgatgattctaatctaatgaatctttataaaaaaatatcatctggtgaattcaactgtcctccgtggctctcactcggtgccatgaaactcatcactagaatcttagatccgaatccgatgactcgtgtaacaccgcaagaggttttcgaagatgaatggttcaagaaagattacaagccacctgttttcgaggagagggatgattcaaacatggacgatattgatgctgttttcaaggactctgaggaacatcttgttactgagaagagagaagaacagccagcggcgatcaatgccttcgagatcatttcaatgtcaaggggacttaacctagagaatctgtttgatccagaacaggaatttaagagggaaacaaggataacattgagaggaggcgcgaatgagatcatcgagaagatagaagaagctgcaaagcctctcggtttcgatgttcaaaagaagaactacaagtacattacttgaaatcagatgaggcttgagaatgtgaaggctggaagaaaggggaatctcaatgtagcgacagagatattccaagtagcgccaagtcttcatatggttcaagtatcgaagtcgaaaggagacactctcgaatttcacaagttctataagaagctctctaattctctggagcaagtagtctggacgaataacgaagttaagaaagaaacagcaaagtgatgtatgagagttttcttttgggacaattcttgctttctttgtgtataagagcttttttgctttaccggctactttgtgtggatgatgagaaagggagtgggattggttttgtgtaaaagaaaggtgtaaatatgaactgcattactcg

SEQ ID NO: 89481 - protein, 375 aa, Arabidopsis thaliana
  peptide (1)..(375): Ceres Seq. ID no. 12719097
MNRRQQVKRRVGKYEVGRTIGEGTFAKVKFARNSETGEPVALKILDKEKVLKHKMAEQIRREIATMKLIKHPNVVQLYEVMASKTKIFIILEYVTGGELFDKIVNDGRMKEDEARRYFQQLIHAVDYCHSRGVYHRDLKPENLLLDSYGNLKISDFGLSALSQQVRDDGLLHTSCGTPNYVAPEVLNDRGYDGATADMWSCGVVLYVLLAGYLPFDDSNLMNLYKKISSGEFNCPPWLSLGAMKLITRILDPNPMTRVTPQEVFEDEWFKKDYKPPVFEERDDSNMDDIDAVFKDSEEHLVTEKREEQPAAINAFEIISMSRGLNLENLFDPEQEFKRETRITLRGGANEIIEKIEEAAKPLGFDVQKKNYKYIT

SEQ ID NO: 89482 - protein, 321 aa, Arabidopsis thaliana
  peptide (1)..(321): Ceres Seq. ID no. 12719098
MAEQIRREIATMKLIKHPNVVQLYEVMASKTKIFIILEYVTGGELFDKIVNDGRMKEDEARRYFQQLIHAVDYCHSRGVYHRDLKPENLLLDSYGNLKISDFGLSALSQQVRDDGLLHTSCGTPNYVAPEVLNDRGYDGATADMWSCGVVLYVLLAGYLPFDDSNLMNLYKKISSGEFNCPPWLSLGAMKLITRILDPNPMTRVTPQEVFEDEWFKKDYKPPVFEERDDSNMDDIDAVFKDSEEHLVTEKREEQPAAINAFEIISMSRGLNLENLFDPEQEFKRETRITLRGGANEIIEKIEEAAKPLGFDVQKKNYKYIT

SEQ ID NO: 89483 - protein, 310 aa, Arabidopsis thaliana
  peptide (1)..(310): Ceres Seq. ID no. 12719099
MKLIKHPNVVQLYEVMASKTKIFIILEYVTGGELFDKIVNDGRMKEDEARRYFQQLIHAVDYCHSRGVYHRDLKPENLLLDSYGNLKISDFGLSALSQQVRDDGLLHTSCGTPNYVAPEVLNDRGYDGATADMWSCGVVLYVLLAGYLPFDDSNLMNLYKKISSGEFNCPPWLSLGAMKLITRILDPNPMTRVTPQEVFEDEWFKKDYKPPVFEERDDSNMDDIDAVFKDSEEHLVTEKREEQPAAINAFEIISMSRGLNLENLFDPEQEFKRETRITLRGGANEIIEKIEEAAKPLGFDVQKKNYKYIT

SEQ ID NO: 89484 - DNA, 1724 bp, Arabidopsis thaliana
  misc_feature (1)..(1724): Ceres Seq. ID no. 12719100
  misc_feature (1)..(1724): Ortholog of  Ceres SEQ ID NO 13599900 as cited in SEQ ID NO 531
  misc_feature (1)..(1724): Ortholog of  Ceres SEQ ID NO 13659971 as cited in SEQ ID NO 67565
  misc_feature (1)..(1724): Ortholog of  Ceres SEQ ID NO 13500385 as cited in SEQ ID NO 67583
attctctgtcttgcttcttctttacccttttcttgtttccaatcaaatcctctaaagtttcgttctttgttctaagttttctgaaggagtgatatttgtttgtggtgtggttagagaaatgaatcggagacagcaagtgaaacgtagagtaggtaaatatgaagttggaagaacaattggagaaggaacgtttgctaaagttaagtttgctagaaactctgaaactggagaacctgttgctctcaagattcttgataaagagaaagttctcaagcataaaatggctgaacagattagaagagagatagctactatgaagttgataaaacatccaaatgttgttcaattatatgaggtgatggcaagtaagacgaaaatatttatcatcttggagtatgttacaggaggagaactctttgataagattgtaaatgatgggcggatgaaagaagatgaggcgcggagatatttccaacagcttatacatgctgtggactactgtcatagcagaggggtctaccatagagacctcaagcctgaaaatttactattggactcctatggaaacctcaagatctcagattttggattaagtgctttgtcccaacaagtcagggatgatggactcttgcatacatcgtgtggaacaccaaactacgttgctcctgaggttctcaatgatagaggctatgatggagcaacagctgacatgtggtcatgcggtgttgtactctatgtcctgcttgcaggttacttaccttttgatgattctaatctaatgaatctttataaaaaaatatcatctggtgaattcaactgtcctccgtggctctcactcggtgccatgaaactcatcactagaatcttagatccgaatccgatgactcgtgtaacaccgcaagaggttttcgaagatgaatggttcaagaaagattacaagccacctgttttcgaggagagggatgattcaaacatggacgatattgatgctgttttcaaggactctgaggaacatcttgttactgagaagagagaagaacagccagcggcgatcaatgccttcgagatcatttcaatgtcaaggggacttaacctagagaatctgtttgatccagaacaggaatttaagagggaaacaaggataacattgagaggaggcgcgaatgagatcatcgagaagatagaagaagctgcaaagcctctcggtttcgatgttcaaaagaagaactacaaggttagtgaaaactctgtaacggaaatgaaatgaaatgaaaagaatcaataactaaagacgtcgtagtacattacttgaaatcagatgaggcttgagaatgtgaaggctggaagaaaggggaatctcaatgtagcgacagagatattccaagtagcgccaagtcttcatatggttcaagtatcgaagtcgaaaggagacactctcgaatttcacaagttctataagaagctctctaattctctggagcaagtagtctggacgaataacgaagttaagaaagaaacagcaaagtgatgtatgagagttttcttttgggacaattcttgctttctttgtgtataagagcttttttgctttaccggctactttgtgtggatgatgagaaagggagtgggattggttttgtgtaaaagaaaggtgtaaatatgaactgcattactcgataaggtgctgcgatgccagttataaagtcatatcaaagcttgttggc

SEQ ID NO: 89485 - protein, 382 aa, Arabidopsis thaliana
  peptide (1)..(382): Ceres Seq. ID no. 12719101
MNRRQQVKRRVGKYEVGRTIGEGTFAKVKFARNSETGEPVALKILDKEKVLKHKMAEQIRREIATMKLIKHPNVVQLYEVMASKTKIFIILEYVTGGELFDKIVNDGRMKEDEARRYFQQLIHAVDYCHSRGVYHRDLKPENLLLDSYGNLKISDFGLSALSQQVRDDGLLHTSCGTPNYVAPEVLNDRGYDGATADMWSCGVVLYVLLAGYLPFDDSNLMNLYKKISSGEFNCPPWLSLGAMKLITRILDPNPMTRVTPQEVFEDEWFKKDYKPPVFEERDDSNMDDIDAVFKDSEEHLVTEKREEQPAAINAFEIISMSRGLNLENLFDPEQEFKRETRITLRGGANEIIEKIEEAAKPLGFDVQKKNYKVSENSVTEMK

SEQ ID NO: 89486 - protein, 328 aa, Arabidopsis thaliana
  peptide (1)..(328): Ceres Seq. ID no. 12719102
MAEQIRREIATMKLIKHPNVVQLYEVMASKTKIFIILEYVTGGELFDKIVNDGRMKEDEARRYFQQLIHAVDYCHSRGVYHRDLKPENLLLDSYGNLKISDFGLSALSQQVRDDGLLHTSCGTPNYVAPEVLNDRGYDGATADMWSCGVVLYVLLAGYLPFDDSNLMNLYKKISSGEFNCPPWLSLGAMKLITRILDPNPMTRVTPQEVFEDEWFKKDYKPPVFEERDDSNMDDIDAVFKDSEEHLVTEKREEQPAAINAFEIISMSRGLNLENLFDPEQEFKRETRITLRGGANEIIEKIEEAAKPLGFDVQKKNYKVSENSVTEMK

SEQ ID NO: 89487 - protein, 317 aa, Arabidopsis thaliana
  peptide (1)..(317): Ceres Seq. ID no. 12719103
MKLIKHPNVVQLYEVMASKTKIFIILEYVTGGELFDKIVNDGRMKEDEARRYFQQLIHAVDYCHSRGVYHRDLKPENLLLDSYGNLKISDFGLSALSQQVRDDGLLHTSCGTPNYVAPEVLNDRGYDGATADMWSCGVVLYVLLAGYLPFDDSNLMNLYKKISSGEFNCPPWLSLGAMKLITRILDPNPMTRVTPQEVFEDEWFKKDYKPPVFEERDDSNMDDIDAVFKDSEEHLVTEKREEQPAAINAFEIISMSRGLNLENLFDPEQEFKRETRITLRGGANEIIEKIEEAAKPLGFDVQKKNYKVSENSVTEMK

SEQ ID NO: 89488 - DNA, 1545 bp, Arabidopsis thaliana
  misc_feature (1)..(1545): Ceres Seq. ID no. 12719104
  misc_feature (1)..(1545): Ortholog of  Ceres SEQ ID NO 13502874 as cited in SEQ ID NO 66298
  misc_feature (1)..(1545): Ortholog of  Ceres SEQ ID NO 12614124 as cited in SEQ ID NO 68392
atgggagagataatgaacgttgactttgtaaactgtttgatcttaatcctcctctgcctcctttcaatcctctgttactctttcttcttcaagaaaccaaaggatggtttcaatttgccaccgagccctccctctctaccgatcattggccatcttcatcatctcctctctctttttatgcacagatctttgcaaaaactctcctccaagtatggacctctcctctatcttcacgtcttcaatgttcccatactccttgtctcctctccctcaatagcctatgagatctttagggcacaagacgtaaacgtttccactcgcgacttccctacgaatgaggggtctctcttcctcggatcatttagcttcattaccgcaccttacggagaatactggaagttcatgaagaagctcatcgtcacaaagctcctcgggcctcaagcactcgagaggtcacaacgcatccgtgcaaatgaagtagagaggttttactcaaacctattagataaggcgatgaagaaagaaagtgttgagattgctgatgaagctatgaagctagtcaacaacataatctgcaagatgattatggggaggacctgttcagaagaaaatggtgaagcagagagaattagaggcttggtgaccaagtcagatgccttgttgaagaagtttttgctggcggccatcttgcggaaaccacttaagaagattgggatcacactgtttaaaaaggtgttcatggatatttctctcaagtttgacgaggtgttagagaagattcttgtggaaaacgaagagagacttgaggagaatcaacaaggtactgacataatggataagctcttagaagtttatggagacaaaacttccgagtataagatcactagagaccatatcaagtccttgtttgtggatcttttctttgcaggtactgacaccgcaacacacactatagagtggaccatggccgagatcatgaacaactctttgattcttgagagattgagagaagaaattgattctgttgtagggaaaacaaggttgattcaagaaactgatctaccgaatctcctttacttgcaagcaactgtcaaagaagggctaagattgcaccctacgatccctcttgtgttgaggacgtttcaagacgggtgtacgatcggaggcttttctatacctaagaagacaaaacttgttgttaatggttatgctataatgagagatcctgataactgggaagatccactggagtttaaaccagagaggtttctagcttcttcaagatcaagccaaaaagacgcaataaaagaagaagttctaaaatatctttcattcggaagcggaaggagaggatgtcctggagtgaatctagcttatgtgtctgtagaaaccgctattggagtgatggtgcaatgctttgattggaagatcgacggacataagatcaacatgaatgaggttgctggtaaaggaacgttgagcatggctcatcctcttaagtgcactcttgttcctcgaagtgtaaccccattaacttcaaagtag

SEQ ID NO: 89489 - protein, 514 aa, Arabidopsis thaliana
  peptide (1)..(514): Ceres Seq. ID no. 12719105
MGEIMNVDFVNCLILILLCLLSILCYSFFFKKPKDGFNLPPSPPSLPIIGHLHHLLSLFMHRSLQKLSSKYGPLLYLHVFNVPILLVSSPSIAYEIFRAQDVNVSTRDFPTNEGSLFLGSFSFITAPYGEYWKFMKKLIVTKLLGPQALERSQRIRANEVERFYSNLLDKAMKKESVEIADEAMKLVNNIICKMIMGRTCSEENGEAERIRGLVTKSDALLKKFLLAAILRKPLKKIGITLFKKVFMDISLKFDEVLEKILVENEERLEENQQGTDIMDKLLEVYGDKTSEYKITRDHIKSLFVDLFFAGTDTATHTIEWTMAEIMNNSLILERLREEIDSVVGKTRLIQETDLPNLLYLQATVKEGLRLHPTIPLVLRTFQDGCTIGGFSIPKKTKLVVNGYAIMRDPDNWEDPLEFKPERFLASSRSSQKDAIKEEVLKYLSFGSGRRGCPGVNLAYVSVETAIGVMVQCFDWKIDGHKINMNEVAGKGTLSMAHPLKCTLVPRSVTPLTSK

SEQ ID NO: 89490 - protein, 510 aa, Arabidopsis thaliana
  peptide (1)..(510): Ceres Seq. ID no. 12719106
MNVDFVNCLILILLCLLSILCYSFFFKKPKDGFNLPPSPPSLPIIGHLHHLLSLFMHRSLQKLSSKYGPLLYLHVFNVPILLVSSPSIAYEIFRAQDVNVSTRDFPTNEGSLFLGSFSFITAPYGEYWKFMKKLIVTKLLGPQALERSQRIRANEVERFYSNLLDKAMKKESVEIADEAMKLVNNIICKMIMGRTCSEENGEAERIRGLVTKSDALLKKFLLAAILRKPLKKIGITLFKKVFMDISLKFDEVLEKILVENEERLEENQQGTDIMDKLLEVYGDKTSEYKITRDHIKSLFVDLFFAGTDTATHTIEWTMAEIMNNSLILERLREEIDSVVGKTRLIQETDLPNLLYLQATVKEGLRLHPTIPLVLRTFQDGCTIGGFSIPKKTKLVVNGYAIMRDPDNWEDPLEFKPERFLASSRSSQKDAIKEEVLKYLSFGSGRRGCPGVNLAYVSVETAIGVMVQCFDWKIDGHKINMNEVAGKGTLSMAHPLKCTLVPRSVTPLTSK

SEQ ID NO: 89491 - protein, 455 aa, Arabidopsis thaliana
  peptide (1)..(455): Ceres Seq. ID no. 12719107
MHRSLQKLSSKYGPLLYLHVFNVPILLVSSPSIAYEIFRAQDVNVSTRDFPTNEGSLFLGSFSFITAPYGEYWKFMKKLIVTKLLGPQALERSQRIRANEVERFYSNLLDKAMKKESVEIADEAMKLVNNIICKMIMGRTCSEENGEAERIRGLVTKSDALLKKFLLAAILRKPLKKIGITLFKKVFMDISLKFDEVLEKILVENEERLEENQQGTDIMDKLLEVYGDKTSEYKITRDHIKSLFVDLFFAGTDTATHTIEWTMAEIMNNSLILERLREEIDSVVGKTRLIQETDLPNLLYLQATVKEGLRLHPTIPLVLRTFQDGCTIGGFSIPKKTKLVVNGYAIMRDPDNWEDPLEFKPERFLASSRSSQKDAIKEEVLKYLSFGSGRRGCPGVNLAYVSVETAIGVMVQCFDWKIDGHKINMNEVAGKGTLSMAHPLKCTLVPRSVTPLTSK

SEQ ID NO: 89492 - DNA, 1118 bp, Arabidopsis thaliana
  misc_feature (1)..(1118): Ceres Seq. ID no. 12719112
  misc_feature (1)..(1118): Ortholog of  Ceres SEQ ID NO 13655934 as cited in SEQ ID NO 65278
gtttctcatttctcaactctcaaactcaaatcacttcctttgtctcagtgactctagtctatctccaatggctgaacgagtctatcccgccgattcaccaccacaaagcggacaattctccggcaacttcagctccggcgaattccccaaaaaaccagcaccaccaccatcaacatacgtaatccaagtcccaaaagatcaaatctaccgtataccaccgccggaaaacgcacaccgctttgaacaactctctcgtaaaaaaaccaaccgcagtaactgtagatgctgcttctgctcattcctcgccgcggttttcatcttaatcgtcctcgccggaatatccttcgcggttctctacctaatctaccgtcccgaagctcctaaatactccatcgaaggattctctgtttccggtatcaatctgaattcaacatctccgatttcgccgagttttaacgttaccgttagatcacgtaacggtaacggtaaaatcggggtttactacgagaaagaaagctctgttgatgtgtattacaacgacgttgatataagtaacggtgttatgccggtgttttatcagccggcgaagaatgtaacggtcgttaagttggttttaagtggttctaaaatacagttgactagtggtatgaggaaggagatgcgtaatgaggtgagtaagaaaacggtgccgtttaagttgaagattaaagctccggtgaagattaagtttggttctgttaagacgtggactatgattgttaatgttgactgtgatgtaacggtggataaattgacggcgccgtcgaggattgtgtcgagaaaatgcagtcatgacgtggatctttggtgatgaatttgctctttgttttttttttttaaagaagaaaataagaaaagaaatgagtacagaggatgtttttggatttgtaggattttttttttataaattataatgttgactttgcattttttattttgggatgttttttttgatgagaacatataatgttgtgaatttgtgattggccggaacatttccaatttgaaccttattttatgtaagttgaaaacttcttttttgtacagttcacattttgaaggagtagtttgctgttgag

SEQ ID NO: 89493 - protein, 282 aa, Arabidopsis thaliana
  peptide (1)..(282): Ceres Seq. ID no. 12719113
FLISQLSNSNHFLCLSDSSLSPMAERVYPADSPPQSGQFSGNFSSGEFPKKPAPPPSTYVIQVPKDQIYRIPPPENAHRFEQLSRKKTNRSNCRCCFCSFLAAVFILIVLAGISFAVLYLIYRPEAPKYSIEGFSVSGINLNSTSPISPSFNVTVRSRNGNGKIGVYYEKESSVDVYYNDVDISNGVMPVFYQPAKNVTVVKLVLSGSKIQLTSGMRKEMRNEVSKKTVPFKLKIKAPVKIKFGSVKTWTMIVNVDCDVTVDKLTAPSRIVSRKCSHDVDLW

SEQ ID NO: 89494 - protein, 260 aa, Arabidopsis thaliana
  peptide (1)..(260): Ceres Seq. ID no. 12719114
MAERVYPADSPPQSGQFSGNFSSGEFPKKPAPPPSTYVIQVPKDQIYRIPPPENAHRFEQLSRKKTNRSNCRCCFCSFLAAVFILIVLAGISFAVLYLIYRPEAPKYSIEGFSVSGINLNSTSPISPSFNVTVRSRNGNGKIGVYYEKESSVDVYYNDVDISNGVMPVFYQPAKNVTVVKLVLSGSKIQLTSGMRKEMRNEVSKKTVPFKLKIKAPVKIKFGSVKTWTMIVNVDCDVTVDKLTAPSRIVSRKCSHDVDLW

SEQ ID NO: 89495 - DNA, 2232 bp, Arabidopsis thaliana
  misc_feature (1)..(2232): Ceres Seq. ID no. 12719115
  misc_feature (1)..(2232): Ortholog of  Ceres SEQ ID NO 13600301 as cited in SEQ ID NO 1010
atgggtgcatcaacatccagaatagatgaagataaagccttacagttatgtcgagaaagaaaaaaattcgtccaacaagcactcgatggaagatgtttgttagctgctgctcacgtttcatacgttcagtctcttaagagtaccggaactgccctcaggaaattttctgagactgaagttccagttgaatcttccttgtacacgtccactagtgcaacaccagaacaacctcttgctttaatcgagaaatctgtttctcatttgtcatactctcctccacctgcttcacattcccaccatgacacgtattctcctcctccgtcgcctcctagtaccagtccgttccaggtcaatcatatgaaattcaaagggttttcttcaaaaaaagtggaagagaaaccaccagtatctattattgccactgttacctcatccagtatcccaccaagcaggtctatagaaaagatggaatcaaccccatttgaggaatcttcttccatgccacctgaagcaccttgggattattttggtctttctcatccaattgacaaccagttttcttcttctcatgttgggaatggtcatgtgtcgagatctgttaaggaggaagatggaactccagaggaggaagatgatggtgaggacttttcttttcaagaaagggaagagtccagagattcggatgatgatgagtttgatgaacccacaagtgatactcttgttagaagctttgaaaacttcaatagagtgcgccgtgatcacagtactttgcctcaaagagagggagtggaaagcgactcctcagacgctgagaaaagtaaaactcctgagttatcaccaccagtgacgcctttagtagctactccagtgaacaaaacaccaaacaagggagatcacaccgagaacaagcttcctcccagggacttcttgtcaagtatgaaagagatagagttgctctttgttaaagcttcagagactggaaaagaggttcctaggatgcttgaagccaataaactacatttccgtccaatagttccatcaaaagaaagtggctccggtgcatcatcactgttcaaaacctgtctctcttgtggggaagatccaaaagatgtaccggaagagcctgctcagaactctgtgaaatacttgacctggcataggactgaatcttcacgatcctcatcttctcggaatcctctcggaggaatgaattctgatgatgtggaagagctcaatagtaatctctttgaaaacatttgcatgattgctggaagccatgcctcaacgctagacagattgtatgcatgggagcggaagctctatgatgaagttaaggggagtcagactgtgcggagagagtatgacgaaaagtgcagaattttgagagaacttgaatcagaaggtaaaggttcacaaagaatagacaagacacgtgcagttgtgaaagaccttcactccagaatcagagtggcgattcataggatcgactcaatatcaagacggattgaagaactccgtgacaatgagctccagcctcaacttgaagaactcattgaagggttgagtcgtatgtgggaagtaatgttggaatgccacaaggttcagtttcagttaatcaaagcgtgttacagaggcggaaacattaaactcaacatgcaatcagagttgcacagacaagtaacatctcaccttgaagatgagctctgcgcattggcctcaagctttacaaaatggatcacaggccagaaatcgtatattcaagcgataaacgagtggctggtgaaatgtgtcgccttaccacaacgatccaaacgaaaaaggcgtgcaccacaaccgtctttgagaaactatgggccccccatttatgcaacctgtggaatctggctagaaaagctcgaagtcttacctaccaaagaggtttcaggctccattaaagcacttgcttctgatgttgccaggttcttgccacgtcaggagaagaatcgcaccaagaaacatcgatctggtgagaacaaaaacgatttgacagctcacatgttgcaagatgagacattggaggattgtggtccgggatttgatcggtttaggacaagcttggaaggatttgttggacaactcaaccagtttgcagaatcatcagtgaaaatgtatgaggaacttaaagaaggaatccacggagctaaaaacaactacgagcagttgaagaaggcgtactcttcacaaggaaaatga

SEQ ID NO: 89496 - protein, 743 aa, Arabidopsis thaliana
  peptide (1)..(743): Ceres Seq. ID no. 12719116
MGASTSRIDEDKALQLCRERKKFVQQALDGRCLLAAAHVSYVQSLKSTGTALRKFSETEVPVESSLYTSTSATPEQPLALIEKSVSHLSYSPPPASHSHHDTYSPPPSPPSTSPFQVNHMKFKGFSSKKVEEKPPVSIIATVTSSSIPPSRSIEKMESTPFEESSSMPPEAPWDYFGLSHPIDNQFSSSHVGNGHVSRSVKEEDGTPEEEDDGEDFSFQEREESRDSDDDEFDEPTSDTLVRSFENFNRVRRDHSTLPQREGVESDSSDAEKSKTPELSPPVTPLVATPVNKTPNKGDHTENKLPPRDFLSSMKEIELLFVKASETGKEVPRMLEANKLHFRPIVPSKESGSGASSLFKTCLSCGEDPKDVPEEPAQNSVKYLTWHRTESSRSSSSRNPLGGMNSDDVEELNSNLFENICMIAGSHASTLDRLYAWERKLYDEVKGSQTVRREYDEKCRILRELESEGKGSQRIDKTRAVVKDLHSRIRVAIHRIDSISRRIEELRDNELQPQLEELIEGLSRMWEVMLECHKVQFQLIKACYRGGNIKLNMQSELHRQVTSHLEDELCALASSFTKWITGQKSYIQAINEWLVKCVALPQRSKRKRRAPQPSLRNYGPPIYATCGIWLEKLEVLPTKEVSGSIKALASDVARFLPRQEKNRTKKHRSGENKNDLTAHMLQDETLEDCGPGFDRFRTSLEGFVGQLNQFAESSVKMYEELKEGIHGAKNNYEQLKKAYSSQGK

SEQ ID NO: 89497 - protein, 624 aa, Arabidopsis thaliana
  peptide (1)..(624): Ceres Seq. ID no. 12719117
MKFKGFSSKKVEEKPPVSIIATVTSSSIPPSRSIEKMESTPFEESSSMPPEAPWDYFGLSHPIDNQFSSSHVGNGHVSRSVKEEDGTPEEEDDGEDFSFQEREESRDSDDDEFDEPTSDTLVRSFENFNRVRRDHSTLPQREGVESDSSDAEKSKTPELSPPVTPLVATPVNKTPNKGDHTENKLPPRDFLSSMKEIELLFVKASETGKEVPRMLEANKLHFRPIVPSKESGSGASSLFKTCLSCGEDPKDVPEEPAQNSVKYLTWHRTESSRSSSSRNPLGGMNSDDVEELNSNLFENICMIAGSHASTLDRLYAWERKLYDEVKGSQTVRREYDEKCRILRELESEGKGSQRIDKTRAVVKDLHSRIRVAIHRIDSISRRIEELRDNELQPQLEELIEGLSRMWEVMLECHKVQFQLIKACYRGGNIKLNMQSELHRQVTSHLEDELCALASSFTKWITGQKSYIQAINEWLVKCVALPQRSKRKRRAPQPSLRNYGPPIYATCGIWLEKLEVLPTKEVSGSIKALASDVARFLPRQEKNRTKKHRSGENKNDLTAHMLQDETLEDCGPGFDRFRTSLEGFVGQLNQFAESSVKMYEELKEGIHGAKNNYEQLKKAYSSQGK

SEQ ID NO: 89498 - protein, 588 aa, Arabidopsis thaliana
  peptide (1)..(588): Ceres Seq. ID no. 12719118
MESTPFEESSSMPPEAPWDYFGLSHPIDNQFSSSHVGNGHVSRSVKEEDGTPEEEDDGEDFSFQEREESRDSDDDEFDEPTSDTLVRSFENFNRVRRDHSTLPQREGVESDSSDAEKSKTPELSPPVTPLVATPVNKTPNKGDHTENKLPPRDFLSSMKEIELLFVKASETGKEVPRMLEANKLHFRPIVPSKESGSGASSLFKTCLSCGEDPKDVPEEPAQNSVKYLTWHRTESSRSSSSRNPLGGMNSDDVEELNSNLFENICMIAGSHASTLDRLYAWERKLYDEVKGSQTVRREYDEKCRILRELESEGKGSQRIDKTRAVVKDLHSRIRVAIHRIDSISRRIEELRDNELQPQLEELIEGLSRMWEVMLECHKVQFQLIKACYRGGNIKLNMQSELHRQVTSHLEDELCALASSFTKWITGQKSYIQAINEWLVKCVALPQRSKRKRRAPQPSLRNYGPPIYATCGIWLEKLEVLPTKEVSGSIKALASDVARFLPRQEKNRTKKHRSGENKNDLTAHMLQDETLEDCGPGFDRFRTSLEGFVGQLNQFAESSVKMYEELKEGIHGAKNNYEQLKKAYSSQGK

SEQ ID NO: 89499 - DNA, 2286 bp, Arabidopsis thaliana
  misc_feature (1)..(2286): Ceres Seq. ID no. 12719134
  misc_feature (1)..(2286): Ortholog of  Ceres SEQ ID NO 12618407 as cited in SEQ ID NO 64994
atgagagtcccactaatagatttcttgagattcttagtactcattctttctcttagtggtgcttcagttgctgcagatgcaacggtgaagcaaaactttaataagtatgagactgatagtggtcacgcacatccgccaccaatttatggtgccccacccagctacacaacaccaccaccaccaatttacagtcctcccatatatccaccaccaatacaaaagcctccgacttatagtcctcccatatatccaccaccaatacaaaaacctcccaccccaacttatagtcctcccatatatccaccaccaatacaaaagcccccgacaccaacttacagtcctcccatttatccaccaccaatacaaaagcctccgaccccaacttatagtcctcccatatatccaccaccaatacaaaagcctccgacaccaagttatagtcctcctgttaaaccacctccggtacaaatgcctcctacaccaacttatagtccccctataaaaccaccaccagtacataagcctccgacaccaacttacagcccccctataaaaccaccagtgcataagcctccgacaccaatttacagtcctccaatcaagccaccaccagtgcacaagcctccgacaccaatttatagtcctccgatcaaaccaccaccagtgcacaagcctccaacaccaacttatagtcccccggtcaagccaccgccagtgcataaacctccaacaccaatatatagtcctccaatcaagccaccaccagtgcacaagcctccaacaccaatttacagtccccctgttaaaccaccacctgtgcaaacgcctccaacaccaatatacagtcctcctgtaaagccaccaccagtgcataagcctccaacaccgacttacagccctccagtaaaatcacctcccgttcagaagcctcctacccctacttatagtcctccgattaagccaccaccagtgcaaaagcctccaacaccaacttatagtccaccaattaaaccgccaccagtgaagcctccaactccaatatacagtccacctgtgaagccaccaccagtacataagcctcctacaccaatttatagcccacctgtcaagccaccaccagtgcataagcctccaacaccaatttacagccctccagtaaaaccacctcccattcagaagcctcctacccctacttatagtcctccgattaagccaccaccacttcaaaagcctccaacaccaacttatagtccaccaattaaactgccaccagtgaagcctccaactccaatatacagtccacctgtgaagccaccaccagtacataagcctcctacaccaatttatagtccacctgtcaagccaccaccagtgcataagcctccaacaccaacttatagtccaccaattaaacccccaccagtgaagcccccaacacccacatacagtccacctgttcagccaccaccagtgcaaaaaccgccaacaccgacttatagtccacctgtcaagccaccgccaatacaaaaaccaccgacgccgacttacagtccacctattaaaccaccaccagtgaagcctccgacaccaacatatagtcctccaatcaagccaccaccagttcataagcctccgacaccaacttacagtccacctatcaagccacctccaattcataaacctccgacaccaacttacagtccacctatcaagccaccaccagtgcataagcctccgacaccaacttacagtccacctatcaagccaccaccagtgcataagcctccgacaccaacttacagtccacctatcaagccaccaccagtgcataagcctccgacaccaacttacagtccacctatcaagccaccaccagtgcataagcctccgacaccaacatacagtcctcctatcaagccaccaccagttcataagcctccgacaccaacatacagtccacctatcaagccaccaccagtgcaaaagcctcctaccccaacttatagccctccagtaaagccaccaccagtacaattgcctccaaccccaacttatagccctcccgtaaaaccaccaccagtacaagtgcctccaaccccaacttatagccctcccgtaaaaccaccaccagtacaagtacctccaacaccaacttatagccctcccataaaaccaccaccggtacaagtgcctccaacaccaactactccatcacctccccaaggtggatacggtactcctcctccatatgcatatctatcgcatcctatagacataaggaactag

SEQ ID NO: 89500 - protein, 761 aa, Arabidopsis thaliana
  peptide (1)..(761): Ceres Seq. ID no. 12719135
MRVPLIDFLRFLVLILSLSGASVAADATVKQNFNKYETDSGHAHPPPIYGAPPSYTTPPPPIYSPPIYPPPIQKPPTYSPPIYPPPIQKPPTPTYSPPIYPPPIQKPPTPTYSPPIYPPPIQKPPTPTYSPPIYPPPIQKPPTPSYSPPVKPPPVQMPPTPTYSPPIKPPPVHKPPTPTYSPPIKPPVHKPPTPIYSPPIKPPPVHKPPTPIYSPPIKPPPVHKPPTPTYSPPVKPPPVHKPPTPIYSPPIKPPPVHKPPTPIYSPPVKPPPVQTPPTPIYSPPVKPPPVHKPPTPTYSPPVKSPPVQKPPTPTYSPPIKPPPVQKPPTPTYSPPIKPPPVKPPTPIYSPPVKPPPVHKPPTPIYSPPVKPPPVHKPPTPIYSPPVKPPPIQKPPTPTYSPPIKPPPLQKPPTPTYSPPIKLPPVKPPTPIYSPPVKPPPVHKPPTPIYSPPVKPPPVHKPPTPTYSPPIKPPPVKPPTPTYSPPVQPPPVQKPPTPTYSPPVKPPPIQKPPTPTYSPPIKPPPVKPPTPTYSPPIKPPPVHKPPTPTYSPPIKPPPIHKPPTPTYSPPIKPPPVHKPPTPTYSPPIKPPPVHKPPTPTYSPPIKPPPVHKPPTPTYSPPIKPPPVHKPPTPTYSPPIKPPPVHKPPTPTYSPPIKPPPVQKPPTPTYSPPVKPPPVQLPPTPTYSPPVKPPPVQVPPTPTYSPPVKPPPVQVPPTPTYSPPIKPPPVQVPPTPTTPSPPQGGYGTPPPYAYLSHPIDIRN

SEQ ID NO: 89501 - protein, 605 aa, Arabidopsis thaliana
  peptide (1)..(605): Ceres Seq. ID no. 12719136
MPPTPTYSPPIKPPPVHKPPTPTYSPPIKPPVHKPPTPIYSPPIKPPPVHKPPTPIYSPPIKPPPVHKPPTPTYSPPVKPPPVHKPPTPIYSPPIKPPPVHKPPTPIYSPPVKPPPVQTPPTPIYSPPVKPPPVHKPPTPTYSPPVKSPPVQKPPTPTYSPPIKPPPVQKPPTPTYSPPIKPPPVKPPTPIYSPPVKPPPVHKPPTPIYSPPVKPPPVHKPPTPIYSPPVKPPPIQKPPTPTYSPPIKPPPLQKPPTPTYSPPIKLPPVKPPTPIYSPPVKPPPVHKPPTPIYSPPVKPPPVHKPPTPTYSPPIKPPPVKPPTPTYSPPVQPPPVQKPPTPTYSPPVKPPPIQKPPTPTYSPPIKPPPVKPPTPTYSPPIKPPPVHKPPTPTYSPPIKPPPIHKPPTPTYSPPIKPPPVHKPPTPTYSPPIKPPPVHKPPTPTYSPPIKPPPVHKPPTPTYSPPIKPPPVHKPPTPTYSPPIKPPPVHKPPTPTYSPPIKPPPVQKPPTPTYSPPVKPPPVQLPPTPTYSPPVKPPPVQVPPTPTYSPPVKPPPVQVPPTPTYSPPIKPPPVQVPPTPTTPSPPQGGYGTPPPYAYLSHPIDIRN

SEQ ID NO: 89502 - DNA, 1307 bp, Arabidopsis thaliana
  misc_feature (1)..(1307): Ceres Seq. ID no. 12719142
  misc_feature (1)..(1307): Ortholog of  Ceres SEQ ID NO 13502952 as cited in SEQ ID NO 62271
  misc_feature (1)..(1307): Ortholog of  Ceres SEQ ID NO 13502973 as cited in SEQ ID NO 68052
  misc_feature (1)..(1307): Ortholog of  Ceres SEQ ID NO 13596000 as cited in SEQ ID NO 68188
  misc_feature (1)..(1307): Ortholog of  Ceres SEQ ID NO 15179420 as cited in SEQ ID NO 0
aaaccaagtaacaaaaaccaaaacatttgtattataagagtatttttattgatactatttttaaattgtgcccatacatattacctatagggaatggcgtcaactatcatcttcattctaactatttttttaagttacagaacttcgctagctacatctcgtggtagcctttttgaagcttctgccattgagaaacatgagcaatggatggctcgattcaatcgcgtttactctgacgaaaccgagaaaagaaatcggtttaatatcttcaagaagaatttggagttcgtccagaacttcaacatgaataataaaatcacgtacaaggttgatatcaacgagttctctgatcttacggacgaagaatttcgggcgacacacactggactagttgtgcccgaggctataaccagaatttcaactctgtcttcgggcaaaaacacggtgccgtttagatatggtaatgttagtgataatggcgagagcatggattggagacaagagggggctgttacacccgttaagtatcaaggccgatgtggaggatgctgggcgttttccgcggtggcggcagtggaaggcattacaaagattactaaaggcgagcttgtatcgctatcggagcaacaactcttagactgcgacagagactacaatcaaggatgtcgtggagggataatgtcgaaagctttcgagtacataatcaaaaaccaaggcatcactactgaggataactatccataccaagaatcacaacaaacttgtagttcatcaactaccctatcatcgtcttttcgtgcagccacaatcagcggatatgagaccgttccaatgaataatgaggaagcgttgctacaagcagtgtctcaacagcctgtttctgtggggatagaagggacaggggccgcgtttaggcactactcgggaggggtattcaacggagaatgtgggacggatttgcatcatgcggttacaattgttggttatggaatgagtgaagaagggactaagtattgggtggtgaagaattcttggggggaaacttggggagaaaatggttacatgaggatcaagagagacgtggatgcaccccaaggaatgtgtggtttggccattcttgctttctatccacttgcttgaatacatgaagattgattgggtgggcttgaagtagttgaaagtattctgatcaaaatgttattttgagaaacattatggtccccatgttttcgtgcaaatggattgatatatatttttaatctgatgtgggtagaagaataaaagcaccaagtaaaagtttaaattgc

SEQ ID NO: 89503 - protein, 348 aa, Arabidopsis thaliana
  peptide (1)..(348): Ceres Seq. ID no. 12719143
MASTIIFILTIFLSYRTSLATSRGSLFEASAIEKHEQWMARFNRVYSDETEKRNRFNIFKKNLEFVQNFNMNNKITYKVDINEFSDLTDEEFRATHTGLVVPEAITRISTLSSGKNTVPFRYGNVSDNGESMDWRQEGAVTPVKYQGRCGGCWAFSAVAAVEGITKITKGELVSLSEQQLLDCDRDYNQGCRGGIMSKAFEYIIKNQGITTEDNYPYQESQQTCSSSTTLSSSFRAATISGYETVPMNNEEALLQAVSQQPVSVGIEGTGAAFRHYSGGVFNGECGTDLHHAVTIVGYGMSEEGTKYWVVKNSWGETWGENGYMRIKRDVDAPQGMCGLAILAFYPLA

SEQ ID NO: 89504 - protein, 310 aa, Arabidopsis thaliana
  peptide (1)..(310): Ceres Seq. ID no. 12719144
MARFNRVYSDETEKRNRFNIFKKNLEFVQNFNMNNKITYKVDINEFSDLTDEEFRATHTGLVVPEAITRISTLSSGKNTVPFRYGNVSDNGESMDWRQEGAVTPVKYQGRCGGCWAFSAVAAVEGITKITKGELVSLSEQQLLDCDRDYNQGCRGGIMSKAFEYIIKNQGITTEDNYPYQESQQTCSSSTTLSSSFRAATISGYETVPMNNEEALLQAVSQQPVSVGIEGTGAAFRHYSGGVFNGECGTDLHHAVTIVGYGMSEEGTKYWVVKNSWGETWGENGYMRIKRDVDAPQGMCGLAILAFYPLA

SEQ ID NO: 89505 - protein, 278 aa, Arabidopsis thaliana
  peptide (1)..(278): Ceres Seq. ID no. 12719145
MNNKITYKVDINEFSDLTDEEFRATHTGLVVPEAITRISTLSSGKNTVPFRYGNVSDNGESMDWRQEGAVTPVKYQGRCGGCWAFSAVAAVEGITKITKGELVSLSEQQLLDCDRDYNQGCRGGIMSKAFEYIIKNQGITTEDNYPYQESQQTCSSSTTLSSSFRAATISGYETVPMNNEEALLQAVSQQPVSVGIEGTGAAFRHYSGGVFNGECGTDLHHAVTIVGYGMSEEGTKYWVVKNSWGETWGENGYMRIKRDVDAPQGMCGLAILAFYPLA

SEQ ID NO: 89506 - DNA, 1683 bp, Arabidopsis thaliana
  misc_feature (1)..(1683): Ceres Seq. ID no. 12719182
  misc_feature (1)..(1683): Ortholog of  Ceres SEQ ID NO 15169603 as cited in SEQ ID NO 65772
  misc_feature (1)..(1683): Ortholog of  Ceres SEQ ID NO 14308003 as cited in SEQ ID NO 65919
  misc_feature (1)..(1683): Ortholog of  Ceres SEQ ID NO 14303087 as cited in SEQ ID NO 66569
aaactcatctctttcctctcaccttcctcatacatcatctctctttctctttgtctcctcatcaacaatgttactaatcatatcattcaccatcgtctccttcttcttcatcataatattctcactctttcacttactcttccttcaaaaactacgttactgcaactgcgagatctgtcatgcttatctcacttcaagctggaaaaaagacttcatcaatctcagtgattggtacactcatcttctccggcggtctccgacgtcaacgatcaaagtacacgtcttaaacagcgttatcacagcgaatccatcaaacgttgaacatatcctcaaaaccaatttccacaattacccaaaaggcaaacaattctctgttatcctcggtgatcttttaggccgtggaatcttcaattccgatggtgacacgtggcgtttccagagaaaactcgcgagtttggaacttggaagtgtttctgtaagagttttcgctcatgagattgttaagaccgagatcgagacacgtcttcttccgatattgacttcgttttccgacaatcctggttctgttttggatctacaagatgtgtttagaagattctcgtttgatacgattagtaaattgtcgtttgggtttgacccagattgtctccggttaccttttccgatatcggaattcgccgtcgctttcgatacggcgtcgttgttatcggcgaaacgagctttagctccgtttcctctgttatggaaaaccaaaaggcttttaagaattggttctgagaaaaagcttcaagaatctatcaatgtgataaaccggttagctggtgatttaatcaagcaacggaggttaaccggtttgatgggtaaaaatgatttgatttctagattcatggcggttgtggcggaggacgatgatgagtatctccgagacatcgttgtgagttttctattggctggtcgggatacggtagctgctggtttaaccggatttttctggttattgacccgtcatccggaagtggagaaccggatccgggaagaactggaccgggttatggggaccggttttgactcagtcactgctcgttgcgatgaaatgagagagatggattatttgcatgcgtcgctgtacgagagcatgagattgtttccgccggttcaattcgattccaaattcgctttaaacgatgacgttttgtctgatggtacatttgtgaatagtgggactagagtcacgtaccatgcttatgcaatgggtcggatggaccggatctggggcccggattacgaagagtttaaaccagagaggtggttggataacgaaggtaagttccggcccgagaatccggttaagtacccggttttccaggccggagctagggtttgtatcgggaaagagatggctatcatggagatgaaatccatagctgtggcaatcattaggaggttcgaaacacgggtcgcaagtcccgaaacaaccgagacactccggtttgcgcctggtttaactgcgacggttaacggtggattgccggttatgatccaagaaaggagttagactcataaaagcattaagtcaagatatataataatacttaatgaaaaccatagatagagtctttgttctctaactgaccaattattgttaacatgcaaacacacttgttgacaacaattatgtgtacc

SEQ ID NO: 89507 - protein, 517 aa, Arabidopsis thaliana
  peptide (1)..(517): Ceres Seq. ID no. 12719183
NSSLSSHLPHTSSLFLFVSSSTMLLIISFTIVSFFFIIIFSLFHLLFLQKLRYCNCEICHAYLTSSWKKDFINLSDWYTHLLRRSPTSTIKVHVLNSVITANPSNVEHILKTNFHNYPKGKQFSVILGDLLGRGIFNSDGDTWRFQRKLASLELGSVSVRVFAHEIVKTEIETRLLPILTSFSDNPGSVLDLQDVFRRFSFDTISKLSFGFDPDCLRLPFPISEFAVAFDTASLLSAKRALAPFPLLWKTKRLLRIGSEKKLQESINVINRLAGDLIKQRRLTGLMGKNDLISRFMAVVAEDDDEYLRDIVVSFLLAGRDTVAAGLTGFFWLLTRHPEVENRIREELDRVMGTGFDSVTARCDEMREMDYLHASLYESMRLFPPVQFDSKFALNDDVLSDGTFVNSGTRVTYHAYAMGRMDRIWGPDYEEFKPERWLDNEGKFRPENPVKYPVFQAGARVCIGKEMAIMEMKSIAVAIIRRFETRVASPETTETLRFAPGLTATVNGGLPVMIQERS

SEQ ID NO: 89508 - protein, 495 aa, Arabidopsis thaliana
  peptide (1)..(495): Ceres Seq. ID no. 12719184
MLLIISFTIVSFFFIIIFSLFHLLFLQKLRYCNCEICHAYLTSSWKKDFINLSDWYTHLLRRSPTSTIKVHVLNSVITANPSNVEHILKTNFHNYPKGKQFSVILGDLLGRGIFNSDGDTWRFQRKLASLELGSVSVRVFAHEIVKTEIETRLLPILTSFSDNPGSVLDLQDVFRRFSFDTISKLSFGFDPDCLRLPFPISEFAVAFDTASLLSAKRALAPFPLLWKTKRLLRIGSEKKLQESINVINRLAGDLIKQRRLTGLMGKNDLISRFMAVVAEDDDEYLRDIVVSFLLAGRDTVAAGLTGFFWLLTRHPEVENRIREELDRVMGTGFDSVTARCDEMREMDYLHASLYESMRLFPPVQFDSKFALNDDVLSDGTFVNSGTRVTYHAYAMGRMDRIWGPDYEEFKPERWLDNEGKFRPENPVKYPVFQAGARVCIGKEMAIMEMKSIAVAIIRRFETRVASPETTETLRFAPGLTATVNGGLPVMIQERS

SEQ ID NO: 89509 - DNA, 1371 bp, Arabidopsis thaliana
  misc_feature (1)..(1371): Ceres Seq. ID no. 12719239
  misc_feature (1)..(1371): Ortholog of  Ceres SEQ ID NO 13596816 as cited in SEQ ID NO 62287
atggctctctccatcctcttccttctcctcttcattctcttctctatttcgccgtcaaatgcacagtcgtttatcggagtaaactacggcttactatccgacaacctcccgccaccttctcaaacggccaaactcctccaatctacctccatccagaaagtgaggctatacaatgcggattcctccatcatcacatccttggttggaaccggtattggtattgttatcggagtagcaaatggcgatctcccgtctatcgcctcggatctcaacattgcctctcagtggataaattccaacgtacttcctttctatcctgcctccaacatcattctcatcaatgtcggcaacgaggtgttgttgtcaaatgatctgaatcttgtaaaccaacttctcccggctatgcaaaatgttcaaaaggctctcgaggcggtttcactaggtggaaaaatcaaggtgtctactgtccatgcaatgacagtactaggcaactccgaaccgccatcagctggttcgtttgctcctagttatcaggccggtttaaagggcattctacagtttcttagcgataccgggtcgccttttgccatcaacccgtacccgttctttgcatatcagagcgacccgagacccgaaacgctggcgttttgtcttttccagcctaaccctggacgggtagactcaaacactggaatcaagtacatgaacatgtttgatgctcaggttgatgcagtgcactcagctttgaaatcgataggattcgagaaagtggaagtgttggtggccgaaactggttggccatcaaccggtgacagcaacgaggtaggtccgagtgttgagaatgctaaagcttacaacggaaatctcattgctcacttaaggtccatggttgggactccgctcatgcccggaaaatccatcgacacttacattttcgctctctttgacgagaatctcaagcctggtccttcttttgagcaatcttttggccttttcaagcctgatctttccatggcctacgacattggactcactaaaactactagtagccagacgtcacaatctccacagttgggaaaagtaacatcaatgggatggtgtgtgccaaaggaggatgcaactcaagagcagttgcaagatagtctagattgggtttgtgggcagggaattgattgtggcccaataatgccaggaggagtttgtttcgagcctaacaatgtcgcctctcatacagcctatgccatgaatctttatttccaaaaatctcctgaaaaccctacggattgcgatttctctaaaaccgccaggatcacttctgagaaccctagtaagttattttcctcttcatctttcatatcctacttgttatag

SEQ ID NO: 89510 - protein, 456 aa, Arabidopsis thaliana
  peptide (1)..(456): Ceres Seq. ID no. 12719240
MALSILFLLLFILFSISPSNAQSFIGVNYGLLSDNLPPPSQTAKLLQSTSIQKVRLYNADSSIITSLVGTGIGIVIGVANGDLPSIASDLNIASQWINSNVLPFYPASNIILINVGNEVLLSNDLNLVNQLLPAMQNVQKALEAVSLGGKIKVSTVHAMTVLGNSEPPSAGSFAPSYQAGLKGILQFLSDTGSPFAINPYPFFAYQSDPRPETLAFCLFQPNPGRVDSNTGIKYMNMFDAQVDAVHSALKSIGFEKVEVLVAETGWPSTGDSNEVGPSVENAKAYNGNLIAHLRSMVGTPLMPGKSIDTYIFALFDENLKPGPSFEQSFGLFKPDLSMAYDIGLTKTTSSQTSQSPQLGKVTSMGWCVPKEDATQEQLQDSLDWVCGQGIDCGPIMPGGVCFEPNNVASHTAYAMNLYFQKSPENPTDCDFSKTARITSENPSKLFSSSSFISYLL

SEQ ID NO: 89511 - protein, 322 aa, Arabidopsis thaliana
  peptide (1)..(322): Ceres Seq. ID no. 12719241
MQNVQKALEAVSLGGKIKVSTVHAMTVLGNSEPPSAGSFAPSYQAGLKGILQFLSDTGSPFAINPYPFFAYQSDPRPETLAFCLFQPNPGRVDSNTGIKYMNMFDAQVDAVHSALKSIGFEKVEVLVAETGWPSTGDSNEVGPSVENAKAYNGNLIAHLRSMVGTPLMPGKSIDTYIFALFDENLKPGPSFEQSFGLFKPDLSMAYDIGLTKTTSSQTSQSPQLGKVTSMGWCVPKEDATQEQLQDSLDWVCGQGIDCGPIMPGGVCFEPNNVASHTAYAMNLYFQKSPENPTDCDFSKTARITSENPSKLFSSSSFISYLL

SEQ ID NO: 89512 - protein, 298 aa, Arabidopsis thaliana
  peptide (1)..(298): Ceres Seq. ID no. 12719242
MTVLGNSEPPSAGSFAPSYQAGLKGILQFLSDTGSPFAINPYPFFAYQSDPRPETLAFCLFQPNPGRVDSNTGIKYMNMFDAQVDAVHSALKSIGFEKVEVLVAETGWPSTGDSNEVGPSVENAKAYNGNLIAHLRSMVGTPLMPGKSIDTYIFALFDENLKPGPSFEQSFGLFKPDLSMAYDIGLTKTTSSQTSQSPQLGKVTSMGWCVPKEDATQEQLQDSLDWVCGQGIDCGPIMPGGVCFEPNNVASHTAYAMNLYFQKSPENPTDCDFSKTARITSENPSKLFSSSSFISYLL

SEQ ID NO: 89513 - DNA, 753 bp, Arabidopsis thaliana
  misc_feature (1)..(753): Ceres Seq. ID no. 12719336
  misc_feature (1)..(753): Ortholog of  Ceres SEQ ID NO 12611392 as cited in SEQ ID NO 56826
atggtttacggtaagagatcgagtgtcgaagtcattggtttccttaacatataccgtcatgatccatgggacttacctggtttatcgagaatcggggagagggaatggtacttctttgtaccaagggaaaggaagcatgggaacggtgggaggccaagcaggacaactgaaaaaggatattggaaagcaactggatccgatcgtaaaatcataagcttgtctgagccaaaacgtgttatagggctcaagaagacgcttgtgttctatagaggaagagcaccaggaggaagcaagactgattgggtgatgaacgagtttcggatgcccgataattgctccttaccaaaggatgttgtgctttgtaagatatatagaaaagctacttcattgaaagtattggagcaaagggcagagatggaagctaagatgaatcaaacatgtcctaactctcctctttcgtcttccgagacgatttctttcgttggtaaagaagaaaacatgatgacttcgttccgtgctcctcaagtaatagctatggaagaagcaaacaagatccaaatgcatcaagaaaacgcgaaaaccgaagagaaacaaagagaagcagagaccaaagaaccttcttcatcactgaagctaccgtttggaagtttaccagagctacaattaccaaaaccaggagtagaatgggaccagttgttgagtataagcccatggctccagaatcttacaccaatagttaacatatattggtag

SEQ ID NO: 89514 - protein, 250 aa, Arabidopsis thaliana
  peptide (1)..(250): Ceres Seq. ID no. 12719337
MVYGKRSSVEVIGFLNIYRHDPWDLPGLSRIGEREWYFFVPRERKHGNGGRPSRTTEKGYWKATGSDRKIISLSEPKRVIGLKKTLVFYRGRAPGGSKTDWVMNEFRMPDNCSLPKDVVLCKIYRKATSLKVLEQRAEMEAKMNQTCPNSPLSSSETISFVGKEENMMTSFRAPQVIAMEEANKIQMHQENAKTEEKQREAETKEPSSSLKLPFGSLPELQLPKPGVEWDQLLSISPWLQNLTPIVNIYW

SEQ ID NO: 89515 - protein, 148 aa, Arabidopsis thaliana
  peptide (1)..(148): Ceres Seq. ID no. 12719338
MNEFRMPDNCSLPKDVVLCKIYRKATSLKVLEQRAEMEAKMNQTCPNSPLSSSETISFVGKEENMMTSFRAPQVIAMEEANKIQMHQENAKTEEKQREAETKEPSSSLKLPFGSLPELQLPKPGVEWDQLLSISPWLQNLTPIVNIYW

SEQ ID NO: 89516 - protein, 143 aa, Arabidopsis thaliana
  peptide (1)..(143): Ceres Seq. ID no. 12719339
MPDNCSLPKDVVLCKIYRKATSLKVLEQRAEMEAKMNQTCPNSPLSSSETISFVGKEENMMTSFRAPQVIAMEEANKIQMHQENAKTEEKQREAETKEPSSSLKLPFGSLPELQLPKPGVEWDQLLSISPWLQNLTPIVNIYW

SEQ ID NO: 89517 - DNA, 1286 bp, Arabidopsis thaliana
  misc_feature (1)..(1286): Ceres Seq. ID no. 12719356
  misc_feature (1)..(1286): Ortholog of  Ceres SEQ ID NO 14307022 as cited in SEQ ID NO 54437
tcaaaaagtcctctctcggtcaactttcttcttggtccccatcttcacaaatcacaactctttttatttccaaagaccaaaaacctgagaacacaccggcgacctgaaaatggaaacttcctgttttacccttctcggtctccttgtctccctctccttcttcctcactctctccgcccaaatgaccggaaacttcaactgcagtggctcaacctcgacgtgtcaatctctcgttggttactcaagcaagaacgcaacaacgttgcgcaatatccaaaccctttttgccgtcaagaacctccgctcgatcctcggagctaacaatctcccactcaacacctcacgtgaccaacgcgtgaacccgaatcaagtcgtacgtgtcccaatccattgctcttgctccaatggaaccggtgtctcgaaccgggacatcgaatacaccatcaagaaagacgacatactctctttcgtcgcaactgagattttcggtggtctcgttacgtacgagaagatcagtgaggttaacaaaatccctgacccgaacaaaatcgaaatcggtcaaaagttttggatccctttgccttgtagctgtgataaattgaacggtgaggatgttgttcactacgcacatgtagtcaaactagggagctctctcggtgagatcgctgctcagtttggaacggacaacacgacgttggctcagctcaatggaatcattggtgactctcagcttcttgctgataaacctctcgacgtccctctcaaagcttgtagctcttctgtgaggaaggactcgttggatgctcctctgcttctgtctaacaactcatacgtcttcactgcaaacaattgcgtcaagtgtacttgtgacgctttgaagaattggactttaagctgtcaatcatcatctgagattaagccttcgaactggcaaacctgcccaccattttcacaatgtgatggagctttgcttaacgcctcttgcagacaacctcgtgattgcgtctatgctggttactccaaccaaaccatcttcaccacagcttccccagcttgtccagattctgctggtcctgataactatgcatcaacgctcagctcaagcttcaatttcgtgattgtgttgattcagtgtgctctgctttgtctctgccttctctagtaatgttttgttgtgtgtttatgagtgtgtatctaagtacagttcggattaaaataaagacattgtttcacctgaagcatcacgtccttgtaccatttttatattggaaacatttcagcttttg

SEQ ID NO: 89518 - protein, 350 aa, Arabidopsis thaliana; identical to SEQ ID NO: 27338
  peptide (1)..(350): Ceres Seq. ID no. 12719357

SEQ ID NO: 89519 - protein, 326 aa, Arabidopsis thaliana; identical to SEQ ID NO: 27339
  peptide (1)..(326): Ceres Seq. ID no. 12719358

SEQ ID NO: 89520 - DNA, 1422 bp, Arabidopsis thaliana
  misc_feature (1)..(1422): Ceres Seq. ID no. 12719382
  misc_feature (1)..(1422): Ortholog of  Ceres SEQ ID NO 14311219 as cited in SEQ ID NO 56635
  misc_feature (1)..(1422): Ortholog of  Ceres SEQ ID NO 15169615 as cited in SEQ ID NO 66708
  misc_feature (1)..(1422): Ortholog of  Ceres SEQ ID NO 15169619 as cited in SEQ ID NO 67512
atggactgggattactatacgctgttgaagacgagtgtggctattattatagtgtttgttgtggccaaactcataacctcctccaaatccaagaagaaaacaagtgtcgtcccactccctccagttcttcaagcgtggcctccatttatcggatccctaatccgcttcatgaaaggtccaatagtgctacttagagaggaatatcctaagcttggaagtgttttcacagtgaagcttcttcacaaaaacatcacttttctcatcggtcccgaagtctcgtcccactttttcaacgcttatgaatctgaactcagccagaaagaaatttacaaatttaatgtgcctacttttggccccggagttgtgtttgatgttgactatcccgttcggatggagcagttccgattcttctccagcgctctcaaggattacttctcaaaatggggagaaagtggggaagtggatctaaaggccgagttagagcgtctaatcaccttgactgctagtagatgtctattgggtcgagaagtccgtgaccaactttttgatgatgttgctccattgttccatgaccttgataaaggcatgcaacccataagtgtcatcttcccaaagctccccattccagctcacaattgtcgtgaccgtgctcgcggaaagattgcaaaaatcttttcaaacatcatagcaacaagaaaacgctctggtgacaaatcagagaacgacatgctacaatgtttcatcgactcaaagtacaaagacggtagagagacaactgaatctgaagtaactggtttgctcattgctggtttgtttgcaggacaacatacaagctctatcactgccacatggaccggtgcttatctaattcaaaacaaacactggtggtccgcggctttggacgagcagaagaaactgattggaaaacatggggacaagatcgactacgatgttttgtctgagatggattttctgtttcgcagtgcaaaagaagctttaaggcttcaccctccaaagatcttactgctgagaacagtacacagtgatttcaccgtgacaactcgagaaggaaagcaatatgagataccaaagggtcatatcgttgcaacttctcctgcattcgccaaccgcttacctcatgtctacaaagatccggaaaattttgatccggatagattttcaaaggaaagagaagaggataaagcagctggttcgtgttcatacatctctttgggagctggtaggcacgagtgtcctggtggatcatttgcgttcttgcagatcaaagccgtatggtgtcacttattgagaaactttgagcttgagttagtgtcacctttccctgaaatcaactggaatgctttggtcgttggtgctaaaggaaatgtcatggttcgttacaagcgtcgtcccttttcttaa

SEQ ID NO: 89521 - protein, 473 aa, Arabidopsis thaliana
  peptide (1)..(473): Ceres Seq. ID no. 12719383
MDWDYYTLLKTSVAIIIVFVVAKLITSSKSKKKTSVVPLPPVLQAWPPFIGSLIRFMKGPIVLLREEYPKLGSVFTVKLLHKNITFLIGPEVSSHFFNAYESELSQKEIYKFNVPTFGPGVVFDVDYPVRMEQFRFFSSALKDYFSKWGESGEVDLKAELERLITLTASRCLLGREVRDQLFDDVAPLFHDLDKGMQPISVIFPKLPIPAHNCRDRARGKIAKIFSNIIATRKRSGDKSENDMLQCFIDSKYKDGRETTESEVTGLLIAGLFAGQHTSSITATWTGAYLIQNKHWWSAALDEQKKLIGKHGDKIDYDVLSEMDFLFRSAKEALRLHPPKILLLRTVHSDFTVTTREGKQYEIPKGHIVATSPAFANRLPHVYKDPENFDPDRFSKEREEDKAAGSCSYISLGAGRHECPGGSFAFLQIKAVWCHLLRNFELELVSPFPEINWNALVVGAKGNVMVRYKRRPFS

SEQ ID NO: 89522 - protein, 417 aa, Arabidopsis thaliana
  peptide (1)..(417): Ceres Seq. ID no. 12719384
MKGPIVLLREEYPKLGSVFTVKLLHKNITFLIGPEVSSHFFNAYESELSQKEIYKFNVPTFGPGVVFDVDYPVRMEQFRFFSSALKDYFSKWGESGEVDLKAELERLITLTASRCLLGREVRDQLFDDVAPLFHDLDKGMQPISVIFPKLPIPAHNCRDRARGKIAKIFSNIIATRKRSGDKSENDMLQCFIDSKYKDGRETTESEVTGLLIAGLFAGQHTSSITATWTGAYLIQNKHWWSAALDEQKKLIGKHGDKIDYDVLSEMDFLFRSAKEALRLHPPKILLLRTVHSDFTVTTREGKQYEIPKGHIVATSPAFANRLPHVYKDPENFDPDRFSKEREEDKAAGSCSYISLGAGRHECPGGSFAFLQIKAVWCHLLRNFELELVSPFPEINWNALVVGAKGNVMVRYKRRPFS

SEQ ID NO: 89523 - protein, 343 aa, Arabidopsis thaliana
  peptide (1)..(343): Ceres Seq. ID no. 12719385
MEQFRFFSSALKDYFSKWGESGEVDLKAELERLITLTASRCLLGREVRDQLFDDVAPLFHDLDKGMQPISVIFPKLPIPAHNCRDRARGKIAKIFSNIIATRKRSGDKSENDMLQCFIDSKYKDGRETTESEVTGLLIAGLFAGQHTSSITATWTGAYLIQNKHWWSAALDEQKKLIGKHGDKIDYDVLSEMDFLFRSAKEALRLHPPKILLLRTVHSDFTVTTREGKQYEIPKGHIVATSPAFANRLPHVYKDPENFDPDRFSKEREEDKAAGSCSYISLGAGRHECPGGSFAFLQIKAVWCHLLRNFELELVSPFPEINWNALVVGAKGNVMVRYKRRPFS

SEQ ID NO: 89524 - DNA, 1410 bp, Arabidopsis thaliana
  misc_feature (1)..(1410): Ceres Seq. ID no. 12719426
  misc_feature (1)..(1410): Ortholog of  Ceres SEQ ID NO 13597334 as cited in SEQ ID NO 64244
atagaattccaaagagtgctgtctaaaagagttcttaatctacattgttaaataatttacatgatgggagtggccggttttgcggtagctctgatggtaacttcactgttaatcgctacttgcgctgatggaaaagagttttttcatcaccgggaaattaaagtacaaagatttttgaagcagcttaacaagccagctcttaaatccattaagagtgaagacggagatataattgattgtgttctaataactagccaaccagcttttgatcatcctttgcttaaaaatcacaccattcaggtaaaaccaagttttatcccggaaggggaaggtgactctacgtacaccaagaaggagacaaaagctactcaagtgtggcagaaatatggagagtgcccagaaaacactatcccgataagaagaacaaaaaaagaagaaatcttacgagcaaaatcccttgaaagtttcgggaaaaagaatcatcaatacattcctgaagatacatctagtccaaattatcaccatgagtacgcgttcatgggtgtgagaaacggaaagttttacgggacaaaagcctcgataaatgtctggaaaccagatgtagcaactcccagcgagttcagcttgtcacagacttggatcgtatctggagatggcactagtcgtaatactattgaagctggttggcaggtttatccaggaatgtacggtaataatgatcctagattatttgtttattggaccagcgatggataccaaaagacaggatgctataatctcgtctgcggtggttttgttcagacgaccaaccaatacactgtaggtggatcctacgttaccgcgtcacaatacgacggagctcaactagttctcaacctacttatatggaaggacccaaaaacaggaaactggtggctaaagattaatgacaacgatgttatagggtactggcctggctcgttgttcaattctctaggagatggagctataaaagttgaatggggtggcgaaatcttcgcgccaaccagtgatagacacacaaccaccgatatgggaagtggacattttgcagaggaagggattaagaaagcgagctatgtaaaaaatattatgatagttgatgggacaaatgctctgagagaaccacaaggactttactcctatgctgataatcgtaattgttacagcgttgtaccaggaaatgctggaacttcctttggtactcatttcttctatggtggtcctggtcagaacgttaaatgcccgtgatctgatctgtgtgttcaagcttttgatattacgcatctatgtttcaatgtttgatcctatctatctttaattatagttaagtgctctttgtctatgtgtaaggcttcatagtttataataaagaacttttacgtttgttcc

SEQ ID NO: 89525 - protein, 402 aa, Arabidopsis thaliana
  peptide (1)..(402): Ceres Seq. ID no. 12719427
MMGVAGFAVALMVTSLLIATCADGKEFFHHREIKVQRFLKQLNKPALKSIKSEDGDIIDCVLITSQPAFDHPLLKNHTIQVKPSFIPEGEGDSTYTKKETKATQVWQKYGECPENTIPIRRTKKEEILRAKSLESFGKKNHQYIPEDTSSPNYHHEYAFMGVRNGKFYGTKASINVWKPDVATPSEFSLSQTWIVSGDGTSRNTIEAGWQVYPGMYGNNDPRLFVYWTSDGYQKTGCYNLVCGGFVQTTNQYTVGGSYVTASQYDGAQLVLNLLIWKDPKTGNWWLKINDNDVIGYWPGSLFNSLGDGAIKVEWGGEIFAPTSDRHTTTDMGSGHFAEEGIKKASYVKNIMIVDGTNALREPQGLYSYADNRNCYSVVPGNAGTSFGTHFFYGGPGQNVKCP

SEQ ID NO: 89526 - protein, 401 aa, Arabidopsis thaliana
  peptide (1)..(401): Ceres Seq. ID no. 12719428
MGVAGFAVALMVTSLLIATCADGKEFFHHREIKVQRFLKQLNKPALKSIKSEDGDIIDCVLITSQPAFDHPLLKNHTIQVKPSFIPEGEGDSTYTKKETKATQVWQKYGECPENTIPIRRTKKEEILRAKSLESFGKKNHQYIPEDTSSPNYHHEYAFMGVRNGKFYGTKASINVWKPDVATPSEFSLSQTWIVSGDGTSRNTIEAGWQVYPGMYGNNDPRLFVYWTSDGYQKTGCYNLVCGGFVQTTNQYTVGGSYVTASQYDGAQLVLNLLIWKDPKTGNWWLKINDNDVIGYWPGSLFNSLGDGAIKVEWGGEIFAPTSDRHTTTDMGSGHFAEEGIKKASYVKNIMIVDGTNALREPQGLYSYADNRNCYSVVPGNAGTSFGTHFFYGGPGQNVKCP

SEQ ID NO: 89527 - protein, 391 aa, Arabidopsis thaliana
  peptide (1)..(391): Ceres Seq. ID no. 12719429
MVTSLLIATCADGKEFFHHREIKVQRFLKQLNKPALKSIKSEDGDIIDCVLITSQPAFDHPLLKNHTIQVKPSFIPEGEGDSTYTKKETKATQVWQKYGECPENTIPIRRTKKEEILRAKSLESFGKKNHQYIPEDTSSPNYHHEYAFMGVRNGKFYGTKASINVWKPDVATPSEFSLSQTWIVSGDGTSRNTIEAGWQVYPGMYGNNDPRLFVYWTSDGYQKTGCYNLVCGGFVQTTNQYTVGGSYVTASQYDGAQLVLNLLIWKDPKTGNWWLKINDNDVIGYWPGSLFNSLGDGAIKVEWGGEIFAPTSDRHTTTDMGSGHFAEEGIKKASYVKNIMIVDGTNALREPQGLYSYADNRNCYSVVPGNAGTSFGTHFFYGGPGQNVKCP

SEQ ID NO: 89528 - DNA, 615 bp, Arabidopsis thaliana
  misc_feature (1)..(615): Ceres Seq. ID no. 12719434
  misc_feature (1)..(615): Ortholog of  Ceres SEQ ID NO 12611293 as cited in SEQ ID NO 56191
  misc_feature (1)..(615): Ortholog of  Ceres SEQ ID NO 12583682 as cited in SEQ ID NO 56297
  misc_feature (1)..(615): Ortholog of  Ceres SEQ ID NO 15179225 as cited in SEQ ID NO 0
atggagtcacggaagattaacctaatggcgacagcaatagctttaatagtggtggctatggtggtggcagctgctgatgataagacgaaagacaaggaggagtgtacggagcagctggtcggtatggccacgtgtcttccttacgtgcaaggacaagcaaaatctccgacgccagactgttgctccggtctcaaacaagttcttaattcaaacaagaagtgtctttgtgtgatcattcaagacaggaatgatcctgatttgggtctccagatcaacgtctctctagctctcgcacttccttctgtttgtcacgccgctgctgacgtcactaaatgccctgctttgcttcacttggatccgaattctccagatgcccaagtcttctaccagctagctaaaggtttaaacaaaaccggcccagcctctgctcccactggctcgtcccctggacctataagcatttctccgacttcaggatccgatgatggtaacaacagtggtcgaacgacctctgtgccaggcaggaaccacgctcaaagcttctataaacaatggctggggctcgaagttgtgttccatttcttcgtaattttttatattttcatcctcgtatag

SEQ ID NO: 89529 - protein, 204 aa, Arabidopsis thaliana
  peptide (1)..(204): Ceres Seq. ID no. 12719435
MESRKINLMATAIALIVVAMVVAAADDKTKDKEECTEQLVGMATCLPYVQGQAKSPTPDCCSGLKQVLNSNKKCLCVIIQDRNDPDLGLQINVSLALALPSVCHAAADVTKCPALLHLDPNSPDAQVFYQLAKGLNKTGPASAPTGSSPGPISISPTSGSDDGNNSGRTTSVPGRNHAQSFYKQWLGLEVVFHFFVIFYIFILV

SEQ ID NO: 89530 - protein, 196 aa, Arabidopsis thaliana
  peptide (1)..(196): Ceres Seq. ID no. 12719436
MATAIALIVVAMVVAAADDKTKDKEECTEQLVGMATCLPYVQGQAKSPTPDCCSGLKQVLNSNKKCLCVIIQDRNDPDLGLQINVSLALALPSVCHAAADVTKCPALLHLDPNSPDAQVFYQLAKGLNKTGPASAPTGSSPGPISISPTSGSDDGNNSGRTTSVPGRNHAQSFYKQWLGLEVVFHFFVIFYIFILV

SEQ ID NO: 89531 - protein, 185 aa, Arabidopsis thaliana
  peptide (1)..(185): Ceres Seq. ID no. 12719437
MVVAAADDKTKDKEECTEQLVGMATCLPYVQGQAKSPTPDCCSGLKQVLNSNKKCLCVIIQDRNDPDLGLQINVSLALALPSVCHAAADVTKCPALLHLDPNSPDAQVFYQLAKGLNKTGPASAPTGSSPGPISISPTSGSDDGNNSGRTTSVPGRNHAQSFYKQWLGLEVVFHFFVIFYIFILV

SEQ ID NO: 89532 - DNA, 1749 bp, Arabidopsis thaliana
  misc_feature (1)..(1749): Ceres Seq. ID no. 12719449
  misc_feature (1)..(1749): Ortholog of  Ceres SEQ ID NO 13600220 as cited in SEQ ID NO 0
atgaagatgcattttttcatcctccttgtaataacctcatggttgtcggagaaaattacttcacttcctcctgattctcgagtattcgatcgtcatggttttcccgataattttgtttttggaacagctgcatcagcttttcagtacgaaggtgcaacaagcgaaggtgggaaatctccatctatatgggattacttcagccacacttttccagaaagaaccagaatgcagaatgcagatgtagcggtcgatttttaccatcgttataaggatgacatcaagttgatgaaagagctaaatatggacgctttcagattttcgatttcgtgggctagattaatacccagtggaaaagtaaaagatggagtaaacaaagaaggtgtagaattctataaggctcttatcgacgagcttgttgctaatggcattgaaccatcgatgaccctctaccattgggaccatcctcaatcactggaagacgagtatggtggtttcttaagccctcaaatagtagaagattttcgagatttttcaagagtgtgttttgaagaattcggagacaaagttaagatgtggactactataaacgagccttatgtcataactgttgcgggctacgacactggcaacaaagcggttggacgatgctcgaaatgggtgaatagtaagtgtcaaggtggcgattcaggtactgagccttacattgcatcacatcaccttcttctcgctcatgccgcagctgtacaagagttccgaaaatgtaacaagactcaagacggtcagattgggatagtgttatctcctttgtggtttgagccttacgactctgcttctcctgccgacaacgaagctgttaaacgagctcttgccactgaactagattggcatttagatccagttattcacggagattatccagaaatgatgaagaaacttgccggaaatagattaccttcgttcactccagaacaatccaaaatgttgaaaaattcatcggatttcattggaataaactactatacagcgcgttacgttgctcatattccacaagccgatcctgctcgtccgcgattcgtaaccgatcatcagctccaatggcgagtaacaaatcacagtaatcaccaattcggaccaggggaagatcgaggcatacttcaatcacatcctgaaggtttacgaaaagttcttaactacatcaaagataaatacaacaaccctatagtttatatcaaagagaacggaattaatgactacgacgacggtacaaaatcacgagaggagattctcaatgatacatttaggataagctaccatgaggaccatctccaacaactccaaaaagctataatagaggatgggtgtgacgtccgaggatattacgtgtggtctttactagacaatttcgagtgggaacatggatattctactagatttggcgtgtactatgttgactacgacaacgatctcactcgtattcccaaagattccgttaactggttcaagcagttcctcgatgtaaagaataaagaaatatgggatgtgtcacataaagaaaggtataataagacttttgatgatgtagaaagtttcgaggcatctgttggttcgattctctatctcatgacgaacaacatatcgaggagagaagaggaagaaagagatcaatgcgcttttgggaatcttaatgatcagtccggtctgttgttggaatcatataattctttcggatttttagaaaacgtttggtga

SEQ ID NO: 89533 - protein, 582 aa, Arabidopsis thaliana
  peptide (1)..(582): Ceres Seq. ID no. 12719450
MKMHFFILLVITSWLSEKITSLPPDSRVFDRHGFPDNFVFGTAASAFQYEGATSEGGKSPSIWDYFSHTFPERTRMQNADVAVDFYHRYKDDIKLMKELNMDAFRFSISWARLIPSGKVKDGVNKEGVEFYKALIDELVANGIEPSMTLYHWDHPQSLEDEYGGFLSPQIVEDFRDFSRVCFEEFGDKVKMWTTINEPYVITVAGYDTGNKAVGRCSKWVNSKCQGGDSGTEPYIASHHLLLAHAAAVQEFRKCNKTQDGQIGIVLSPLWFEPYDSASPADNEAVKRALATELDWHLDPVIHGDYPEMMKKLAGNRLPSFTPEQSKMLKNSSDFIGINYYTARYVAHIPQADPARPRFVTDHQLQWRVTNHSNHQFGPGEDRGILQSHPEGLRKVLNYIKDKYNNPIVYIKENGINDYDDGTKSREEILNDTFRISYHEDHLQQLQKAIIEDGCDVRGYYVWSLLDNFEWEHGYSTRFGVYYVDYDNDLTRIPKDSVNWFKQFLDVKNKEIWDVSHKERYNKTFDDVESFEASVGSILYLMTNNISRREEEERDQCAFGNLNDQSGLLLESYNSFGFLENVW

SEQ ID NO: 89534 - protein, 580 aa, Arabidopsis thaliana
  peptide (1)..(580): Ceres Seq. ID no. 12719451
MHFFILLVITSWLSEKITSLPPDSRVFDRHGFPDNFVFGTAASAFQYEGATSEGGKSPSIWDYFSHTFPERTRMQNADVAVDFYHRYKDDIKLMKELNMDAFRFSISWARLIPSGKVKDGVNKEGVEFYKALIDELVANGIEPSMTLYHWDHPQSLEDEYGGFLSPQIVEDFRDFSRVCFEEFGDKVKMWTTINEPYVITVAGYDTGNKAVGRCSKWVNSKCQGGDSGTEPYIASHHLLLAHAAAVQEFRKCNKTQDGQIGIVLSPLWFEPYDSASPADNEAVKRALATELDWHLDPVIHGDYPEMMKKLAGNRLPSFTPEQSKMLKNSSDFIGINYYTARYVAHIPQADPARPRFVTDHQLQWRVTNHSNHQFGPGEDRGILQSHPEGLRKVLNYIKDKYNNPIVYIKENGINDYDDGTKSREEILNDTFRISYHEDHLQQLQKAIIEDGCDVRGYYVWSLLDNFEWEHGYSTRFGVYYVDYDNDLTRIPKDSVNWFKQFLDVKNKEIWDVSHKERYNKTFDDVESFEASVGSILYLMTNNISRREEEERDQCAFGNLNDQSGLLLESYNSFGFLENVW

SEQ ID NO: 89535 - protein, 507 aa, Arabidopsis thaliana
  peptide (1)..(507): Ceres Seq. ID no. 12719452
MQNADVAVDFYHRYKDDIKLMKELNMDAFRFSISWARLIPSGKVKDGVNKEGVEFYKALIDELVANGIEPSMTLYHWDHPQSLEDEYGGFLSPQIVEDFRDFSRVCFEEFGDKVKMWTTINEPYVITVAGYDTGNKAVGRCSKWVNSKCQGGDSGTEPYIASHHLLLAHAAAVQEFRKCNKTQDGQIGIVLSPLWFEPYDSASPADNEAVKRALATELDWHLDPVIHGDYPEMMKKLAGNRLPSFTPEQSKMLKNSSDFIGINYYTARYVAHIPQADPARPRFVTDHQLQWRVTNHSNHQFGPGEDRGILQSHPEGLRKVLNYIKDKYNNPIVYIKENGINDYDDGTKSREEILNDTFRISYHEDHLQQLQKAIIEDGCDVRGYYVWSLLDNFEWEHGYSTRFGVYYVDYDNDLTRIPKDSVNWFKQFLDVKNKEIWDVSHKERYNKTFDDVESFEASVGSILYLMTNNISRREEEERDQCAFGNLNDQSGLLLESYNSFGFLENVW

SEQ ID NO: 89536 - DNA, 1743 bp, Arabidopsis thaliana
  misc_feature (1)..(1743): Ceres Seq. ID no. 12719453
  misc_feature (1)..(1743): Ortholog of  Ceres SEQ ID NO 13600220 as cited in SEQ ID NO 0
atgaacgttcaaattttcatcctccttttgataatctcatggcttacaccgaagattacttctcttcctcctgaatctcaagtccttgatcgaagtagttttcctgatgattttgttttcggaaccgctatatcggcctttcagagcgaaggtgcaacaagcgaaggtggaaaatcgccaactatttgggattacttcagccacacctttccagaaagaaccaatatgcagaatgcagatgtagccgtcgatttttaccatcgttataaggatgacatcaaattgatagaagagctaaatgtggacgctttcagattttcgatttcgtgggccagattaatacccagtggaaaggtaaaggatggagtaaacaaagaaggtgtacaattctacaaggctctcatagacgagcttattgctaatggcattcaaccttcggtgactctctatcattgggaccatcctcaagctcttgaggacgagtatggtggttttttaaaccctcaaataatagaagattttcgaaattttgcaagagtttgttttgaaaatttcggagacaaagttaagatgtggacaacaatcaacgagccttatgttataagtgttgcgggctacgacacgggcatcaaagcggttggacggtgctcgaaatgggtgaatagtcggtgtcaagccggtgactcggccatcgagccttacattgtatcacatcaccttcttctttcccatgctgcggcagtacaagagttccgaaattgtaacaagactttacaagatggtaagattgggatagtgatatctccttggtggcttgagccttacgactctacatcgtctgctgacaaagaagccgttgaacgaggccttcccttagaactagagtggcatttaaatccggtgatttacggagattatcctgaaacaatgaaaaagcatgtcggaaatagattacctgctttcacaccagaacaatcaaagatgttaataaattcatcagatttcattggagtaaactattatagcatacacttcaccgctcatctccctcatatcgatcatactcgacctcgattcagaactgatcaccattttgagaagaaatgtaaggatgatcgaggcaaaattcactcgcatccagaaggtttgcgaagagttctgaactatatcaaagataaatacaataaccctatcgtctatgtaaaagagaatggaatagatcactacgatgatggtacaaaatcgcgggaaacaattctcaaggacacatttaggataagctaccatcaggaccatcttaaacaagttcacaaagctataatagaggatgggtgtgatgttagaggatattacgtgtggtctttattcgacaacttcgagtgggagcatggatataattctagattcggtatgtactatgttgacttcaaaaacaatctccaacggtatcctaaagattccgtcaactggttcaagaaattcctcagtagaccggtggtaagaagtgaagaaacagaggatgaaaaagtatgcaatgtgtcacgcaaggaagaaaaaattaataaggctttggatgtctcagagggtttcaagacttcagttgattctattgtcaatctcatcaaaaacggatcgagaatagaagaagaagatgatgaagaagagagagatttctgtgcttttaagaatcataatgatcagttgggtttctttctgaagctacagaactcattgggattctag

SEQ ID NO: 89537 - protein, 580 aa, Arabidopsis thaliana
  peptide (1)..(580): Ceres Seq. ID no. 12719454
MNVQIFILLLIISWLTPKITSLPPESQVLDRSSFPDDFVFGTAISAFQSEGATSEGGKSPTIWDYFSHTFPERTNMQNADVAVDFYHRYKDDIKLIEELNVDAFRFSISWARLIPSGKVKDGVNKEGVQFYKALIDELIANGIQPSVTLYHWDHPQALEDEYGGFLNPQIIEDFRNFARVCFENFGDKVKMWTTINEPYVISVAGYDTGIKAVGRCSKWVNSRCQAGDSAIEPYIVSHHLLLSHAAAVQEFRNCNKTLQDGKIGIVISPWWLEPYDSTSSADKEAVERGLPLELEWHLNPVIYGDYPETMKKHVGNRLPAFTPEQSKMLINSSDFIGVNYYSIHFTAHLPHIDHTRPRFRTDHHFEKKCKDDRGKIHSHPEGLRRVLNYIKDKYNNPIVYVKENGIDHYDDGTKSRETILKDTFRISYHQDHLKQVHKAIIEDGCDVRGYYVWSLFDNFEWEHGYNSRFGMYYVDFKNNLQRYPKDSVNWFKKFLSRPVVRSEETEDEKVCNVSRKEEKINKALDVSEGFKTSVDSIVNLIKNGSRIEEEDDEEERDFCAFKNHNDQLGFFLKLQNSLGF

SEQ ID NO: 89538 - protein, 505 aa, Arabidopsis thaliana
  peptide (1)..(505): Ceres Seq. ID no. 12719455
MQNADVAVDFYHRYKDDIKLIEELNVDAFRFSISWARLIPSGKVKDGVNKEGVQFYKALIDELIANGIQPSVTLYHWDHPQALEDEYGGFLNPQIIEDFRNFARVCFENFGDKVKMWTTINEPYVISVAGYDTGIKAVGRCSKWVNSRCQAGDSAIEPYIVSHHLLLSHAAAVQEFRNCNKTLQDGKIGIVISPWWLEPYDSTSSADKEAVERGLPLELEWHLNPVIYGDYPETMKKHVGNRLPAFTPEQSKMLINSSDFIGVNYYSIHFTAHLPHIDHTRPRFRTDHHFEKKCKDDRGKIHSHPEGLRRVLNYIKDKYNNPIVYVKENGIDHYDDGTKSRETILKDTFRISYHQDHLKQVHKAIIEDGCDVRGYYVWSLFDNFEWEHGYNSRFGMYYVDFKNNLQRYPKDSVNWFKKFLSRPVVRSEETEDEKVCNVSRKEEKINKALDVSEGFKTSVDSIVNLIKNGSRIEEEDDEEERDFCAFKNHNDQLGFFLKLQNSLGF

SEQ ID NO: 89539 - protein, 390 aa, Arabidopsis thaliana; identical to SEQ ID NO: 75520
  peptide (1)..(390): Ceres Seq. ID no. 12719456

SEQ ID NO: 89540 - DNA, 1463 bp, Arabidopsis thaliana
  misc_feature (1)..(1463): Ceres Seq. ID no. 12719461
  misc_feature (1)..(1463): Ortholog of  Ceres SEQ ID NO 14302146 as cited in SEQ ID NO 0
gttcatatgatgaagaagtttctctcgttctcctccaacgcgtagaaaattctgacggcttaacgatgtggcgaagatctgttgtttatcgtttctcttcaagaatctctgtttcttcttcgttaccaaaccctagactgattccttggtcccgcgaattatgtgccgttaatagcttctcccagcctccggtctcgacggaatcaactgctaagttagggatcactggtgttagatctgatgccaatcgagtttttgccactgctactgccgccgctacagctacagctaccaccggtgagatttcgtctagagttgcggctttggctggattagggcatcactacgctcgttgttattgggagctttctaaagctaaacttagtatgcttgtggttgcaacttctggaactgggtatattctgggtacgggaaatgctgcaattagcttcccggggctttgttacacatgtgcaggaaccatgatgattgctgcatctgctaattccttgaatcagatttttgagataagcaatgattctaagatgaaaagaacgatgctaaggccattgccttcaggacgtattagtgttccacacgctgttgcatgggctactattgctggtgcttctggtgcttgtttgttggccagcaagactaatatgttggctgctggacttgcatctgccaatcttgtactttatgcgtttgtttatactccgttgaagcaacttcaccctatcaatacatgggttggcgctgttgttggtgctatcccacccttgcttgggtgggcggcagcgtctggtcagatttcatacaattcgatgattcttccagctgctctttacttttggcagatacctcattttatggcccttgcacatctctgccgcaatgattatgcagctggaggttacaagatgttgtcactctttgatccgtcagggaagagaatagcagcagtggctctaaggaactgcttttacatgatccctctcggtttcatcgcctatgactgggggttaacctcaagttggttttgcctcgaatcaacacttctcacactagcaatcgctgcaacagcattttcattctaccgagaccggaccatgcataaagcaaggaaaatgttccatgccagtcttctcttccttcctgttttcatgtctggtcttcttctacaccgtgtctctaatgataatcagcaacaactcgtagaagaagccggattaacaaattctgtatctggtgaagtcaaaactcagaggcgaaagaaacgtgtggctcaacctccggtggcttatgcctctgctgcaccgtttcctttcctcccagctccttccttctactctccatgataacctttaagcaagctattgaatttttggaaacagaaattaaaaaaaaaatctgaaaagttcttaagtttaatctttggttaataatgaagtggagaacgc

SEQ ID NO: 89541 - protein, 452 aa, Arabidopsis thaliana
  peptide (1)..(452): Ceres Seq. ID no. 12719462
SYDEEVSLVLLQRVENSDGLTMWRRSVVYRFSSRISVSSSLPNPRLIPWSRELCAVNSFSQPPVSTESTAKLGITGVRSDANRVFATATAAATATATTGEISSRVAALAGLGHHYARCYWELSKAKLSMLVVATSGTGYILGTGNAAISFPGLCYTCAGTMMIAASANSLNQIFEISNDSKMKRTMLRPLPSGRISVPHAVAWATIAGASGACLLASKTNMLAAGLASANLVLYAFVYTPLKQLHPINTWVGAVVGAIPPLLGWAAASGQISYNSMILPAALYFWQIPHFMALAHLCRNDYAAGGYKMLSLFDPSGKRIAAVALRNCFYMIPLGFIAYDWGLTSSWFCLESTLLTLAIAATAFSFYRDRTMHKARKMFHASLLFLPVFMSGLLLHRVSNDNQQQLVEEAGLTNSVSGEVKTQRRKKRVAQPPVAYASAAPFPFLPAPSFYSP

SEQ ID NO: 89542 - protein, 431 aa, Arabidopsis thaliana
  peptide (1)..(431): Ceres Seq. ID no. 12719463
MWRRSVVYRFSSRISVSSSLPNPRLIPWSRELCAVNSFSQPPVSTESTAKLGITGVRSDANRVFATATAAATATATTGEISSRVAALAGLGHHYARCYWELSKAKLSMLVVATSGTGYILGTGNAAISFPGLCYTCAGTMMIAASANSLNQIFEISNDSKMKRTMLRPLPSGRISVPHAVAWATIAGASGACLLASKTNMLAAGLASANLVLYAFVYTPLKQLHPINTWVGAVVGAIPPLLGWAAASGQISYNSMILPAALYFWQIPHFMALAHLCRNDYAAGGYKMLSLFDPSGKRIAAVALRNCFYMIPLGFIAYDWGLTSSWFCLESTLLTLAIAATAFSFYRDRTMHKARKMFHASLLFLPVFMSGLLLHRVSNDNQQQLVEEAGLTNSVSGEVKTQRRKKRVAQPPVAYASAAPFPFLPAPSFYSP

SEQ ID NO: 89543 - protein, 324 aa, Arabidopsis thaliana
  peptide (1)..(324): Ceres Seq. ID no. 12719464
MLVVATSGTGYILGTGNAAISFPGLCYTCAGTMMIAASANSLNQIFEISNDSKMKRTMLRPLPSGRISVPHAVAWATIAGASGACLLASKTNMLAAGLASANLVLYAFVYTPLKQLHPINTWVGAVVGAIPPLLGWAAASGQISYNSMILPAALYFWQIPHFMALAHLCRNDYAAGGYKMLSLFDPSGKRIAAVALRNCFYMIPLGFIAYDWGLTSSWFCLESTLLTLAIAATAFSFYRDRTMHKARKMFHASLLFLPVFMSGLLLHRVSNDNQQQLVEEAGLTNSVSGEVKTQRRKKRVAQPPVAYASAAPFPFLPAPSFYSP

SEQ ID NO: 89544 - DNA, 954 bp, Arabidopsis thaliana
  misc_feature (1)..(954): Ceres Seq. ID no. 12719504
  misc_feature (1)..(954): Ortholog of  Ceres SEQ ID NO 14316095 as cited in SEQ ID NO 52477
atggctaattcctcctccttctccccctctaccaccgtaacagatttaatctccaccgtccatgacgacatcatagagtctcacatcttgacacgtctcgacggcgcaaccttagcatccgtctcttgcgcctcctcacatcttcatcatctcgcttccaatgagatcctctggtccaaaatctgccgatccacgtggccttcttgctccggtggttctcgttctttcttctccgacgcttattctatggtggaaaccgccggtacagtctctgatctcgaccgtccgtttccggaattgatctccgccgtggatcttcactacagagggaagttgatttttagtagagtcgtgaagacggagactacgacggcgtggtttaagagttcgccgttgaggattgatctggtggatacaaaggatacggtggcgacgccgattaagagaagacagaggacggaagacacgtgtcgtgatctagagaaggatttgactttgagctggatcgtgattgatccgatcgggaaacgagcggcgaatatttcgagtcaccggccggtgtcggtgcagaggaactggataagcggagaagtggaggcgcaattcgcgacggtggtgggggcggtggagtgtgtgatcacggtggtcacgtgcggtgaggaggagatgcacgtgagggaagtgagtctcaaggtagagaagatggagggaacgcatttaaacgggagggacagtttggttattttaaggagtgtcatggagggtaaaagggtaaatggaagtaggagggaagtagaatcgaagaagagacacgaagagtttatggagaagaagagagagatgaaggagaagaagatgagggtagaatcggtatttgacattttgactgtagcttttggtattttaggctttgtgttgcttgttgtgttttgtctttggagaacctctatatga

SEQ ID NO: 89545 - protein, 317 aa, Arabidopsis thaliana
  peptide (1)..(317): Ceres Seq. ID no. 12719505
MANSSSFSPSTTVTDLISTVHDDIIESHILTRLDGATLASVSCASSHLHHLASNEILWSKICRSTWPSCSGGSRSFFSDAYSMVETAGTVSDLDRPFPELISAVDLHYRGKLIFSRVVKTETTTAWFKSSPLRIDLVDTKDTVATPIKRRQRTEDTCRDLEKDLTLSWIVIDPIGKRAANISSHRPVSVQRNWISGEVEAQFATVVGAVECVITVVTCGEEEMHVREVSLKVEKMEGTHLNGRDSLVILRSVMEGKRVNGSRREVESKKRHEEFMEKKREMKEKKMRVESVFDILTVAFGILGFVLLVVFCLWRTSI

SEQ ID NO: 89546 - protein, 235 aa, Arabidopsis thaliana
  peptide (1)..(235): Ceres Seq. ID no. 12719506
MVETAGTVSDLDRPFPELISAVDLHYRGKLIFSRVVKTETTTAWFKSSPLRIDLVDTKDTVATPIKRRQRTEDTCRDLEKDLTLSWIVIDPIGKRAANISSHRPVSVQRNWISGEVEAQFATVVGAVECVITVVTCGEEEMHVREVSLKVEKMEGTHLNGRDSLVILRSVMEGKRVNGSRREVESKKRHEEFMEKKREMKEKKMRVESVFDILTVAFGILGFVLLVVFCLWRTSI

SEQ ID NO: 89547 - DNA, 1029 bp, Arabidopsis thaliana
  misc_feature (1)..(1029): Ceres Seq. ID no. 12719513
  misc_feature (1)..(1029): Ortholog of  Ceres SEQ ID NO 14306355 as cited in SEQ ID NO 1268
  misc_feature (1)..(1029): Ortholog of  Ceres SEQ ID NO 14314070 as cited in SEQ ID NO 56946
  misc_feature (1)..(1029): Ortholog of  Ceres SEQ ID NO 13624427 as cited in SEQ ID NO 0
acaactaaatcttaagtagaaagagtgaaacatggctaatcacaaaaatctcttctttctatgtttcttaataggtttagggttatgttctgctagacgagcactactctcctcctctgaatccgaggctgaagtcgctgcctatggcgtgaatagtggtttaagtgctggtcttggtgttggtattggtggtggtcctggaggaggatctggttacggaggtggaagcggtgaaggcggtggagctggtgggcatggcgagggacatattggtgggggcggaggtggtggacatggtggtggtgctggcggaggaggaggtggtggccctggaggaggctacggaggtggaagcggtgaaggtggtggagctggatacggaggcggagaagctggtgggcatggcggaggtggaggaggcggagcaggcggcggtggaggtggtggtggtggtgcacatggtggaggatacggtggtggacaaggtgctggtgctggaggaggatatggaggtggaggtgccgggggacatggaggtggtggaggcggtggaaatggtgggggtggaggaggaggttctggcgaaggaggagctcatggtggtggttacggagcaggaggtggagctggagagggatacggtggtggtgctggagctggtggacatggtggtggaggaggaggcggtggtggttccggaggtggaggaggaggaggtggaggttatgctgctgcttctggatacggtcacggtgggggtgctggtggtggagaaggaagcggtggctatgtaccatgaaaaattatctatatggagtgtaacggcaattgagtgaagtgtcatatctcgtaagggactatatagtttcacgatttatatgtggcaataaatagagtaatccttcgtataataagccgtagaaaggcggctattgttgaagtttttaaattgtaccacgaccaatattgttgtaagctactactacgtgtgtatcaagtttttataaatggaaatcatagttgttccta

SEQ ID NO: 89548 - protein, 255 aa, Arabidopsis thaliana
  peptide (1)..(255): Ceres Seq. ID no. 12719514
MANHKNLFFLCFLIGLGLCSARRALLSSSESEAEVAAYGVNSGLSAGLGVGIGGGPGGGSGYGGGSGEGGGAGGHGEGHIGGGGGGGHGGGAGGGGGGGPGGGYGGGSGEGGGAGYGGGEAGGHGGGGGGGAGGGGGGGGGAHGGGYGGGQGAGAGGGYGGGGAGGHGGGGGGGNGGGGGGGSGEGGAHGGGYGAGGGAGEGYGGGAGAGGHGGGGGGGGGSGGGGGGGGGYAAASGYGHGGGAGGGEGSGGYVP

SEQ ID NO: 89549 - protein, 193 aa, Arabidopsis thaliana
  peptide (1)..(193): Ceres Seq. ID no. 12719515
MARDILVGAEVVDMVVVLAEEEVVALEEATEVEAVKVVELDTEAEKLVGMAEVEEAEQAAVEVVVVVHMVEDTVVDKVLVLEEDMEVEVPGDMEVVEAVEMVGVEEEVLAKEELMVVVTEQEVELERDTVVVLELVDMVVEEEAVVVPEVEEEEVEVMLLLLDTVTVGVLVVEKEAVAMYHEKLSIWSVTAIE

SEQ ID NO: 89550 - protein, 180 aa, Arabidopsis thaliana
  peptide (1)..(180): Ceres Seq. ID no. 12719516
MVVVLAEEEVVALEEATEVEAVKVVELDTEAEKLVGMAEVEEAEQAAVEVVVVVHMVEDTVVDKVLVLEEDMEVEVPGDMEVVEAVEMVGVEEEVLAKEELMVVVTEQEVELERDTVVVLELVDMVVEEEAVVVPEVEEEEVEVMLLLLDTVTVGVLVVEKEAVAMYHEKLSIWSVTAIE

SEQ ID NO: 89551 - DNA, 2850 bp, Arabidopsis thaliana
  misc_feature (1)..(2850): Ceres Seq. ID no. 12719528
  misc_feature (1)..(2850): Ortholog of  Ceres SEQ ID NO 14303959 as cited in SEQ ID NO 53709
atggaatcctttgcaggttcttgtgaaattgttgaggagaaggatgcggtaaggttagccaaacattctagcagatattgtatgtcacctttgggatcaagtaaagatatggagcagcgtcctgcattgaagtcagggtaccaaggttctatggagtatgacattgatcagcttttccagtctataactataaaaccatcacctagaagagtgatgggctcttctttccatcatcttgagacgagcgcaagtgctggtacgagcaggagcacaagcccttcaaataaaggcgctatgaaaaagccctttcccatgggaacccctcgatcaccaagagttggtccctctgattcaatatctctgaagcaggctctgagagatctttgcatctccaaggcatcagaaatggcttcccagaaacgtttatcaaaatctgcagctgcatctccgagggtttctgaagcagacaggataaagactctttacagacaagttttgaatgaatctgctggcaagcctgggcttcctgtggacaagggtaaaagcttggttgaaatatctttgacgccggtagtcgatatacccagctcctcccagagtgtacctcagcggtatgatgtccttgagacagagccatctaacttcatttctgaaccatctcaggctgaaatccttctccacgtacttggaaatgggtcgggaataaagacagtgggatatggaatgctggagactgtatcactgtgtaaatccaacaaatctggatcttgtctcagttctggcagtggagattatgagatagagatagatgaaaatcatacatctcctcctcatatggtcattgaagatcaattagtggaaatcgacaaacatgttacctcgctgccttcttgttctggcagcaaagttgatactgaagagctagacaagagcatcgtctcatcagctagagtgaaaagtgagccaacagctttgagctcagggttaaaaggaaagttggataactttcctggttcaggaacagagaagagcaaactggtaagcaaggtgacaagaaatatcccacgtcccaaaccgcggccgaagaagaagatattgcttaaaaagaagctaaaaatcgttgtaaattctgctacaaaaatggttgaggaagtcgatacttccttagagcctagtgcaagtcaacttctgtgccagaagtgccactgtgcggtaaagagcaccagcactgaaaaccacccgccctcgaatactagtcatactactgataaaaatgtcagtatagaagcagatcaagaatcactcgcaagcccgcgtctcattcgcattgtgaagtgtaataaagaggccagcaagggttcctcggattcttgtgaggttagtgatagcggtgaagctgtcattgtcatgaaacaagaagtctctccaagcaattatagtggaaaaggtgatgcagatgaacagataagagcgaatccaacttccagtgaaaaatttgatttctcgttgagctcaaagaatagcctaggggactatagcagcagcacaagcatgagtgaggagagcaatctgagcaggtttagctgtggcaataaacctcacatgtctatggatgtgagatgggaagcagttaagcatgtaaagttgcagtatggctctttaggactgcgacatttcaaccttttgaaaaagcttggttgtggagatattggaactgtctatcttgctgagctggttggtacaaactgcctgtttgccatcaaggtcatggacaacgagttcttggcccgaaggaaaaagacaccaagagcacaggcagaacgggcaatccttaaaatgttggaccatccttttctgcctaccttgtatgcgcaatttacttcagataatttatcgtgtctggtgatggagtattgtcctggtggtgatcttcatgtcctaaggcagaaacagctcagcaggtgtttctccgaacccgcaactaggttctatgtagcagaaatcctccttgcgctggagtacttacacatgcttggtgttatataccgagatttgaaaccagagaacattctagtccgagaagatggtcacatcatgcttacagattttgacctctcactcagatgtgcggtgaacccgactcttctcagatcaacttctccacccgagaaagatcccgcaaggatgtccggtccatacagcacatcgaattgcatacaacctctatgtattgaaccatcatgtcgggtcccatgtttcagccctaggctcttatcaacccaagcaagaaaccaaaaaccaagaaaaccgaaaaggcctgatcttttgacacagcagttcagatcattgcctcagcttgtggctgaaccaaccgaagcaagatcaaattcgtttgtgggaacgcacgagtacttggccccggagatcattaaaggagaaggacatggtgctgcagtagactggtggacatttggggtccttctctatgagcttttgtacgggaagacacctttcaaaggttatgacaatgaggagacactgtccaatgttgtataccagaacctcaagtttcctgatagcccgctcgtgagcttccaggcaaaggagttgatcagaaggctgctggtgaaggatccagagagtcgtcttgggtcagaaaaaggagctgcagagatcaaaagacatcctttctttgaaggattgaattgggctctcatccgctgcgccataccacctgagctgccagatatctatgacaatggtgccacggaagcgacttctcctgaggggaataataggtatcttgaatgtaaagccatcggagatcatcttgagttcgagttgttttag

SEQ ID NO: 89552 - protein, 949 aa, Arabidopsis thaliana
  peptide (1)..(949): Ceres Seq. ID no. 12719529
MESFAGSCEIVEEKDAVRLAKHSSRYCMSPLGSSKDMEQRPALKSGYQGSMEYDIDQLFQSITIKPSPRRVMGSSFHHLETSASAGTSRSTSPSNKGAMKKPFPMGTPRSPRVGPSDSISLKQALRDLCISKASEMASQKRLSKSAAASPRVSEADRIKTLYRQVLNESAGKPGLPVDKGKSLVEISLTPVVDIPSSSQSVPQRYDVLETEPSNFISEPSQAEILLHVLGNGSGIKTVGYGMLETVSLCKSNKSGSCLSSGSGDYEIEIDENHTSPPHMVIEDQLVEIDKHVTSLPSCSGSKVDTEELDKSIVSSARVKSEPTALSSGLKGKLDNFPGSGTEKSKLVSKVTRNIPRPKPRPKKKILLKKKLKIVVNSATKMVEEVDTSLEPSASQLLCQKCHCAVKSTSTENHPPSNTSHTTDKNVSIEADQESLASPRLIRIVKCNKEASKGSSDSCEVSDSGEAVIVMKQEVSPSNYSGKGDADEQIRANPTSSEKFDFSLSSKNSLGDYSSSTSMSEESNLSRFSCGNKPHMSMDVRWEAVKHVKLQYGSLGLRHFNLLKKLGCGDIGTVYLAELVGTNCLFAIKVMDNEFLARRKKTPRAQAERAILKMLDHPFLPTLYAQFTSDNLSCLVMEYCPGGDLHVLRQKQLSRCFSEPATRFYVAEILLALEYLHMLGVIYRDLKPENILVREDGHIMLTDFDLSLRCAVNPTLLRSTSPPEKDPARMSGPYSTSNCIQPLCIEPSCRVPCFSPRLLSTQARNQKPRKPKRPDLLTQQFRSLPQLVAEPTEARSNSFVGTHEYLAPEIIKGEGHGAAVDWWTFGVLLYELLYGKTPFKGYDNEETLSNVVYQNLKFPDSPLVSFQAKELIRRLLVKDPESRLGSEKGAAEIKRHPFFEGLNWALIRCAIPPELPDIYDNGATEATSPEGNNRYLECKAIGDHLEFELF

SEQ ID NO: 89553 - protein, 922 aa, Arabidopsis thaliana
  peptide (1)..(922): Ceres Seq. ID no. 12719530
MSPLGSSKDMEQRPALKSGYQGSMEYDIDQLFQSITIKPSPRRVMGSSFHHLETSASAGTSRSTSPSNKGAMKKPFPMGTPRSPRVGPSDSISLKQALRDLCISKASEMASQKRLSKSAAASPRVSEADRIKTLYRQVLNESAGKPGLPVDKGKSLVEISLTPVVDIPSSSQSVPQRYDVLETEPSNFISEPSQAEILLHVLGNGSGIKTVGYGMLETVSLCKSNKSGSCLSSGSGDYEIEIDENHTSPPHMVIEDQLVEIDKHVTSLPSCSGSKVDTEELDKSIVSSARVKSEPTALSSGLKGKLDNFPGSGTEKSKLVSKVTRNIPRPKPRPKKKILLKKKLKIVVNSATKMVEEVDTSLEPSASQLLCQKCHCAVKSTSTENHPPSNTSHTTDKNVSIEADQESLASPRLIRIVKCNKEASKGSSDSCEVSDSGEAVIVMKQEVSPSNYSGKGDADEQIRANPTSSEKFDFSLSSKNSLGDYSSSTSMSEESNLSRFSCGNKPHMSMDVRWEAVKHVKLQYGSLGLRHFNLLKKLGCGDIGTVYLAELVGTNCLFAIKVMDNEFLARRKKTPRAQAERAILKMLDHPFLPTLYAQFTSDNLSCLVMEYCPGGDLHVLRQKQLSRCFSEPATRFYVAEILLALEYLHMLGVIYRDLKPENILVREDGHIMLTDFDLSLRCAVNPTLLRSTSPPEKDPARMSGPYSTSNCIQPLCIEPSCRVPCFSPRLLSTQARNQKPRKPKRPDLLTQQFRSLPQLVAEPTEARSNSFVGTHEYLAPEIIKGEGHGAAVDWWTFGVLLYELLYGKTPFKGYDNEETLSNVVYQNLKFPDSPLVSFQAKELIRRLLVKDPESRLGSEKGAAEIKRHPFFEGLNWALIRCAIPPELPDIYDNGATEATSPEGNNRYLECKAIGDHLEFELF

SEQ ID NO: 89554 - protein, 913 aa, Arabidopsis thaliana
  peptide (1)..(913): Ceres Seq. ID no. 12719531
MEQRPALKSGYQGSMEYDIDQLFQSITIKPSPRRVMGSSFHHLETSASAGTSRSTSPSNKGAMKKPFPMGTPRSPRVGPSDSISLKQALRDLCISKASEMASQKRLSKSAAASPRVSEADRIKTLYRQVLNESAGKPGLPVDKGKSLVEISLTPVVDIPSSSQSVPQRYDVLETEPSNFISEPSQAEILLHVLGNGSGIKTVGYGMLETVSLCKSNKSGSCLSSGSGDYEIEIDENHTSPPHMVIEDQLVEIDKHVTSLPSCSGSKVDTEELDKSIVSSARVKSEPTALSSGLKGKLDNFPGSGTEKSKLVSKVTRNIPRPKPRPKKKILLKKKLKIVVNSATKMVEEVDTSLEPSASQLLCQKCHCAVKSTSTENHPPSNTSHTTDKNVSIEADQESLASPRLIRIVKCNKEASKGSSDSCEVSDSGEAVIVMKQEVSPSNYSGKGDADEQIRANPTSSEKFDFSLSSKNSLGDYSSSTSMSEESNLSRFSCGNKPHMSMDVRWEAVKHVKLQYGSLGLRHFNLLKKLGCGDIGTVYLAELVGTNCLFAIKVMDNEFLARRKKTPRAQAERAILKMLDHPFLPTLYAQFTSDNLSCLVMEYCPGGDLHVLRQKQLSRCFSEPATRFYVAEILLALEYLHMLGVIYRDLKPENILVREDGHIMLTDFDLSLRCAVNPTLLRSTSPPEKDPARMSGPYSTSNCIQPLCIEPSCRVPCFSPRLLSTQARNQKPRKPKRPDLLTQQFRSLPQLVAEPTEARSNSFVGTHEYLAPEIIKGEGHGAAVDWWTFGVLLYELLYGKTPFKGYDNEETLSNVVYQNLKFPDSPLVSFQAKELIRRLLVKDPESRLGSEKGAAEIKRHPFFEGLNWALIRCAIPPELPDIYDNGATEATSPEGNNRYLECKAIGDHLEFELF

SEQ ID NO: 89555 - DNA, 1572 bp, Arabidopsis thaliana
  misc_feature (1)..(1572): Ceres Seq. ID no. 12719572
  misc_feature (1)..(1572): Ortholog of  Ceres SEQ ID NO 13584608 as cited in SEQ ID NO 65113
taaaatcgtaaagttctaaagcggtttttcatcaattttcaagcaatcgagaaaaaagcaatggcgtcagacaaacaaaaggcggagagagccgaggttgcggcgaggctagcggctgaggacttgcatgacattaacaaatccggtggtgctgatgtcacaatgtataaggtgacggagagaacaactgaacatccaccggagcaagataggcccggtgtgataggatcagtgttcagggctgtccaaggaacgtatgagcatgcgagagacgctgtagttggaaaaacccacgaagcggctgagtctaccaaagaaggagctcagatagcttcagagaaagcggttggagcaaaggacgcaaccgtcgagaaagctaaggaaaccgctgattatactgcggagaaggtgggtgagtataaagactatacggttgataaagctaaagaggctaaggacacaactgcagagaaggcgaaggagactgctaattatactgcggataaggcggtggaagcaaaggataagacggcggagaagattggtgagtacaaagactatgcggtggataaggcagtagaagctaaagataagacagcggagaaggcgaaggagactgcgaattatacggcggataaggctaaagaggctaaggacaagacggctgagaaggttggtgagtataaggattacacggtggacaaggccgtggaagctagggattacacagcggagaaggctattgaagcaaaggataagacagctgagaagactggagagtataaggactatacggtggagaaggcgacggaggggaaagatgttacggtgagtaagctaggagagctgaaggatagtgccgttgagacagcgaagagagctatgggtttcttgtcggggaagacagaggaggccaaaggaaaagctgtggagaccaaagatactgccaaggaaaacatggagaaagctggagaagtaacaagacaaaagatggaggaaatgagattggaaggtaaagagctcaaagaagaagctggagcaaaagcccaagaggcatctcaaaagactagggagagtactgagtcgggagctcaaaaagccgaagagaccaaagattctgctgccgtgaggggaaatgaagcgaaagggactatttttggtgcattagggaatgtaacggaagcaataaagagcaaactgacaatgccatcagacattgtggaggaaacacgcgcggcacgtgagcatggagggacgggtaggactgtggttgaagtcaaggtcgaggattcaaagccgggtaaggtggcgacttcactgaaggcgtcggatcaaatgaccggtcaaacattcaacgacgttggacggatggatgatgatgctcggaaagataagggaaagctgtgagaatactagaaaaatgacaatgttttttgggccttttgttctggatgaatatctctgttgttttttgggccttttgttttggatacgtctgttatagcagataacgttttctgatagtttctatgtttgtattcttgttttggaataggaaagctttcttcagtt

SEQ ID NO: 89556 - protein, 448 aa, Arabidopsis thaliana
  peptide (1)..(448): Ceres Seq. ID no. 12719573
MASDKQKAERAEVAARLAAEDLHDINKSGGADVTMYKVTERTTEHPPEQDRPGVIGSVFRAVQGTYEHARDAVVGKTHEAAESTKEGAQIASEKAVGAKDATVEKAKETADYTAEKVGEYKDYTVDKAKEAKDTTAEKAKETANYTADKAVEAKDKTAEKIGEYKDYAVDKAVEAKDKTAEKAKETANYTADKAKEAKDKTAEKVGEYKDYTVDKAVEARDYTAEKAIEAKDKTAEKTGEYKDYTVEKATEGKDVTVSKLGELKDSAVETAKRAMGFLSGKTEEAKGKAVETKDTAKENMEKAGEVTRQKMEEMRLEGKELKEEAGAKAQEASQKTRESTESGAQKAEETKDSAAVRGNEAKGTIFGALGNVTEAIKSKLTMPSDIVEETRAAREHGGTGRTVVEVKVEDSKPGKVATSLKASDQMTGQTFNDVGRMDDDARKDKGKL

SEQ ID NO: 89557 - protein, 414 aa, Arabidopsis thaliana
  peptide (1)..(414): Ceres Seq. ID no. 12719574
MYKVTERTTEHPPEQDRPGVIGSVFRAVQGTYEHARDAVVGKTHEAAESTKEGAQIASEKAVGAKDATVEKAKETADYTAEKVGEYKDYTVDKAKEAKDTTAEKAKETANYTADKAVEAKDKTAEKIGEYKDYAVDKAVEAKDKTAEKAKETANYTADKAKEAKDKTAEKVGEYKDYTVDKAVEARDYTAEKAIEAKDKTAEKTGEYKDYTVEKATEGKDVTVSKLGELKDSAVETAKRAMGFLSGKTEEAKGKAVETKDTAKENMEKAGEVTRQKMEEMRLEGKELKEEAGAKAQEASQKTRESTESGAQKAEETKDSAAVRGNEAKGTIFGALGNVTEAIKSKLTMPSDIVEETRAAREHGGTGRTVVEVKVEDSKPGKVATSLKASDQMTGQTFNDVGRMDDDARKDKGKL

SEQ ID NO: 89558 - DNA, 862 bp, Arabidopsis thaliana
  misc_feature (1)..(862): Ceres Seq. ID no. 12719579
  misc_feature (1)..(862): Ortholog of  Ceres SEQ ID NO 15170857 as cited in SEQ ID NO 54658
  misc_feature (1)..(862): Ortholog of  Ceres SEQ ID NO 15180523 as cited in SEQ ID NO 0
atctgctgaataacaacagtgattggctcttctgattagcaagcttcttcttttcgaaatcgcatcactttggctgatcggtggattctacgaaccatgttcaatttctggggatcaaaagaacagcaacaaggacaatctcgtccttctccagaagcttctgcaacaccgtggtattcgccgtctcttgtcacctctcctagctcatcccggcctcaaacctcagggcagattccatcacatgtttcaccaggtgaagccgccggcattattgccattttaaaagacaaaagtgtggatgagcttaggaagcttctctctgacaaggatgcgtatcaacagtttctgcactcgcttgaccaggtcactattcaaaacaatatcagagaagagcttcgcaaagaaacgttacatctagctagagaaaacttggagaaggaaccacagatagtggagctcagaaaccaaaataatccgtacatccgagcttgcgactgctcaagagaagctcaatgagcttgagaatcaaagagaagagatcctcaaattctactctccaggttctcttcttcatagacttcaagatgctatgaaccaggtggatgaagaatcagaggagctgcaacagaagtttatggagaaggatattgacacagctgcatttgtgcagaaatacaaaaagctaagaagcaagtatcatcgacgggctttgattcatctcgctgctaaaacttcatctattggctgaaaacaaacttacacgttttgttttttttgcttccgaccttaattcgatgtgtaagtaaacaaaactggttaaaagtcgagatctatatacgagatcaatatatatcattgtatt

SEQ ID NO: 89559 - protein, 139 aa, Arabidopsis thaliana
  peptide (1)..(139): Ceres Seq. ID no. 12719580
MFNFWGSKEQQQGQSRPSPEASATPWYSPSLVTSPSSSRPQTSGQIPSHVSPGEAAGIIAILKDKSVDELRKLLSDKDAYQQFLHSLDQVTIQNNIREELRKETLHLARENLEKEPQIVELRNQNNPYIRACDCSREAQ

SEQ ID NO: 89560 - DNA, 1506 bp, Arabidopsis thaliana
  misc_feature (1)..(1506): Ceres Seq. ID no. 12719591
  misc_feature (1)..(1506): Ortholog of  Ceres SEQ ID NO 12586556 as cited in SEQ ID NO 64667
  misc_feature (1)..(1506): Ortholog of  Ceres SEQ ID NO 13660894 as cited in SEQ ID NO 67475
atgatttggagttcagattcatgcttcaaatccaggaaacaccaatgtcttatcttcctcaagctatgttcctcaattaaacaccttctacagatccatggtcaaatccatctctcctctctccaaaatgacagctttatcatcagcgagcttgtacgggtttcatcactatccctcgccaaagaccttgcctttgcgcgaacccttctgcttcactcttcagattcgactccttctacttggaatatgctcagtagaggctattcttcaagtgattctcctgtggaatcgatttgggtttactctgagatgaagagacgaggaatcaaacctaataagctcacttttccttttcttctcaaggcttgtgcttcgtttttaggtctcactgctgggagacagattcaagttgaggttttgaaacatgggtttgattttgatgtatatgttgggaacaatttgatccatctttatggtacttgtaagaaaacttctgatgccaggaaggtgttcgacgaaatgactgagagaaatgttgtttcttggaactcgattatgactgctcttgttgagaatggtaagttaaatttggtgtttgagtgtttttgtgagatgattggtaagcggttttgtccagatgagacgacaatggtggttttgctttcggcttgtggcggtaacttgagcttggggaaattggtgcattcacaggtgatggtaagagagttagagttaaactgtagactaggtactgcacttgtagacatgtatgcaaaatcaggtggattagagtatgctaggttagttttcgaaagaatggttgacaaaaatgtttggacttggagtgccatgattgtaggattagcacaatatggatttgcagaagaagcccttcaactattctcgaagatgatgaaagaatcatcggtgagaccaaactacgtaacatttctcggtgttttatgcgcttgtagccacacgggattggtggatgacgggtacaaatatttccacgaaatggagaaaatacacaagatcaaaccaatgatgattcactacggagcaatggtagatatcttgggacgtgcaggtcgactaaacgaggcgtatgacttcataaagaaaatgccttttgagcctgatgcggttgtttggaggactctactctccgcttgtagtatccatcacgatgaagatgatgagggaattggtgagaaagtaaagaagagattgattgagttagaaccaaagaggagtgggaatttggtgattgtggcgaataggtttgcggaagcgaggatgtgggctgaggcagcagaagttaggagagtaatgaaggaaactaagatgaagaagatcgccggagagagttgtctagagctaggagggtcgtttcatagattcttctcagggtatgatcctcgttctgaatatgtatccatctatgaattattagatttgttcaagtttcagttgacatgtgactatcgtttggtgtccgaatga

SEQ ID NO: 89561 - protein, 501 aa, Arabidopsis thaliana
  peptide (1)..(501): Ceres Seq. ID no. 12719592
MIWSSDSCFKSRKHQCLIFLKLCSSIKHLLQIHGQIHLSSLQNDSFIISELVRVSSLSLAKDLAFARTLLLHSSDSTPSTWNMLSRGYSSSDSPVESIWVYSEMKRRGIKPNKLTFPFLLKACASFLGLTAGRQIQVEVLKHGFDFDVYVGNNLIHLYGTCKKTSDARKVFDEMTERNVVSWNSIMTALVENGKLNLVFECFCEMIGKRFCPDETTMVVLLSACGGNLSLGKLVHSQVMVRELELNCRLGTALVDMYAKSGGLEYARLVFERMVDKNVWTWSAMIVGLAQYGFAEEALQLFSKMMKESSVRPNYVTFLGVLCACSHTGLVDDGYKYFHEMEKIHKIKPMMIHYGAMVDILGRAGRLNEAYDFIKKMPFEPDAVVWRTLLSACSIHHDEDDEGIGEKVKKRLIELEPKRSGNLVIVANRFAEARMWAEAAEVRRVMKETKMKKIAGESCLELGGSFHRFFSGYDPRSEYVSIYELLDLFKFQLTCDYRLVSE

SEQ ID NO: 89562 - protein, 419 aa, Arabidopsis thaliana
  peptide (1)..(419): Ceres Seq. ID no. 12719593
MLSRGYSSSDSPVESIWVYSEMKRRGIKPNKLTFPFLLKACASFLGLTAGRQIQVEVLKHGFDFDVYVGNNLIHLYGTCKKTSDARKVFDEMTERNVVSWNSIMTALVENGKLNLVFECFCEMIGKRFCPDETTMVVLLSACGGNLSLGKLVHSQVMVRELELNCRLGTALVDMYAKSGGLEYARLVFERMVDKNVWTWSAMIVGLAQYGFAEEALQLFSKMMKESSVRPNYVTFLGVLCACSHTGLVDDGYKYFHEMEKIHKIKPMMIHYGAMVDILGRAGRLNEAYDFIKKMPFEPDAVVWRTLLSACSIHHDEDDEGIGEKVKKRLIELEPKRSGNLVIVANRFAEARMWAEAAEVRRVMKETKMKKIAGESCLELGGSFHRFFSGYDPRSEYVSIYELLDLFKFQLTCDYRLVSE

SEQ ID NO: 89563 - protein, 398 aa, Arabidopsis thaliana
  peptide (1)..(398): Ceres Seq. ID no. 12719594
MKRRGIKPNKLTFPFLLKACASFLGLTAGRQIQVEVLKHGFDFDVYVGNNLIHLYGTCKKTSDARKVFDEMTERNVVSWNSIMTALVENGKLNLVFECFCEMIGKRFCPDETTMVVLLSACGGNLSLGKLVHSQVMVRELELNCRLGTALVDMYAKSGGLEYARLVFERMVDKNVWTWSAMIVGLAQYGFAEEALQLFSKMMKESSVRPNYVTFLGVLCACSHTGLVDDGYKYFHEMEKIHKIKPMMIHYGAMVDILGRAGRLNEAYDFIKKMPFEPDAVVWRTLLSACSIHHDEDDEGIGEKVKKRLIELEPKRSGNLVIVANRFAEARMWAEAAEVRRVMKETKMKKIAGESCLELGGSFHRFFSGYDPRSEYVSIYELLDLFKFQLTCDYRLVSE

SEQ ID NO: 89564 - DNA, 1476 bp, Arabidopsis thaliana
  misc_feature (1)..(1476): Ceres Seq. ID no. 12719595
  misc_feature (1)..(1476): Ortholog of  Ceres SEQ ID NO 13594345 as cited in SEQ ID NO 58043
  misc_feature (1)..(1476): Ortholog of  Ceres SEQ ID NO 14314755 as cited in SEQ ID NO 59919
  misc_feature (1)..(1476): Ortholog of  Ceres SEQ ID NO 13597574 as cited in SEQ ID NO 64677
  misc_feature (1)..(1476): Ortholog of  Ceres SEQ ID NO 13597678 as cited in SEQ ID NO 65375
  misc_feature (1)..(1476): Ortholog of  Ceres SEQ ID NO 13662880 as cited in SEQ ID NO 65422
  misc_feature (1)..(1476): Ortholog of  Ceres SEQ ID NO 12779098 as cited in SEQ ID NO 67698
  misc_feature (1)..(1476): Ortholog of  Ceres SEQ ID NO 13596180 as cited in SEQ ID NO 67941
  misc_feature (1)..(1476): Ortholog of  Ceres SEQ ID NO 13591190 as cited in SEQ ID NO 68044
  misc_feature (1)..(1476): Ortholog of  Ceres SEQ ID NO 13595961 as cited in SEQ ID NO 68223
  misc_feature (1)..(1476): Ortholog of  Ceres SEQ ID NO 13596089 as cited in SEQ ID NO 68373
atggcatcggaatttcgtcctcctcttcattttgttctcttccctttcatggctcaaggccacatgatcccaatggtagatattgcaaggctcctggctcagcgcggggtgactataaccattgtcactacacctcaaaacgcaggccggttcaagaacgttcttagccgggctatccaatccggcttgcccatcaatctcgtgcaagtaaagtttccatctcaagaatcgggttcaccggaaggacaggagaatttggacttgctcgattcattgggggcttcattaaccttcttcaaagcatttagcctgctcgaggaaccagtcgagaagctcttgaaagagattcaacctaggccaaactgcataatcgctgacatgtgtttgccttatacaaacagaattgccaagaatcttggtataccaaaaatcatctttcatggcatgtgttgcttcaatcttctttgtacgcacataatgcaccaaaaccacgagttcttggaaactatagagtctgacaaggaatacttccccattcctaatttccctgacagagttgagttcacaaaatctcagcttccaatggtattagttgctggagattggaaagacttccttgacggaatgacagaaggggataacacttcttatggtgtgattgttaacacgtttgaagagctcgagccagcttatgttagagactacaagaaggttaaagcgggtaagatatggagcatcggaccggtttccttgtgcaacaagttaggagaagaccaagctgagaggggaaacaaggcggacattgatcaagacgagtgtattaaatggcttgattctaaagaagaagggtcggtgctatatgtttgccttggaagtatatgcaatcttcctctgtctcagctcaaagagctcggcttaggcctcgaggaatcccaaagacctttcatttgggtcataagaggttgggagaagtataacgagttacttgaatggatctcagagagcggttataaggaaagaatcaaagaaagaggccttctcataacaggatggtcgcctcaaatgcttatccttacacatcctgccgttggaggattcttgacacattgtggatggaactctactcttgaaggaatcacttcaggcgttccattactcacgtggccactgtttggagaccaattctgcaatgagaaattggcggtgcagatactaaaagccggtgtgagagctggggttgaagagtccatgagatggggagaagaggagaaaataggagtactggtggataaagaaggagtaaagaaggcagtggaggaattgatgggtgatagtaatgatgctaaggagagaagaaaaagagtgaaagagcttggagaattagctcacaaggctgtggaagaaggaggctcttctcattccaacatcacattcttgctacaagacataatgcaattagaacaacccaagaaatga

SEQ ID NO: 89565 - protein, 491 aa, Arabidopsis thaliana
  peptide (1)..(491): Ceres Seq. ID no. 12719596
MASEFRPPLHFVLFPFMAQGHMIPMVDIARLLAQRGVTITIVTTPQNAGRFKNVLSRAIQSGLPINLVQVKFPSQESGSPEGQENLDLLDSLGASLTFFKAFSLLEEPVEKLLKEIQPRPNCIIADMCLPYTNRIAKNLGIPKIIFHGMCCFNLLCTHIMHQNHEFLETIESDKEYFPIPNFPDRVEFTKSQLPMVLVAGDWKDFLDGMTEGDNTSYGVIVNTFEELEPAYVRDYKKVKAGKIWSIGPVSLCNKLGEDQAERGNKADIDQDECIKWLDSKEEGSVLYVCLGSICNLPLSQLKELGLGLEESQRPFIWVIRGWEKYNELLEWISESGYKERIKERGLLITGWSPQMLILTHPAVGGFLTHCGWNSTLEGITSGVPLLTWPLFGDQFCNEKLAVQILKAGVRAGVEESMRWGEEEKIGVLVDKEGVKKAVEELMGDSNDAKERRKRVKELGELAHKAVEEGGSSHSNITFLLQDIMQLEQPKK

SEQ ID NO: 89566 - protein, 475 aa, Arabidopsis thaliana
  peptide (1)..(475): Ceres Seq. ID no. 12719597
MAQGHMIPMVDIARLLAQRGVTITIVTTPQNAGRFKNVLSRAIQSGLPINLVQVKFPSQESGSPEGQENLDLLDSLGASLTFFKAFSLLEEPVEKLLKEIQPRPNCIIADMCLPYTNRIAKNLGIPKIIFHGMCCFNLLCTHIMHQNHEFLETIESDKEYFPIPNFPDRVEFTKSQLPMVLVAGDWKDFLDGMTEGDNTSYGVIVNTFEELEPAYVRDYKKVKAGKIWSIGPVSLCNKLGEDQAERGNKADIDQDECIKWLDSKEEGSVLYVCLGSICNLPLSQLKELGLGLEESQRPFIWVIRGWEKYNELLEWISESGYKERIKERGLLITGWSPQMLILTHPAVGGFLTHCGWNSTLEGITSGVPLLTWPLFGDQFCNEKLAVQILKAGVRAGVEESMRWGEEEKIGVLVDKEGVKKAVEELMGDSNDAKERRKRVKELGELAHKAVEEGGSSHSNITFLLQDIMQLEQPKK

SEQ ID NO: 89567 - protein, 470 aa, Arabidopsis thaliana
  peptide (1)..(470): Ceres Seq. ID no. 12719598
MIPMVDIARLLAQRGVTITIVTTPQNAGRFKNVLSRAIQSGLPINLVQVKFPSQESGSPEGQENLDLLDSLGASLTFFKAFSLLEEPVEKLLKEIQPRPNCIIADMCLPYTNRIAKNLGIPKIIFHGMCCFNLLCTHIMHQNHEFLETIESDKEYFPIPNFPDRVEFTKSQLPMVLVAGDWKDFLDGMTEGDNTSYGVIVNTFEELEPAYVRDYKKVKAGKIWSIGPVSLCNKLGEDQAERGNKADIDQDECIKWLDSKEEGSVLYVCLGSICNLPLSQLKELGLGLEESQRPFIWVIRGWEKYNELLEWISESGYKERIKERGLLITGWSPQMLILTHPAVGGFLTHCGWNSTLEGITSGVPLLTWPLFGDQFCNEKLAVQILKAGVRAGVEESMRWGEEEKIGVLVDKEGVKKAVEELMGDSNDAKERRKRVKELGELAHKAVEEGGSSHSNITFLLQDIMQLEQPKK

SEQ ID NO: 89568 - DNA, 1663 bp, Arabidopsis thaliana
  misc_feature (1)..(1663): Ceres Seq. ID no. 12719603
  misc_feature (1)..(1663): Ortholog of  Ceres SEQ ID NO 13594345 as cited in SEQ ID NO 58043
  misc_feature (1)..(1663): Ortholog of  Ceres SEQ ID NO 14314755 as cited in SEQ ID NO 59919
  misc_feature (1)..(1663): Ortholog of  Ceres SEQ ID NO 13597574 as cited in SEQ ID NO 64677
  misc_feature (1)..(1663): Ortholog of  Ceres SEQ ID NO 13597843 as cited in SEQ ID NO 64850
  misc_feature (1)..(1663): Ortholog of  Ceres SEQ ID NO 13597678 as cited in SEQ ID NO 65375
  misc_feature (1)..(1663): Ortholog of  Ceres SEQ ID NO 13662880 as cited in SEQ ID NO 65422
  misc_feature (1)..(1663): Ortholog of  Ceres SEQ ID NO 12779098 as cited in SEQ ID NO 67698
  misc_feature (1)..(1663): Ortholog of  Ceres SEQ ID NO 13596180 as cited in SEQ ID NO 67941
  misc_feature (1)..(1663): Ortholog of  Ceres SEQ ID NO 13591190 as cited in SEQ ID NO 68044
  misc_feature (1)..(1663): Ortholog of  Ceres SEQ ID NO 13595961 as cited in SEQ ID NO 68223
aaaaacacataacttgagtattcctcattgagtcgttgcaaacggtatggctacggaaaaaacccaccaatttcatccttctcttcactttgtcctcttccctttcatggctcaaggccacatgattcccatgattgatattgcaagactcttggctcagcgtggtgtgaccataacaattgtcacgacacctcacaacgcagcaaggtttaagaatgtcctaaaccgagcgatcgagtctggcttggccatcaacatactgcatgtgaagtttccatatcaagagtttggtttgccagaaggaaaagagaatatagattcgttagactcaacggagttgatggtacctttcttcaaagcggtgaacttgcttgaagatccggtcatgaagctcatggaagagatgaaacctagacctagctgtctaatttctgattggtgtttgccttatacaagcataatcgccaagaacttcaatataccaaagatagttttccacggcatgggttgctttaatcttttgtgtatgcatgttctacgcagaaacttagagatcctagagaatgtaaagtcggatgaagagtatttcttggttcctagttttcctgatagagttgaatttacaaagcttcaacttcctgtgaaagcaaatgcaagtggagattggaaagagataatggatgaaatggtaaaagcagaatacacatcctatggtgtgatcgtcaacacatttcaggagttggagccaccttatgtcaaagactacaaagaggcaatggatggaaaagtatggtccattggacccgtttccttgtgtaacaaggcaggtgcagacaaagctgagaggggaagcaaggccgccattgatcaagatgagtgtcttcaatggcttgattctaaagaagaaggttcggtgctctatgtttgccttggaagtatatgtaatcttcctttgtctcagctcaaggagctggggctaggccttgaggaatctcgaagatcttttatttgggtcataagaggttcggaaaagtataaagaactatttgagtggatgttggagagcggttttgaagaaagaatcaaagagagaggacttctcattaaagggtgggcacctcaagtccttatcctttcacatccttccgttggaggattcctgacacactgtggatggaactcgactctcgaaggaatcacctcaggcattccactgatcacttggccgctgtttggagaccaattctgcaaccaaaaactggtcgttcaagtactaaaagccggtgtaagtgccggggttgaagaagtcatgaaatggggagaagaagataaaataggagtgttagtggataaagaaggagtgaaaaaggctgtggaagaattgatgggtgatagtgatgatgcaaaagagaggagaagaagagtcaaagagcttggagaattagctcacaaagctgtggaaaaaggaggctcttctcattctaacatcacactcttgctacaagacataatgcaactagcacaattcaagaattgagcatatgtcattttatgttcatagaaatttaaacattaaacagtttttgatttctatattggagaaatttaaatcagagcctttgttaaacacgtggataatgaatcagaagaagataaatcagtg

SEQ ID NO: 89569 - protein, 496 aa, Arabidopsis thaliana
  peptide (1)..(496): Ceres Seq. ID no. 12719604
MATEKTHQFHPSLHFVLFPFMAQGHMIPMIDIARLLAQRGVTITIVTTPHNAARFKNVLNRAIESGLAINILHVKFPYQEFGLPEGKENIDSLDSTELMVPFFKAVNLLEDPVMKLMEEMKPRPSCLISDWCLPYTSIIAKNFNIPKIVFHGMGCFNLLCMHVLRRNLEILENVKSDEEYFLVPSFPDRVEFTKLQLPVKANASGDWKEIMDEMVKAEYTSYGVIVNTFQELEPPYVKDYKEAMDGKVWSIGPVSLCNKAGADKAERGSKAAIDQDECLQWLDSKEEGSVLYVCLGSICNLPLSQLKELGLGLEESRRSFIWVIRGSEKYKELFEWMLESGFEERIKERGLLIKGWAPQVLILSHPSVGGFLTHCGWNSTLEGITSGIPLITWPLFGDQFCNQKLVVQVLKAGVSAGVEEVMKWGEEDKIGVLVDKEGVKKAVEELMGDSDDAKERRRRVKELGELAHKAVEKGGSSHSNITLLLQDIMQLAQFKN

SEQ ID NO: 89570 - protein, 476 aa, Arabidopsis thaliana
  peptide (1)..(476): Ceres Seq. ID no. 12719605
MAQGHMIPMIDIARLLAQRGVTITIVTTPHNAARFKNVLNRAIESGLAINILHVKFPYQEFGLPEGKENIDSLDSTELMVPFFKAVNLLEDPVMKLMEEMKPRPSCLISDWCLPYTSIIAKNFNIPKIVFHGMGCFNLLCMHVLRRNLEILENVKSDEEYFLVPSFPDRVEFTKLQLPVKANASGDWKEIMDEMVKAEYTSYGVIVNTFQELEPPYVKDYKEAMDGKVWSIGPVSLCNKAGADKAERGSKAAIDQDECLQWLDSKEEGSVLYVCLGSICNLPLSQLKELGLGLEESRRSFIWVIRGSEKYKELFEWMLESGFEERIKERGLLIKGWAPQVLILSHPSVGGFLTHCGWNSTLEGITSGIPLITWPLFGDQFCNQKLVVQVLKAGVSAGVEEVMKWGEEDKIGVLVDKEGVKKAVEELMGDSDDAKERRRRVKELGELAHKAVEKGGSSHSNITLLLQDIMQLAQFKN

SEQ ID NO: 89571 - protein, 471 aa, Arabidopsis thaliana
  peptide (1)..(471): Ceres Seq. ID no. 12719606
MIPMIDIARLLAQRGVTITIVTTPHNAARFKNVLNRAIESGLAINILHVKFPYQEFGLPEGKENIDSLDSTELMVPFFKAVNLLEDPVMKLMEEMKPRPSCLISDWCLPYTSIIAKNFNIPKIVFHGMGCFNLLCMHVLRRNLEILENVKSDEEYFLVPSFPDRVEFTKLQLPVKANASGDWKEIMDEMVKAEYTSYGVIVNTFQELEPPYVKDYKEAMDGKVWSIGPVSLCNKAGADKAERGSKAAIDQDECLQWLDSKEEGSVLYVCLGSICNLPLSQLKELGLGLEESRRSFIWVIRGSEKYKELFEWMLESGFEERIKERGLLIKGWAPQVLILSHPSVGGFLTHCGWNSTLEGITSGIPLITWPLFGDQFCNQKLVVQVLKAGVSAGVEEVMKWGEEDKIGVLVDKEGVKKAVEELMGDSDDAKERRRRVKELGELAHKAVEKGGSSHSNITLLLQDIMQLAQFKN

SEQ ID NO: 89572 - DNA, 1605 bp, Arabidopsis thaliana
  misc_feature (1)..(1605): Ceres Seq. ID no. 12719611
  misc_feature (1)..(1605): Ortholog of  Ceres SEQ ID NO 13594345 as cited in SEQ ID NO 58043
  misc_feature (1)..(1605): Ortholog of  Ceres SEQ ID NO 14314755 as cited in SEQ ID NO 59919
  misc_feature (1)..(1605): Ortholog of  Ceres SEQ ID NO 13597843 as cited in SEQ ID NO 64850
  misc_feature (1)..(1605): Ortholog of  Ceres SEQ ID NO 13597678 as cited in SEQ ID NO 65375
  misc_feature (1)..(1605): Ortholog of  Ceres SEQ ID NO 13662880 as cited in SEQ ID NO 65422
  misc_feature (1)..(1605): Ortholog of  Ceres SEQ ID NO 12779098 as cited in SEQ ID NO 67698
  misc_feature (1)..(1605): Ortholog of  Ceres SEQ ID NO 13596180 as cited in SEQ ID NO 67941
  misc_feature (1)..(1605): Ortholog of  Ceres SEQ ID NO 13591190 as cited in SEQ ID NO 68044
  misc_feature (1)..(1605): Ortholog of  Ceres SEQ ID NO 13595961 as cited in SEQ ID NO 68223
aagcaaaacttgagagtttcttactaaggttgaatcatggtttccgaaacaaccaaatcttctccacttcactttgttctcttccctttcatggctcaaggccacatgattcccatggttgatattgcaaggctcttggctcagcgtggtgtgatcataacaattgtcacgacgcctcacaatgcagcgaggttcaagaatgtcctaaaccgtgccattgagtctggcttgcccatcaacttagtgcaagtcaagtttccatatctagaagctggtttgcaagaaggacaagagaatatcgattctcttgacacaatggagcggatgatacctttctttaaagcggttaactttctcgaagaaccagtccagaagctcattgaagagatgaaccctcgaccaagctgtctaatttctgatttttgtttgccttatacaagcaaaatcgccaagaagttcaatatcccaaagatcctcttccatggcatgggttgcttttgtcttctgtgtatgcatgttttacgcaagaaccgtgagatcttggacaatttaaagtcagataaggagcttttcactgttcctgattttcctgatagagttgaattcacaagaacgcaagttccggtagaaacatatgttccagctggagactggaaagatatctttgatggtatggtagaagcgaatgagacatcttatggtgtgatcgtcaactcatttcaagagctcgagcctgcttatgccaaagactacaaggaggtaaggtccggtaaagcatggaccattggacccgtttccttgtgcaacaaggtaggagccgacaaagcagagaggggaaacaaatcagacattgatcaagatgagtgccttaaatggctcgattctaagaaacatggctcggtgctttacgtttgtcttggaagtatctgtaatcttcctttgtctcaactcaaggagctgggactaggcctagaggaatcccaaagacctttcatttgggtcataagaggttgggagaagtacaaagagttagttgagtggttctcggaaagcggctttgaagatagaatccaagatagaggacttctcatcaaaggatggtcccctcaaatgcttatcctttcacatccatcagttggagggttcctaacacactgtggttggaactcgactcttgaggggataactgctggtctaccgctacttacatggccgctattcgcagaccaattctgcaatgagaaattggtcgttgaggtactaaaagccggtgtaagatccggggttgaacagcctatgaaatggggagaagaggagaaaataggagtgttggtggataaagaaggagtgaagaaggcagtggaagaattaatgggtgagagtgatgatgcaaaagagagaagaagaagagccaaagagcttggagattcagctcacaaggctgtggaagaaggaggctcttctcattctaacatctctttcttgctacaagacataatggaactggcagaacccaataattgagtatacgtcatctttttaaaggaatttaaaaattaaatagttttgttttctgtatttgtgaaatttaaaacagagtcttag

SEQ ID NO: 89573 - protein, 495 aa, Arabidopsis thaliana
  peptide (1)..(495): Ceres Seq. ID no. 12719612
MVSETTKSSPLHFVLFPFMAQGHMIPMVDIARLLAQRGVIITIVTTPHNAARFKNVLNRAIESGLPINLVQVKFPYLEAGLQEGQENIDSLDTMERMIPFFKAVNFLEEPVQKLIEEMNPRPSCLISDFCLPYTSKIAKKFNIPKILFHGMGCFCLLCMHVLRKNREILDNLKSDKELFTVPDFPDRVEFTRTQVPVETYVPAGDWKDIFDGMVEANETSYGVIVNSFQELEPAYAKDYKEVRSGKAWTIGPVSLCNKVGADKAERGNKSDIDQDECLKWLDSKKHGSVLYVCLGSICNLPLSQLKELGLGLEESQRPFIWVIRGWEKYKELVEWFSESGFEDRIQDRGLLIKGWSPQMLILSHPSVGGFLTHCGWNSTLEGITAGLPLLTWPLFADQFCNEKLVVEVLKAGVRSGVEQPMKWGEEEKIGVLVDKEGVKKAVEELMGESDDAKERRRRAKELGDSAHKAVEEGGSSHSNISFLLQDIMELAEPNN

SEQ ID NO: 89574 - protein, 477 aa, Arabidopsis thaliana
  peptide (1)..(477): Ceres Seq. ID no. 12719613
MAQGHMIPMVDIARLLAQRGVIITIVTTPHNAARFKNVLNRAIESGLPINLVQVKFPYLEAGLQEGQENIDSLDTMERMIPFFKAVNFLEEPVQKLIEEMNPRPSCLISDFCLPYTSKIAKKFNIPKILFHGMGCFCLLCMHVLRKNREILDNLKSDKELFTVPDFPDRVEFTRTQVPVETYVPAGDWKDIFDGMVEANETSYGVIVNSFQELEPAYAKDYKEVRSGKAWTIGPVSLCNKVGADKAERGNKSDIDQDECLKWLDSKKHGSVLYVCLGSICNLPLSQLKELGLGLEESQRPFIWVIRGWEKYKELVEWFSESGFEDRIQDRGLLIKGWSPQMLILSHPSVGGFLTHCGWNSTLEGITAGLPLLTWPLFADQFCNEKLVVEVLKAGVRSGVEQPMKWGEEEKIGVLVDKEGVKKAVEELMGESDDAKERRRRAKELGDSAHKAVEEGGSSHSNISFLLQDIMELAEPNN

SEQ ID NO: 89575 - protein, 472 aa, Arabidopsis thaliana
  peptide (1)..(472): Ceres Seq. ID no. 12719614
MIPMVDIARLLAQRGVIITIVTTPHNAARFKNVLNRAIESGLPINLVQVKFPYLEAGLQEGQENIDSLDTMERMIPFFKAVNFLEEPVQKLIEEMNPRPSCLISDFCLPYTSKIAKKFNIPKILFHGMGCFCLLCMHVLRKNREILDNLKSDKELFTVPDFPDRVEFTRTQVPVETYVPAGDWKDIFDGMVEANETSYGVIVNSFQELEPAYAKDYKEVRSGKAWTIGPVSLCNKVGADKAERGNKSDIDQDECLKWLDSKKHGSVLYVCLGSICNLPLSQLKELGLGLEESQRPFIWVIRGWEKYKELVEWFSESGFEDRIQDRGLLIKGWSPQMLILSHPSVGGFLTHCGWNSTLEGITAGLPLLTWPLFADQFCNEKLVVEVLKAGVRSGVEQPMKWGEEEKIGVLVDKEGVKKAVEELMGESDDAKERRRRAKELGDSAHKAVEEGGSSHSNISFLLQDIMELAEPNN

SEQ ID NO: 89576 - DNA, 926 bp, Arabidopsis thaliana
  misc_feature (1)..(926): Ceres Seq. ID no. 12719626
  misc_feature (1)..(926): Ortholog of  Ceres SEQ ID NO 14315223 as cited in SEQ ID NO 52527
  misc_feature (1)..(926): Ortholog of  Ceres SEQ ID NO 14307085 as cited in SEQ ID NO 54749
atgggtagggctccatgttgtgacaaggcaaatgtgaagagaggtccatggtctcctgaagaagacgcaaagcttaaagattacatcgagaaacaaggaactggtggcaattggattgctctccctcacaaagctggtttaaggagatgtgggaagagttgcagactgagatggttaaattatttgagaccaaacataagacatggagatttcactgaagaagaagacaatattatctacagcctctttgcctccattggaagcaggtggtcagtaatagcagctcacttgcaaggtagaactgataatgacatcaagaactattggaacactaagctcaagaagaagctcatagccaccatggctcctcctccacatcaccacttagccattgctacatcatcatcatcagcatccccatcatcatcatcacattacaacatgatcaatagtcttcttccgtataacccatcaacaaaccaacttctcacacctcatcagggtatcatgatgacaatgatgggccaacaacaacaactattttatcaagaagacatgggcaatttggtaaattctccaaacagaaacaatctcataatgagccatcaagaagacaaccaagagcaaagtacaaacaagggaataatgttgttgagtgatgtaagaagtgggtcgagtacaacaagtacagtaacaagagtgaagatggaacatcgtgatcatgatgatcatcatcatcatcatgaagaagatgagagatcaatgacctcggtagtgatggaagattatggaatggaggagatcaagcaattaataagtagtagttgtacgagtagtaacaatagcttgtggtttgacgaaaacaagacggaggataagttcatgttgtactactgatctcgagtaccaactttgatttaatctcc

SEQ ID NO: 89577 - protein, 298 aa, Arabidopsis thaliana
  peptide (1)..(298): Ceres Seq. ID no. 12719627
MGRAPCCDKANVKRGPWSPEEDAKLKDYIEKQGTGGNWIALPHKAGLRRCGKSCRLRWLNYLRPNIRHGDFTEEEDNIIYSLFASIGSRWSVIAAHLQGRTDNDIKNYWNTKLKKKLIATMAPPPHHHLAIATSSSSASPSSSSHYNMINSLLPYNPSTNQLLTPHQGIMMTMMGQQQQLFYQEDMGNLVNSPNRNNLIMSHQEDNQEQSTNKGIMLLSDVRSGSSTTSTVTRVKMEHRDHDDHHHHHEEDERSMTSVVMEDYGMEEIKQLISSSCTSSNNSLWFDENKTEDKFMLYY

SEQ ID NO: 89578 - protein, 178 aa, Arabidopsis thaliana
  peptide (1)..(178): Ceres Seq. ID no. 12719628
MAPPPHHHLAIATSSSSASPSSSSHYNMINSLLPYNPSTNQLLTPHQGIMMTMMGQQQQLFYQEDMGNLVNSPNRNNLIMSHQEDNQEQSTNKGIMLLSDVRSGSSTTSTVTRVKMEHRDHDDHHHHHEEDERSMTSVVMEDYGMEEIKQLISSSCTSSNNSLWFDENKTEDKFMLYY

SEQ ID NO: 89579 - protein, 151 aa, Arabidopsis thaliana
  peptide (1)..(151): Ceres Seq. ID no. 12719629
MINSLLPYNPSTNQLLTPHQGIMMTMMGQQQQLFYQEDMGNLVNSPNRNNLIMSHQEDNQEQSTNKGIMLLSDVRSGSSTTSTVTRVKMEHRDHDDHHHHHEEDERSMTSVVMEDYGMEEIKQLISSSCTSSNNSLWFDENKTEDKFMLYY

SEQ ID NO: 89580 - DNA, 1522 bp, Arabidopsis thaliana
  misc_feature (1)..(1522): Ceres Seq. ID no. 12719634
  misc_feature (1)..(1522): Ortholog of  Ceres SEQ ID NO 13594345 as cited in SEQ ID NO 58043
  misc_feature (1)..(1522): Ortholog of  Ceres SEQ ID NO 12614112 as cited in SEQ ID NO 60891
  misc_feature (1)..(1522): Ortholog of  Ceres SEQ ID NO 13597574 as cited in SEQ ID NO 64677
  misc_feature (1)..(1522): Ortholog of  Ceres SEQ ID NO 13597678 as cited in SEQ ID NO 65375
  misc_feature (1)..(1522): Ortholog of  Ceres SEQ ID NO 13662880 as cited in SEQ ID NO 65422
  misc_feature (1)..(1522): Ortholog of  Ceres SEQ ID NO 12779098 as cited in SEQ ID NO 67698
  misc_feature (1)..(1522): Ortholog of  Ceres SEQ ID NO 13596180 as cited in SEQ ID NO 67941
  misc_feature (1)..(1522): Ortholog of  Ceres SEQ ID NO 13591190 as cited in SEQ ID NO 68044
  misc_feature (1)..(1522): Ortholog of  Ceres SEQ ID NO 13595961 as cited in SEQ ID NO 68223
aaaacttcaagaaaaaaagattcttcaaaagagcaaaaaaatcaatggagagagcaaagtcgaggaagcctcatatcatgatgataccatacccacttcaaggtcacgttatcccttttgtccacttagccatcaaacttgcttctcatggcttcaccatcactttcgtcaacaccgactccatccaccaccacatctccaccgctcaccaagatgacgccggtgacatcttctccgccgctcgcagctccggccagcacgacatacgttacaccaccgtgagcgacggcttccctttagactttgaccggtcactgaaccatgaccagtttttcgaaggcattctccacgtcttctctgcccacgtggatgatctcatcgccaaactctcccgccgtgatgatcctcccgtgacttgcttgatcgccgacacgttttatgtttggtcatctatgatttgcgacaagcacaaccttgtaaatgtctcgttttggaccgaacctgccttggtcctcaatctctattatcacatggatctcctcatatctaacggtcatttcaaatctcttgataatcgtaaagacgtgatcgattacgtaccaggggttaaagcaatagaaccaaaggacttgatgtcatatcttcaagtaagcgacaaagacgtagacacaaatacagtagtatacagaatattattcaaggcctttaaagacgtcaagagagccgacttcgtcgtatgcaacacggtgcaagagctcgaaccagactctctctcggctctacaagccaaacaaccggtttacgctatcggtccggttttctcaactgattcggtagttcccacaagcttatgggccgagtcagactgtaccgagtggcttaagggccggcccactgggtcagttctctacgtctcgtttggtagctatgcacatgttggtaagaaggagattgttgagatagctcatgggcttttgcttagtgggattagtttcatttgggttttacgtccggatatagttggatccaacgtaccagattttcttccagccgggtttgtggaccaagcccaagatcgaggtcttgtggtccaatggtgctgccagatggaagttatttcaaatccggccgtgggagggtttttcacacattgtggatggaattcaattctagagagcgtttggtgtggtttgcctttgttgtgttatccacttttgacagatcagttcacgaataggaagcttgtggtcgatgattggtgcattgggattaatctttgtgagaagaagacaatcacaagggaccaagtctcagcgaatgttaaaagattgatgaatggagaaacttcaagtgagctaagaaacaatgttgaaaaggttaaacgtcatctcaaagatgcggttacaaccgttggatcttcggagacgaattttaacttgtttgttagtgaggtccgaaatagaatagaaactaaattgtgtaatgtaaatggactagaaataagtccatcaaactaaacaat

SEQ ID NO: 89581 - protein, 504 aa, Arabidopsis thaliana
  peptide (1)..(504): Ceres Seq. ID no. 12719635
NFKKKRFFKRAKKSMERAKSRKPHIMMIPYPLQGHVIPFVHLAIKLASHGFTITFVNTDSIHHHISTAHQDDAGDIFSAARSSGQHDIRYTTVSDGFPLDFDRSLNHDQFFEGILHVFSAHVDDLIAKLSRRDDPPVTCLIADTFYVWSSMICDKHNLVNVSFWTEPALVLNLYYHMDLLISNGHFKSLDNRKDVIDYVPGVKAIEPKDLMSYLQVSDKDVDTNTVVYRILFKAFKDVKRADFVVCNTVQELEPDSLSALQAKQPVYAIGPVFSTDSVVPTSLWAESDCTEWLKGRPTGSVLYVSFGSYAHVGKKEIVEIAHGLLLSGISFIWVLRPDIVGSNVPDFLPAGFVDQAQDRGLVVQWCCQMEVISNPAVGGFFTHCGWNSILESVWCGLPLLCYPLLTDQFTNRKLVVDDWCIGINLCEKKTITRDQVSANVKRLMNGETSSELRNNVEKVKRHLKDAVTTVGSSETNFNLFVSEVRNRIETKLCNVNGLEISPSN

SEQ ID NO: 89582 - protein, 490 aa, Arabidopsis thaliana
  peptide (1)..(490): Ceres Seq. ID no. 12719636
MERAKSRKPHIMMIPYPLQGHVIPFVHLAIKLASHGFTITFVNTDSIHHHISTAHQDDAGDIFSAARSSGQHDIRYTTVSDGFPLDFDRSLNHDQFFEGILHVFSAHVDDLIAKLSRRDDPPVTCLIADTFYVWSSMICDKHNLVNVSFWTEPALVLNLYYHMDLLISNGHFKSLDNRKDVIDYVPGVKAIEPKDLMSYLQVSDKDVDTNTVVYRILFKAFKDVKRADFVVCNTVQELEPDSLSALQAKQPVYAIGPVFSTDSVVPTSLWAESDCTEWLKGRPTGSVLYVSFGSYAHVGKKEIVEIAHGLLLSGISFIWVLRPDIVGSNVPDFLPAGFVDQAQDRGLVVQWCCQMEVISNPAVGGFFTHCGWNSILESVWCGLPLLCYPLLTDQFTNRKLVVDDWCIGINLCEKKTITRDQVSANVKRLMNGETSSELRNNVEKVKRHLKDAVTTVGSSETNFNLFVSEVRNRIETKLCNVNGLEISPSN

SEQ ID NO: 89583 - protein, 479 aa, Arabidopsis thaliana
  peptide (1)..(479): Ceres Seq. ID no. 12719637
MMIPYPLQGHVIPFVHLAIKLASHGFTITFVNTDSIHHHISTAHQDDAGDIFSAARSSGQHDIRYTTVSDGFPLDFDRSLNHDQFFEGILHVFSAHVDDLIAKLSRRDDPPVTCLIADTFYVWSSMICDKHNLVNVSFWTEPALVLNLYYHMDLLISNGHFKSLDNRKDVIDYVPGVKAIEPKDLMSYLQVSDKDVDTNTVVYRILFKAFKDVKRADFVVCNTVQELEPDSLSALQAKQPVYAIGPVFSTDSVVPTSLWAESDCTEWLKGRPTGSVLYVSFGSYAHVGKKEIVEIAHGLLLSGISFIWVLRPDIVGSNVPDFLPAGFVDQAQDRGLVVQWCCQMEVISNPAVGGFFTHCGWNSILESVWCGLPLLCYPLLTDQFTNRKLVVDDWCIGINLCEKKTITRDQVSANVKRLMNGETSSELRNNVEKVKRHLKDAVTTVGSSETNFNLFVSEVRNRIETKLCNVNGLEISPSN

SEQ ID NO: 89584 - DNA, 823 bp, Arabidopsis thaliana
  misc_feature (1)..(823): Ceres Seq. ID no. 12719656
  misc_feature (1)..(823): Ortholog of  Ceres SEQ ID NO 14316118 as cited in SEQ ID NO 52391
  misc_feature (1)..(823): Ortholog of  Ceres SEQ ID NO 15177246 as cited in SEQ ID NO 57731
  misc_feature (1)..(823): Ortholog of  Ceres SEQ ID NO 13664032 as cited in SEQ ID NO 67527
  misc_feature (1)..(823): Ortholog of  Ceres SEQ ID NO 15177573 as cited in SEQ ID NO 0
  misc_feature (1)..(823): Ortholog of  Ceres SEQ ID NO 15179397 as cited in SEQ ID NO 0
ctcttctctcgatctctctccctctctgcctcctctcttcctccaatcaacaaacacctctctgtttcactcccgccctttttcgaattcttctgatggcggagtcgcaggccaagagtcccggaggctgtggaagccatgagagtggtggagatcaaagtcccaggtcgttacatgttcgtgagcaagataggtttcttccgattgctaacataagccgtatcatgaaaagaggtcttcctgctaatgggaaaatcgctaaagatgctaaggagattgtgcaggaatgtgtctctgaattcatcagtttcgtcaccagcgaagcgagtgataaatgtcaaagagagaaaaggaagactattaatggagatgatttgctttgggcaatggctactttaggatttgaagactacatggaacctctcaaggtttacctgatgagatatagagagatggagggtgacacaaagggatcagcaaaaggtggggatccaaatgcaaagaaagatgggcaatcaagccaaaatggccagttctcgcagcttgctcaccaaggtccttatgggaactctcaagctcagcagcatatgatggttccaatgccgggaacagactagtatgagaggagtattcaactttggttatgttccaccaaaagaggttatcttatctgtatattatttgtgttgtaagagttttgctatgcagaacttgtgactataatcatctcattgttttgttttgtttttgtttccttggatttgttctgaatatgtcatcaagtcagtcagtctatttatatatttggtttgttgattatttc

SEQ ID NO: 89585 - protein, 204 aa, Arabidopsis thaliana
  peptide (1)..(204): Ceres Seq. ID no. 12719657
LLSISLPLCLLSSSNQQTPLCFTPALFRILLMAESQAKSPGGCGSHESGGDQSPRSLHVREQDRFLPIANISRIMKRGLPANGKIAKDAKEIVQECVSEFISFVTSEASDKCQREKRKTINGDDLLWAMATLGFEDYMEPLKVYLMRYREMEGDTKGSAKGGDPNAKKDGQSSQNGQFSQLAHQGPYGNSQAQQHMMVPMPGTD

SEQ ID NO: 89586 - protein, 173 aa, Arabidopsis thaliana
  peptide (1)..(173): Ceres Seq. ID no. 12719658
MAESQAKSPGGCGSHESGGDQSPRSLHVREQDRFLPIANISRIMKRGLPANGKIAKDAKEIVQECVSEFISFVTSEASDKCQREKRKTINGDDLLWAMATLGFEDYMEPLKVYLMRYREMEGDTKGSAKGGDPNAKKDGQSSQNGQFSQLAHQGPYGNSQAQQHMMVPMPGTD

SEQ ID NO: 89587 - protein, 130 aa, Arabidopsis thaliana
  peptide (1)..(130): Ceres Seq. ID no. 12719659
MKRGLPANGKIAKDAKEIVQECVSEFISFVTSEASDKCQREKRKTINGDDLLWAMATLGFEDYMEPLKVYLMRYREMEGDTKGSAKGGDPNAKKDGQSSQNGQFSQLAHQGPYGNSQAQQHMMVPMPGTD

SEQ ID NO: 89588 - DNA, 1056 bp, Arabidopsis thaliana
  misc_feature (1)..(1056): Ceres Seq. ID no. 12719664
  misc_feature (1)..(1056): Ortholog of  Ceres SEQ ID NO 13599162 as cited in SEQ ID NO 698
  misc_feature (1)..(1056): Ortholog of  Ceres SEQ ID NO 15180702 as cited in SEQ ID NO 0
atgggatctctagagagatcaaagaagaaagctcaagtatggaagaaagctgtgatccatttctctctatgttttgtaatgggtttcttcactggcttcgctcctgctggtaaggcctcatttttctctaatttcgaaacgacttcttatacttctacaaaatctccgattcctccccaaccttttgaaaacgctacatacacacaacattccctcctcaatagaaccttgatcaattcccaaagccaagctccagctcccgcagagtcgcgagaagctgaaggagaaacaagatctctctccgagaaagaagatgagaatcaagtaaaagtgacaccaagaggactagtgattgttgtaactccaataataactaaagatcgctacaaaaacgttcttcttaggagaatggccaataccttgaggctagttccacctcccttattgtggatagtcgtggaaaaacactcggatggcgaagaaaaatcttcgtctacaatgttaagaaagaccggtatcatgtatagacgtatagtcttcaaggaagatttcacaagcttagaatcagagcttgatcatcaaaggaatctagctttgaggcacattgaacatcacaaattaagcggaatagttcattttgcgggactaaacaacatatatgatcttgattttttcgtcaagatcagagatatcgaggtatttggtacttggccaatggcattgttatcggctaataggaaacgagtggtagtagaagggcctgtttgtgaatcttcacaagtattggggtggcatttgagaaaaattaataacgagacagagacaaagcctccgattcatatatcaagcttcgctttcaatagttccatactttgggaccctgagagatggggtcgtccttcttctgttgaaggcaccaaacaggattcgataaaatatgtgaagcaagtagttttggaggacgatacaaagttgaagggacttccggcacaagattgttccaagattatgctttggcgtctcaaatttcccacaagaacacgtttaagcacctga

SEQ ID NO: 89589 - protein, 351 aa, Arabidopsis thaliana
  peptide (1)..(351): Ceres Seq. ID no. 12719665
MGSLERSKKKAQVWKKAVIHFSLCFVMGFFTGFAPAGKASFFSNFETTSYTSTKSPIPPQPFENATYTQHSLLNRTLINSQSQAPAPAESREAEGETRSLSEKEDENQVKVTPRGLVIVVTPIITKDRYKNVLLRRMANTLRLVPPPLLWIVVEKHSDGEEKSSSTMLRKTGIMYRRIVFKEDFTSLESELDHQRNLALRHIEHHKLSGIVHFAGLNNIYDLDFFVKIRDIEVFGTWPMALLSANRKRVVVEGPVCESSQVLGWHLRKINNETETKPPIHISSFAFNSSILWDPERWGRPSSVEGTKQDSIKYVKQVVLEDDTKLKGLPAQDCSKIMLWRLKFPTRTRLST

SEQ ID NO: 89590 - protein, 325 aa, Arabidopsis thaliana
  peptide (1)..(325): Ceres Seq. ID no. 12719666
MGFFTGFAPAGKASFFSNFETTSYTSTKSPIPPQPFENATYTQHSLLNRTLINSQSQAPAPAESREAEGETRSLSEKEDENQVKVTPRGLVIVVTPIITKDRYKNVLLRRMANTLRLVPPPLLWIVVEKHSDGEEKSSSTMLRKTGIMYRRIVFKEDFTSLESELDHQRNLALRHIEHHKLSGIVHFAGLNNIYDLDFFVKIRDIEVFGTWPMALLSANRKRVVVEGPVCESSQVLGWHLRKINNETETKPPIHISSFAFNSSILWDPERWGRPSSVEGTKQDSIKYVKQVVLEDDTKLKGLPAQDCSKIMLWRLKFPTRTRLST

SEQ ID NO: 89591 - protein, 215 aa, Arabidopsis thaliana
  peptide (1)..(215): Ceres Seq. ID no. 12719667
MANTLRLVPPPLLWIVVEKHSDGEEKSSSTMLRKTGIMYRRIVFKEDFTSLESELDHQRNLALRHIEHHKLSGIVHFAGLNNIYDLDFFVKIRDIEVFGTWPMALLSANRKRVVVEGPVCESSQVLGWHLRKINNETETKPPIHISSFAFNSSILWDPERWGRPSSVEGTKQDSIKYVKQVVLEDDTKLKGLPAQDCSKIMLWRLKFPTRTRLST

SEQ ID NO: 89592 - DNA, 1958 bp, Arabidopsis thaliana
  misc_feature (1)..(1958): Ceres Seq. ID no. 12719672
  misc_feature (1)..(1958): Ortholog of  Ceres SEQ ID NO 13596865 as cited in SEQ ID NO 60644
atcaccaaaaaagaaagcaatttgtcttcaaaacatatttctctctctaaaacctctttttcataaaaggttgcgtcatctatacgaatccatacgtctctttgcttttctccgatcggtcttcttttctcatcgccggaacgctttggtttaatggggcacagacattttcttggttcatcccagttttttgatgatgaacatgatcaaggctggaatcatacacacccagaacatccatattcgagtcaagcaacatctgggaccagtgagaacagatcacatgtttatccagcagaaaacatgttgaatgaaggaatgccagtgtcttctcattggaactcttctccaggaccaaatgcttatactgactcaggtcatagtgtggagagaccacactacaatccgggggtttcggggccgtcccatgatccttccgtgaattcaacagttccaactttctctgctccacatgagaattatgtgacatttgcatcttcttcaagctacaacagccagacatggtcaaatgctagttatgttgatcatcaatctatggaaagtgtgagaggagcacaaaagagaaaacgaccatgtccttcttccatctatgaaatgggtagttcaagccaatatcacggtgacagaactcctgcagacactcatttcccctcggaattgcacttgggaaaatcaataacgcatgatcatgaccctcattacatgccatggcttatgaacccaacttacagaagtaataatctctcgatcaggggagagagctcttcaaggaatgtccggagtcgtcctacacttgattcagagaccagcttaggtagaaataatttgccaagaagcttgagccttgattctcattctacacaccaccacagtgttgatcattatggctcaggtcaatttcctggtcagacatctcacggaaataaagactggaactgtgctagattgtccccagttcttagagatataaatggctttagtccagagacaaataatttccttcctgcaagaagtgttgtcaacagcttatctgttaatacttccggctatcatcaccatgagcttaccggaaacagaaaccctacagtttcccacggggttcctggaacttcaacactatctacaagcagcagccgcttctctcataggtcaacatccacctatagatcttcttcacacggttcgcgatcgggacatgtagcatcttcttctggagacaggtctcatttggtcactgagacttatccgtctaggcatttaaggccaccaccacacatttcatggcgtagcggtgatcggccagggagacgcagaagttcctatgagaggtttcagcctcctttcgatgaagttgctctccacgaacggttttcatctgaggaattcatggttgaagatcgccaaccacaatactacggatccagaaacatgcttgatcaccacagagacatgaggcttgacatcgataacatgagctatgaggaactccttgatcttggagaaaggattgggagtgtcaacactggtctatccgacagcgcaatctccagttgcttgttagcaacaatgtattatccatcatatcaaacagaggagcaaagaaaatgtgcaatctgcctggaggagtacaaggaaaaagaagagttaggggaagttaaggggtgtggtcatgactaccatgggaggtgcatcaagaaatggttgtctatgaagaactcttgccctatttgcaaatcccctgctttacctgatgcttctaagaactcatcataaattataggttatcttttatgtgtgcatgttatattcatttgtctttcgaaaggaagaaaaatatgtgacagaatataacattaagttttcttagtgattaatagttgtaaatagaagaaagtccaggatctttctcaagggttaatatatatgttaattattgg

SEQ ID NO: 89593 - protein, 546 aa, Arabidopsis thaliana
  peptide (1)..(546): Ceres Seq. ID no. 12719673
MGHRHFLGSSQFFDDEHDQGWNHTHPEHPYSSQATSGTSENRSHVYPAENMLNEGMPVSSHWNSSPGPNAYTDSGHSVERPHYNPGVSGPSHDPSVNSTVPTFSAPHENYVTFASSSSYNSQTWSNASYVDHQSMESVRGAQKRKRPCPSSIYEMGSSSQYHGDRTPADTHFPSELHLGKSITHDHDPHYMPWLMNPTYRSNNLSIRGESSSRNVRSRPTLDSETSLGRNNLPRSLSLDSHSTHHHSVDHYGSGQFPGQTSHGNKDWNCARLSPVLRDINGFSPETNNFLPARSVVNSLSVNTSGYHHHELTGNRNPTVSHGVPGTSTLSTSSSRFSHRSTSTYRSSSHGSRSGHVASSSGDRSHLVTETYPSRHLRPPPHISWRSGDRPGRRRSSYERFQPPFDEVALHERFSSEEFMVEDRQPQYYGSRNMLDHHRDMRLDIDNMSYEELLDLGERIGSVNTGLSDSAISSCLLATMYYPSYQTEEQRKCAICLEEYKEKEELGEVKGCGHDYHGRCIKKWLSMKNSCPICKSPALPDASKNSS

SEQ ID NO: 89594 - protein, 496 aa, Arabidopsis thaliana
  peptide (1)..(496): Ceres Seq. ID no. 12719674
MLNEGMPVSSHWNSSPGPNAYTDSGHSVERPHYNPGVSGPSHDPSVNSTVPTFSAPHENYVTFASSSSYNSQTWSNASYVDHQSMESVRGAQKRKRPCPSSIYEMGSSSQYHGDRTPADTHFPSELHLGKSITHDHDPHYMPWLMNPTYRSNNLSIRGESSSRNVRSRPTLDSETSLGRNNLPRSLSLDSHSTHHHSVDHYGSGQFPGQTSHGNKDWNCARLSPVLRDINGFSPETNNFLPARSVVNSLSVNTSGYHHHELTGNRNPTVSHGVPGTSTLSTSSSRFSHRSTSTYRSSSHGSRSGHVASSSGDRSHLVTETYPSRHLRPPPHISWRSGDRPGRRRSSYERFQPPFDEVALHERFSSEEFMVEDRQPQYYGSRNMLDHHRDMRLDIDNMSYEELLDLGERIGSVNTGLSDSAISSCLLATMYYPSYQTEEQRKCAICLEEYKEKEELGEVKGCGHDYHGRCIKKWLSMKNSCPICKSPALPDASKNSS

SEQ ID NO: 89595 - protein, 491 aa, Arabidopsis thaliana
  peptide (1)..(491): Ceres Seq. ID no. 12719675
MPVSSHWNSSPGPNAYTDSGHSVERPHYNPGVSGPSHDPSVNSTVPTFSAPHENYVTFASSSSYNSQTWSNASYVDHQSMESVRGAQKRKRPCPSSIYEMGSSSQYHGDRTPADTHFPSELHLGKSITHDHDPHYMPWLMNPTYRSNNLSIRGESSSRNVRSRPTLDSETSLGRNNLPRSLSLDSHSTHHHSVDHYGSGQFPGQTSHGNKDWNCARLSPVLRDINGFSPETNNFLPARSVVNSLSVNTSGYHHHELTGNRNPTVSHGVPGTSTLSTSSSRFSHRSTSTYRSSSHGSRSGHVASSSGDRSHLVTETYPSRHLRPPPHISWRSGDRPGRRRSSYERFQPPFDEVALHERFSSEEFMVEDRQPQYYGSRNMLDHHRDMRLDIDNMSYEELLDLGERIGSVNTGLSDSAISSCLLATMYYPSYQTEEQRKCAICLEEYKEKEELGEVKGCGHDYHGRCIKKWLSMKNSCPICKSPALPDASKNSS

SEQ ID NO: 89596 - DNA, 1974 bp, Arabidopsis thaliana
  misc_feature (1)..(1974): Ceres Seq. ID no. 12719680
  misc_feature (1)..(1974): Ortholog of  Ceres SEQ ID NO 12586556 as cited in SEQ ID NO 64667
  misc_feature (1)..(1974): Ortholog of  Ceres SEQ ID NO 13660894 as cited in SEQ ID NO 67475
atgaagttgggattcgaaattcaacgagccttgcaaggcttgctaaacaaggcggcggtcgacggcggtgcgtacggtcacctcatccagcacttcacccgtcaccgacttcctctccacgtgcttcagcttcacgcgcgtattgtcgtcttctccatcaagccggacaacttcctcgcgtcaaagctcatcagtttttacactaggcaggatcgtttccgccaagcactccatgtgttcgacgaaattaccgttagaaatgccttctcttacaacgcacttctcatcgcttatacttcgcgtgagatgtatttcgatgctttctcgttgttcttgtcctggattggatcctcttgttactcttccgatgctgccagaccggattctattagcatctcttgtgtgttgaaggcactgtcaggctgtgatgatttctggttgggttcattggctcgacaagttcatgggtttgttatacgaggtggatttgattcagatgtcttcgtgggcaatgggatgataacgtactatacaaagtgtgataacatcgagtctgcgaggaaagtgtttgatgaaatgtctgagagagatgttgtttcgtggaattctatgatttcagggtattctcaaagtgggtcttttgaggactgtaagaagatgtataaagcgatgttagcttgctctgattttaagcctaatggagtcactgtgataagcgtcttccaggcgtgcggacagtcaagcgatcttattttcgggttggaagttcacaagaagatgattgaaaatcatattcagatggatttatccttgtgtaatgctgtgattggtttttatgctaaatgtggtagcttggattatgcaagagcattgtttgatgagatgagtgagaaagattcggttacatacggagctataatttctggatatatggctcatggtcttgtcaaggaagcaatggctttgtttagtgaaatggaaagcattggtctgagtacgtggaatgctatgatttcgggtcttatgcagaataaccatcatgaggaggttataaactcatttagggagatgataagatgtggctcgaggccaaacacggtgaccctttcgagccttcttccttcgttgacatatagttcaaatctgaaagggggtaaggaaatccacgcttttgccatccgtaacggcgctgacaacaatatatatgtcaccacttccattatagataactatgctaaattaggatttctgctaggagctcaaagagtttttgataactgtaaagataggagcttgattgcttggacggcaattataacagcatatgctgttcatggggactctgattctgcttgtagtctttttgaccaaatgcagtgtcttggaactaagccagacgatgtcacactaacagctgttctttcagcttttgcgcactcaggggattcagacatggcgcagcatatatttgattctatgttaactaagtatgacattgagcctggagttgagcactatgcttgtatggtaagtgttcttagccgggctggaaaactttcggatgcaatggaattcatttctaagatgccaattgatccaattgctaaagtttggggtgcattgttgaacggagcctctgttcttggcgatttagagattgctaggttcgcttgtgatcggttgtttgagatggaacctgaaaacacagggaactacactatcatggcgaatttgtacactcaagcagggagatgggaagaagctgaaatggtaaggaataagatgaaaagaatcggattgaagaaaatccccggcaccagctggatcgaaactgagaaaggattacgtagtttcatagcgaaagacagttcgtgtgagagaagcaaagagatgtatgagataatagagggtttggttgagtcaatgagcgacaaagagtatatcaggaaacaagagcttgatgaagcttactga

SEQ ID NO: 89597 - protein, 657 aa, Arabidopsis thaliana
  peptide (1)..(657): Ceres Seq. ID no. 12719681
MKLGFEIQRALQGLLNKAAVDGGAYGHLIQHFTRHRLPLHVLQLHARIVVFSIKPDNFLASKLISFYTRQDRFRQALHVFDEITVRNAFSYNALLIAYTSREMYFDAFSLFLSWIGSSCYSSDAARPDSISISCVLKALSGCDDFWLGSLARQVHGFVIRGGFDSDVFVGNGMITYYTKCDNIESARKVFDEMSERDVVSWNSMISGYSQSGSFEDCKKMYKAMLACSDFKPNGVTVISVFQACGQSSDLIFGLEVHKKMIENHIQMDLSLCNAVIGFYAKCGSLDYARALFDEMSEKDSVTYGAIISGYMAHGLVKEAMALFSEMESIGLSTWNAMISGLMQNNHHEEVINSFREMIRCGSRPNTVTLSSLLPSLTYSSNLKGGKEIHAFAIRNGADNNIYVTTSIIDNYAKLGFLLGAQRVFDNCKDRSLIAWTAIITAYAVHGDSDSACSLFDQMQCLGTKPDDVTLTAVLSAFAHSGDSDMAQHIFDSMLTKYDIEPGVEHYACMVSVLSRAGKLSDAMEFISKMPIDPIAKVWGALLNGASVLGDLEIARFACDRLFEMEPENTGNYTIMANLYTQAGRWEEAEMVRNKMKRIGLKKIPGTSWIETEKGLRSFIAKDSSCERSKEMYEIIEGLVESMSDKEYIRKQELDEAY

SEQ ID NO: 89598 - protein, 555 aa, Arabidopsis thaliana
  peptide (1)..(555): Ceres Seq. ID no. 12719682
MYFDAFSLFLSWIGSSCYSSDAARPDSISISCVLKALSGCDDFWLGSLARQVHGFVIRGGFDSDVFVGNGMITYYTKCDNIESARKVFDEMSERDVVSWNSMISGYSQSGSFEDCKKMYKAMLACSDFKPNGVTVISVFQACGQSSDLIFGLEVHKKMIENHIQMDLSLCNAVIGFYAKCGSLDYARALFDEMSEKDSVTYGAIISGYMAHGLVKEAMALFSEMESIGLSTWNAMISGLMQNNHHEEVINSFREMIRCGSRPNTVTLSSLLPSLTYSSNLKGGKEIHAFAIRNGADNNIYVTTSIIDNYAKLGFLLGAQRVFDNCKDRSLIAWTAIITAYAVHGDSDSACSLFDQMQCLGTKPDDVTLTAVLSAFAHSGDSDMAQHIFDSMLTKYDIEPGVEHYACMVSVLSRAGKLSDAMEFISKMPIDPIAKVWGALLNGASVLGDLEIARFACDRLFEMEPENTGNYTIMANLYTQAGRWEEAEMVRNKMKRIGLKKIPGTSWIETEKGLRSFIAKDSSCERSKEMYEIIEGLVESMSDKEYIRKQELDEAY

SEQ ID NO: 89599 - protein, 485 aa, Arabidopsis thaliana
  peptide (1)..(485): Ceres Seq. ID no. 12719683
MITYYTKCDNIESARKVFDEMSERDVVSWNSMISGYSQSGSFEDCKKMYKAMLACSDFKPNGVTVISVFQACGQSSDLIFGLEVHKKMIENHIQMDLSLCNAVIGFYAKCGSLDYARALFDEMSEKDSVTYGAIISGYMAHGLVKEAMALFSEMESIGLSTWNAMISGLMQNNHHEEVINSFREMIRCGSRPNTVTLSSLLPSLTYSSNLKGGKEIHAFAIRNGADNNIYVTTSIIDNYAKLGFLLGAQRVFDNCKDRSLIAWTAIITAYAVHGDSDSACSLFDQMQCLGTKPDDVTLTAVLSAFAHSGDSDMAQHIFDSMLTKYDIEPGVEHYACMVSVLSRAGKLSDAMEFISKMPIDPIAKVWGALLNGASVLGDLEIARFACDRLFEMEPENTGNYTIMANLYTQAGRWEEAEMVRNKMKRIGLKKIPGTSWIETEKGLRSFIAKDSSCERSKEMYEIIEGLVESMSDKEYIRKQELDEAY

SEQ ID NO: 89600 - DNA, 888 bp, Arabidopsis thaliana
  misc_feature (1)..(888): Ceres Seq. ID no. 12719684
  misc_feature (1)..(888): Ortholog of  Ceres SEQ ID NO 15225561 as cited in SEQ ID NO 0
agaagacgacgacaaaacaaaaaagttgcgagagacagagagaaacagagacatggatctgaaatgggatgattttttcaacgattacgaatggctgatcgtgtttctgaaaggtatggtgaagccagcggcggcgctcgtggtggtgcttttggcggtgattctttcatactcgcagaacctatctttggaaggagaaatgatatactctgtttcccgatcgtttcttcaactctctgttatcggatttgttcttcagttcatctttaaccaagagaactcaggctggatcatccttgcgtatctcttcatggtctctgtcgccggttacactgccggacaacgtgcgaggcacgtgccacgtggaaagtacgtggccggattatcgatccttgccgggacttcaattacaatgttcttgctcgtcctcctcaacgtctttcctttcactccgaggtatatgatcccaatcgccggaatgttggtcggaaatgccatgaccgtcaccggagttaccatgaaacagcttcgagatgacatcaaaatgcaactcaacctggtggagacggcattggcactaggagcaacgccaagacaagcgacgttgcaacaggtgaagagagcactagtgatctctctgtctccggttttagatagctgcaaaaccgttggattgatctctctaccaggcgcaatgactggtatgataatgggcggggcgtcgcctctagaagctattcagcttcagatagtagtcatgaacatgatggtaggagcagctacggttagtagcatcacgtctacttatctttgttggccatctttcttcactaaagcttaccagttacaaactcatgtcttctcctcagattgaaacttttataaatc

SEQ ID NO: 89601 - protein, 290 aa, Arabidopsis thaliana
  peptide (1)..(290): Ceres Seq. ID no. 12719685
EDDDKTKKLRETERNRDMDLKWDDFFNDYEWLIVFLKGMVKPAAALVVVLLAVILSYSQNLSLEGEMIYSVSRSFLQLSVIGFVLQFIFNQENSGWIILAYLFMVSVAGYTAGQRARHVPRGKYVAGLSILAGTSITMFLLVLLNVFPFTPRYMIPIAGMLVGNAMTVTGVTMKQLRDDIKMQLNLVETALALGATPRQATLQQVKRALVISLSPVLDSCKTVGLISLPGAMTGMIMGGASPLEAIQLQIVVMNMMVGAATVSSITSTYLCWPSFFTKAYQLQTHVFSSD

SEQ ID NO: 89602 - protein, 273 aa, Arabidopsis thaliana
  peptide (1)..(273): Ceres Seq. ID no. 12719686
MDLKWDDFFNDYEWLIVFLKGMVKPAAALVVVLLAVILSYSQNLSLEGEMIYSVSRSFLQLSVIGFVLQFIFNQENSGWIILAYLFMVSVAGYTAGQRARHVPRGKYVAGLSILAGTSITMFLLVLLNVFPFTPRYMIPIAGMLVGNAMTVTGVTMKQLRDDIKMQLNLVETALALGATPRQATLQQVKRALVISLSPVLDSCKTVGLISLPGAMTGMIMGGASPLEAIQLQIVVMNMMVGAATVSSITSTYLCWPSFFTKAYQLQTHVFSSD

SEQ ID NO: 89603 - protein, 252 aa, Arabidopsis thaliana
  peptide (1)..(252): Ceres Seq. ID no. 12719687
MVKPAAALVVVLLAVILSYSQNLSLEGEMIYSVSRSFLQLSVIGFVLQFIFNQENSGWIILAYLFMVSVAGYTAGQRARHVPRGKYVAGLSILAGTSITMFLLVLLNVFPFTPRYMIPIAGMLVGNAMTVTGVTMKQLRDDIKMQLNLVETALALGATPRQATLQQVKRALVISLSPVLDSCKTVGLISLPGAMTGMIMGGASPLEAIQLQIVVMNMMVGAATVSSITSTYLCWPSFFTKAYQLQTHVFSSD

SEQ ID NO: 89604 - DNA, 966 bp, Arabidopsis thaliana
  misc_feature (1)..(966): Ceres Seq. ID no. 12719692
  misc_feature (1)..(966): Ortholog of  Ceres SEQ ID NO 14310394 as cited in SEQ ID NO 54044
atggatttgcatgaatcagaatcaagaacacatgttctgtccaccgatggtgatgatggttacatagacatggaagtcaatctctcttcttcttcttcttcttctacttcgtcctcaagcttcttcagcttccccgtcacttcctccccgccgcaaagcagagagttcgagtttcaaatgtgttcctccgccgtagcttccggtgaatcaaccacatctccggctgatgagcttttctacaaaggtcaacttcttcctcttcatctccctcctcgtctcaaaatggtacaaaagcttcttctcgcttcctcctcctccaccgccgcaacggaaactcctatctccccacgcgccgccgcagatgtattgtctccacggagattcagtagctgtgagatcggacaagacgagaattgtttctttgagatttcgacagagctcaagagattcatcgagagcaacgagaatcatcttggaaacagttggagcaaaaagatcaaacattcatccataacacaaaaactcaaagcctcacgcgcttacataaaagctctgttctcaaaacaagcctgttcagattcatcagagatcaatccaagattcaaaattgaaccttctaaagtctcaagaaagaagaacccatttgtgaacagtgagaatcctctgttaattcataggagatctttctctggtgtgatacagagacattctcaagcaaagtgttcaacatcttcttcttcttcttcctctgcgtcttcgttgtcttcttcgttcagttttggatcaaacgggtcgttggatctgcagacactgatgagaagcagcaatgcgagtgataactccattgaaggagcgatcgagcattgtaagcagtcgtttactactaggaagagtaatgtgactgaatctgagctctgttcttcaagaacctctgtttctacttgtggtgaccttgataaagattga

SEQ ID NO: 89605 - protein, 321 aa, Arabidopsis thaliana
  peptide (1)..(321): Ceres Seq. ID no. 12719693
MDLHESESRTHVLSTDGDDGYIDMEVNLSSSSSSSTSSSSFFSFPVTSSPPQSREFEFQMCSSAVASGESTTSPADELFYKGQLLPLHLPPRLKMVQKLLLASSSSTAATETPISPRAAADVLSPRRFSSCEIGQDENCFFEISTELKRFIESNENHLGNSWSKKIKHSSITQKLKASRAYIKALFSKQACSDSSEINPRFKIEPSKVSRKKNPFVNSENPLLIHRRSFSGVIQRHSQAKCSTSSSSSSSASSLSSSFSFGSNGSLDLQTLMRSSNASDNSIEGAIEHCKQSFTTRKSNVTESELCSSRTSVSTCGDLDKD

SEQ ID NO: 89606 - protein, 298 aa, Arabidopsis thaliana
  peptide (1)..(298): Ceres Seq. ID no. 12719694
MEVNLSSSSSSSTSSSSFFSFPVTSSPPQSREFEFQMCSSAVASGESTTSPADELFYKGQLLPLHLPPRLKMVQKLLLASSSSTAATETPISPRAAADVLSPRRFSSCEIGQDENCFFEISTELKRFIESNENHLGNSWSKKIKHSSITQKLKASRAYIKALFSKQACSDSSEINPRFKIEPSKVSRKKNPFVNSENPLLIHRRSFSGVIQRHSQAKCSTSSSSSSSASSLSSSFSFGSNGSLDLQTLMRSSNASDNSIEGAIEHCKQSFTTRKSNVTESELCSSRTSVSTCGDLDKD

SEQ ID NO: 89607 - protein, 262 aa, Arabidopsis thaliana
  peptide (1)..(262): Ceres Seq. ID no. 12719695
MCSSAVASGESTTSPADELFYKGQLLPLHLPPRLKMVQKLLLASSSSTAATETPISPRAAADVLSPRRFSSCEIGQDENCFFEISTELKRFIESNENHLGNSWSKKIKHSSITQKLKASRAYIKALFSKQACSDSSEINPRFKIEPSKVSRKKNPFVNSENPLLIHRRSFSGVIQRHSQAKCSTSSSSSSSASSLSSSFSFGSNGSLDLQTLMRSSNASDNSIEGAIEHCKQSFTTRKSNVTESELCSSRTSVSTCGDLDKD

SEQ ID NO: 89608 - DNA, 3120 bp, Arabidopsis thaliana
  misc_feature (1)..(3120): Ceres Seq. ID no. 12719696
  misc_feature (1)..(3120): Ortholog of  Ceres SEQ ID NO 13600310 as cited in SEQ ID NO 5086
atgtcgtttacgccagaggtggtatcaaggaaaagtggagtaggagtgattccatcacctgcaccgtttctaactcctcgtctcgagagaagacgacctgattctttctctaaccgtctcgatagagataataaagaagtcaatgttcaagtgattctacgatgcaaaccattaagtgaagaagagcagaaatctagtgttcctagagtcatctcttgtaatgaaatgagaagagaagtcaatgttcttcatactattgctaataagcaagtagaccgtcttttcaatttcgacaaggtttttggtcctaagtcacaacaacggtctatatatgatcaagctattgcacctattgttcatgaagtcttggaaggttttagctgtactgtgtttgcttatggacaaacaggaactgggaagacttacactatggaaggtggaatgaggaaaaagggaggggatttacctgcggaggctggggtgattcccagagctgttagacatattttcgatactcttgaggcgcaaaatgctgattacagtatgaaagtaacattcttggagctttacaatgaggaagttacggatttgttagctcaagatgattcctcaagatcttctgaggataagcagaggaagcccatttctttgatggaggatgggaagggttctgtggttttaagaggtcttgaagaagaagttgtgtacagtgctaatgatatatatgctcttcttgaacgaggttcatctaaaaggcgtacagctgatactttgttgaataagagaagtagtcgatctcattcagtgtttactatcactgtccatataaaggaagagtctatgggagatgaagagttaatcaaatgtgggaagcttaaccttgtggatctagcaggatctgagaatatcttacggtcaggagctcgagatggccgtgcacgagaagcaggagagattaacaagagtttgcttacactaggccgtgtgattaatgcccttgtggaacattcttctcatgtaccttacagggatagtaagctgacaaggcttttacgggactctctaggaggaaagacaaaaacttgtatcattgctacaatctctccatctgctcattccctagaggaaactttaagtactttggattatgcctatcgtgccaagaacatcaagaacaaacctgaggcaaaccagaagttatccaaggctgtgttgcttaaagatctttacttggagcttgagagaatgaaagaagatgtaagagcagcaagggataagaatggtgtttacattgcacatgaaagatatacacaagaagaagttgaaaagaaggcgagaattgagaggatagaacagttggagaatgaactaaatctcagtgaaagtgaggtttccaagttctgtgacctttatgagactgagaaagagaagttactggacgttgaaagtgaccttaaggactgcaagagaaacctgcacaatagtaacaaggacttgctagatctcaaagagaattatatccaagttgtttcaaagttaaaggaaaaggaagtcatcgtctccagaatgaaagcttcagagacttctttgatcgaccgtgcaaaggggttacgttgtgatctgcagcatgcgtcaaacgatataaattcgttgttcacaagattggaccaaaaagacaagctggaatccgataaccagagcatgcttctgaaatttggatcacaacttgatcaaaaccttaaagatttgcacagaacagttcttggatcagtctctcagcaacagcaacaattaagaactatggaagaacatacccactcatttcttgctcacaaatatgatgcaacacgcgatctggaatcaagaattgggaaaacatcagacacttatacttcaggaatagcagccttgaaggagttatctgaaatgctacaaaagaaagcctcctctgatctggagaagaagaacacttctatagtatcacaaatagaggctgttgagaaatttctcactacatcagcaacagaggcttctgcagtcgctcaggacatccacaatttacttaatgatcagaagaagctcttagcacttgctgcaagacaacaagagcagggcttggtcagaagcatgagatctgcacaagaaatttccaattcaacttcaaccattttcagtaacatctacaaccaagcccatgacgtggtggaagccattagagcaagccaagcagagaaatcaagacagcttgatgcttttgaaatgaagtttaaggaagaggctgaaagagaggagaaacaagccttaaatgatatcagtctgatattatcaaagttaacttcaaagaaaactgcaatgatttctgatgcatcaagcaatatccgggaacatgacatacaggaagagaagagattgtatgaacaaatgtctggtatgcagcaagtctcgattggtgcaaaggaagaattgtgtgactatctaaagaaagagaaaactcacttcacggaaaacacaatagcttcagctgagtctatcacagtcatggatagttaccttgaagattgcttgggaagggccaatgattctaaaacattgtgggagaccactgaaacaggcataaagaaccttaacacgaagtatcaacaagaacttaatgtcacaatggaggacatggcaaaagaaaatgagaaggtgcaagatgaatttacatccacattttcctcaatggatgctaactttgtctctaggacaaatgaacttcacgcagctgttaatgactcattgatgcaagaccgtgagaacaaagaaacaacagaggctatagtagagacttgcatgaaccaggtcacattattgcaggagaatcatggacaagctgtttcaaacattagaaacaaagcagaacagtctctcataaaagactatcaggttgatcagcacaagaacgaaacaccaaagaaacaatccataaatgtgccaagcctggattcgattgaggagatgaggactttgttttcgcagaatactctcagcgaagaacacacaagtttggagaaaatatcaacaaaacaaggacttggcgaagctaacaacagaactccattcttggaagtaaacaaatga

SEQ ID NO: 89609 - protein, 1039 aa, Arabidopsis thaliana
  peptide (1)..(1039): Ceres Seq. ID no. 12719697
MSFTPEVVSRKSGVGVIPSPAPFLTPRLERRRPDSFSNRLDRDNKEVNVQVILRCKPLSEEEQKSSVPRVISCNEMRREVNVLHTIANKQVDRLFNFDKVFGPKSQQRSIYDQAIAPIVHEVLEGFSCTVFAYGQTGTGKTYTMEGGMRKKGGDLPAEAGVIPRAVRHIFDTLEAQNADYSMKVTFLELYNEEVTDLLAQDDSSRSSEDKQRKPISLMEDGKGSVVLRGLEEEVVYSANDIYALLERGSSKRRTADTLLNKRSSRSHSVFTITVHIKEESMGDEELIKCGKLNLVDLAGSENILRSGARDGRAREAGEINKSLLTLGRVINALVEHSSHVPYRDSKLTRLLRDSLGGKTKTCIIATISPSAHSLEETLSTLDYAYRAKNIKNKPEANQKLSKAVLLKDLYLELERMKEDVRAARDKNGVYIAHERYTQEEVEKKARIERIEQLENELNLSESEVSKFCDLYETEKEKLLDVESDLKDCKRNLHNSNKDLLDLKENYIQVVSKLKEKEVIVSRMKASETSLIDRAKGLRCDLQHASNDINSLFTRLDQKDKLESDNQSMLLKFGSQLDQNLKDLHRTVLGSVSQQQQQLRTMEEHTHSFLAHKYDATRDLESRIGKTSDTYTSGIAALKELSEMLQKKASSDLEKKNTSIVSQIEAVEKFLTTSATEASAVAQDIHNLLNDQKKLLALAARQQEQGLVRSMRSAQEISNSTSTIFSNIYNQAHDVVEAIRASQAEKSRQLDAFEMKFKEEAEREEKQALNDISLILSKLTSKKTAMISDASSNIREHDIQEEKRLYEQMSGMQQVSIGAKEELCDYLKKEKTHFTENTIASAESITVMDSYLEDCLGRANDSKTLWETTETGIKNLNTKYQQELNVTMEDMAKENEKVQDEFTSTFSSMDANFVSRTNELHAAVNDSLMQDRENKETTEAIVETCMNQVTLLQENHGQAVSNIRNKAEQSLIKDYQVDQHKNETPKKQSINVPSLDSIEEMRTLFSQNTLSEEHTSLEKISTKQGLGEANNRTPFLEVNK

SEQ ID NO: 89610 - protein, 964 aa, Arabidopsis thaliana
  peptide (1)..(964): Ceres Seq. ID no. 12719698
MRREVNVLHTIANKQVDRLFNFDKVFGPKSQQRSIYDQAIAPIVHEVLEGFSCTVFAYGQTGTGKTYTMEGGMRKKGGDLPAEAGVIPRAVRHIFDTLEAQNADYSMKVTFLELYNEEVTDLLAQDDSSRSSEDKQRKPISLMEDGKGSVVLRGLEEEVVYSANDIYALLERGSSKRRTADTLLNKRSSRSHSVFTITVHIKEESMGDEELIKCGKLNLVDLAGSENILRSGARDGRAREAGEINKSLLTLGRVINALVEHSSHVPYRDSKLTRLLRDSLGGKTKTCIIATISPSAHSLEETLSTLDYAYRAKNIKNKPEANQKLSKAVLLKDLYLELERMKEDVRAARDKNGVYIAHERYTQEEVEKKARIERIEQLENELNLSESEVSKFCDLYETEKEKLLDVESDLKDCKRNLHNSNKDLLDLKENYIQVVSKLKEKEVIVSRMKASETSLIDRAKGLRCDLQHASNDINSLFTRLDQKDKLESDNQSMLLKFGSQLDQNLKDLHRTVLGSVSQQQQQLRTMEEHTHSFLAHKYDATRDLESRIGKTSDTYTSGIAALKELSEMLQKKASSDLEKKNTSIVSQIEAVEKFLTTSATEASAVAQDIHNLLNDQKKLLALAARQQEQGLVRSMRSAQEISNSTSTIFSNIYNQAHDVVEAIRASQAEKSRQLDAFEMKFKEEAEREEKQALNDISLILSKLTSKKTAMISDASSNIREHDIQEEKRLYEQMSGMQQVSIGAKEELCDYLKKEKTHFTENTIASAESITVMDSYLEDCLGRANDSKTLWETTETGIKNLNTKYQQELNVTMEDMAKENEKVQDEFTSTFSSMDANFVSRTNELHAAVNDSLMQDRENKETTEAIVETCMNQVTLLQENHGQAVSNIRNKAEQSLIKDYQVDQHKNETPKKQSINVPSLDSIEEMRTLFSQNTLSEEHTSLEKISTKQGLGEANNRTPFLEVNK

SEQ ID NO: 89611 - protein, 896 aa, Arabidopsis thaliana
  peptide (1)..(896): Ceres Seq. ID no. 12719699
MEGGMRKKGGDLPAEAGVIPRAVRHIFDTLEAQNADYSMKVTFLELYNEEVTDLLAQDDSSRSSEDKQRKPISLMEDGKGSVVLRGLEEEVVYSANDIYALLERGSSKRRTADTLLNKRSSRSHSVFTITVHIKEESMGDEELIKCGKLNLVDLAGSENILRSGARDGRAREAGEINKSLLTLGRVINALVEHSSHVPYRDSKLTRLLRDSLGGKTKTCIIATISPSAHSLEETLSTLDYAYRAKNIKNKPEANQKLSKAVLLKDLYLELERMKEDVRAARDKNGVYIAHERYTQEEVEKKARIERIEQLENELNLSESEVSKFCDLYETEKEKLLDVESDLKDCKRNLHNSNKDLLDLKENYIQVVSKLKEKEVIVSRMKASETSLIDRAKGLRCDLQHASNDINSLFTRLDQKDKLESDNQSMLLKFGSQLDQNLKDLHRTVLGSVSQQQQQLRTMEEHTHSFLAHKYDATRDLESRIGKTSDTYTSGIAALKELSEMLQKKASSDLEKKNTSIVSQIEAVEKFLTTSATEASAVAQDIHNLLNDQKKLLALAARQQEQGLVRSMRSAQEISNSTSTIFSNIYNQAHDVVEAIRASQAEKSRQLDAFEMKFKEEAEREEKQALNDISLILSKLTSKKTAMISDASSNIREHDIQEEKRLYEQMSGMQQVSIGAKEELCDYLKKEKTHFTENTIASAESITVMDSYLEDCLGRANDSKTLWETTETGIKNLNTKYQQELNVTMEDMAKENEKVQDEFTSTFSSMDANFVSRTNELHAAVNDSLMQDRENKETTEAIVETCMNQVTLLQENHGQAVSNIRNKAEQSLIKDYQVDQHKNETPKKQSINVPSLDSIEEMRTLFSQNTLSEEHTSLEKISTKQGLGEANNRTPFLEVNK

SEQ ID NO: 89612 - DNA, 950 bp, Arabidopsis thaliana
  misc_feature (1)..(950): Ceres Seq. ID no. 12719711
  misc_feature (1)..(950): Ortholog of  Ceres SEQ ID NO 13639645 as cited in SEQ ID NO 57488
atggcatgtatgaagaaggcactaccattcattttaatggtattgttgcaaatagggtatgcaggaatggatattcttacaaaggatgtcctaaacaaaggcatgagcatttacgttctttccgtctaccgtcacggagttgccaccgttgttatggctccgttcgccttctacttcgacaagctcgaaagcgtgaagtttcaaagtatcaggagtgccgctaaggtggttggaacagtaactacagttggaggaatcatggtcatgacacttgtaaaaggtccagctcttgacctcttctggactaaaggaccctctgcacagaacacagttgggaccgatattcatagctccatcaaaggtgcagttttagtcacaattggttgcttcagctatgcatgtttcatgatactacaagcaatcacattgaagacttaccctgcagagctctctctcgcaacatggatatgcctaataggtacaatagagggagtagttgtagcattagtgatggagaaaggaaatcctagcgtgtgggccattggttgggacactaaacttcttacaatcacctatagtgggatagtgtgctcagcgcttggttactacattggaggagtggtgatgaaaaccagaggtcctgtgtttgtaacagctttcaaacctctttgtatgatcgttgtggcgattatgtcgagcatcatctttgatgagcagatgtacctcggaagggctcttggtgctacggtcatatgtgtaggtctataccttgtgatatggggcaaagccaaagattatgaatatcctagcacgccgcaaatagatgatgacttagcacaagcaaccacaagcaagcaaaaagaacaaagaagaacagtgatagaatcagtctaacttaacaatcacggtccaaatgtttagcatggatgagccataacgtataccagctt

SEQ ID NO: 89613 - protein, 297 aa, Arabidopsis thaliana
  peptide (1)..(297): Ceres Seq. ID no. 12719712
MACMKKALPFILMVLLQIGYAGMDILTKDVLNKGMSIYVLSVYRHGVATVVMAPFAFYFDKLESVKFQSIRSAAKVVGTVTTVGGIMVMTLVKGPALDLFWTKGPSAQNTVGTDIHSSIKGAVLVTIGCFSYACFMILQAITLKTYPAELSLATWICLIGTIEGVVVALVMEKGNPSVWAIGWDTKLLTITYSGIVCSALGYYIGGVVMKTRGPVFVTAFKPLCMIVVAIMSSIIFDEQMYLGRALGATVICVGLYLVIWGKAKDYEYPSTPQIDDDLAQATTSKQKEQRRTVIESV

SEQ ID NO: 89614 - protein, 294 aa, Arabidopsis thaliana
  peptide (1)..(294): Ceres Seq. ID no. 12719713
MKKALPFILMVLLQIGYAGMDILTKDVLNKGMSIYVLSVYRHGVATVVMAPFAFYFDKLESVKFQSIRSAAKVVGTVTTVGGIMVMTLVKGPALDLFWTKGPSAQNTVGTDIHSSIKGAVLVTIGCFSYACFMILQAITLKTYPAELSLATWICLIGTIEGVVVALVMEKGNPSVWAIGWDTKLLTITYSGIVCSALGYYIGGVVMKTRGPVFVTAFKPLCMIVVAIMSSIIFDEQMYLGRALGATVICVGLYLVIWGKAKDYEYPSTPQIDDDLAQATTSKQKEQRRTVIESV

SEQ ID NO: 89615 - protein, 285 aa, Arabidopsis thaliana
  peptide (1)..(285): Ceres Seq. ID no. 12719714
MVLLQIGYAGMDILTKDVLNKGMSIYVLSVYRHGVATVVMAPFAFYFDKLESVKFQSIRSAAKVVGTVTTVGGIMVMTLVKGPALDLFWTKGPSAQNTVGTDIHSSIKGAVLVTIGCFSYACFMILQAITLKTYPAELSLATWICLIGTIEGVVVALVMEKGNPSVWAIGWDTKLLTITYSGIVCSALGYYIGGVVMKTRGPVFVTAFKPLCMIVVAIMSSIIFDEQMYLGRALGATVICVGLYLVIWGKAKDYEYPSTPQIDDDLAQATTSKQKEQRRTVIESV

SEQ ID NO: 89616 - DNA, 1896 bp, Arabidopsis thaliana
  misc_feature (1)..(1896): Ceres Seq. ID no. 12719715
  misc_feature (1)..(1896): Ortholog of  Ceres SEQ ID NO 14310803 as cited in SEQ ID NO 58463
  misc_feature (1)..(1896): Ortholog of  Ceres SEQ ID NO 13663769 as cited in SEQ ID NO 60793
atatcttcttcaaagtttcgtttttttttggtgtttattagaatctagaagttaacaattggagaatttggaattgggaaaataggggttagatatatctgtaagtggtttggttcttcttagcaagtgtttaactttgggagaggaagatgagaattacaagtgttgttatggttattggctatgagacttgtctctggtgtgagctgagatggtggtagatactttgttttaacgtcttggctatggagaatcatcatccttctactctattgtctatggattcaagtgcttcttctcatgaggagcttgatttggagatgaataacaacaggcaatctctgctctctggccctcctgatatcaatttacctctctcagctgagagaagtcctcctcctccgccgtggaatttagatgcttgtgatattttggatgttgggttaggttcacaagcttatgagactgagaattacatgagtgttgtacctaaggttgggaggaaatgtgctaaacgtgttgatagtatctggggtgcttggtttttcttcagtttctacttcaagcctgcgttaaacgagaaatcaaaggcgaaaatcgtccgggatagtaatgggatatctggttttgacaagtcggatttgaagcttgatgtgtttttagttcagcatgatatggagaatatgtatatgtgggtgtttaaggaaagacctgagaatgcactagggaagatgcagttgaggagttacatgaatggtcattctagacaaggggatcgtttgtttccatttagtgttgagaaagggtttgttaggtctcacagaatgcagaggaaacactacagaggtttgtcgaatccgcagtgcgttcatgggattgagcttgttcctttgccaaacctcacgtgtctagatgaagaagagaggaaaaggtggatggagcttacgggtcgtgatttgaatttcaccattccacctgaagctagtgactttggttcttggagaaaccttcccaacactgactttgagcttgagaggcctacaccttctttgaagaatcctactgcaaaccactctaagaaactactcaatggctcggggctcaatctctcgactcaaccatccaaccattctaatggtgaagcaaccgatttatctccttcgagccacaagaagaggaaggacttgttctcaaatgggattcatgaggaggagtgttgcttaactgtaaacccacaacctcctgttatcgaagctcaccagaatgagctacctacttggtcaaacgagtttactggggccatgaaaaacgtttatggacctgttactgctgcaaaaacgatctatgaggacgaagaaggctacttgatcataatcagccttccttttgtggatttgaacagcgttaaagtctcctggaggaacactctcacacatggaatcataaaagtttcatgcctcagcacatcgcgcgtacctttcataaagagacatgatagaacattcaagttgactgattcagcctctgagcattgcccgccaggtgaatttgtcagagagatcccattatcaaaccgaatcccggaagatgcaaacattgaagcgtattacgatggacctggatcagttcttgagatacttgtcccaaaactaagagctggcccggaagagcacgaggtgcgggtgtgtctccgtcccaacctcggtggaaacgatcttatgctgacttaaaaagagaaacaactgtttagttttcttgtttgtagaagcttattataggagtcatctctcattgatattggccactcatatataggcgttttcactgttttaatgggatttttcacacattgcaatcttgtgtacgttgtgttggaatcaaccctatccatagatt

SEQ ID NO: 89617 - protein, 494 aa, Arabidopsis thaliana
  peptide (1)..(494): Ceres Seq. ID no. 12719716
MENHHPSTLLSMDSSASSHEELDLEMNNNRQSLLSGPPDINLPLSAERSPPPPPWNLDACDILDVGLGSQAYETENYMSVVPKVGRKCAKRVDSIWGAWFFFSFYFKPALNEKSKAKIVRDSNGISGFDKSDLKLDVFLVQHDMENMYMWVFKERPENALGKMQLRSYMNGHSRQGDRLFPFSVEKGFVRSHRMQRKHYRGLSNPQCVHGIELVPLPNLTCLDEEERKRWMELTGRDLNFTIPPEASDFGSWRNLPNTDFELERPTPSLKNPTANHSKKLLNGSGLNLSTQPSNHSNGEATDLSPSSHKKRKDLFSNGIHEEECCLTVNPQPPVIEAHQNELPTWSNEFTGAMKNVYGPVTAAKTIYEDEEGYLIIISLPFVDLNSVKVSWRNTLTHGIIKVSCLSTSRVPFIKRHDRTFKLTDSASEHCPPGEFVREIPLSNRIPEDANIEAYYDGPGSVLEILVPKLRAGPEEHEVRVCLRPNLGGNDLMLT

SEQ ID NO: 89618 - protein, 483 aa, Arabidopsis thaliana
  peptide (1)..(483): Ceres Seq. ID no. 12719717
MDSSASSHEELDLEMNNNRQSLLSGPPDINLPLSAERSPPPPPWNLDACDILDVGLGSQAYETENYMSVVPKVGRKCAKRVDSIWGAWFFFSFYFKPALNEKSKAKIVRDSNGISGFDKSDLKLDVFLVQHDMENMYMWVFKERPENALGKMQLRSYMNGHSRQGDRLFPFSVEKGFVRSHRMQRKHYRGLSNPQCVHGIELVPLPNLTCLDEEERKRWMELTGRDLNFTIPPEASDFGSWRNLPNTDFELERPTPSLKNPTANHSKKLLNGSGLNLSTQPSNHSNGEATDLSPSSHKKRKDLFSNGIHEEECCLTVNPQPPVIEAHQNELPTWSNEFTGAMKNVYGPVTAAKTIYEDEEGYLIIISLPFVDLNSVKVSWRNTLTHGIIKVSCLSTSRVPFIKRHDRTFKLTDSASEHCPPGEFVREIPLSNRIPEDANIEAYYDGPGSVLEILVPKLRAGPEEHEVRVCLRPNLGGNDLMLT

SEQ ID NO: 89619 - protein, 469 aa, Arabidopsis thaliana
  peptide (1)..(469): Ceres Seq. ID no. 12719718
MNNNRQSLLSGPPDINLPLSAERSPPPPPWNLDACDILDVGLGSQAYETENYMSVVPKVGRKCAKRVDSIWGAWFFFSFYFKPALNEKSKAKIVRDSNGISGFDKSDLKLDVFLVQHDMENMYMWVFKERPENALGKMQLRSYMNGHSRQGDRLFPFSVEKGFVRSHRMQRKHYRGLSNPQCVHGIELVPLPNLTCLDEEERKRWMELTGRDLNFTIPPEASDFGSWRNLPNTDFELERPTPSLKNPTANHSKKLLNGSGLNLSTQPSNHSNGEATDLSPSSHKKRKDLFSNGIHEEECCLTVNPQPPVIEAHQNELPTWSNEFTGAMKNVYGPVTAAKTIYEDEEGYLIIISLPFVDLNSVKVSWRNTLTHGIIKVSCLSTSRVPFIKRHDRTFKLTDSASEHCPPGEFVREIPLSNRIPEDANIEAYYDGPGSVLEILVPKLRAGPEEHEVRVCLRPNLGGNDLMLT

SEQ ID NO: 89620 - DNA, 2260 bp, Arabidopsis thaliana
  misc_feature (1)..(2260): Ceres Seq. ID no. 12719727
  misc_feature (1)..(2260): Ortholog of  Ceres SEQ ID NO 13654989 as cited in SEQ ID NO 63117
  misc_feature (1)..(2260): Ortholog of  Ceres SEQ ID NO 13655640 as cited in SEQ ID NO 63844
aaaagaaagaacaacacagagcagagaaaaaaaagaggtagccatgttcttgaagcttttaaccatcttcttcttcttcttcttcaacctcatctttcaatcttcttctcaaagtctcaactttgcttacaacaatggctttaatccaccgacggacttatccatccaagggatcacaaccgtcacacccaacggtctcttgaagctaaccaacacaaccgttcagaaaaccggtcacgccttctataccaaaccgatccggtttaaagattctccaaacggcaccgtttcatccttctcgacatcgttcgtcttcgctattcactctcagatcgcgattctcagcggtcatggcatagctttcgtcgtcgctcctaacgcaagccttccttacggcaacccaagtcaatacataggtctcttcaacctcgcaaacaacggtaatgagacaaatcatgtctttgctgttgaattagatacgatcttgagtacagagttcaatgatacaaacgataatcatgtcggaatcgatatcaatagtttgaagtctgtgcaaagctcgcctgctgggtattgggacgagaaaggtcaattcaagaatctgactttgatcagtcgtaagccgatgcaggtctgggtcgattacgacggacgtacaaataaaatcgatgtgacgatggctccgttcaacgaagataaacctacaagaccgcttgttacggctgttagagatctttcttcggttctactccaagatatgtatgtgggtttctcctctgcgacaggctctgttctgtcggaacattatattctcgggtggagtttcggtttgaacgaaaaggctccacctttagctttatcgagactcccgaagcttcctcgcttcgagcccaagagaatctctgagttctacaagatcggaatgcctttgatttctctgtttttgattttctcgtttattttcctcgtttgttacatcgtgaggaggaggaggaagtttgcggaggagctcgaggaatgggaaaaagagttcgggaagaatcggttcaggttcaaggatttgtactacgcgaccaaagggtttaaggagaagggacttcttggaactggtgggttcgggagtgtttacaaaggtgtgatgcctggtacgaagttggagatcgctgttaaaagagtttcgcatgagtctcgtcaagggatgaaagagtttgtggcggagattgtgagtattggtcggatgagtcataggaatttagttcctctcttgggttattgtcgtaggagaggtgagcttcttttggtgtatgattacatgcctaatggaagcttagacaagtacttgtacaacactccggaggtaacacttaattggaaacagaggattaaggttattctaggtgttgcctctggcttgttctatctccatgaggaatgggaacaagtggtgattcaccgggatgtcaaagctagcaatgtcttgttggacggagagctcaatgggagacttggggatttcggtttggctcggttgtatgatcacggatcggatcctcagaccacgcatgttgttggaacattgggatacttagctcctgaacatactaggacaggacgtgccacgatggctaccgatgtttttgcgtttggggcgttcttactcgaagtcgcatgcggtagacgtcctatcgagttccagcaagagaccgatgagacgttcttgctcgtggattgggttttcgggttgtggaacaagggagacatcttggctgctaaagatccgaatatgggttcggaatgtgatgaaaaagaggtggaaatggttttgaagctaggtctcttgtgctctcactctgacccaagggctagaccaagtatgagacaagtgctacattatctaagaggagatgcaaagttaccagaattgtctccgttggacttgtccggaagtgggatgatgtttggggttcatgacggatttagtgaattaggaatgtcgtattcctcctccgtattcaaagggtttaccggtggatcttccatcgctgattctcaactttctggcgggagatgaatagaatgttttgaagttatataaagtatatgttatttaatggcgatagttatgttttaaatatatttgaacctttttgtgtgttttgcatttcatctgtagagactatttgggcgagatatgggaatgggactatgtatatatacttcagcatatgttgaaaattactgtctaaagaatattatggcc

SEQ ID NO: 89621 - protein, 689 aa, Arabidopsis thaliana
  peptide (1)..(689): Ceres Seq. ID no. 12719728
KERTTQSREKKEVAMFLKLLTIFFFFFFNLIFQSSSQSLNFAYNNGFNPPTDLSIQGITTVTPNGLLKLTNTTVQKTGHAFYTKPIRFKDSPNGTVSSFSTSFVFAIHSQIAILSGHGIAFVVAPNASLPYGNPSQYIGLFNLANNGNETNHVFAVELDTILSTEFNDTNDNHVGIDINSLKSVQSSPAGYWDEKGQFKNLTLISRKPMQVWVDYDGRTNKIDVTMAPFNEDKPTRPLVTAVRDLSSVLLQDMYVGFSSATGSVLSEHYILGWSFGLNEKAPPLALSRLPKLPRFEPKRISEFYKIGMPLISLFLIFSFIFLVCYIVRRRRKFAEELEEWEKEFGKNRFRFKDLYYATKGFKEKGLLGTGGFGSVYKGVMPGTKLEIAVKRVSHESRQGMKEFVAEIVSIGRMSHRNLVPLLGYCRRRGELLLVYDYMPNGSLDKYLYNTPEVTLNWKQRIKVILGVASGLFYLHEEWEQVVIHRDVKASNVLLDGELNGRLGDFGLARLYDHGSDPQTTHVVGTLGYLAPEHTRTGRATMATDVFAFGAFLLEVACGRRPIEFQQETDETFLLVDWVFGLWNKGDILAAKDPNMGSECDEKEVEMVLKLGLLCSHSDPRARPSMRQVLHYLRGDAKLPELSPLDLSGSGMMFGVHDGFSELGMSYSSSVFKGFTGGSSIADSQLSGGR

SEQ ID NO: 89622 - protein, 675 aa, Arabidopsis thaliana
  peptide (1)..(675): Ceres Seq. ID no. 12719729
MFLKLLTIFFFFFFNLIFQSSSQSLNFAYNNGFNPPTDLSIQGITTVTPNGLLKLTNTTVQKTGHAFYTKPIRFKDSPNGTVSSFSTSFVFAIHSQIAILSGHGIAFVVAPNASLPYGNPSQYIGLFNLANNGNETNHVFAVELDTILSTEFNDTNDNHVGIDINSLKSVQSSPAGYWDEKGQFKNLTLISRKPMQVWVDYDGRTNKIDVTMAPFNEDKPTRPLVTAVRDLSSVLLQDMYVGFSSATGSVLSEHYILGWSFGLNEKAPPLALSRLPKLPRFEPKRISEFYKIGMPLISLFLIFSFIFLVCYIVRRRRKFAEELEEWEKEFGKNRFRFKDLYYATKGFKEKGLLGTGGFGSVYKGVMPGTKLEIAVKRVSHESRQGMKEFVAEIVSIGRMSHRNLVPLLGYCRRRGELLLVYDYMPNGSLDKYLYNTPEVTLNWKQRIKVILGVASGLFYLHEEWEQVVIHRDVKASNVLLDGELNGRLGDFGLARLYDHGSDPQTTHVVGTLGYLAPEHTRTGRATMATDVFAFGAFLLEVACGRRPIEFQQETDETFLLVDWVFGLWNKGDILAAKDPNMGSECDEKEVEMVLKLGLLCSHSDPRARPSMRQVLHYLRGDAKLPELSPLDLSGSGMMFGVHDGFSELGMSYSSSVFKGFTGGSSIADSQLSGGR

SEQ ID NO: 89623 - protein, 481 aa, Arabidopsis thaliana
  peptide (1)..(481): Ceres Seq. ID no. 12719730
MQVWVDYDGRTNKIDVTMAPFNEDKPTRPLVTAVRDLSSVLLQDMYVGFSSATGSVLSEHYILGWSFGLNEKAPPLALSRLPKLPRFEPKRISEFYKIGMPLISLFLIFSFIFLVCYIVRRRRKFAEELEEWEKEFGKNRFRFKDLYYATKGFKEKGLLGTGGFGSVYKGVMPGTKLEIAVKRVSHESRQGMKEFVAEIVSIGRMSHRNLVPLLGYCRRRGELLLVYDYMPNGSLDKYLYNTPEVTLNWKQRIKVILGVASGLFYLHEEWEQVVIHRDVKASNVLLDGELNGRLGDFGLARLYDHGSDPQTTHVVGTLGYLAPEHTRTGRATMATDVFAFGAFLLEVACGRRPIEFQQETDETFLLVDWVFGLWNKGDILAAKDPNMGSECDEKEVEMVLKLGLLCSHSDPRARPSMRQVLHYLRGDAKLPELSPLDLSGSGMMFGVHDGFSELGMSYSSSVFKGFTGGSSIADSQLSGGR

SEQ ID NO: 89624 - DNA, 680 bp, Arabidopsis thaliana
  misc_feature (1)..(680): Ceres Seq. ID no. 12719780
  misc_feature (1)..(680): Ortholog of  Ceres SEQ ID NO 12614157 as cited in SEQ ID NO 67965
caaccttttttgttcctcccaacaggttctctatttctttctctctatgtaaacattttgttaagataatggtttcatacatgaacgtgagtttgtatctattgttcgaaaggtcaatggaagaggaaaagaactgaaaaacccaatttctctaaaccacaacaaagatttggactttctgttaaagaagttagctccgccactcacggcggttttacttgctgtttcacccatctgtttccctccagaatctcttgggcagactttggatatacagagaggagctacattgtttaatagagcttgtatcgggtgtcatgatacaggtggaaacattattcaacctggtgcaacgcttttcacaaaagacctcgaaagaaatggagttgatactgaggaagaaatatatcgtgttacctactttggaaagggaagaatgccgggatttggtgagaaatgcacaccgagaggacaatgtacctttggaccgcggttgcaggacgaagaaatcaagcttctcgctgaatttgtaaagtttcaagctgaccaaggctggccaactgtatctacggactagcgactaggcattcttcgtcttgtgagcgtttttgtaatccaattaatccatagggctgtatctacttacacttataacaattccttctgggaggtttcattgc

SEQ ID NO: 89625 - protein, 71 aa, Arabidopsis thaliana
  peptide (1)..(71): Ceres Seq. ID no. 12719781
MIQVETLFNLVQRFSQKTSKEMELILRKKYIVLPTLEREECRDLVRNAHREDNVPLDRGCRTKKSSFSLNL

SEQ ID NO: 89626 - protein, 50 aa, Arabidopsis thaliana; identical to SEQ ID NO: 28366
  peptide (1)..(50): Ceres Seq. ID no. 12719782

SEQ ID NO: 89627 - protein, 46 aa, Arabidopsis thaliana; identical to SEQ ID NO: 28367
  peptide (1)..(46): Ceres Seq. ID no. 12719783

SEQ ID NO: 89628 - DNA, 1489 bp, Arabidopsis thaliana
  misc_feature (1)..(1489): Ceres Seq. ID no. 12719800
  misc_feature (1)..(1489): Ortholog of  Ceres SEQ ID NO 13656404 as cited in SEQ ID NO 65806
  misc_feature (1)..(1489): Ortholog of  Ceres SEQ ID NO 12779935 as cited in SEQ ID NO 66774
  misc_feature (1)..(1489): Ortholog of  Ceres SEQ ID NO 13598695 as cited in SEQ ID NO 67368
  misc_feature (1)..(1489): Ortholog of  Ceres SEQ ID NO 13591174 as cited in SEQ ID NO 68289
gaacttgtaaaccttactctcgaagagtcctctgttactcatttttacattgtaaaaaaaaacttcttttcttctctacgtgaataagaatctgaagagtcattttctcaagaatgacgtggctaaaacaaatgtggtcaagcattttagtgctagccgtggtggtgatcggagccagagctgtgcccatcacgtatcttgaatctgcagtggctaaaggagctgtgtgtttggatggtagcgcgccagcataccatttcgataagggatcgggctcaggagtgaacaattggatcgttcatatggaaggaggaggatggtgcactgatatagctacatgcgttcaacgtaaaagtacaatgaagggttcttctaagcttatgaacaaagactttggtttctccggtatcttgggtggcaagcaaagcaccaatccagacttttacaattggaatagaatcaaagttcggtattgcgatggttcatctttcaccggtgatatagaagctgttgatccgacgcacaagctgttctttcgcggtgctagggtttggcgtgcggtgatcgatgatcttatggctaagggaatgagcaacgctcaaaacgctatactctccggttgttcagctggagcattggctgcgattctacattgcgaccagttcaagtccactctccctaaaacggctaaggtcaaatgtgtttctgacgctggttacttcatccacggtaaggatatcactggaggatcttacatccaatcctactacgccaaagtcgtagcgacccacggatctgcaaagagtctacctgcttcttgcacctcaagtatgaagcctgatttgtgtttcttccctcaatacgttgctaagaccttacaaacaccgcttttcgtcatcaatgccgccttcgattcttggcagatcaagaatgtattggcaccaacctctgttgataaaagcaaagcatggaagacttgtaagcttgatcttaagaagtgtacggccgctcagcttcaaaccgttcaagagaccaagtgttggctgcgttggcgcctgttcgatccgcgacgacgaacggattgttcttggactcgtgccatgctcattgccaaggtggaagcgctgccacttggtccggcgacaaaggtcccacagtcgcgaatacgaaaatggctaaggcggttggagattggttctttgagaggagtacgtttcagaacgtagattgttcatcgcttaattgcaaccctacttgccctgcagtatctactgaagactaaaatttattcattgatgtcttaaaatttattcatctttggaatattgttcttgaaatttaaaagtaaaataatataattgatacaatttcattcgaataaataaaatcctttgcccttctacaatcgtttaagctgttatatataatcaatctctcttattattgggttcgcaatttcttaaattctttttaataaagaatcaatctt

SEQ ID NO: 89629 - protein, 370 aa, Arabidopsis thaliana
  peptide (1)..(370): Ceres Seq. ID no. 12719801
MTWLKQMWSSILVLAVVVIGARAVPITYLESAVAKGAVCLDGSAPAYHFDKGSGSGVNNWIVHMEGGGWCTDIATCVQRKSTMKGSSKLMNKDFGFSGILGGKQSTNPDFYNWNRIKVRYCDGSSFTGDIEAVDPTHKLFFRGARVWRAVIDDLMAKGMSNAQNAILSGCSAGALAAILHCDQFKSTLPKTAKVKCVSDAGYFIHGKDITGGSYIQSYYAKVVATHGSAKSLPASCTSSMKPDLCFFPQYVAKTLQTPLFVINAAFDSWQIKNVLAPTSVDKSKAWKTCKLDLKKCTAAQLQTVQETKCWLRWRLFDPRRRTDCSWTRAMLIAKVEALPLGPATKVPQSRIRKWLRRLEIGSLRGVRFRT

SEQ ID NO: 89630 - protein, 364 aa, Arabidopsis thaliana
  peptide (1)..(364): Ceres Seq. ID no. 12719802
MWSSILVLAVVVIGARAVPITYLESAVAKGAVCLDGSAPAYHFDKGSGSGVNNWIVHMEGGGWCTDIATCVQRKSTMKGSSKLMNKDFGFSGILGGKQSTNPDFYNWNRIKVRYCDGSSFTGDIEAVDPTHKLFFRGARVWRAVIDDLMAKGMSNAQNAILSGCSAGALAAILHCDQFKSTLPKTAKVKCVSDAGYFIHGKDITGGSYIQSYYAKVVATHGSAKSLPASCTSSMKPDLCFFPQYVAKTLQTPLFVINAAFDSWQIKNVLAPTSVDKSKAWKTCKLDLKKCTAAQLQTVQETKCWLRWRLFDPRRRTDCSWTRAMLIAKVEALPLGPATKVPQSRIRKWLRRLEIGSLRGVRFRT

SEQ ID NO: 89631 - protein, 307 aa, Arabidopsis thaliana
  peptide (1)..(307): Ceres Seq. ID no. 12719803
MEGGGWCTDIATCVQRKSTMKGSSKLMNKDFGFSGILGGKQSTNPDFYNWNRIKVRYCDGSSFTGDIEAVDPTHKLFFRGARVWRAVIDDLMAKGMSNAQNAILSGCSAGALAAILHCDQFKSTLPKTAKVKCVSDAGYFIHGKDITGGSYIQSYYAKVVATHGSAKSLPASCTSSMKPDLCFFPQYVAKTLQTPLFVINAAFDSWQIKNVLAPTSVDKSKAWKTCKLDLKKCTAAQLQTVQETKCWLRWRLFDPRRRTDCSWTRAMLIAKVEALPLGPATKVPQSRIRKWLRRLEIGSLRGVRFRT

SEQ ID NO: 89632 - DNA, 893 bp, Arabidopsis thaliana
  misc_feature (1)..(893): Ceres Seq. ID no. 12719804
  misc_feature (1)..(893): Ortholog of  Ceres SEQ ID NO 13598140 as cited in SEQ ID NO 61443
gactctctttctcatttccacctgaggaaaaaagctttttcgaatctcgcttgctttttgtcgccatgagtctctttgggttaggaagaaatcagaagactttccgacctaagaagagtgcaccttctggaagcaagggtgcacagcttcgaaagcatatagatgccaccctaggaagtgggaacttgagagaagctgtaagacttcctccgggagaggatgcaaatgaatggcttgctgtaaacactgtggatttctttaatcaggtgaatttgctatatggcacccttaccgagttctgcacacctgataactgtcctacaatgactgctggcccaaagtacgagtatagatgggcagatggtgtacagatcaagaagcccatcgaggtttctgctccaaagtatgtcgagtacttgatggattggatcgagacccaactcgatgatgagactttatttcctcaaaggcttggagcaccatttcctcagaacttcaaagatgtggtgaaaacgatctttaaacggctattccgagtttatgctcacatataccactctcatttccagaaaatcgttagcctaaaagaagaagctcatctcaacacttgcttcaaacacttcatcctctttactcatgaatttggactgatagacaagaaagaactcgcgcctctacaagagctcatagaatctatcatttcaccttattgagcaaaagaccatttctgttttttttttttcagattaaaaaccccaataaattaacggtaagaagttttatttttaattataaatctctcttgtttgttttcaagtttttttctttcttaaacctctgtaaaatttaaacatttactatgtaaaaaagaaatcgatcttgactagttcttt

SEQ ID NO: 89633 - protein, 236 aa, Arabidopsis thaliana; identical to SEQ ID NO: 36283
  peptide (1)..(236): Ceres Seq. ID no. 12719805

SEQ ID NO: 89634 - protein, 215 aa, Arabidopsis thaliana; identical to SEQ ID NO: 36284
  peptide (1)..(215): Ceres Seq. ID no. 12719806

SEQ ID NO: 89635 - protein, 129 aa, Arabidopsis thaliana; identical to SEQ ID NO: 36285
  peptide (1)..(129): Ceres Seq. ID no. 12719807

SEQ ID NO: 89636 - DNA, 705 bp, Arabidopsis thaliana
  misc_feature (1)..(705): Ceres Seq. ID no. 12719816
  misc_feature (1)..(705): Ortholog of  Ceres SEQ ID NO 14315253 as cited in SEQ ID NO 52508
  misc_feature (1)..(705): Ortholog of  Ceres SEQ ID NO 12627566 as cited in SEQ ID NO 62753
ctcgatccctcactctctctcgcgtcagtcgttactgctgcaacaaatctgtatttgatttctccattaacaacgaatctaaatggccgctgcttttgcttccagattaacccgaggaggacgttcattgcttggaggtcttaacaatggtggttcgatgaattcttctaatggaatgatgaatgaaagtatcctctctcagcagcagcagagaaggacatttattcagatggggactgttctcaaagtcgtggacaattcaggtgcgaagaaagtgatgtgtattcaagctctaaaggggaaaaaaggagctagacttggagatactatagttgcttcagtgaaagaagcgatgccaaacggtaaagtgaagaaaggagcggttgtgtatggtgtggttgttcgtgctgcgatgcagagaggtcgtgttgatggaagtgaagttaggtttgatgataacgcggttgttcttgttgatagtaaagataagaatactaaaactgatcgccagccgattggtactagagtgtttggtcctgttcctcatgagcttcgcaagaagaaacatctcaagattcttgctttggctcaacacgttgcgtgagatgcaacaaaaccgtaaacctcgtactgtctttttttatgtaaactctagttacccgcatgttttttttttgtgtgttcttaacggaatttagaggcttc

SEQ ID NO: 89637 - protein, 173 aa, Arabidopsis thaliana
  peptide (1)..(173): Ceres Seq. ID no. 12719817
MAAAFASRLTRGGRSLLGGLNNGGSMNSSNGMMNESILSQQQQRRTFIQMGTVLKVVDNSGAKKVMCIQALKGKKGARLGDTIVASVKEAMPNGKVKKGAVVYGVVVRAAMQRGRVDGSEVRFDDNAVVLVDSKDKNTKTDRQPIGTRVFGPVPHELRKKKHLKILALAQHVA

SEQ ID NO: 89638 - protein, 148 aa, Arabidopsis thaliana
  peptide (1)..(148): Ceres Seq. ID no. 12719818
MNSSNGMMNESILSQQQQRRTFIQMGTVLKVVDNSGAKKVMCIQALKGKKGARLGDTIVASVKEAMPNGKVKKGAVVYGVVVRAAMQRGRVDGSEVRFDDNAVVLVDSKDKNTKTDRQPIGTRVFGPVPHELRKKKHLKILALAQHVA

SEQ ID NO: 89639 - protein, 142 aa, Arabidopsis thaliana
  peptide (1)..(142): Ceres Seq. ID no. 12719819
MMNESILSQQQQRRTFIQMGTVLKVVDNSGAKKVMCIQALKGKKGARLGDTIVASVKEAMPNGKVKKGAVVYGVVVRAAMQRGRVDGSEVRFDDNAVVLVDSKDKNTKTDRQPIGTRVFGPVPHELRKKKHLKILALAQHVA

SEQ ID NO: 89640 - DNA, 853 bp, Arabidopsis thaliana
  misc_feature (1)..(853): Ceres Seq. ID no. 12719820
  misc_feature (1)..(853): Ortholog of  Ceres SEQ ID NO 13596601 as cited in SEQ ID NO 62486
atggatctgttactaaaacaaagtcgctttattcagatctgaagaagaagaagaagaagaaacatagttgaagtctctgttaatatgtcttcaacaacaacagattctacagaattgcaaaatctgatcaaactgtttcaaaattgccaaactcatcctcgtcaacattttcctgcaaaatcttcagctgtattagtttgtctataccaagaacaaagagaagacaaaaacgagctacgcgtaatcttaaccaaacgatctactactctctcttctcatcctggggaagtagcattgcctggaggaaaaagagaccaagaagataaagatgatatagctactgcgttgagagaagctcgtgaagaaatcggtttagatccttctcttgttacaatcatttctgttcttgaaccatttgttaacaagaagggaatgtcggtagcaccagttatcggttttctacacgataagaaagcgtttaaacagttaccaaatccagctgaagtggaagagatctttgatgtgccattagagatgttcctcaaggacagaaacaggcgagcagaggaacgagagcatgaaggagagagatatcttcttcaatactttgattactattccgaagataaagagagaagctttatcatatgggcactcactgctggtattctgatcagagttgcctccattgtttatcagagattaccggagtttcaagaacgtaaaccgagtttctggaatcagcctaactgattcttgacttgatctgattgagaaaattgaaacttttatgtataataagcgatacagattgaatcttctttaaatgtgtttcaagaatctatctttactc

SEQ ID NO: 89641 - protein, 222 aa, Arabidopsis thaliana; identical to SEQ ID NO: 74452
  peptide (1)..(222): Ceres Seq. ID no. 12719821

SEQ ID NO: 89642 - DNA, 900 bp, Arabidopsis thaliana
  misc_feature (1)..(900): Ceres Seq. ID no. 12719830
  misc_feature (1)..(900): Ortholog of  Ceres SEQ ID NO 14307776 as cited in SEQ ID NO 59397
gttgttagcgctgatgagaagaaggtgaagcggctgagtcctcttcctgagatcagagatccaaagattttcactgttttggtagaaaatttgccagaggatcattcaaatgagaatattcgagagatatttggtaaagctggaagtattaaaagtgtatccatatgtgatccaaatgctgttgaagaatcagagaagggtgggaagaaggaaaatttcatcagaaccagattacatgcctttgtggagtatgaaacggtggaggcagctgaaaaagcggcagctacattgaataatgagcaagactggagaaatgggttgcgagttaagcttcttgaacaagcagcaggaaagtttgcacagagaagaccagctcggagggaagtcgataaagaaaaggacactacaggcagagttcatgatcaaactggaggagagaaaaacaaaaagacgcgtgaacatcaaaatcaccgtctccatcattctgataatcctgctgatgatgacggtggcaatcatcagaaggataaaaatggaaacaaaggcagagttgtaggacaaggaagacgacagaatcatcaaggcggcaacggacatggaacagcttcatcatcttctcatcctaattatcatcctgttgaggtctcaaagcgtccacctggcccgagaatgcctgatgggacgagagggttcacaatggggcgtggtaaagcgattcctcctcccacatctactcaaaccagtcatgaagtttgatcggttccgcatcttcggttgtatcattgtgtggttttatttcacattaaaaaatgtgaaacttgtatgtaattagaattgagatgttgttttggatttgggtttccttttggcatattcaagtcctccaaatcttcactttgg

SEQ ID NO: 89643 - protein, 251 aa, Arabidopsis thaliana
  peptide (1)..(251): Ceres Seq. ID no. 12719831
VVSADEKKVKRLSPLPEIRDPKIFTVLVENLPEDHSNENIREIFGKAGSIKSVSICDPNAVEESEKGGKKENFIRTRLHAFVEYETVEAAEKAAATLNNEQDWRNGLRVKLLEQAAGKFAQRRPARREVDKEKDTTGRVHDQTGGEKNKKTREHQNHRLHHSDNPADDDGGNHQKDKNGNKGRVVGQGRRQNHQGGNGHGTASSSSHPNYHPVEVSKRPPGPRMPDGTRGFTMGRGKAIPPPTSTQTSHEV

SEQ ID NO: 89644 - DNA, 1469 bp, Arabidopsis thaliana
  misc_feature (1)..(1469): Ceres Seq. ID no. 12719838
  misc_feature (1)..(1469): Ortholog of  Ceres SEQ ID NO 14310740 as cited in SEQ ID NO 53755
  misc_feature (1)..(1469): Ortholog of  Ceres SEQ ID NO 13596202 as cited in SEQ ID NO 68492
aatttctgctttgaagaagaagagtcgatccataatcgccactttcagatttccagattctggggaaacatctctaaactcttcaacgatggcgactgagaatctcaccgataagaatgttgttttcagaaagctgaaatcaaaatccgagaacaaggtttgctttgattgtagtgcgaagaatccaacatgggcttctgttccttatgggatcttcctatgcatcgattgttctgctgttcatcgaagtctaggtgttcatatcagcttcgtcaggtcaacgaacttagactcgtggagtcctgagcagctaagaacaatgatgtttggagggaacaatcgagctcaggtgttttttaagcaacatggatggaatgatggtggtaagattgaggctaagtatacttcaagagctgctgatatgtatagacagactcttgctaaagaagttgctaaagccatggctgaagaaactgttttaccgtcgttatcctctgttgctacttctcagccagtggaatcatctgaaaatgggtttacttctgaatctccgaaagagagttctttgaagcaagaagcagctgttgtctcttcaccaaaagcttctcagaaagttgttgctagtacgtttaagaaacctcttgtttcgcgaaagtctgggaagactggtggtcttggtgctcgtaagcttactactaagtcaaaggataacctctatgagcagaagcctgaagaacctgtacctgtgattcctgctgcttctccaaccaatgacacatcagcagctggatcatcatttgcctctcgatttgagtactttgatgatgagcaatctggtgggcaaagtggcacacgggtgcttagccatgttgctccaccaaagtcatcaaatttctttaatgaatttggaatggacagtgctttccccaagaagtcaagctcaagctcatccaaagctcaggttgaagaaacagatgaagcaagaaagaagttttcaaacgccaaatcgatttcctctgcccaatttttcggaaatcagaacagagatgccgatcttgactcaaaagctacccttcagaagttctcgggttcagcagctatttcaagttctgatctttttggccacggaccagatgattccaacatcgatatcactgcaagcgatctcatcaaccgaatttctttccaggcgcagcaagatatgtcatctattgctaacttagctgaggaaacaaagaataagctgggaacatttgcctctagtatattcagtgatcttcaggatagaatgctgtaagaaacatacaaaggatcttgtcttttgatttacagagaacaaattgttggatataaatgtcatttttatttttggtttgactttgtagttgaaagagtgatttttgaggtaaattgttaaatgtggaatttgataatttgatgtggatatggtagaatatgttacagtatta

SEQ ID NO: 89645 - protein, 431 aa, Arabidopsis thaliana
  peptide (1)..(431): Ceres Seq. ID no. 12719839
ISALKKKSRSIIATFRFPDSGETSLNSSTMATENLTDKNVVFRKLKSKSENKVCFDCSAKNPTWASVPYGIFLCIDCSAVHRSLGVHISFVRSTNLDSWSPEQLRTMMFGGNNRAQVFFKQHGWNDGGKIEAKYTSRAADMYRQTLAKEVAKAMAEETVLPSLSSVATSQPVESSENGFTSESPKESSLKQEAAVVSSPKASQKVVASTFKKPLVSRKSGKTGGLGARKLTTKSKDNLYEQKPEEPVPVIPAASPTNDTSAAGSSFASRFEYFDDEQSGGQSGTRVLSHVAPPKSSNFFNEFGMDSAFPKKSSSSSSKAQVEETDEARKKFSNAKSISSAQFFGNQNRDADLDSKATLQKFSGSAAISSSDLFGHGPDDSNIDITASDLINRISFQAQQDMSSIANLAEETKNKLGTFASSIFSDLQDRML

SEQ ID NO: 89646 - protein, 402 aa, Arabidopsis thaliana; identical to SEQ ID NO: 78261
  peptide (1)..(402): Ceres Seq. ID no. 12719840

SEQ ID NO: 89647 - protein, 325 aa, Arabidopsis thaliana; identical to SEQ ID NO: 78262
  peptide (1)..(325): Ceres Seq. ID no. 12719841

SEQ ID NO: 89648 - DNA, 1686 bp, Arabidopsis thaliana
  misc_feature (1)..(1686): Ceres Seq. ID no. 12719842
  misc_feature (1)..(1686): Ortholog of  Ceres SEQ ID NO 15177858 as cited in SEQ ID NO 51624
  misc_feature (1)..(1686): Ortholog of  Ceres SEQ ID NO 15171249 as cited in SEQ ID NO 52276
  misc_feature (1)..(1686): Ortholog of  Ceres SEQ ID NO 13594189 as cited in SEQ ID NO 58890
agttgttcaacttcttcgtcgtcgtcttcttcctttgctccgtcgtcgagatctcgtcgaacctcaaatctcaaatctcctgtaaccagatcgtctaattatccgatctgcgtttcgaatctcagatcgaagatgccggtggctgcttccgccatctattttctgaatctccgtggcgatgtactcataaatcgcacctaccgagatgacgtcgggggaaacatggtggatgcatttcgtacgcatataatgcagacgaaagagttagggaattgtcctgtgcgtcagattggtggctgctcctttgtttatatgcgaatcagcaatgtctacatcgtcattgttgtcagtagcaatgctaatgttgcttgtggattcaaatttgttgttgaggctgtagctttgttcaaatcatactttggtggagcttttgatgaagacgctattagaaataactttgttctgatttatgaattgttggatgagattatggactttggctatccacaaaatctctcacctgaaattttaaaactttatatcactcaggaaggtgtacggtcaccattttcatcgaagccaaaagacaaacctgttccaaatgcaacattacaagttacaggtgctgttggttggagaagagagggccttgcttacaaaaagaatgaggtgtttctggatattgtggaaagtgtaaaccttctgatgtcctctaaaggcaatgttcttcggtgtgatgtgacggggaaggttttaatgaaatgtttcctttcgggaatgcctgatttgaagttggggttgaatgataaaattggtcttgagaaggaatcagaaatgaaatctcgcccagctaagagtggtaaaaccattgagcttgatgatgtcacatttcaccagtgtgtgaacctgaccagattcaactccgagaagactgttagttttgtaccaccggatggagagtttgaactgatgaagtatcgaataacagagggtgtaaatctgcctttccgtgtattaccaacaatcaaagaacttggtcgtacacgtatggaagtaaatgtcaaggtcaaaagtgtgtttggtgctaaaatgtttgcccttggggtcgtggttaaaattccagtgccaaaacaaacagccaagaccaatttccaagtgacaactggtcgcgctaaatacaatccatcaatcgattgcttggtttggaagataagaaaattcccagggcaaacagagtccacgctaagtgcagaaattgagttgatctcaacaatgggagagaagaaatcttggacaaggccaccgatccaaatggaatttcaggtgccaatgttcacagcatctggtctgcgagttcgttttctcaaggtttgggagaagagcggttacaacacggtcgagtgggttcgatacataacgaaagcgggatcttacgagatcagatgctgaacattaaacacagttcaggttcagtgacatcagacttaaaagtttcatggcttctagttttttgttccttatgcaaaacaaaaacaaaagagttaaatatgttttataccttgttttatgtttgttttgtcgattagagatatctgtgttaatatgatttcttatgtcttaatttggtattgaattctgtttttctttctttctctgtttgtgaaattgtacgagatatagtttaga

SEQ ID NO: 89649 - protein, 482 aa, Arabidopsis thaliana
  peptide (1)..(482): Ceres Seq. ID no. 12719843
SCSTSSSSSSSFAPSSRSRRTSNLKSPVTRSSNYPICVSNLRSKMPVAASAIYFLNLRGDVLINRTYRDDVGGNMVDAFRTHIMQTKELGNCPVRQIGGCSFVYMRISNVYIVIVVSSNANVACGFKFVVEAVALFKSYFGGAFDEDAIRNNFVLIYELLDEIMDFGYPQNLSPEILKLYITQEGVRSPFSSKPKDKPVPNATLQVTGAVGWRREGLAYKKNEVFLDIVESVNLLMSSKGNVLRCDVTGKVLMKCFLSGMPDLKLGLNDKIGLEKESEMKSRPAKSGKTIELDDVTFHQCVNLTRFNSEKTVSFVPPDGEFELMKYRITEGVNLPFRVLPTIKELGRTRMEVNVKVKSVFGAKMFALGVVVKIPVPKQTAKTNFQVTTGRAKYNPSIDCLVWKIRKFPGQTESTLSAEIELISTMGEKKSWTRPPIQMEFQVPMFTASGLRVRFLKVWEKSGYNTVEWVRYITKAGSYEIRC

SEQ ID NO: 89650 - protein, 438 aa, Arabidopsis thaliana; identical to SEQ ID NO: 76506
  peptide (1)..(438): Ceres Seq. ID no. 12719844

SEQ ID NO: 89651 - protein, 408 aa, Arabidopsis thaliana; identical to SEQ ID NO: 76507
  peptide (1)..(408): Ceres Seq. ID no. 12719845

SEQ ID NO: 89652 - DNA, 1632 bp, Arabidopsis thaliana
  misc_feature (1)..(1632): Ceres Seq. ID no. 12719846
  misc_feature (1)..(1632): Ortholog of  Ceres SEQ ID NO 15177858 as cited in SEQ ID NO 51624
  misc_feature (1)..(1632): Ortholog of  Ceres SEQ ID NO 15171249 as cited in SEQ ID NO 52276
  misc_feature (1)..(1632): Ortholog of  Ceres SEQ ID NO 13594189 as cited in SEQ ID NO 58890
cttcgtcgtcgtcttcttcctttgctccgtcgtcgagatctcgtcgaacctcaaatctcaaatctcctgtaaccagatcgtctaattatccgatctgcgtttcgaatctcagatcgaagatgccggtggctgcttccgccatctattttctgaatctccgtggcgatgtactcataaatcgcacctaccgagatgacgtcgggggaaacatggtggatgcatttcgtacgcatataatgcagacgaaagagttagggaattgtcctgtgcgtcagattggtggctgctcctttgtttatatgcgaatcagcaatgtctacatcgtcattgttgtcagtagcaatgctaatgttgcttgtggattcaaatttgttgttgaggctgtagctttgttcaaatcatactttggtggagcttttgatgaagacgctattagaaataactttgttctgatttatgaattgttggatgagattatggactttggctatccacaaaatctctcacctgaaattttaaaactttatatcactcaggaaggtgtacggtcaccattttcatcgaagccaaaagacaaacctgttccaaatgcaacattacaagttacaggtgctgttggttggagaagagagggccttgcttacaaaaagaatgaggtgtttctggatattgtggaaagtgtaaaccttctgatgtcctctaaaggcaatgttcttcggtgtgatgtgacggggaaggttttaatgaaatgtttcctttcgggaatgcctgatttgaagttggggttgaatgataaaattggtcttgagaaggaatcagaaatgaaatctcgcccagctaagagtggtaaaaccattgagcttgatgatgtcacatttcaccagtgtgtgaacctgaccagattcaactccgagaagactgttagttttgtaccaccggatggagagtttgaactgatgaagtatcgaataacagagggtgtaaatctgcctttccgtgtattaccaacaatcaaagaacttggtcgtacacgtatggaagtaaatgtcaaggtcaaaagtgtgtttggtgctaaaatgtttgcccttggggtcgtggttaaaattccagtgccaaaacaaacagccaagaccaatttccaagtgacaactggtcgcgctaaatacaatccatcaatcgattgcttggtttggaagataagaaaattcccagggcaaacagagtccacgctaagtgcagaaattgagttgatctcaacaatgggagagaagaaatcttggacaaggccaccgatccaaatggaatttcaggtgccaatgttcacagcatctggtctgcgagttcgttttctcaaggtttgggagaagagcggttacaacacggtcgagtgggttcgatacataacgaaagcgggatcttacgagatcagatgctgaacattaaacacagttcaggttcagtgacatcagacttaaaagtttcatggcttctagttttttgttccttatgcaaaacaaaaacaaaagagttaaatatgttttataccttgttttatgtttgttttgtcgattagagatatctgtgttaatatgatttcttatgtcttaatttggtattgaattctgtttttct

SEQ ID NO: 89653 - protein, 477 aa, Arabidopsis thaliana
  peptide (1)..(477): Ceres Seq. ID no. 12719847
SSSSSSFAPSSRSRRTSNLKSPVTRSSNYPICVSNLRSKMPVAASAIYFLNLRGDVLINRTYRDDVGGNMVDAFRTHIMQTKELGNCPVRQIGGCSFVYMRISNVYIVIVVSSNANVACGFKFVVEAVALFKSYFGGAFDEDAIRNNFVLIYELLDEIMDFGYPQNLSPEILKLYITQEGVRSPFSSKPKDKPVPNATLQVTGAVGWRREGLAYKKNEVFLDIVESVNLLMSSKGNVLRCDVTGKVLMKCFLSGMPDLKLGLNDKIGLEKESEMKSRPAKSGKTIELDDVTFHQCVNLTRFNSEKTVSFVPPDGEFELMKYRITEGVNLPFRVLPTIKELGRTRMEVNVKVKSVFGAKMFALGVVVKIPVPKQTAKTNFQVTTGRAKYNPSIDCLVWKIRKFPGQTESTLSAEIELISTMGEKKSWTRPPIQMEFQVPMFTASGLRVRFLKVWEKSGYNTVEWVRYITKAGSYEIRC

SEQ ID NO: 89654 - protein, 438 aa, Arabidopsis thaliana; identical to SEQ ID NO: 76506
  peptide (1)..(438): Ceres Seq. ID no. 12719848

SEQ ID NO: 89655 - protein, 408 aa, Arabidopsis thaliana; identical to SEQ ID NO: 76507
  peptide (1)..(408): Ceres Seq. ID no. 12719849

SEQ ID NO: 89656 - DNA, 1116 bp, Arabidopsis thaliana
  misc_feature (1)..(1116): Ceres Seq. ID no. 12719850
  misc_feature (1)..(1116): Ortholog of  Ceres SEQ ID NO 13599585 as cited in SEQ ID NO 988
  misc_feature (1)..(1116): Ortholog of  Ceres SEQ ID NO 13594624 as cited in SEQ ID NO 55765
  misc_feature (1)..(1116): Ortholog of  Ceres SEQ ID NO 15177682 as cited in SEQ ID NO 0
atttcaaaccacacattcaaactaactctgcaaaaaaaaaaaaaactcagagcagaggagatcgagagagacaaagagagagagagagagagagagagatcttaacaaaaaaatgtctatatccatggcgttattctctccgccgatctcttcctcacttcagaaccctaatctcatccccaagatctcaacctctcttctctccaccaagcgtttctctctaatctccgtccctagagcttcctccgacaatggtacgacttcccccgtcgtggagattccgaagcctgcttctgtggctgtagaggaagttccagttaaatctccagccgaaagctcctccgcttctgaaaacggcgccgttggaggtgaagcgactgattcgagtactgagacggtaatcaaatatcagaatgcgaagtgggttaatggaacttgggatctgaaacagttcgagaaagatggcaaaactgattgggattctgttatcgtttctgaggcaaagaggagaaaatggcttgaagataacccggaaacaacgagtaacgacgagcttgttgtcttcgatacttcgattattccatggtgggcatggatgaagagataccatctacctgaagctgaacttctcaatggtcgtgctgcgatgatagggttcttcatggcttactttgttgatagtcttaccggagtaggacttgttgatcaaatgggaaatttcttctgcaaaacactcttgtttgtggctgtagctggagttctcttcatccgtaagaatgaagatttagacaaacttaaggatctgttcgatgagactacgttatatgacaaacaatggcaagctgcatggaaagagccagattcatcaacagtttcttcaaagaagtgaacaagttcttacaatctttcattttcctttttttgttatgcaataatctgtgaatcagtgaaagtttatctctactgaactactgatcttcagattttgtaatctttctgctttaaaaatctctatgaagtagtctcaaagataatgtatcgaaggtctttgacttgtaaagcagacctatttcgttttgacgcttgataatttaatcaataagagattttattttt

SEQ ID NO: 89657 - protein, 258 aa, Arabidopsis thaliana; identical to SEQ ID NO: 71157
  peptide (1)..(258): Ceres Seq. ID no. 12719851

SEQ ID NO: 89658 - protein, 254 aa, Arabidopsis thaliana; identical to SEQ ID NO: 71158
  peptide (1)..(254): Ceres Seq. ID no. 12719852

SEQ ID NO: 89659 - DNA, 1812 bp, Arabidopsis thaliana
  misc_feature (1)..(1812): Ceres Seq. ID no. 12719864
  misc_feature (1)..(1812): Ortholog of  Ceres SEQ ID NO 13598582 as cited in SEQ ID NO 65294
  misc_feature (1)..(1812): Ortholog of  Ceres SEQ ID NO 15176145 as cited in SEQ ID NO 0
gcagaaaaagaaaagaaaagaaaagactaaaaatttggacgataagcagaaaagagagaggagggcctctcgccctcttattaaaaccttgccttctccaaatctgaagatttctcaatcctaaaatcttttttttttcctctttctccgtttctttattttcggaatccaagatcgtgggtcgatcggtttttacacaatccgatcacgacccatctgctctttttcatcctattttgcttcccttgagaaatggaaatggaatcatgtaagctcttcatcggtggtatatcttgggaaaccagtgaagatcgtcttcgtgactattttcacagttttggtgaggttttagaggctgttattatgaaggatcgtgccactggccgtgctcgtggctttggtttcgttgtctttgctgatcctaatgttgctgaaagagtcgtcttgcttaaacatatcattgatggtaaaattgttgaggcaaagaaggctgttccaagagatgatcacgtagtatttaataaaagtaacagcagccttcagggatcacctggcccatcaaactccaagaagatctttgtgggaggtttggcatcatccgtgacagaggctgagttcaaaaagtattttgctcagtttgggatgatcactgatgttgtggtgatgtatgaccacagaacccagcggcctagaggctttgggttcatttcatatgactctgaggaagctgttgacaaagtactgcagaagacattccacgaactcaatggtaagatggtggaggtcaaactggctgttcctaaggatatggctctcaacacaatgcggaaccaaatgaatgtaaatagctttggcactagtagaatcagttcattactgaatgagtacacccagggattcagcccgagtccaatctctggttatggagtgaaacctgaagttaggtacagtccagcagtaggtaataggggaggattctcaccgtttggacatggatacggaatcgagctgaattttgagccaaaccagactcagaactacggttctggttccagtggaggctttggacgaccctttagccctggatatgctgcgagtctcggcaggttcggtagccaaatggagtcgggaggagctagtgttgggaacggttctgtcctaaatgcagcaccaaagaaccatttatggggaaatggtggtctaggttacatgtcaaactctccgatatcaagaagcagcttcagtggaaactctggaatgtcttcactaggcagcattggtgacaactggggaacagttgcacgtgcacgcagtagctaccacggtgagagaggaggtgtaggattagaagcaatgagaggagttcatgttggtggttacagcagcggctcaagcatcttggaggcagactctctgtacagcgactcgatgtggctttcgctgcctgcaaaggcagaggaaggattgggaatgggaccattggacttcatgtctagaggaccagctggatacatcaacaggcaaccaaacggaggaattgcagcttagagaagtgacaaatctataccatggagatcagatgattgcagaagagagtttttagaagaggaaaaaagtttattaaaaaaaaaaaaattattggtaccaaaaagcttaaagcttttatttactttttactattttgatttgttgttatagctttcttttcacccttttttctaatttggggttttgtttcttttgtttttatcgttaaagaaaaaagatgtaaacttgagtgatataaaaagagacaaagaaacaatgaagtgt

SEQ ID NO: 89660 - protein, 431 aa, Arabidopsis thaliana; identical to SEQ ID NO: 26118
  peptide (1)..(431): Ceres Seq. ID no. 12719865

SEQ ID NO: 89661 - protein, 429 aa, Arabidopsis thaliana; identical to SEQ ID NO: 26119
  peptide (1)..(429): Ceres Seq. ID no. 12719866

SEQ ID NO: 89662 - protein, 394 aa, Arabidopsis thaliana; identical to SEQ ID NO: 26120
  peptide (1)..(394): Ceres Seq. ID no. 12719867

SEQ ID NO: 89663 - DNA, 942 bp, Arabidopsis thaliana
  misc_feature (1)..(942): Ceres Seq. ID no. 12719872
  misc_feature (1)..(942): Ortholog of  Ceres SEQ ID NO 13594809 as cited in SEQ ID NO 51847
  misc_feature (1)..(942): Ortholog of  Ceres SEQ ID NO 14309033 as cited in SEQ ID NO 0
aggggtgactctcgaacacgatgctctgaagactgaaaaaggcgtaaacttttttcacctggctagggttcttggtcgtcgttaactggcatctagtatggctttctgcactaaacttggcggtcactggaaacaaggggtaaatgttccagtgtcatcaatgctcggttctcttcgctacatgtccacaaaactttatattggtggcctgtcccctggaactgacgagcactccttgaaggacgctttctctagcttcaatggagtgacagaggcaagagtcatgacaaacaaagtgaccgggaggtctagaggttatggatttgttaacttcataagcgaggattctgccaactctgctatttcagcaatgaatggacaggagctgaatgggtttaacataagtgtgaacgttgcaaaagattggccaagtttgccattgtctttggatgagagtatagaagaagctgagaagaaagaaaataagatgatgagccgatctgtatggaaagatccattcgttgatgcgttcctgatgaagaagaagaatgcagctctgaacaggaaaatatggtcaaggagatcgacgattcttcccgagtatgttgattcggcggtgagaatctacaacggcaaaactcatgtgcgttgtaagatcacagaggggaaagttgggcataaattcggagagtttgcgtttacaagaaaagtgaagaagcatgctaaagcaaagtagcatctttgagaatgaattggtcagctgcttgaaaggattgtgttgaaaagccaaaaacgaatcaaatcaataaattctcaataggtaaaactcattagctcacatgatcatgtagacgaatattgagctttagaaagtctttagttttcttgtcgatttcgtatttttggaccacaaaagtgccaatgttattttggaattcgatt

SEQ ID NO: 89664 - protein, 212 aa, Arabidopsis thaliana; identical to SEQ ID NO: 25892
  peptide (1)..(212): Ceres Seq. ID no. 12719873

SEQ ID NO: 89665 - protein, 191 aa, Arabidopsis thaliana; identical to SEQ ID NO: 25893
  peptide (1)..(191): Ceres Seq. ID no. 12719874

SEQ ID NO: 89666 - protein, 184 aa, Arabidopsis thaliana; identical to SEQ ID NO: 25894
  peptide (1)..(184): Ceres Seq. ID no. 12719875

SEQ ID NO: 89667 - DNA, 680 bp, Arabidopsis thaliana
  misc_feature (1)..(680): Ceres Seq. ID no. 12719880
  misc_feature (1)..(680): Ortholog of  Ceres SEQ ID NO 13639243 as cited in SEQ ID NO 56820
aggaagggtttatagattaggtttttaagtcgcacctctctctctcactgccgcatcttttcttagggttcttgtttcgctatctcttaaacacaaacagctctgtccgaataatctctcttcaagtacctcttttttctgattctgtatatcgccatgaattactgatttccctctctataaacccatcaaagtaaaccaatttctcctgtgacttgtacctaactcgatcttaccagactggtgatggcgtctttgaaccctttcgatcttctaggagatgatgctgaggatccaagccagctcgctgtggctttgtctcagaaagtcgagaaagctgctgctgctgttcagcctcctaaggccgctaagttcccaaccaagccggctcctccttctcaagcagtgagggagtcgaggaatgctcctcaaggaggtcgtggtgggactggtggacgaggaaaccaaaggtatgcaaaagaagctgcagctccggcgattggagacacagctcagttcccttcgttgggctagtaaagacccctggtccttcagcctcgctatctctgtctttcgtttctctttggttgaattttgttagttttataattttttgttacactttctgaaggtcttttctgcgaaactattacgttttttaagttatgaaaaaaattatt

SEQ ID NO: 89668 - protein, 95 aa, Arabidopsis thaliana
  peptide (1)..(95): Ceres Seq. ID no. 12719881
MASLNPFDLLGDDAEDPSQLAVALSQKVEKAAAAVQPPKAAKFPTKPAPPSQAVRESRNAPQGGRGGTGGRGNQRYAKEAAAPAIGDTAQFPSLG

SEQ ID NO: 89669 - protein, 59 aa, Arabidopsis thaliana
  peptide (1)..(59): Ceres Seq. ID no. 12719882
MLLKEVVVGLVDEETKGMQKKLQLRRLETQLSSLRWASKDPWSFSLAISVFRFSLVEFC

SEQ ID NO: 89670 - DNA, 1077 bp, Arabidopsis thaliana
  misc_feature (1)..(1077): Ceres Seq. ID no. 12719900
  misc_feature (1)..(1077): Ortholog of  Ceres SEQ ID NO 13582332 as cited in SEQ ID NO 59890
  misc_feature (1)..(1077): Ortholog of  Ceres SEQ ID NO 13598278 as cited in SEQ ID NO 68456
atgaagatgaagacagttcttgtaatcataaactgtatattcttggccattggaaactgtggaggccctctaatgatgcgtctctacttccaaaatggtggcgaaaggatctggtttccaagcttccttcaaaccgttggttgtccactcattttcttccctcttctcttatctttcctccgccgtcgtcgttgccttgaagaacaagaaacgactccatttttcctcatgaaacctcctctctttatcgccgctatcgttgttggtttgctcgtgggatttgacaattacctctactcttacgggttagcttatatccctgtttctactgcgtctttgatcatctccgcgcaattaggcttcactgctctctttgcattttttatggtgaagcaaaagttcacacctttcactataaacgctatcgttttgctcactggtggtgccgtagtccttgcccttaactctgatagtgacaagcttgcaaacgagacacacaaggaatatgttgttgggttcatcatgactcttggtgcagctcttctctatgggtttatattgccacttgtcgagctttcttacaagaaatctggtcagcgaatcacgtatacgctcgcgctcgagttccagatggtcttatgctttgctgccacttgtgtctgcctcgtggggatgctagccgctggcgatttcaaggtaaaacatgctttgtttattttcaagaatagggtgatagcaggagaagcaagagattttaagcttggagagtctttgtactatgtggtgattgtgttcacggccataatctggcaagcattttttgtgggagctattgggttgatcttctgtgcatcgtctctggtctctggaattatggtcagtgctctgcttccggtgacggtgatcttggccgtcatttgcttccaggagaagtttcaggcggggaaaggtgtcgctttggctctctccctctggggatcagtctcttatttctatggacaggttaaatccgaggagaagactaaggctcaggatacacaactgtctcagcttccagttactgattatgtagcttaa

SEQ ID NO: 89671 - protein, 358 aa, Arabidopsis thaliana
  peptide (1)..(358): Ceres Seq. ID no. 12719901
MKMKTVLVIINCIFLAIGNCGGPLMMRLYFQNGGERIWFPSFLQTVGCPLIFFPLLLSFLRRRRCLEEQETTPFFLMKPPLFIAAIVVGLLVGFDNYLYSYGLAYIPVSTASLIISAQLGFTALFAFFMVKQKFTPFTINAIVLLTGGAVVLALNSDSDKLANETHKEYVVGFIMTLGAALLYGFILPLVELSYKKSGQRITYTLALEFQMVLCFAATCVCLVGMLAAGDFKVKHALFIFKNRVIAGEARDFKLGESLYYVVIVFTAIIWQAFFVGAIGLIFCASSLVSGIMVSALLPVTVILAVICFQEKFQAGKGVALALSLWGSVSYFYGQVKSEEKTKAQDTQLSQLPVTDYVA

SEQ ID NO: 89672 - protein, 356 aa, Arabidopsis thaliana
  peptide (1)..(356): Ceres Seq. ID no. 12719902
MKTVLVIINCIFLAIGNCGGPLMMRLYFQNGGERIWFPSFLQTVGCPLIFFPLLLSFLRRRRCLEEQETTPFFLMKPPLFIAAIVVGLLVGFDNYLYSYGLAYIPVSTASLIISAQLGFTALFAFFMVKQKFTPFTINAIVLLTGGAVVLALNSDSDKLANETHKEYVVGFIMTLGAALLYGFILPLVELSYKKSGQRITYTLALEFQMVLCFAATCVCLVGMLAAGDFKVKHALFIFKNRVIAGEARDFKLGESLYYVVIVFTAIIWQAFFVGAIGLIFCASSLVSGIMVSALLPVTVILAVICFQEKFQAGKGVALALSLWGSVSYFYGQVKSEEKTKAQDTQLSQLPVTDYVA

SEQ ID NO: 89673 - protein, 334 aa, Arabidopsis thaliana
  peptide (1)..(334): Ceres Seq. ID no. 12719903
MMRLYFQNGGERIWFPSFLQTVGCPLIFFPLLLSFLRRRRCLEEQETTPFFLMKPPLFIAAIVVGLLVGFDNYLYSYGLAYIPVSTASLIISAQLGFTALFAFFMVKQKFTPFTINAIVLLTGGAVVLALNSDSDKLANETHKEYVVGFIMTLGAALLYGFILPLVELSYKKSGQRITYTLALEFQMVLCFAATCVCLVGMLAAGDFKVKHALFIFKNRVIAGEARDFKLGESLYYVVIVFTAIIWQAFFVGAIGLIFCASSLVSGIMVSALLPVTVILAVICFQEKFQAGKGVALALSLWGSVSYFYGQVKSEEKTKAQDTQLSQLPVTDYVA

SEQ ID NO: 89674 - DNA, 1752 bp, Arabidopsis thaliana
  misc_feature (1)..(1752): Ceres Seq. ID no. 12719904
  misc_feature (1)..(1752): Ortholog of  Ceres SEQ ID NO 12586556 as cited in SEQ ID NO 64667
  misc_feature (1)..(1752): Ortholog of  Ceres SEQ ID NO 13660894 as cited in SEQ ID NO 67475
atgacaacaaaagtggcggcaaattctgctgcttacgaagccatagttcgagcaggtcctcgtgtaaagcaacttcaacaagttcatgctcacctcattgtcacgggttatggtcgtagccggagtctcttgacaaagctcattactttagcttgttccgctcgagccatcgcctatactcatcttctcttcctctccgttccccttcccgatgacttcctcttcaattcagttatcaaatcgacttctaagttgcgtttacctttgcattgcgttgcttattaccgtcgtatgttatcttcaaacgtctctccgagtaactacactttcacctctgttatcaagtcttgcgccgatctctctgccttgagaatcggaaaaggtgttcattgtcatgcagtggtttctgggtttggattggatacttacgttcaggctgctttggtgacgttttattcaaagtgtggcgatatggaaggtgcacgccaagtgttcgatagaatgcctgagaagtctattgtggcgtggaattcgttggtttctggatttgagcaaaatgggttggcggatgaagcaattcaggtgttttatcagatgcgagaatcagggtttgagccggattcagcgacgtttgtgagccttctctcggcttgtgcccaaactggtgcggtaagtttaggatcttgggtgcatcagtacattatcagtgagggtcttgacctgaatgttaaacttggtactgcgttgattaacttgtattctaggtgcggtgacgttggaaaagcccgggaagtctttgacaagatgaaggaaactaatgtggctgcttggacggcaatgatctctgcttatggtactcatggatatggccaacaagctgtagagctgtttaataaaatggaggatgattgcggtccaatcccaaataacgtaacatttgtagctgttttatcggcttgcgctcatgctggactcgttgaggaaggacgttcagtctacaagagaatgaccaagagctatagattgatcccaggagtggaacatcatgtttgtatggtagatatgcttgggcgggctggatttcttgacgaagcttataaattcatacatcagcttgatgctacagggaaagcaactgctccagcattgtggacagcgatgcttggagcatgcaagatgcacaggaactatgatctcggtgtagaaattgccaagcgtctcatagcccttgagccagataatcccggtcatcatgtcatgctctcaaatatctatgccttgagtggcaaaacagatgaagtatcacacataagagatggaatgatgaggaataaccttagaaaacaggttggctatagcgtaattgaagtggaaaataagacatatatgttcagtatgggtgatgagtctcatcaagagactggagaaatttatcggtatctggaaactttgataagccggtgtaaggaaatagggtatgcaccggtttctgaagaagttatgcaccaagttgaggaagaggaaaaggagttcgcacttagataccacagcgagaagcttgctgtagcattcggtttgttgaaaactgtagatgtagccattacaattgtgaagaatctacggatctgtgaggattgtcattctgctttcaagtatatttctattgtgtccaatagacagatcactgttagggataagctccggtttcaccattttcaaaatggttcttgttcatgtctggactattggtaa

SEQ ID NO: 89675 - protein, 583 aa, Arabidopsis thaliana
  peptide (1)..(583): Ceres Seq. ID no. 12719905
MTTKVAANSAAYEAIVRAGPRVKQLQQVHAHLIVTGYGRSRSLLTKLITLACSARAIAYTHLLFLSVPLPDDFLFNSVIKSTSKLRLPLHCVAYYRRMLSSNVSPSNYTFTSVIKSCADLSALRIGKGVHCHAVVSGFGLDTYVQAALVTFYSKCGDMEGARQVFDRMPEKSIVAWNSLVSGFEQNGLADEAIQVFYQMRESGFEPDSATFVSLLSACAQTGAVSLGSWVHQYIISEGLDLNVKLGTALINLYSRCGDVGKAREVFDKMKETNVAAWTAMISAYGTHGYGQQAVELFNKMEDDCGPIPNNVTFVAVLSACAHAGLVEEGRSVYKRMTKSYRLIPGVEHHVCMVDMLGRAGFLDEAYKFIHQLDATGKATAPALWTAMLGACKMHRNYDLGVEIAKRLIALEPDNPGHHVMLSNIYALSGKTDEVSHIRDGMMRNNLRKQVGYSVIEVENKTYMFSMGDESHQETGEIYRYLETLISRCKEIGYAPVSEEVMHQVEEEEKEFALRYHSEKLAVAFGLLKTVDVAITIVKNLRICEDCHSAFKYISIVSNRQITVRDKLRFHHFQNGSCSCLDYW

SEQ ID NO: 89676 - protein, 486 aa, Arabidopsis thaliana
  peptide (1)..(486): Ceres Seq. ID no. 12719906
MLSSNVSPSNYTFTSVIKSCADLSALRIGKGVHCHAVVSGFGLDTYVQAALVTFYSKCGDMEGARQVFDRMPEKSIVAWNSLVSGFEQNGLADEAIQVFYQMRESGFEPDSATFVSLLSACAQTGAVSLGSWVHQYIISEGLDLNVKLGTALINLYSRCGDVGKAREVFDKMKETNVAAWTAMISAYGTHGYGQQAVELFNKMEDDCGPIPNNVTFVAVLSACAHAGLVEEGRSVYKRMTKSYRLIPGVEHHVCMVDMLGRAGFLDEAYKFIHQLDATGKATAPALWTAMLGACKMHRNYDLGVEIAKRLIALEPDNPGHHVMLSNIYALSGKTDEVSHIRDGMMRNNLRKQVGYSVIEVENKTYMFSMGDESHQETGEIYRYLETLISRCKEIGYAPVSEEVMHQVEEEEKEFALRYHSEKLAVAFGLLKTVDVAITIVKNLRICEDCHSAFKYISIVSNRQITVRDKLRFHHFQNGSCSCLDYW

SEQ ID NO: 89677 - protein, 426 aa, Arabidopsis thaliana
  peptide (1)..(426): Ceres Seq. ID no. 12719907
MEGARQVFDRMPEKSIVAWNSLVSGFEQNGLADEAIQVFYQMRESGFEPDSATFVSLLSACAQTGAVSLGSWVHQYIISEGLDLNVKLGTALINLYSRCGDVGKAREVFDKMKETNVAAWTAMISAYGTHGYGQQAVELFNKMEDDCGPIPNNVTFVAVLSACAHAGLVEEGRSVYKRMTKSYRLIPGVEHHVCMVDMLGRAGFLDEAYKFIHQLDATGKATAPALWTAMLGACKMHRNYDLGVEIAKRLIALEPDNPGHHVMLSNIYALSGKTDEVSHIRDGMMRNNLRKQVGYSVIEVENKTYMFSMGDESHQETGEIYRYLETLISRCKEIGYAPVSEEVMHQVEEEEKEFALRYHSEKLAVAFGLLKTVDVAITIVKNLRICEDCHSAFKYISIVSNRQITVRDKLRFHHFQNGSCSCLDYW

SEQ ID NO: 89678 - DNA, 660 bp, Arabidopsis thaliana
  misc_feature (1)..(660): Ceres Seq. ID no. 12719936
  misc_feature (1)..(660): Ortholog of  Ceres SEQ ID NO 15175034 as cited in SEQ ID NO 62432
  misc_feature (1)..(660): Ortholog of  Ceres SEQ ID NO 12619999 as cited in SEQ ID NO 66123
  misc_feature (1)..(660): Ortholog of  Ceres SEQ ID NO 13656436 as cited in SEQ ID NO 69154
atgggaacatataaagctgaagacgattacgattacctcttcaaggttgtcttaacgggagattccggtgtaggaaaatcaaatctgctatcccgattcaccagaaacgactttagccacgactcacgctcgaccatcggtgttgaatttgccacacgtaggggcatccaggtcgacgacaagattgtcaaagctcagatatgggacactgccggccaagaaaggtatcgagccatcacgagcgcttattaccgaggagccgttggtgcattactagtctacgacgtgacacggcacgtgacattcgagaacgttgaaagatggctaaaggagctaagagaccacacggacgcaaacactgtgattatgctcgtaggtaacaaagctgatttgaatcaccttcgagccatctctacggaagaagtgaaagattttgcagagagagagaacactttctttatggagacttcggcactcgaagctataaatgtagaaaacgctttcacagaggttcttacacagatttacagagttgtaagcaagaaggctcttgatgctggagatgatccaaccactgccttgcctaaaggacaaatgattaacgtcggaagtagagatgatgtttcagccgtcaagaaatctggttgctgcgcgacatag

SEQ ID NO: 89679 - protein, 219 aa, Arabidopsis thaliana
  peptide (1)..(219): Ceres Seq. ID no. 12719937
MGTYKAEDDYDYLFKVVLTGDSGVGKSNLLSRFTRNDFSHDSRSTIGVEFATRRGIQVDDKIVKAQIWDTAGQERYRAITSAYYRGAVGALLVYDVTRHVTFENVERWLKELRDHTDANTVIMLVGNKADLNHLRAISTEEVKDFAERENTFFMETSALEAINVENAFTEVLTQIYRVVSKKALDAGDDPTTALPKGQMINVGSRDDVSAVKKSGCCAT

SEQ ID NO: 89680 - DNA, 1969 bp, Arabidopsis thaliana
  misc_feature (1)..(1969): Ceres Seq. ID no. 12719938
  misc_feature (1)..(1969): Ortholog of  Ceres SEQ ID NO 13596601 as cited in SEQ ID NO 62486
atcaaccaaaacctcaacctaacttagggcaaaaagcttttttttttaagtgtcatattgccaaaagttccattggtctgcctttcaagcgagccttggctagcggacaactgttgtaattcactgcaattccatgaagtcgggagcatcagccgcgtcgccaacggcgaaaagcttcaattttggatcttccagactcttagccttggcgcagcagctgcgtgtatacaagccgccgctttcgtcatccttcgacgagagggaagagctgcttgcgtacaaggaaagcaccaggaaatcgataacccacgttgggtttcaggaatctatggctccggtgaggttcagaccgaagaaagctgctgtcttgatatgtctcttcgaaggagacgatggtgatttgcgtgtgattcttactaagaggtcttccacattgtctactcactcaggagaagtttctttgccaggtggtaaagcagaagagcatgataaggatgatgggattactgcaactagagaggcagaggaagagattggattagacccttcgcttgttgatgttgttgctttcctcgaaccatttctatctcagcatctgcttagagtaattcctgtggtaggaatattatgggacagaaaagcattcaatccaacaccaaatcctgcagaagtggaagccgtgcttgatgcaccctttgaaatgtttctgaaggatgagaaccggagatccgaggagtttgattggatgggagaaaagcatttggtccacttctttgattacaaaacaggagatagtgattatgttatatggggcttaactgcaagaatcttgattagagctgcaacagtggtttatcaacgaccacctgctttcattgaacagaaacctaacttgaagtactccaaaatgaaccaggctactcgtttatatggatggctgaagccgctggcaaatttacatgaatcttgtgaaaatggaagattactaggtcatgtcccagcatactgcttgcgttatctagttggaatatcatcaagatgatcgtgtttgtgcatatctcaatcgtttgtgctgaaagacaagctcattcttggaaagtctttcagcatgctttttggatgactctggtatcggaaatcaacagatttaagttatctaattcatctgatgcaagagcaaaggttaaaaagctaaagggaaggctgctgcgtagatccatcttctagatgctttgtttagctctttcatgttctaatgtctcaagagccactgatgcagctccttgaaaacatgggtagctcccgttttgcaagaagtgtgttttttggtgaaaccccaaccatttgacctgaaagtaaagctcgttcttgaaaaatctgccagcaggtgggtagtgcttgtgctgctttctgatgttttccggtttttctggtggaacaaattaatacatctgatgcgaaagaaaagctcgttcttgccttcttggagaatctggcagcatagcgctttgtcatggtcaatgtgtgtctgatattatctggttggaaatctcaatcatatgacctgatagcaaaggagcatttgacttcagttaaaagagctacagacacgctgttctaataggtctgagatgaaattccgtgtaactttggtctcctgaagaagccaagtggtcgataaagccatcactcgtcttatggaacaaaggagaatgcctaaatataatgaatcaacgttgccaaaactaagatggatgataaaccttataagttagggatcaaattcaataaaaaataaacaatgagaaaagtaaaacagtacatgtatgaagtgacacacgagtgaaaaagaagactaaatcgtcttattgtactccaaacattgatcctctacatttctttaggttatatgtaattatgcatgctacaacttaagcatattgtcgtaatttagtgatatattggagcc

SEQ ID NO: 89681 - protein, 302 aa, Arabidopsis thaliana
  peptide (1)..(302): Ceres Seq. ID no. 12719939
MKSGASAASPTAKSFNFGSSRLLALAQQLRVYKPPLSSSFDEREELLAYKESTRKSITHVGFQESMAPVRFRPKKAAVLICLFEGDDGDLRVILTKRSSTLSTHSGEVSLPGGKAEEHDKDDGITATREAEEEIGLDPSLVDVVAFLEPFLSQHLLRVIPVVGILWDRKAFNPTPNPAEVEAVLDAPFEMFLKDENRRSEEFDWMGEKHLVHFFDYKTGDSDYVIWGLTARILIRAATVVYQRPPAFIEQKPNLKYSKMNQATRLYGWLKPLANLHESCENGRLLGHVPAYCLRYLVGISSR

SEQ ID NO: 89682 - protein, 237 aa, Arabidopsis thaliana
  peptide (1)..(237): Ceres Seq. ID no. 12719940
MAPVRFRPKKAAVLICLFEGDDGDLRVILTKRSSTLSTHSGEVSLPGGKAEEHDKDDGITATREAEEEIGLDPSLVDVVAFLEPFLSQHLLRVIPVVGILWDRKAFNPTPNPAEVEAVLDAPFEMFLKDENRRSEEFDWMGEKHLVHFFDYKTGDSDYVIWGLTARILIRAATVVYQRPPAFIEQKPNLKYSKMNQATRLYGWLKPLANLHESCENGRLLGHVPAYCLRYLVGISSR

SEQ ID NO: 89683 - DNA, 750 bp, Arabidopsis thaliana
  misc_feature (1)..(750): Ceres Seq. ID no. 12719941
  misc_feature (1)..(750): Ortholog of  Ceres SEQ ID NO 13592859 as cited in SEQ ID NO 20479
atgggttctgggaatttgattaaggcaataattagattgaagaagagtaaacaaggaactgaaaagaaaaaaactagtgctgtgaaaccaaaaaaaggttccaagaagaagggtacatcactagttactcgtagtgaggattgggctgctactcggattcagactgcttttaaagcctataaggctagaaaaagcttacggcgtctaaaaggaattgcaagagcaaagttatcaactgagaaacaatctgtgaagaaccaagctgtggtcacattgaggtatcttcactcatggagtaaaatacagtcagagataaaggctcgccgagtttgcatggtaaccgaatggcgactgaagaataaaagattagagcatcagcaaaagcttgaggcaaagcttcatgatgttgaggttgaatggaatggtgggtcagagacaaaagatgaaatcttggagaggatacttcaaagggaagaagcgacgattaagcgagaaagagccttggcatatgctttctctcatcagctaggaaacactaattggggttggagctggaaagagcgttggatatctgctcggccttgggaagtaagatattcagtgactcctaagaaaccaaagagctcaaagacagactcaaattcaccagcaaagagaacagtgtcattatcatcagttccagccaaaactccgtttcctggagctagaaacacagtgaaaccgcggagattgtcatttccaggtgcttga

SEQ ID NO: 89684 - protein, 249 aa, Arabidopsis thaliana
  peptide (1)..(249): Ceres Seq. ID no. 12719942
MGSGNLIKAIIRLKKSKQGTEKKKTSAVKPKKGSKKKGTSLVTRSEDWAATRIQTAFKAYKARKSLRRLKGIARAKLSTEKQSVKNQAVVTLRYLHSWSKIQSEIKARRVCMVTEWRLKNKRLEHQQKLEAKLHDVEVEWNGGSETKDEILERILQREEATIKRERALAYAFSHQLGNTNWGWSWKERWISARPWEVRYSVTPKKPKSSKTDSNSPAKRTVSLSSVPAKTPFPGARNTVKPRRLSFPGA

SEQ ID NO: 89685 - protein, 138 aa, Arabidopsis thaliana
  peptide (1)..(138): Ceres Seq. ID no. 12719943
MVTEWRLKNKRLEHQQKLEAKLHDVEVEWNGGSETKDEILERILQREEATIKRERALAYAFSHQLGNTNWGWSWKERWISARPWEVRYSVTPKKPKSSKTDSNSPAKRTVSLSSVPAKTPFPGARNTVKPRRLSFPGA

SEQ ID NO: 89686 - DNA, 1038 bp, Arabidopsis thaliana
  misc_feature (1)..(1038): Ceres Seq. ID no. 12719946
  misc_feature (1)..(1038): Ortholog of  Ceres SEQ ID NO 13502952 as cited in SEQ ID NO 62271
  misc_feature (1)..(1038): Ortholog of  Ceres SEQ ID NO 13502973 as cited in SEQ ID NO 68052
  misc_feature (1)..(1038): Ortholog of  Ceres SEQ ID NO 13596000 as cited in SEQ ID NO 68188
atggcatcaatcatggtattggtcactgttttaatcattcttttcacgggtttcagaatctctcaagctacgtctcgtactgtcatctttcgcgagcagtcaatggttgataaacatgagcaatggatggctcgattttctcgtgaataccgtgatgagctcgagaaaaatatgagacgcgatgtgtttaagaagaacttgaagttcattgagaacttcaacaaaaaagggaacaaaagctacaagcttggtgtcaatgaattcgcggattggaccaacgaggagttcctagcaatacataccggactaaagggcctaactgaagtttccccatccaaggtggtcgccaaaacgatatcgtctcagacttggaacgtcagtgacatggtagtcgagagcaaggactggagagctgaaggagctgtcactcctgtcaagtaccaaggccaatgcggatgttgctgggcattttcggctgtagcagcagtggaaggtgtggctaagatcgccggcgggaaccttgtatctctgtccgaacaacagcttctagactgcgacagagagtacgaccgaggctgcgacggtgggataatgtcggacgctttcaactatgtagtccaaaatcgaggcatcgcatcagagaatgactactcttaccaaggatcagatgggggatgccggtccaatgcaagaccagctgcacgtatcagtggattccaaaccgtccctagcaacaacgagcgggccttgctcgaggctgtatcgaggcaaccagtctctgtgtcgatggacgcgactggggacgggttcatgcattactcgggaggagtatatgatgggccttgtgggaccagctcgaaccacgctgttacgtttgttgggtatggaacgagccaggatggaactaagtactggctggctaaaaactcttggggcgaaacttggggagaaaaaggttacattaggatccgaagagacgtggcttggcctcaaggcatgtgtggtgtagcacagtatgctttttatccggttgcgtaa

SEQ ID NO: 89687 - protein, 345 aa, Arabidopsis thaliana
  peptide (1)..(345): Ceres Seq. ID no. 12719947
MASIMVLVTVLIILFTGFRISQATSRTVIFREQSMVDKHEQWMARFSREYRDELEKNMRRDVFKKNLKFIENFNKKGNKSYKLGVNEFADWTNEEFLAIHTGLKGLTEVSPSKVVAKTISSQTWNVSDMVVESKDWRAEGAVTPVKYQGQCGCCWAFSAVAAVEGVAKIAGGNLVSLSEQQLLDCDREYDRGCDGGIMSDAFNYVVQNRGIASENDYSYQGSDGGCRSNARPAARISGFQTVPSNNERALLEAVSRQPVSVSMDATGDGFMHYSGGVYDGPCGTSSNHAVTFVGYGTSQDGTKYWLAKNSWGETWGEKGYIRIRRDVAWPQGMCGVAQYAFYPVA

SEQ ID NO: 89688 - protein, 341 aa, Arabidopsis thaliana
  peptide (1)..(341): Ceres Seq. ID no. 12719948
MVLVTVLIILFTGFRISQATSRTVIFREQSMVDKHEQWMARFSREYRDELEKNMRRDVFKKNLKFIENFNKKGNKSYKLGVNEFADWTNEEFLAIHTGLKGLTEVSPSKVVAKTISSQTWNVSDMVVESKDWRAEGAVTPVKYQGQCGCCWAFSAVAAVEGVAKIAGGNLVSLSEQQLLDCDREYDRGCDGGIMSDAFNYVVQNRGIASENDYSYQGSDGGCRSNARPAARISGFQTVPSNNERALLEAVSRQPVSVSMDATGDGFMHYSGGVYDGPCGTSSNHAVTFVGYGTSQDGTKYWLAKNSWGETWGEKGYIRIRRDVAWPQGMCGVAQYAFYPVA

SEQ ID NO: 89689 - protein, 311 aa, Arabidopsis thaliana
  peptide (1)..(311): Ceres Seq. ID no. 12719949
MVDKHEQWMARFSREYRDELEKNMRRDVFKKNLKFIENFNKKGNKSYKLGVNEFADWTNEEFLAIHTGLKGLTEVSPSKVVAKTISSQTWNVSDMVVESKDWRAEGAVTPVKYQGQCGCCWAFSAVAAVEGVAKIAGGNLVSLSEQQLLDCDREYDRGCDGGIMSDAFNYVVQNRGIASENDYSYQGSDGGCRSNARPAARISGFQTVPSNNERALLEAVSRQPVSVSMDATGDGFMHYSGGVYDGPCGTSSNHAVTFVGYGTSQDGTKYWLAKNSWGETWGEKGYIRIRRDVAWPQGMCGVAQYAFYPVA

SEQ ID NO: 89690 - DNA, 1509 bp, Arabidopsis thaliana
  misc_feature (1)..(1509): Ceres Seq. ID no. 12719957
  misc_feature (1)..(1509): Ortholog of  Ceres SEQ ID NO 13599900 as cited in SEQ ID NO 531
  misc_feature (1)..(1509): Ortholog of  Ceres SEQ ID NO 13596509 as cited in SEQ ID NO 62004
  misc_feature (1)..(1509): Ortholog of  Ceres SEQ ID NO 13659971 as cited in SEQ ID NO 67565
  misc_feature (1)..(1509): Ortholog of  Ceres SEQ ID NO 13500385 as cited in SEQ ID NO 67583
atggctcaagtactatctacaccgttggccatccccggcccaacgccaatacaattcatggcgggtcttcttgctcgaatcgttacaaaaaatacgaacaaagagaccagtactccagagagcccgaggagtccgcggactccacaaggctctattctcatggacaagtacgaaataggaaagcttcttggccacggaagcttcgctaaggtctatttagcacggaacattcattctggcgaggatgttgccatcaaagtcattgacaaggagaagatagtgaagagtggattggccggtcatattaaacgggagatttcaatcctccgccgtgtccgccacccttacattgtacacctactcgaggttatggctacgaagacaaagatttacattgtgatggagtacgttcgaggcggagagctttataatacggtggctagaggacggcttcgagaaggaaccgcgaggagatatttccagcagttgatctcatccgttgctttctgccacagccgcggtgtttaccaccgcgatctcaagcttgagaatctgcttttggacgacaaggggaacgtgaaagtctctgactttgggctcagcgttgtctcggagcagctcaagcaagaaggaatctgtcaaacgttttgcgggacaccagcttatttggcgcctgaggttttgacaaggaaaggttatgaaggtgcaaaagccgatatttggtcttgtggagtgatcttgtttgtattgatggctggttatcttccatttgatgacaagaacatattggttatgtatacaaagatatataaagggcagtttaagtgtcctaaatggttttctcctgagcttgcaaggcttgtgacccggatgctagacacgaatccagatacccgaatcacaataccggagatcatgaagcatagatggttcaagaaagggttcaaacatgtcaaattctatattgaaaacgataagttatgtagggaggatgatgacaatgatgatgacgattcatcatcattgtcatcaggccgatcatcgactgcttcagaaggagatgcagagtttgatattaaaagggttgattcaatgccgagacccgcgagtctaaacgcatttgacatcttatcgttctcagatctttcgggtttgtttgaagaaggtggacaaggagcaaggtttgtatctgctgctcctatgacaaagatcatatcgaaattggaagagattgccaaagaggtgaaatttatggtgaggaagaaggattggagcgtgaggctagaaggttgtagagaaggagctaaaggaccgttgacaattagagtcgagatctttgagctgacgccatctcttgtggtggttgaagtgaagaagaaaggaggaaatatagaagagtatgaagagttttgcaacaaggaacttagaccacagctggagaaactgatgcattaccaagcagatgaagttgaagaagtaatgtgtttgccacctgaaattgaacagtga

SEQ ID NO: 89691 - protein, 502 aa, Arabidopsis thaliana
  peptide (1)..(502): Ceres Seq. ID no. 12719958
MAQVLSTPLAIPGPTPIQFMAGLLARIVTKNTNKETSTPESPRSPRTPQGSILMDKYEIGKLLGHGSFAKVYLARNIHSGEDVAIKVIDKEKIVKSGLAGHIKREISILRRVRHPYIVHLLEVMATKTKIYIVMEYVRGGELYNTVARGRLREGTARRYFQQLISSVAFCHSRGVYHRDLKLENLLLDDKGNVKVSDFGLSVVSEQLKQEGICQTFCGTPAYLAPEVLTRKGYEGAKADIWSCGVILFVLMAGYLPFDDKNILVMYTKIYKGQFKCPKWFSPELARLVTRMLDTNPDTRITIPEIMKHRWFKKGFKHVKFYIENDKLCREDDDNDDDDSSSLSSGRSSTASEGDAEFDIKRVDSMPRPASLNAFDILSFSDLSGLFEEGGQGARFVSAAPMTKIISKLEEIAKEVKFMVRKKDWSVRLEGCREGAKGPLTIRVEIFELTPSLVVVEVKKKGGNIEEYEEFCNKELRPQLEKLMHYQADEVEEVMCLPPEIEQ

SEQ ID NO: 89692 - protein, 483 aa, Arabidopsis thaliana
  peptide (1)..(483): Ceres Seq. ID no. 12719959
MAGLLARIVTKNTNKETSTPESPRSPRTPQGSILMDKYEIGKLLGHGSFAKVYLARNIHSGEDVAIKVIDKEKIVKSGLAGHIKREISILRRVRHPYIVHLLEVMATKTKIYIVMEYVRGGELYNTVARGRLREGTARRYFQQLISSVAFCHSRGVYHRDLKLENLLLDDKGNVKVSDFGLSVVSEQLKQEGICQTFCGTPAYLAPEVLTRKGYEGAKADIWSCGVILFVLMAGYLPFDDKNILVMYTKIYKGQFKCPKWFSPELARLVTRMLDTNPDTRITIPEIMKHRWFKKGFKHVKFYIENDKLCREDDDNDDDDSSSLSSGRSSTASEGDAEFDIKRVDSMPRPASLNAFDILSFSDLSGLFEEGGQGARFVSAAPMTKIISKLEEIAKEVKFMVRKKDWSVRLEGCREGAKGPLTIRVEIFELTPSLVVVEVKKKGGNIEEYEEFCNKELRPQLEKLMHYQADEVEEVMCLPPEIEQ

SEQ ID NO: 89693 - protein, 449 aa, Arabidopsis thaliana
  peptide (1)..(449): Ceres Seq. ID no. 12719960
MDKYEIGKLLGHGSFAKVYLARNIHSGEDVAIKVIDKEKIVKSGLAGHIKREISILRRVRHPYIVHLLEVMATKTKIYIVMEYVRGGELYNTVARGRLREGTARRYFQQLISSVAFCHSRGVYHRDLKLENLLLDDKGNVKVSDFGLSVVSEQLKQEGICQTFCGTPAYLAPEVLTRKGYEGAKADIWSCGVILFVLMAGYLPFDDKNILVMYTKIYKGQFKCPKWFSPELARLVTRMLDTNPDTRITIPEIMKHRWFKKGFKHVKFYIENDKLCREDDDNDDDDSSSLSSGRSSTASEGDAEFDIKRVDSMPRPASLNAFDILSFSDLSGLFEEGGQGARFVSAAPMTKIISKLEEIAKEVKFMVRKKDWSVRLEGCREGAKGPLTIRVEIFELTPSLVVVEVKKKGGNIEEYEEFCNKELRPQLEKLMHYQADEVEEVMCLPPEIEQ

SEQ ID NO: 89694 - DNA, 1003 bp, Arabidopsis thaliana
  misc_feature (1)..(1003): Ceres Seq. ID no. 12720005
  misc_feature (1)..(1003): Ortholog of  Ceres SEQ ID NO 13595072 as cited in SEQ ID NO 55971
atccaatttcatcacatcttattaactaaagagccttttacttgcgccacactctcaccgcaatggccgcctcgacaatggctctctcctctcctgctttgaccggaaaggccgttaagctatccccggcggcctccgaagtatttggaaccggccgaatcaccatgcgcaaagcctccaagcccaccggtccatccggcagcccatggtacggatccgaccgagtcaagtacttgggtccattctccggtgagcctccgagctacctcactggagagttccccggtgattacgggtgggacactgccggtctatccgccgatcccgagaccttcgctaggaaccgtgagctagaagttatccacagcagatgggccatgctcggagccctaggctgcgttttccctgagctattggctaggaacggagtgaagttcggagaagcggtttggttcaaggctggttcacagatcttcagcgacggaggattggactacttgggcaacccgagcttggtccacgctcagagcatcttagccatttgggctactcaagttatcctcatgggagctgttgagggctacagagtcgccggagatggtccattgggagaagcagaggacttgctttacccaggtgggagcttcgacccattgggcctcgctactgaccccgaggctttcgcggagttgaaggtgaaggagctcaagaacggaaggttggctatgttctctatgtttggattcttcgttcaggccattgtcaccggaaagggaccgttggagaacctcgcggaccacttggctgatccagtcaacaacaatgcatgggccttcgctaccaacttcgtccccggaaagtgagtttaatttgtgatcgagttgtgtgtatccggtttgttgcatcttggaaatgtgatgcagatttcatatcttgtaaattactttgtatgtgtgtgaaatatttaagaagctttatgatattgatggatcagtcacttact

SEQ ID NO: 89695 - protein, 266 aa, Arabidopsis thaliana
  peptide (1)..(266): Ceres Seq. ID no. 12720006
MAASTMALSSPALTGKAVKLSPAASEVFGTGRITMRKASKPTGPSGSPWYGSDRVKYLGPFSGEPPSYLTGEFPGDYGWDTAGLSADPETFARNRELEVIHSRWAMLGALGCVFPELLARNGVKFGEAVWFKAGSQIFSDGGLDYLGNPSLVHAQSILAIWATQVILMGAVEGYRVAGDGPLGEAEDLLYPGGSFDPLGLATDPEAFAELKVKELKNGRLAMFSMFGFFVQAIVTGKGPLENLADHLADPVNNNAWAFATNFVPGK

SEQ ID NO: 89696 - protein, 261 aa, Arabidopsis thaliana
  peptide (1)..(261): Ceres Seq. ID no. 12720007
MALSSPALTGKAVKLSPAASEVFGTGRITMRKASKPTGPSGSPWYGSDRVKYLGPFSGEPPSYLTGEFPGDYGWDTAGLSADPETFARNRELEVIHSRWAMLGALGCVFPELLARNGVKFGEAVWFKAGSQIFSDGGLDYLGNPSLVHAQSILAIWATQVILMGAVEGYRVAGDGPLGEAEDLLYPGGSFDPLGLATDPEAFAELKVKELKNGRLAMFSMFGFFVQAIVTGKGPLENLADHLADPVNNNAWAFATNFVPGK

SEQ ID NO: 89697 - protein, 232 aa, Arabidopsis thaliana
  peptide (1)..(232): Ceres Seq. ID no. 12720008
MRKASKPTGPSGSPWYGSDRVKYLGPFSGEPPSYLTGEFPGDYGWDTAGLSADPETFARNRELEVIHSRWAMLGALGCVFPELLARNGVKFGEAVWFKAGSQIFSDGGLDYLGNPSLVHAQSILAIWATQVILMGAVEGYRVAGDGPLGEAEDLLYPGGSFDPLGLATDPEAFAELKVKELKNGRLAMFSMFGFFVQAIVTGKGPLENLADHLADPVNNNAWAFATNFVPGK

SEQ ID NO: 89698 - DNA, 1925 bp, Arabidopsis thaliana
  misc_feature (1)..(1925): Ceres Seq. ID no. 12720085
  misc_feature (1)..(1925): Ortholog of  Ceres SEQ ID NO 13596319 as cited in SEQ ID NO 67933
actagtcaaacaatggaacaaaattagatggtgtctctttagctcttcttcattaacaaatctttgaagcagagagaatggaaggtgaagagagaggatactggagatggagcaagagagatttctttcctgaggaatctttccagagctttggtagttacagagctgctctgtctcagacatgttccaggttcaagaacaggttggttagtaggtctgatgatgagaacgagcggtttgagctcaagaaacagagtgagcacgagatgaaacggtgtttgacatggtgggatttagtatggtttggattcgggtcggtgattggagctggaatctttgtcttgacaggtcaagaagctcatgagcaagcaggaccagctattgtcttgtcttatgttgtttcaggtctttctgctatgctctctgtcttctgctacacggaattcgctgtggaaatccctgtggctggtggttctttcgcctatctacggattgagcttggggattttgcggcgttcatcactgcagggaatatacttcttgagagtattgttggaactgcagctgttgctagagcctggacttcatattttgcaactcttctgaatcgtagcccgaacgctctacggatcaaaacagatctcagttccggttttaatctcttggacccaatagctgttgttgttatagccgcttcagctacaattgcatcgatcagcacaagaaagacttcattgctcaactggatagcttctgctatcaacactttagtgatattttttgttataatcgctggttttatccacgccgacacatcaaatttgactccattcttgccttttggacctgagggagtgttccgagcagctgcagttgtgtactttgcatatggaggatttgatagcatagcaacaatggctgaagaaaccaagaatccatcaagagacataccaatcgggttactcggttcaatgtcgataataacagtgatatactgcttgatggcattatccttgagtatgatgcagaagtatacagatatagatccaaatgcagcttactcagtagcgtttcagagcgttggaatgaaatggggaaagtacttggtggcacttggtgctctcaaagggatgaccacagttcttttagtaggagcattgggacaagcgagatacgttactcacatcgcacggacccacatgattccgcctatatttgcccttgtccatcccaaaacaggaacaccgataaacgctaacctcctagtagcaattccaagtgctctcattgctttcttttctggtttagatgttttggcaagcctcttatcgataagtactctcttcatcttcacaatgatgcctatcgcactactcgtgaggagatactacgtgagacaagatactccaagagttcatctcattaagctcatcacttgtctcttattcgtcgttgtttcttcaatgggtacttcggcgtattggggaatgcagcgcaagggatcatggatcggttacacagtaacagttcctttctggttcttgggaactttggggatcgtattctttgttcctcagcaacgaacaccgaaagtgtggggcgtaccgttagtgccatggctcccgtgcttatcaatagcaacaaacatctttctcatgggatctttgggagcaatggcttttgtaaggtttggtgtttgcactttagccatgttactatactatttcctgcttggtcttcatgcaacattcgatatggctcatcagcaaattgtgccaagaacataacaactatggaaaacagagaagaaatgtaacctctgaaaaggtctcttccttccaccctagtgttattctgctttcttcatgaactgcttcgttctgtattctctgtaatctgcaaaaagtaaagtttgtatatataag

SEQ ID NO: 89699 - protein, 569 aa, Arabidopsis thaliana
  peptide (1)..(569): Ceres Seq. ID no. 12720086
MEGEERGYWRWSKRDFFPEESFQSFGSYRAALSQTCSRFKNRLVSRSDDENERFELKKQSEHEMKRCLTWWDLVWFGFGSVIGAGIFVLTGQEAHEQAGPAIVLSYVVSGLSAMLSVFCYTEFAVEIPVAGGSFAYLRIELGDFAAFITAGNILLESIVGTAAVARAWTSYFATLLNRSPNALRIKTDLSSGFNLLDPIAVVVIAASATIASISTRKTSLLNWIASAINTLVIFFVIIAGFIHADTSNLTPFLPFGPEGVFRAAAVVYFAYGGFDSIATMAEETKNPSRDIPIGLLGSMSIITVIYCLMALSLSMMQKYTDIDPNAAYSVAFQSVGMKWGKYLVALGALKGMTTVLLVGALGQARYVTHIARTHMIPPIFALVHPKTGTPINANLLVAIPSALIAFFSGLDVLASLLSISTLFIFTMMPIALLVRRYYVRQDTPRVHLIKLITCLLFVVVSSMGTSAYWGMQRKGSWIGYTVTVPFWFLGTLGIVFFVPQQRTPKVWGVPLVPWLPCLSIATNIFLMGSLGAMAFVRFGVCTLAMLLYYFLLGLHATFDMAHQQIVPRT

SEQ ID NO: 89700 - protein, 506 aa, Arabidopsis thaliana
  peptide (1)..(506): Ceres Seq. ID no. 12720087
MKRCLTWWDLVWFGFGSVIGAGIFVLTGQEAHEQAGPAIVLSYVVSGLSAMLSVFCYTEFAVEIPVAGGSFAYLRIELGDFAAFITAGNILLESIVGTAAVARAWTSYFATLLNRSPNALRIKTDLSSGFNLLDPIAVVVIAASATIASISTRKTSLLNWIASAINTLVIFFVIIAGFIHADTSNLTPFLPFGPEGVFRAAAVVYFAYGGFDSIATMAEETKNPSRDIPIGLLGSMSIITVIYCLMALSLSMMQKYTDIDPNAAYSVAFQSVGMKWGKYLVALGALKGMTTVLLVGALGQARYVTHIARTHMIPPIFALVHPKTGTPINANLLVAIPSALIAFFSGLDVLASLLSISTLFIFTMMPIALLVRRYYVRQDTPRVHLIKLITCLLFVVVSSMGTSAYWGMQRKGSWIGYTVTVPFWFLGTLGIVFFVPQQRTPKVWGVPLVPWLPCLSIATNIFLMGSLGAMAFVRFGVCTLAMLLYYFLLGLHATFDMAHQQIVPRT

SEQ ID NO: 89701 - protein, 456 aa, Arabidopsis thaliana
  peptide (1)..(456): Ceres Seq. ID no. 12720088
MLSVFCYTEFAVEIPVAGGSFAYLRIELGDFAAFITAGNILLESIVGTAAVARAWTSYFATLLNRSPNALRIKTDLSSGFNLLDPIAVVVIAASATIASISTRKTSLLNWIASAINTLVIFFVIIAGFIHADTSNLTPFLPFGPEGVFRAAAVVYFAYGGFDSIATMAEETKNPSRDIPIGLLGSMSIITVIYCLMALSLSMMQKYTDIDPNAAYSVAFQSVGMKWGKYLVALGALKGMTTVLLVGALGQARYVTHIARTHMIPPIFALVHPKTGTPINANLLVAIPSALIAFFSGLDVLASLLSISTLFIFTMMPIALLVRRYYVRQDTPRVHLIKLITCLLFVVVSSMGTSAYWGMQRKGSWIGYTVTVPFWFLGTLGIVFFVPQQRTPKVWGVPLVPWLPCLSIATNIFLMGSLGAMAFVRFGVCTLAMLLYYFLLGLHATFDMAHQQIVPRT

SEQ ID NO: 89702 - DNA, 1802 bp, Arabidopsis thaliana
  misc_feature (1)..(1802): Ceres Seq. ID no. 12720123
  misc_feature (1)..(1802): Ortholog of  Ceres SEQ ID NO 14314220 as cited in SEQ ID NO 57321
cttcttcttcttcttcgcgaaaacttggaaactgttttaggaacaaaaaccagaggctttgatttggaaaaaaccctaattttcaacaaccctaaatcccctaccatttctccccaaatcctctttccaagttccatactctttatgtaaatgcatctgaagaaatcatctgtaacagaacgacgattaatcgggaaagacgattccgatccaaaccaaatccccaatccgattcatcatcatcatcagacccagaataaaaatcgaaccgccattgataataaaggctctggcttcactaagtataatcatccccaaggtcagaatcatcatcacacggttgatatcccaaccggtgttgaccatttccgacgaagaagcgcacgggcacgatcaggatcgatttcttcatttttcccatcaaatcttttgtcttctctttcttcctatcgtcctgtgattgctcggttcttgaggaagcttctacgctatacccttagagcccgtttgatttgtttccatcttcgtttcttgcttcttctcgctgtccctcctttatacatcttcttccttgttatcaatcttcgtatcttccttcgtctagtctttgtgattatcgctttatccttcatcctctcgatctctctcagattcgctcttcctcacttaacatcaattcgtctttttgtcgcacgcttgctgacatttatccctgccagattctcttcctctcagccgagcactgaccgagttgtttggtccattgggtcgaagccagttgcggagaataataagacaaattcaggatcttgggttcagaagtatggcactaatgatatgtatgaaggagagtttcatagaggaaagtgttcaggaagtggagtttattactattctatgaaaggcaaatacgaaggagagtggattgatgggaaatatgatggttatggagtagaaacatggtctaaagggagtaggtatcgaggtcaatataggttaggtctaagacatggaattggagtttatacgttttatacaggagatgtgtatgctggtgaatggtctaatgggcagtgccatggttgtggtgtatatacctctgaggatggaagtagatatgacggagagttcaagtggggtgtcaaacatggccttggtagttaccatttcagaaatggtgatgcgtatgctggggagtattttgcagacaagatgcatggttttggagtgtatcactttgcgaacgggcataagtatgaaggagcttggcacgagggaagaaggcaagggcttggtatgtatactttcaggaatggtgatacacaagccggtcattgggaagacggtgtactcagttgtcctaccgagcagactatccgtcctggatcatcttttaccataagccattccaaagttgttgatgctgttgagcaagcaaggaaagcagctgagaaagcacatgaagttgtgaaagtggaagagaggatcaagagagcggtgatggctgcaaatagagcagcgaatgcagctagagtagcagccgtgaaggctgtccaatcccagacctttcacaggaatgatggcgatcttgaaaccaattgttgagcataggttagaagagatcttccttaacaggttttcttgttcctttatgagcaaagctagtttgaaactgtagataataaactagagatgatctttgtatatcaacaagaaaaaaattgggtctgcttcatagaatgcaactgacatacatgtagccaaaaatccctatcttgattaaacaattagaagaatctggt

SEQ ID NO: 89703 - protein, 484 aa, Arabidopsis thaliana
  peptide (1)..(484): Ceres Seq. ID no. 12720124
MHLKKSSVTERRLIGKDDSDPNQIPNPIHHHHQTQNKNRTAIDNKGSGFTKYNHPQGQNHHHTVDIPTGVDHFRRRSARARSGSISSFFPSNLLSSLSSYRPVIARFLRKLLRYTLRARLICFHLRFLLLLAVPPLYIFFLVINLRIFLRLVFVIIALSFILSISLRFALPHLTSIRLFVARLLTFIPARFSSSQPSTDRVVWSIGSKPVAENNKTNSGSWVQKYGTNDMYEGEFHRGKCSGSGVYYYSMKGKYEGEWIDGKYDGYGVETWSKGSRYRGQYRLGLRHGIGVYTFYTGDVYAGEWSNGQCHGCGVYTSEDGSRYDGEFKWGVKHGLGSYHFRNGDAYAGEYFADKMHGFGVYHFANGHKYEGAWHEGRRQGLGMYTFRNGDTQAGHWEDGVLSCPTEQTIRPGSSFTISHSKVVDAVEQARKAAEKAHEVVKVEERIKRAVMAANRAANAARVAAVKAVQSQTFHRNDGDLETNC

SEQ ID NO: 89704 - protein, 255 aa, Arabidopsis thaliana
  peptide (1)..(255): Ceres Seq. ID no. 12720125
MYEGEFHRGKCSGSGVYYYSMKGKYEGEWIDGKYDGYGVETWSKGSRYRGQYRLGLRHGIGVYTFYTGDVYAGEWSNGQCHGCGVYTSEDGSRYDGEFKWGVKHGLGSYHFRNGDAYAGEYFADKMHGFGVYHFANGHKYEGAWHEGRRQGLGMYTFRNGDTQAGHWEDGVLSCPTEQTIRPGSSFTISHSKVVDAVEQARKAAEKAHEVVKVEERIKRAVMAANRAANAARVAAVKAVQSQTFHRNDGDLETNC

SEQ ID NO: 89705 - DNA, 858 bp, Arabidopsis thaliana
  misc_feature (1)..(858): Ceres Seq. ID no. 12720130
  misc_feature (1)..(858): Ortholog of  Ceres SEQ ID NO 13584646 as cited in SEQ ID NO 60715
atggctggtctcgatctaggcacaacttctcgctacgtccacaacgtcgatggtggcggcggcggacagttcaccaccgacaaccaccacgaagatgacggtggcgctggaggaaaccaccatcatcaccatcataatcataatcaccatcaaggtttagatttaatagcttctaatgataactctggactaggcggcggtggaggaggagggagcggtgacctcgtcatgcgtcggccacgtggccgtccagctggatcgaagaacaaaccgaagccgccggtgattgtcacgcgcgagagcgcaaacactcttagggctcacattcttgaagttggaagtggctgcgacgttttcgaatgtatctccacttacgctcgtcggagacagcgcgggatttgcgttttatccgggacgggaaccgtcactaacgtcagcatccgtcagcctacggcggccggagctgttgtgactctgcggggtacttttgagattctttccctctccggatcttttcttccgccacctgctcctccaggggcgactagcttgacgatattcctcgctggagctcaaggacaggtcgtcggaggtaacgtagttggtgagttaatggcggcggggccggtaatggtcatggcagcgtcttttacaaacgtggcttacgaaaggttgcctttggacgagcatgaggagcacttgcaaagtggcggcggcggaggtggagggaatatgtactcggaagccactggcggtggcggagggttgcctttctttaatttgccgatgagtatgcctcagattggagttgaaagttggcaggggaatcacgccggcgccggtagggctccgttttag

SEQ ID NO: 89706 - protein, 285 aa, Arabidopsis thaliana
  peptide (1)..(285): Ceres Seq. ID no. 12720131
MAGLDLGTTSRYVHNVDGGGGGQFTTDNHHEDDGGAGGNHHHHHHNHNHHQGLDLIASNDNSGLGGGGGGGSGDLVMRRPRGRPAGSKNKPKPPVIVTRESANTLRAHILEVGSGCDVFECISTYARRRQRGICVLSGTGTVTNVSIRQPTAAGAVVTLRGTFEILSLSGSFLPPPAPPGATSLTIFLAGAQGQVVGGNVVGELMAAGPVMVMAASFTNVAYERLPLDEHEEHLQSGGGGGGGNMYSEATGGGGGLPFFNLPMSMPQIGVESWQGNHAGAGRAPF

SEQ ID NO: 89707 - protein, 209 aa, Arabidopsis thaliana
  peptide (1)..(209): Ceres Seq. ID no. 12720132
MRRPRGRPAGSKNKPKPPVIVTRESANTLRAHILEVGSGCDVFECISTYARRRQRGICVLSGTGTVTNVSIRQPTAAGAVVTLRGTFEILSLSGSFLPPPAPPGATSLTIFLAGAQGQVVGGNVVGELMAAGPVMVMAASFTNVAYERLPLDEHEEHLQSGGGGGGGNMYSEATGGGGGLPFFNLPMSMPQIGVESWQGNHAGAGRAPF

SEQ ID NO: 89708 - DNA, 585 bp, Arabidopsis thaliana
  misc_feature (1)..(585): Ceres Seq. ID no. 12720172
  misc_feature (1)..(585): Ortholog of  Ceres SEQ ID NO 14304408 as cited in SEQ ID NO 58051
  misc_feature (1)..(585): Ortholog of  Ceres SEQ ID NO 13661769 as cited in SEQ ID NO 61435
atggaacgtgacgactgccggagatttcaggactcgccggcgcagacgacggagagaagagtgaaatataaaccaaagaagaaaagagccaaagatgatgatgatgagaaagttgtttcgaagcatccaaattttcgaggtgtcagaatgagacaatggggaaaatgggtgtccgaaatcagagagccaaaaaagaaatcaagaatctggctcggtactttctccacggcggagatggcggcgcgtgctcacgacgtggcagctttagccatcaaaggcggttctgcacatctcaacttcccggagctcgcttatcacctccctagaccagctagtgccgaccctaaagacatccaagctgccgccgccgcagctgcagccgctgtggccattgacatggatgtagagacgtcttcgccgtcgccatctcccacagttacggaaacgtcatctccggctatgatagcactctccgacgacgcgttctccgatcttcctgatctcttgctcaacgtgaaccataacatcgatggcttctgggactcttttccctatgaagaacccttcctctctcaaagttactag

SEQ ID NO: 89709 - protein, 194 aa, Arabidopsis thaliana
  peptide (1)..(194): Ceres Seq. ID no. 12720173
MERDDCRRFQDSPAQTTERRVKYKPKKKRAKDDDDEKVVSKHPNFRGVRMRQWGKWVSEIREPKKKSRIWLGTFSTAEMAARAHDVAALAIKGGSAHLNFPELAYHLPRPASADPKDIQAAAAAAAAAVAIDMDVETSSPSPSPTVTETSSPAMIALSDDAFSDLPDLLLNVNHNIDGFWDSFPYEEPFLSQSY

SEQ ID NO: 89710 - protein, 145 aa, Arabidopsis thaliana
  peptide (1)..(145): Ceres Seq. ID no. 12720174
MRQWGKWVSEIREPKKKSRIWLGTFSTAEMAARAHDVAALAIKGGSAHLNFPELAYHLPRPASADPKDIQAAAAAAAAAVAIDMDVETSSPSPSPTVTETSSPAMIALSDDAFSDLPDLLLNVNHNIDGFWDSFPYEEPFLSQSY

SEQ ID NO: 89711 - protein, 116 aa, Arabidopsis thaliana
  peptide (1)..(116): Ceres Seq. ID no. 12720175
MAARAHDVAALAIKGGSAHLNFPELAYHLPRPASADPKDIQAAAAAAAAAVAIDMDVETSSPSPSPTVTETSSPAMIALSDDAFSDLPDLLLNVNHNIDGFWDSFPYEEPFLSQSY

SEQ ID NO: 89712 - DNA, 1344 bp, Arabidopsis thaliana
  misc_feature (1)..(1344): Ceres Seq. ID no. 12720190
  misc_feature (1)..(1344): Ortholog of  Ceres SEQ ID NO 13594349 as cited in SEQ ID NO 58161
  misc_feature (1)..(1344): Ortholog of  Ceres SEQ ID NO 13663419 as cited in SEQ ID NO 66561
atggtgattgcattattagacgtagtgagtagtgatgatgctaaagagcaaaagatgaaggacaagattatctctttgccaggccaacctcctaacctcaacttctctcaattttctggctacgtcactgttgatcccgcggccggacgggctctcttttattggctaaccgaagctcctaggcctagcggaacgaagcccttagtcctatggctcaatggtggtccaggatgctcctctattgcttatggtgcttctgaagaagttggtccatttcgggttaatccagacggaaagactttgcgtctaaatctatatgcttggaacaaagtggcaaatgtgttatttttggattcaccggcgggagttggtttctcttacacaaacacttcgtcagacgaactaaccgtgggagacaagagaacaggggaggatgcttatagattcttggtgagatggttggagaggttccctgagtataaggaacgggctttttacatcgccggcgagagctacgctggacattatattccggagctagcccaactgatcgtcaaccgtaacaaaggtgccaaaaatccaactatcaatctaaaagggattctgatggggaatcctcttgtcgatgactacaatgacaacaaaggaatgcgtgactactggtggaatcacgggcttatatcggacgaaagctacaatgacctgaccaaatggtgtctcaacgactccatcctatttccaaaactaaactgcaacgctgctctgaaccaagccttgtctgagtttggtgacattgacccttacaacatcaatagccctgcatgcaccacgcatgcatcatcaaatgagtggatgcaagcatggcggtatagagggaacgatgagtgtgttgtgggatacacacgcaagtatatgaacgatcccaatgtgcacaaatccttccatgcccgtctcaacggcagtactccttggacaccttgcagtcgtgtgataagaaagaattggaaagactcacctaagtccatgcttcctatcatcaagaatcttcttcaagctcatctccgcatttggatcttcagtggggactcggacgcggtgttgcctctaagcgggacgaggcattcgattaatgcaatgaaattgaagagtagcaaaaggtggtatccatggtaccattcacacggcctagtaggaggttggagtcaggtttatgaggatggcttgctaacgtacacgacggttagagcagcagggcatgaggtgccattgtctcagcctcgtctcgctcttttcctcttcacccacttcctagccaaccactctcttccctcctctccctcttaa

SEQ ID NO: 89713 - protein, 447 aa, Arabidopsis thaliana
  peptide (1)..(447): Ceres Seq. ID no. 12720191
MVIALLDVVSSDDAKEQKMKDKIISLPGQPPNLNFSQFSGYVTVDPAAGRALFYWLTEAPRPSGTKPLVLWLNGGPGCSSIAYGASEEVGPFRVNPDGKTLRLNLYAWNKVANVLFLDSPAGVGFSYTNTSSDELTVGDKRTGEDAYRFLVRWLERFPEYKERAFYIAGESYAGHYIPELAQLIVNRNKGAKNPTINLKGILMGNPLVDDYNDNKGMRDYWWNHGLISDESYNDLTKWCLNDSILFPKLNCNAALNQALSEFGDIDPYNINSPACTTHASSNEWMQAWRYRGNDECVVGYTRKYMNDPNVHKSFHARLNGSTPWTPCSRVIRKNWKDSPKSMLPIIKNLLQAHLRIWIFSGDSDAVLPLSGTRHSINAMKLKSSKRWYPWYHSHGLVGGWSQVYEDGLLTYTTVRAAGHEVPLSQPRLALFLFTHFLANHSLPSSPS

SEQ ID NO: 89714 - protein, 429 aa, Arabidopsis thaliana
  peptide (1)..(429): Ceres Seq. ID no. 12720192
MKDKIISLPGQPPNLNFSQFSGYVTVDPAAGRALFYWLTEAPRPSGTKPLVLWLNGGPGCSSIAYGASEEVGPFRVNPDGKTLRLNLYAWNKVANVLFLDSPAGVGFSYTNTSSDELTVGDKRTGEDAYRFLVRWLERFPEYKERAFYIAGESYAGHYIPELAQLIVNRNKGAKNPTINLKGILMGNPLVDDYNDNKGMRDYWWNHGLISDESYNDLTKWCLNDSILFPKLNCNAALNQALSEFGDIDPYNINSPACTTHASSNEWMQAWRYRGNDECVVGYTRKYMNDPNVHKSFHARLNGSTPWTPCSRVIRKNWKDSPKSMLPIIKNLLQAHLRIWIFSGDSDAVLPLSGTRHSINAMKLKSSKRWYPWYHSHGLVGGWSQVYEDGLLTYTTVRAAGHEVPLSQPRLALFLFTHFLANHSLPSSPS

SEQ ID NO: 89715 - protein, 245 aa, Arabidopsis thaliana
  peptide (1)..(245): Ceres Seq. ID no. 12720193
MGNPLVDDYNDNKGMRDYWWNHGLISDESYNDLTKWCLNDSILFPKLNCNAALNQALSEFGDIDPYNINSPACTTHASSNEWMQAWRYRGNDECVVGYTRKYMNDPNVHKSFHARLNGSTPWTPCSRVIRKNWKDSPKSMLPIIKNLLQAHLRIWIFSGDSDAVLPLSGTRHSINAMKLKSSKRWYPWYHSHGLVGGWSQVYEDGLLTYTTVRAAGHEVPLSQPRLALFLFTHFLANHSLPSSPS

SEQ ID NO: 89716 - DNA, 636 bp, Arabidopsis thaliana
  misc_feature (1)..(636): Ceres Seq. ID no. 12720202
  misc_feature (1)..(636): Ortholog of  Ceres SEQ ID NO 13639250 as cited in SEQ ID NO 56555
  misc_feature (1)..(636): Ortholog of  Ceres SEQ ID NO 15177034 as cited in SEQ ID NO 60024
  misc_feature (1)..(636): Ortholog of  Ceres SEQ ID NO 13598257 as cited in SEQ ID NO 63008
  misc_feature (1)..(636): Ortholog of  Ceres SEQ ID NO 13597309 as cited in SEQ ID NO 63851
  misc_feature (1)..(636): Ortholog of  Ceres SEQ ID NO 12599167 as cited in SEQ ID NO 64443
atgacgaccaaagagtgcggaaaccacggtggtggcggtggaggaggcggaaccgcctgtagaatctgtggagcaatcatcggcttcatcatcatcgtcttgatgacaatcttcctcgtttcgataatcctccaaccgaaaaaaccagaattcatcctccaagacaccaccgtctacgcctttaacctctcgcagcctaacctcctcacctcaaagtttcagataacaatcgcttcacgcaaccgaaactccaacatcggaatctactacgaccatcttcacgcctacgcttcttaccggaaccagcaaatcactctagctagcgaccttcctccgacgtaccaaagacacaaagaaaatagcgtttggtctcctttattatatggaaaccaagtccctatcgctcctttcaacgccgtggctctcggggacgagcagaatagtggggttttcacgttgactatatgcgttgatggacgcgtgaggtggaaggtcgggactcttactatagggaattatcatctccatgttcgttgtcaggcgttcataaaccaggctgataaagcagccggagttcatgtcggcgaaaacaccgttaagtacacgttgatcaataagtgcagtgtcaatttttag

SEQ ID NO: 89717 - protein, 211 aa, Arabidopsis thaliana
  peptide (1)..(211): Ceres Seq. ID no. 12720203
MTTKECGNHGGGGGGGGTACRICGAIIGFIIIVLMTIFLVSIILQPKKPEFILQDTTVYAFNLSQPNLLTSKFQITIASRNRNSNIGIYYDHLHAYASYRNQQITLASDLPPTYQRHKENSVWSPLLYGNQVPIAPFNAVALGDEQNSGVFTLTICVDGRVRWKVGTLTIGNYHLHVRCQAFINQADKAAGVHVGENTVKYTLINKCSVNF

SEQ ID NO: 89718 - protein, 177 aa, Arabidopsis thaliana
  peptide (1)..(177): Ceres Seq. ID no. 12720204
MTIFLVSIILQPKKPEFILQDTTVYAFNLSQPNLLTSKFQITIASRNRNSNIGIYYDHLHAYASYRNQQITLASDLPPTYQRHKENSVWSPLLYGNQVPIAPFNAVALGDEQNSGVFTLTICVDGRVRWKVGTLTIGNYHLHVRCQAFINQADKAAGVHVGENTVKYTLINKCSVNF

SEQ ID NO: 89719 - DNA, 1035 bp, Arabidopsis thaliana
  misc_feature (1)..(1035): Ceres Seq. ID no. 12720209
  misc_feature (1)..(1035): Ortholog of  Ceres SEQ ID NO 13597380 as cited in SEQ ID NO 64054
  misc_feature (1)..(1035): Ortholog of  Ceres SEQ ID NO 12625474 as cited in SEQ ID NO 64169
  misc_feature (1)..(1035): Ortholog of  Ceres SEQ ID NO 13597502 as cited in SEQ ID NO 64681
atgaattgcctcatgttcttcaaaatgctattagcattctctttcattagtctattttatgttggtaatgcacaacaatcatatggcaattcaacggtttcggcacttttcgcttttggagactcaatacttgacacaggcaacaataatcttcttttaagtgtttctaaagtcaatttttatccatacggtagagactttataggtggaagagctactgggagatttggaaatgggagagttttttctgatataattgctgagggtttgggattgaagaatctcttaccagcatatcgtgatccatacctctggaacaatgatctaacgactggtgtttgtttcgcatctggtggatctggacttgatccaatcactgcaagaacaacaggaagtatatgggtgtcagaccaggtcacagacttccaaaactacatcaccagactaaatggtgtagtaggaaatcaagaacaagcaaatgcagttatatcaaatgctgtttacctaatctccgcaggaaataatgatattgctatcacttattttactacgggggctagaagattacaatacactcttccagcctacaatgatcaattggtctcttggactcgtgatctcataaagagtttatatgatatgggtgcaagaaaatttgccgttatgggaacattaccgctaggttgtttaccaggagcaagagccttaacgagagcatgtgaattatttgtaaatcaaggagctgctatgttcaaccaacaattatctgccgacattgacaatcttggtgcaacatttccgggtgccaaattcgtgtacgtagatatgtacaatcctcttttgggtctcatcattaaccctcaagcttcagggttcattgatgtagctgatgcgtgttgttgtacgccaacgcacttaataccgtgcttggatgcgtctcgttacgtgttttgggatgtagcccatccgacccagaagtcatacgaaaccatcgctccacagattattgaaaatatcaaagcaaagctcgcatga

SEQ ID NO: 89720 - protein, 344 aa, Arabidopsis thaliana
  peptide (1)..(344): Ceres Seq. ID no. 12720210
MNCLMFFKMLLAFSFISLFYVGNAQQSYGNSTVSALFAFGDSILDTGNNNLLLSVSKVNFYPYGRDFIGGRATGRFGNGRVFSDIIAEGLGLKNLLPAYRDPYLWNNDLTTGVCFASGGSGLDPITARTTGSIWVSDQVTDFQNYITRLNGVVGNQEQANAVISNAVYLISAGNNDIAITYFTTGARRLQYTLPAYNDQLVSWTRDLIKSLYDMGARKFAVMGTLPLGCLPGARALTRACELFVNQGAAMFNQQLSADIDNLGATFPGAKFVYVDMYNPLLGLIINPQASGFIDVADACCCTPTHLIPCLDASRYVFWDVAHPTQKSYETIAPQIIENIKAKLA

SEQ ID NO: 89721 - protein, 340 aa, Arabidopsis thaliana
  peptide (1)..(340): Ceres Seq. ID no. 12720211
MFFKMLLAFSFISLFYVGNAQQSYGNSTVSALFAFGDSILDTGNNNLLLSVSKVNFYPYGRDFIGGRATGRFGNGRVFSDIIAEGLGLKNLLPAYRDPYLWNNDLTTGVCFASGGSGLDPITARTTGSIWVSDQVTDFQNYITRLNGVVGNQEQANAVISNAVYLISAGNNDIAITYFTTGARRLQYTLPAYNDQLVSWTRDLIKSLYDMGARKFAVMGTLPLGCLPGARALTRACELFVNQGAAMFNQQLSADIDNLGATFPGAKFVYVDMYNPLLGLIINPQASGFIDVADACCCTPTHLIPCLDASRYVFWDVAHPTQKSYETIAPQIIENIKAKLA

SEQ ID NO: 89722 - protein, 336 aa, Arabidopsis thaliana
  peptide (1)..(336): Ceres Seq. ID no. 12720212
MLLAFSFISLFYVGNAQQSYGNSTVSALFAFGDSILDTGNNNLLLSVSKVNFYPYGRDFIGGRATGRFGNGRVFSDIIAEGLGLKNLLPAYRDPYLWNNDLTTGVCFASGGSGLDPITARTTGSIWVSDQVTDFQNYITRLNGVVGNQEQANAVISNAVYLISAGNNDIAITYFTTGARRLQYTLPAYNDQLVSWTRDLIKSLYDMGARKFAVMGTLPLGCLPGARALTRACELFVNQGAAMFNQQLSADIDNLGATFPGAKFVYVDMYNPLLGLIINPQASGFIDVADACCCTPTHLIPCLDASRYVFWDVAHPTQKSYETIAPQIIENIKAKLA

SEQ ID NO: 89723 - DNA, 3769 bp, Arabidopsis thaliana
  misc_feature (1)..(3769): Ceres Seq. ID no. 12720213
  misc_feature (1)..(3769): Ortholog of  Ceres SEQ ID NO 13593889 as cited in SEQ ID NO 53305
  misc_feature (1)..(3769): Ortholog of  Ceres SEQ ID NO 13581959 as cited in SEQ ID NO 56156
agagagatacatattcaagttggttgaaggaggagaattagcggttcatatcagtacggagaaaattgtcagtcatatgctttttttctttaaattctgcatttgagtgggtgtgtgcttttaaccattttggtgatttatcaaaaaaaaaaaaaaaattctgtgtgttttgagctcaagctctctacaaattttgctgtctcaagtttttgccttttgaagtccaataaagttgaaatctttgttctttttgattggtcttcgtgaattccggtgaaagtttcaaacttttgatttaaattccggggaggaattagggtttatgaaagtaaaagaagaaactttgaagaatttgggagatggagtggttttaagacctgttgatcattgttctagcatttggagtatgaagatgaacatgaagaactttcttaagaaacttcatatctcgcccaatcaatcagatgaagctgaaggatcaatttcaacaactaagagcaatcatcataagtctatcgatgtatcatcatcatcatcaccgaggtctcatcacagcaatagccctgaaatcaaacctttttctggtttatctaattggttaagttctgttggtcatagaaaaatccctagtcctcctaattctttcaatgccaagaacagagccgccacggttgatgacactgttgttgttaatgggtcagaacatgtggatttaggttccaaagatccagctgttgaagaagagaatcagatacagttggctttagagttaagtgctagagaagatcctgaggctactcagattgaggctattaagcaattcagtttaggctcttgtgctcctgagaactctccagctgaactcatcgcttatcgctactggaattacaattgtcttggctatgatgacaagatcttggatggtttttatgacttgtatggagtgttgaatgcatcctcagcagaaagaatacctcctttgctcgatcttcaagggacacctgtttcagacggtgtgacatgggaagctgttcttgtgaacagaagtggggattctaatctgttgagacttgaacagatggctcttgatattgctgctaaatcaagatcagtttcttcctctggttttgtgaatagtgaattggtaaggaaactggctattttagtgggagattacatgggtggaccagtcgtgcacccagagagcatgttgagagcttggaggagtcttagctatagtttgaaagcaactcttggaagcatggttttgccacttggttctctgactattggtttggctcgtcaccgagccttgttattcaaagtattgtgtgatagtgttggtgttccttgtcgaatagtcaaaggtcagcaatataccggttctgaagatgtggcaatgaactttattaaggctgatgatggcagggagtacattgttgatcttatgggagatcccggcacgcttattccagctgatgcagctggactacaaatagactatgatgaatctgcctattccgctagtcctggagacaatgattcaattcatgtagcttcttccagcaatggtattgaaagctcatatgaagagaatacagagtttcgaacaggggaacatcgttctagtaccaagagttctggggagagaaaccaatccggaggtggaggcgatctcattgttcatccaaatatttctagagaagatgtgaaaaatcagaagaaagttgaaaaggctccatttcaaaatctgtctagcaggcctattcattctttcacccatatgagatcaccttcttggactgaaggggttagctccccagctgcacaaaggatgaaagtcaaagatgtttcacaatatatgattgatgctgctaaagagaatccacggttagctcagaagcttcatgatgtattacttgaaagcggagttgtagctcctcccaatttattttccgaagtctatccccagcaattggaggcaactgttgaaagcaaaaactcgactgaagccaagaaagagagaggaaaagatttagagacaactcaggaaggaagacaccaaaacggttttggtccagtgaggtttttgcctccattaccaagagtgcaatctaaaacaaatgcacatgatcaacgtgataatggcaaagttgtaagtcagtctgattcttcacattctgaagcatcttcgacagaatatgccagaaccgtccctgctgctgtagctgcagctgctgttgttgcatcttccatggttgctgctgctgctgccaagtctgcaaactcagactcctcccccatagaacttcctgctgcagctgctgccacggccactgctgctgcagttgtggcaacagctgcagccgtgtccaggcaacttgaattaggctcgaatagcgacggggatgatggttctggtgggcatgagcctcaaggtagtggggactctaatcatgggccaaattcaggaggggaaagaatatctgacaaatctattggcaatgaaagttctaagtcagactgtgatgatgtatctgactgtgagattttgtgggaagaaattactgtgggagaacgtattggacttggatcttatggagaagtgtatcggggagattggcacgggactgaagtggctgtcaagaagttccttgatcaagatttaacaggagaagcattggaggaattcagaagtgaggtccgaatcatgaaaaagctaagacatcccaacattgttctcttcatgggagctgtgactcgcccaccgaatctttcaattgttacagagtttcttcctagaggtagcttgtataggttaatccaccggccaaataaccaattagacgagaggaggcgcctgagaatggcccttgatgctgctcgtggaatgaactatttgcacagctgtaatccgatgattgtccatcgcgatcttaagtccccaaaccttctagttgacaaaaactgggtcgtgaaggtgtgtgattttggattgtctaggatgaaacacagtacatacctctcttcaaagtcaacagcagggacggctgaatggatggctccagaagtgctaagaaacgaacctgctgatgagaagtgcgatgtttacagctacggtgtgatcttatgggaactctttacgttacaacaaccgtggggaaagatgaacccgatgcaagtagttggggcagttgggtttcagcatcgacgtcttgacattcccgactttgtagatccagcaattgcagatctcatcagtaaatgctggcagacggattcaaagttaaggccaagttttgcagagataatggcgtctctaaagcggctacagaaacctgtaacaggttccaacatcccaagaccagtccccagttcctcttcattaccaactgaacatgaacaaaaggattgataacagaagaagacgaccaaagtggcaaacacatttttgacgaattcaatctgtttgaaggaaaaaaaagctacaaatgttccttctctgctactttttgcctcagcttcagtgtttgacacagcttgtgaattgtgaaaaagaaagattcatggaagatgacgattgaagaaggtgaaggattgtgctcgtgtgttttgttgtctttgcttgcaagcgatgttcatgttcatgcgtaatttcctctattttgttttccaatattgaaactgtacaaagagagaaagaaaaaacaattgacaaactcgtcgaaacgttgaccgaaaacatatattaaaaaaaatcattgagctc

SEQ ID NO: 89724 - protein, 1030 aa, Arabidopsis thaliana
  peptide (1)..(1030): Ceres Seq. ID no. 12720214
MKVKEETLKNLGDGVVLRPVDHCSSIWSMKMNMKNFLKKLHISPNQSDEAEGSISTTKSNHHKSIDVSSSSSPRSHHSNSPEIKPFSGLSNWLSSVGHRKIPSPPNSFNAKNRAATVDDTVVVNGSEHVDLGSKDPAVEEENQIQLALELSAREDPEATQIEAIKQFSLGSCAPENSPAELIAYRYWNYNCLGYDDKILDGFYDLYGVLNASSAERIPPLLDLQGTPVSDGVTWEAVLVNRSGDSNLLRLEQMALDIAAKSRSVSSSGFVNSELVRKLAILVGDYMGGPVVHPESMLRAWRSLSYSLKATLGSMVLPLGSLTIGLARHRALLFKVLCDSVGVPCRIVKGQQYTGSEDVAMNFIKADDGREYIVDLMGDPGTLIPADAAGLQIDYDESAYSASPGDNDSIHVASSSNGIESSYEENTEFRTGEHRSSTKSSGERNQSGGGGDLIVHPNISREDVKNQKKVEKAPFQNLSSRPIHSFTHMRSPSWTEGVSSPAAQRMKVKDVSQYMIDAAKENPRLAQKLHDVLLESGVVAPPNLFSEVYPQQLEATVESKNSTEAKKERGKDLETTQEGRHQNGFGPVRFLPPLPRVQSKTNAHDQRDNGKVVSQSDSSHSEASSTEYARTVPAAVAAAAVVASSMVAAAAAKSANSDSSPIELPAAAAATATAAAVVATAAAVSRQLELGSNSDGDDGSGGHEPQGSGDSNHGPNSGGERISDKSIGNESSKSDCDDVSDCEILWEEITVGERIGLGSYGEVYRGDWHGTEVAVKKFLDQDLTGEALEEFRSEVRIMKKLRHPNIVLFMGAVTRPPNLSIVTEFLPRGSLYRLIHRPNNQLDERRRLRMALDAARGMNYLHSCNPMIVHRDLKSPNLLVDKNWVVKVCDFGLSRMKHSTYLSSKSTAGTAEWMAPEVLRNEPADEKCDVYSYGVILWELFTLQQPWGKMNPMQVVGAVGFQHRRLDIPDFVDPAIADLISKCWQTDSKLRPSFAEIMASLKRLQKPVTGSNIPRPVPSSSSLPTEHEQKD

SEQ ID NO: 89725 - protein, 1002 aa, Arabidopsis thaliana; identical to SEQ ID NO: 88587
  peptide (1)..(1002): Ceres Seq. ID no. 12720215

SEQ ID NO: 89726 - protein, 1000 aa, Arabidopsis thaliana; identical to SEQ ID NO: 88588
  peptide (1)..(1000): Ceres Seq. ID no. 12720216

SEQ ID NO: 89727 - DNA, 1525 bp, Arabidopsis thaliana
  misc_feature (1)..(1525): Ceres Seq. ID no. 12720236
  misc_feature (1)..(1525): Ortholog of  Ceres SEQ ID NO 15171406 as cited in SEQ ID NO 51661
gggataccgctagtgattaacggtggttatggataccctccgattcgagttaagctcagcttccttcacttccgccgtcaccgcctcttctttacacagtcactcacggtatttcttctcctcagtgcaactcggccgagtcggctcatcatctccggcgatcacatcggtctcgaggacgacagtgaatgaaatctgcacggcggatgaacttcactacgttcctgttcccaactccgattggcgcgtcgctctctggcgatatcttccttccccaaaggcaccgaagaggaaccatcctttgcttctattgtctgggattgggaccaatgctgttacatacgatctttcccctgagtgttcctttgcaagatccatgtctggatcaggatttgatacatggattcttgagctccgtggagccgggctgagttctctcagtgttgatacaaatcttggtaaaggcaataaccagcagcggatagtctcgaatctattggagaatttcataagtgtatctgaaaggctggaaaatgttcttgatggaggttccaagatccttgggatgcaagaccgtctatcgaagagagcgggagatttcaagcagcggtttgaacttatccctcattacaattgggattttgataactatctagaagaagatgttccttctgcgatggactatgtaaggactcaaaccaagtcaaaagatggaaagttgctagcagttggtcactcaatgggtggtatcttgttatatgccttgctctcaagatgtggctttaaaggaatggattcaggtttggctggtgtcaccactctcgcatcaacatttgactattcatcctcaggaacactcctcaagtacctattaccaatgaaagagcctgcacaagctattaaccttcctatcatgccaattgacacaatgctcgctatggctcaccctctaatgtgtcgtcctccatattctttgtcctggttaaccgctaatatctctgctcctcaaatgatggaccctgaagttattgagaagcttgttttgaacagcttatgcacagtaccagtcaagcttctcttgcagctaacaacagccgtggaccacggtgggttgcgtgacagaaccggtactttctgttacaaggatcatatcagcaaaacaaatgtgcctatcttagctcttgcaggggactgggacataatctgccctcccgatgcagtatacgatactgtaaagctgattccagaacatctagccacttacaaagttgtaggatcacccggaggtccacattatggccaccaggatctaatttcgggtcgaacggctcggaacgaagtatatcctctgattactagatttcttcaacaacaagatgagagttaagatcaacaagaatgcaaatgaattttgattcttgtttctgtacatataacattccatatatacatttatgtgtacaaatcttcatacagttaaactcacaagcactgtatacaaattaaatacaaatgatacctttaa

SEQ ID NO: 89728 - protein, 452 aa, Arabidopsis thaliana
  peptide (1)..(452): Ceres Seq. ID no. 12720237
MDTLRFELSSASFTSAVTASSLHSHSRYFFSSVQLGRVGSSSPAITSVSRTTVNEICTADELHYVPVPNSDWRVALWRYLPSPKAPKRNHPLLLLSGIGTNAVTYDLSPECSFARSMSGSGFDTWILELRGAGLSSLSVDTNLGKGNNQQRIVSNLLENFISVSERLENVLDGGSKILGMQDRLSKRAGDFKQRFELIPHYNWDFDNYLEEDVPSAMDYVRTQTKSKDGKLLAVGHSMGGILLYALLSRCGFKGMDSGLAGVTTLASTFDYSSSGTLLKYLLPMKEPAQAINLPIMPIDTMLAMAHPLMCRPPYSLSWLTANISAPQMMDPEVIEKLVLNSLCTVPVKLLLQLTTAVDHGGLRDRTGTFCYKDHISKTNVPILALAGDWDIICPPDAVYDTVKLIPEHLATYKVVGSPGGPHYGHQDLISGRTARNEVYPLITRFLQQQDES

SEQ ID NO: 89729 - protein, 336 aa, Arabidopsis thaliana
  peptide (1)..(336): Ceres Seq. ID no. 12720238
MSGSGFDTWILELRGAGLSSLSVDTNLGKGNNQQRIVSNLLENFISVSERLENVLDGGSKILGMQDRLSKRAGDFKQRFELIPHYNWDFDNYLEEDVPSAMDYVRTQTKSKDGKLLAVGHSMGGILLYALLSRCGFKGMDSGLAGVTTLASTFDYSSSGTLLKYLLPMKEPAQAINLPIMPIDTMLAMAHPLMCRPPYSLSWLTANISAPQMMDPEVIEKLVLNSLCTVPVKLLLQLTTAVDHGGLRDRTGTFCYKDHISKTNVPILALAGDWDIICPPDAVYDTVKLIPEHLATYKVVGSPGGPHYGHQDLISGRTARNEVYPLITRFLQQQDES

SEQ ID NO: 89730 - protein, 273 aa, Arabidopsis thaliana
  peptide (1)..(273): Ceres Seq. ID no. 12720239
MQDRLSKRAGDFKQRFELIPHYNWDFDNYLEEDVPSAMDYVRTQTKSKDGKLLAVGHSMGGILLYALLSRCGFKGMDSGLAGVTTLASTFDYSSSGTLLKYLLPMKEPAQAINLPIMPIDTMLAMAHPLMCRPPYSLSWLTANISAPQMMDPEVIEKLVLNSLCTVPVKLLLQLTTAVDHGGLRDRTGTFCYKDHISKTNVPILALAGDWDIICPPDAVYDTVKLIPEHLATYKVVGSPGGPHYGHQDLISGRTARNEVYPLITRFLQQQDES

SEQ ID NO: 89731 - DNA, 1260 bp, Arabidopsis thaliana
  misc_feature (1)..(1260): Ceres Seq. ID no. 12720240
  misc_feature (1)..(1260): Ortholog of  Ceres SEQ ID NO 14315193 as cited in SEQ ID NO 57743
atctctcttttgttttttctctctctcacagagaaaaagaacacaatgccagtttctgcagagccttcttcatcttcttcaacaacaatcggtcaacacatgagactccaacgacctaggaatcatcgaaatctcccacccatttccaccgccgacgaacctctaatccccaaacctagccgcgtctctaaatccgccatgtcttccttcttcctcttgccagaaactactaagaagaaacccaacggaacggcgtcgtttcgtggtctaggctgcacaacctccgcatctcagcaagtttcagtcccggcagtgattcgctcctccgcggattgggatgctagtaatttcaaaattaagaagacgaagaagaagaacaagaacaagggtagtagtagctacaatggtggttcgattaagatcttgagcgaagctagtactagtagtagcgtcgcttgcgcagcgattcctgatgtttggtgtggtcctggagttgggttttcaacggatgctgtcgtcggaggctccattgacacagttgtttcagatcctccgagaaggaatattccggtgagacgcaaaatcgatggagataaaaccaatagtaacagtaataatcatagagagggttcttcttctcttcttcctagacgatctctcaatcaagagtctaatccttattttgattctgattcgagttttttgacatcgcgggctgagcagactgatagatatcatcgtcatctaagactgccttaccctgatggactcgctgagatgatgatgatgcagaatggttttgtgatgggaggagtattaagctcattcgatcaattccgtgacatgaggctcaatgtcgataacatgacatacgagcaacttttggagcttggtgaaagaattgggcatgtgaacactggacttactgaaaaacagatcaaaagttgtcttcggaaagtcaaaccatgccggcaagatacaacagttgctgatagaaagtgcatcatctgtcaagacgagtatgaggcgaaggacgaggtaggggaattacgatgtgggcacaggttccatatcgactgtgtgaatcaatggcttgtgaggaagaactcttgtccggtctgtaaaacgatggcgtacaataagtcttagttagatattatctcttcctgtgatgtgattcttgatttcgggattgaaaccaaatcactattttatgttaagattcttttttggctttttattcatgattgctatttttct

SEQ ID NO: 89732 - protein, 382 aa, Arabidopsis thaliana
  peptide (1)..(382): Ceres Seq. ID no. 12720241
ISLLFFLSLTEKKNTMPVSAEPSSSSSTTIGQHMRLQRPRNHRNLPPISTADEPLIPKPSRVSKSAMSSFFLLPETTKKKPNGTASFRGLGCTTSASQQVSVPAVIRSSADWDASNFKIKKTKKKNKNKGSSSYNGGSIKILSEASTSSSVACAAIPDVWCGPGVGFSTDAVVGGSIDTVVSDPPRRNIPVRRKIDGDKTNSNSNNHREGSSSLLPRRSLNQESNPYFDSDSSFLTSRAEQTDRYHRHLRLPYPDGLAEMMMMQNGFVMGGVLSSFDQFRDMRLNVDNMTYEQLLELGERIGHVNTGLTEKQIKSCLRKVKPCRQDTTVADRKCIICQDEYEAKDEVGELRCGHRFHIDCVNQWLVRKNSCPVCKTMAYNKS

SEQ ID NO: 89733 - protein, 367 aa, Arabidopsis thaliana
  peptide (1)..(367): Ceres Seq. ID no. 12720242
MPVSAEPSSSSSTTIGQHMRLQRPRNHRNLPPISTADEPLIPKPSRVSKSAMSSFFLLPETTKKKPNGTASFRGLGCTTSASQQVSVPAVIRSSADWDASNFKIKKTKKKNKNKGSSSYNGGSIKILSEASTSSSVACAAIPDVWCGPGVGFSTDAVVGGSIDTVVSDPPRRNIPVRRKIDGDKTNSNSNNHREGSSSLLPRRSLNQESNPYFDSDSSFLTSRAEQTDRYHRHLRLPYPDGLAEMMMMQNGFVMGGVLSSFDQFRDMRLNVDNMTYEQLLELGERIGHVNTGLTEKQIKSCLRKVKPCRQDTTVADRKCIICQDEYEAKDEVGELRCGHRFHIDCVNQWLVRKNSCPVCKTMAYNKS

SEQ ID NO: 89734 - protein, 349 aa, Arabidopsis thaliana
  peptide (1)..(349): Ceres Seq. ID no. 12720243
MRLQRPRNHRNLPPISTADEPLIPKPSRVSKSAMSSFFLLPETTKKKPNGTASFRGLGCTTSASQQVSVPAVIRSSADWDASNFKIKKTKKKNKNKGSSSYNGGSIKILSEASTSSSVACAAIPDVWCGPGVGFSTDAVVGGSIDTVVSDPPRRNIPVRRKIDGDKTNSNSNNHREGSSSLLPRRSLNQESNPYFDSDSSFLTSRAEQTDRYHRHLRLPYPDGLAEMMMMQNGFVMGGVLSSFDQFRDMRLNVDNMTYEQLLELGERIGHVNTGLTEKQIKSCLRKVKPCRQDTTVADRKCIICQDEYEAKDEVGELRCGHRFHIDCVNQWLVRKNSCPVCKTMAYNKS

SEQ ID NO: 89735 - DNA, 3093 bp, Arabidopsis thaliana
  misc_feature (1)..(3093): Ceres Seq. ID no. 12720262
  misc_feature (1)..(3093): Ortholog of  Ceres SEQ ID NO 13600310 as cited in SEQ ID NO 5086
atgaatcctatgcgtgatcaaccgggcagcccttatggagattcaactcctcgtagtccgttttctcccttttctccattatctgtagatgataggcatagaaatcatgcagatacaaaaactcctcgtagtcctttctctccattttctccattatccggagatgaaaggcacaaaagtctggcagagtccaaatttcagcaagcccttgccagctctggccaattagatccattatctcctggatcaatgcatcatggaggacacaagtttcatgaggttttccaaatgaaacaggggcgttatgatcttcaagcttcaaagatttctgaaatgatgaaatcaagtagcttagataatgctcctacgcagtcattgctaagcgtcttgaatggaattctagatgaaagtatcgaaagaaagaatggtgaaatccctcagcgtgtggcatgcctgttaagaaaagtcgtgcaggagattgagcggcgtatatcaactcaagctgaacatctaagaacgcaaaacaatattttcaaaactcgcgaggaaaaataccagtcaaggatcaatgtccttgaagccttagcatcaggaactggtgtagaacacgagattgcaacacaacagcttagacagatagagacagaaaagtcaatgtgggaggaaaagaagaaacacgaagaggaagatatggttaagctaatgaaacaaaatgatcagcacaacctcgaaatttctgcgctgaagcaagaactggagacaactaaaagaaaatatgaacaacaatactcgcaaattgaaagccaaacaaagacagagaagtcaaagtgggaagaacagaagaaaaatgaagaggaggatatggacaagctattgaaagaaaatgatcagttcaaccttcagatttctgcgttaaggcaagagctggagacaacaagaaaagcgtatgaacagcaatgctcgcaaatggaaagccaaacaatggtcgctacaacaggacttgagagcaggctcaaggaacttgaacaagagggaaaagtggtaaacactgcaaaaaatgcccttgaggaaagggttaaagagcttgaacaaatgggaaaagaagcacattctgctaaaaatgctcttgaggaaaagattaaacagcttcaacaaatggaaaaagaaacaaaaactgctaatacaagccttgaaggaaagatccaagagcttgaacaaaacctcgtaatgtggaagactaaagtcagagaaatggagaaaaagtctgagtccaaccaccaaagatggagtcagaaagaactttcctataaaagctttattgataaccagtctcaggcactactggagttgaggtcctattcaagatccatcaagcaagaaatactgaaggtacaagagaactatacagaccagttcagccaactaggaaagaaactgattgaacttagcaatgctgctgaaaactatcacgctgtactaactgaaaaccggaagcttttcaacgagcttcaggagctaaaaggaaacatcagagtgttttgccgggtgaggcctttccttcctgcacagggtgcagcaaacacagtggtcgagtatgtcggtgaagatggagaattagtagttaccaatccaactagacccgggaaagacggtcttcgccagtttaagttcaacaaggtgtatagtccaactgcttcacaagctgacgtcttttcagacataagaccgctggttaggtcagtacttgatgggtacaatgtttgtatatttgcatatggccagacaggatcagggaaaacttatacaatgactggtccagatggatcaagtgaagaagactggggagtaaattatcgcgctctcaatgatctttttaaaatctctcagtccagaaagggaaacatatcgtatgaagtcggggtgcaaatggtggagatatataatgaacaagtgctcgatctgctgtctgatgacaattctcaaaagaaatatccctttgttttaaatcctgggatcctttctacaactcaacaaaatggcctggctgtgcctgacgcaagcatgtatcctgtgacatcaacttcagatgtgattacattgatggacattggactacagaatcgagccgttggttctactgccttgaatgaaagaagtagtcgttcacatagcattgtcactgttcacgttcgcggtaaagatttaaagaccggttccgtgctatacggtaatcttcatttggtggatctggcaggaagtgagagagtagatcgctctgaagttacaggagacagactaagagaagcacaacatataaacaagtcgctctcatctcttggagatgtgatattctctctcgcttcaaagagttctcatgtaccatacagaaacagcaagctaacacagcttctccaaacctctcttggaggacgagcaaagacactaatgtttgtgcaactcaaccctgacgctacttcatactcagagtcaatgagtaccttgaaatttgcagagcgtgtctctggagtcgaacttggtgctgcaaagacaagtaaagaaggtaaagatgttcgagacttgatggaacagttagcgtcccttaaggacaccatagcgagaaaagacgaagagatagagagacttcagcatcagcctcagagacttcagaaatcaatgatgagaagaaaaagcataggacatacagatgacataaactcagatacaggagaatattcatcacaatcaagatactctgttactgacggcgaaagtttagcatcctctgccgaggcagagtacgacgagagactaagcgagattacgtctgatgctgcatctatgggaacacaaggatccattgatgttaccaaaagaccacccagaatttcagacagagctaagtcggtgactgcaaaatcatctacgagtgtaacacggccactcgataaacttcggaaagtagctacaagaacaacatcgaccgttgctaaggtcacgggcttgacatcatcaagtaaaggcttagcgtcatcaagcattaagaagacgggaagtacatcaagtttggcaaagtcttcaaaacggtgggcgtaa

SEQ ID NO: 89736 - protein, 1030 aa, Arabidopsis thaliana
  peptide (1)..(1030): Ceres Seq. ID no. 12720263
MNPMRDQPGSPYGDSTPRSPFSPFSPLSVDDRHRNHADTKTPRSPFSPFSPLSGDERHKSLAESKFQQALASSGQLDPLSPGSMHHGGHKFHEVFQMKQGRYDLQASKISEMMKSSSLDNAPTQSLLSVLNGILDESIERKNGEIPQRVACLLRKVVQEIERRISTQAEHLRTQNNIFKTREEKYQSRINVLEALASGTGVEHEIATQQLRQIETEKSMWEEKKKHEEEDMVKLMKQNDQHNLEISALKQELETTKRKYEQQYSQIESQTKTEKSKWEEQKKNEEEDMDKLLKENDQFNLQISALRQELETTRKAYEQQCSQMESQTMVATTGLESRLKELEQEGKVVNTAKNALEERVKELEQMGKEAHSAKNALEEKIKQLQQMEKETKTANTSLEGKIQELEQNLVMWKTKVREMEKKSESNHQRWSQKELSYKSFIDNQSQALLELRSYSRSIKQEILKVQENYTDQFSQLGKKLIELSNAAENYHAVLTENRKLFNELQELKGNIRVFCRVRPFLPAQGAANTVVEYVGEDGELVVTNPTRPGKDGLRQFKFNKVYSPTASQADVFSDIRPLVRSVLDGYNVCIFAYGQTGSGKTYTMTGPDGSSEEDWGVNYRALNDLFKISQSRKGNISYEVGVQMVEIYNEQVLDLLSDDNSQKKYPFVLNPGILSTTQQNGLAVPDASMYPVTSTSDVITLMDIGLQNRAVGSTALNERSSRSHSIVTVHVRGKDLKTGSVLYGNLHLVDLAGSERVDRSEVTGDRLREAQHINKSLSSLGDVIFSLASKSSHVPYRNSKLTQLLQTSLGGRAKTLMFVQLNPDATSYSESMSTLKFAERVSGVELGAAKTSKEGKDVRDLMEQLASLKDTIARKDEEIERLQHQPQRLQKSMMRRKSIGHTDDINSDTGEYSSQSRYSVTDGESLASSAEAEYDERLSEITSDAASMGTQGSIDVTKRPPRISDRAKSVTAKSSTSVTRPLDKLRKVATRTTSTVAKVTGLTSSSKGLASSSIKKTGSTSSLAKSSKRWA

SEQ ID NO: 89737 - protein, 1027 aa, Arabidopsis thaliana
  peptide (1)..(1027): Ceres Seq. ID no. 12720264
MRDQPGSPYGDSTPRSPFSPFSPLSVDDRHRNHADTKTPRSPFSPFSPLSGDERHKSLAESKFQQALASSGQLDPLSPGSMHHGGHKFHEVFQMKQGRYDLQASKISEMMKSSSLDNAPTQSLLSVLNGILDESIERKNGEIPQRVACLLRKVVQEIERRISTQAEHLRTQNNIFKTREEKYQSRINVLEALASGTGVEHEIATQQLRQIETEKSMWEEKKKHEEEDMVKLMKQNDQHNLEISALKQELETTKRKYEQQYSQIESQTKTEKSKWEEQKKNEEEDMDKLLKENDQFNLQISALRQELETTRKAYEQQCSQMESQTMVATTGLESRLKELEQEGKVVNTAKNALEERVKELEQMGKEAHSAKNALEEKIKQLQQMEKETKTANTSLEGKIQELEQNLVMWKTKVREMEKKSESNHQRWSQKELSYKSFIDNQSQALLELRSYSRSIKQEILKVQENYTDQFSQLGKKLIELSNAAENYHAVLTENRKLFNELQELKGNIRVFCRVRPFLPAQGAANTVVEYVGEDGELVVTNPTRPGKDGLRQFKFNKVYSPTASQADVFSDIRPLVRSVLDGYNVCIFAYGQTGSGKTYTMTGPDGSSEEDWGVNYRALNDLFKISQSRKGNISYEVGVQMVEIYNEQVLDLLSDDNSQKKYPFVLNPGILSTTQQNGLAVPDASMYPVTSTSDVITLMDIGLQNRAVGSTALNERSSRSHSIVTVHVRGKDLKTGSVLYGNLHLVDLAGSERVDRSEVTGDRLREAQHINKSLSSLGDVIFSLASKSSHVPYRNSKLTQLLQTSLGGRAKTLMFVQLNPDATSYSESMSTLKFAERVSGVELGAAKTSKEGKDVRDLMEQLASLKDTIARKDEEIERLQHQPQRLQKSMMRRKSIGHTDDINSDTGEYSSQSRYSVTDGESLASSAEAEYDERLSEITSDAASMGTQGSIDVTKRPPRISDRAKSVTAKSSTSVTRPLDKLRKVATRTTSTVAKVTGLTSSSKGLASSSIKKTGSTSSLAKSSKRWA

SEQ ID NO: 89738 - protein, 947 aa, Arabidopsis thaliana
  peptide (1)..(947): Ceres Seq. ID no. 12720265
MHHGGHKFHEVFQMKQGRYDLQASKISEMMKSSSLDNAPTQSLLSVLNGILDESIERKNGEIPQRVACLLRKVVQEIERRISTQAEHLRTQNNIFKTREEKYQSRINVLEALASGTGVEHEIATQQLRQIETEKSMWEEKKKHEEEDMVKLMKQNDQHNLEISALKQELETTKRKYEQQYSQIESQTKTEKSKWEEQKKNEEEDMDKLLKENDQFNLQISALRQELETTRKAYEQQCSQMESQTMVATTGLESRLKELEQEGKVVNTAKNALEERVKELEQMGKEAHSAKNALEEKIKQLQQMEKETKTANTSLEGKIQELEQNLVMWKTKVREMEKKSESNHQRWSQKELSYKSFIDNQSQALLELRSYSRSIKQEILKVQENYTDQFSQLGKKLIELSNAAENYHAVLTENRKLFNELQELKGNIRVFCRVRPFLPAQGAANTVVEYVGEDGELVVTNPTRPGKDGLRQFKFNKVYSPTASQADVFSDIRPLVRSVLDGYNVCIFAYGQTGSGKTYTMTGPDGSSEEDWGVNYRALNDLFKISQSRKGNISYEVGVQMVEIYNEQVLDLLSDDNSQKKYPFVLNPGILSTTQQNGLAVPDASMYPVTSTSDVITLMDIGLQNRAVGSTALNERSSRSHSIVTVHVRGKDLKTGSVLYGNLHLVDLAGSERVDRSEVTGDRLREAQHINKSLSSLGDVIFSLASKSSHVPYRNSKLTQLLQTSLGGRAKTLMFVQLNPDATSYSESMSTLKFAERVSGVELGAAKTSKEGKDVRDLMEQLASLKDTIARKDEEIERLQHQPQRLQKSMMRRKSIGHTDDINSDTGEYSSQSRYSVTDGESLASSAEAEYDERLSEITSDAASMGTQGSIDVTKRPPRISDRAKSVTAKSSTSVTRPLDKLRKVATRTTSTVAKVTGLTSSSKGLASSSIKKTGSTSSLAKSSKRWA

SEQ ID NO: 89739 - DNA, 1635 bp, Arabidopsis thaliana
  misc_feature (1)..(1635): Ceres Seq. ID no. 12720272
  misc_feature (1)..(1635): Ortholog of  Ceres SEQ ID NO 13597574 as cited in SEQ ID NO 64677
  misc_feature (1)..(1635): Ortholog of  Ceres SEQ ID NO 13597843 as cited in SEQ ID NO 64850
  misc_feature (1)..(1635): Ortholog of  Ceres SEQ ID NO 12617417 as cited in SEQ ID NO 65089
  misc_feature (1)..(1635): Ortholog of  Ceres SEQ ID NO 13597678 as cited in SEQ ID NO 65375
  misc_feature (1)..(1635): Ortholog of  Ceres SEQ ID NO 12779098 as cited in SEQ ID NO 67698
  misc_feature (1)..(1635): Ortholog of  Ceres SEQ ID NO 13596180 as cited in SEQ ID NO 67941
  misc_feature (1)..(1635): Ortholog of  Ceres SEQ ID NO 13591190 as cited in SEQ ID NO 68044
  misc_feature (1)..(1635): Ortholog of  Ceres SEQ ID NO 13595961 as cited in SEQ ID NO 68223
aaaacattccggcataaacaaaaaaaagtcccactagaaaagctcattatgaaagtgaacgaggaaaacaacaagccgacaaagacccatgtcttaatcttcccatttccggcgcaaggtcacatgattcccctcctcgacttcacccaccgccttgctctccgcggcggcgccgccttaaaaataaccgtcctagtcactccaaaaaaccttccttttctctctccgcttctctccgccgtagttaacatcgaaccacttatcctcccttttccctcccacccttcaatcccctccggcgtcgaaaacgtccaagacttacctccttcaggcttccctttaatgatccacgcgcttggtaatctccacgcgccgcttatctcttggattacttctcacccttctcctccagtagccatcgtatctgatttcttccttggttggaccaaaaacctcggaatccctcgtttcgatttctctccctccgctgctatcacttgctgcatactcaatactctctggatcgaaatgcccaccaagatcaacgaagatgacgataacgagatcctccactttcccaagatcccgaattgtccaaaataccgttttgatcagatctcctctctttacagaagttacgttcacggagatccagcttgggagttcataagagactcctttagagataacgtggcgagttggggactcgtcgtgaactcgttcaccgccatggaaggtgtttatctcgaacatcttaagcgagagatgggccatgatcgtgtatgggctgtaggcccaattattccgttatctggggataaccgtggtggcccgacttctgtttctgttgatcacgtgatgtcgtggcttgacgcacgtgaggataaccacgtggtgtacgtgtgctttggaagtcaagtagttttgactaaagagcagactcttgcactcgcctctgggcttgagaaaagcggcgtccatttcatatgggccgtaaaggagcccgttgagaaagactcaacacgtggcaacatcctggacggtttcgacgatcgcgtggctgggagaggtctggtgatcagaggatgggctccacaagtagctgtgctacgtcaccgagccgttggcgcgtttttaacgcactgtggttggaactctgtggtggaggcggttgtcgccggcgttttgatgctgacgtggccgatgagagctgaccagtacactgacgcgtctctggtggttgatgagttgaaagtaggtgtgcgtgcttgcgaaggacctgacacggtgcctgacccggacgagttagctcgagttttcgctgattccgtgaccggaaatcaaacggagaggatcaaagccgtggagctgaggaaagcagcgttggatgcgattcaagaacgtgggagctcagtgaatgatttagatggatttatccaacatgtcgttagtttaggactaaacaaatgatttgatttagtcaaacaaaattctaattatggtttttttttccttaatacagtatgttcctcacgaactaaaaaaatatgcatgagtgtattttattaaattgttgtaagatgataaataagtgtttgtgattgtgattcataaataagtgtttgtgatttttgt

SEQ ID NO: 89740 - protein, 489 aa, Arabidopsis thaliana
  peptide (1)..(489): Ceres Seq. ID no. 12720273
KTFRHKQKKVPLEKLIMKVNEENNKPTKTHVLIFPFPAQGHMIPLLDFTHRLALRGGAALKITVLVTPKNLPFLSPLLSAVVNIEPLILPFPSHPSIPSGVENVQDLPPSGFPLMIHALGNLHAPLISWITSHPSPPVAIVSDFFLGWTKNLGIPRFDFSPSAAITCCILNTLWIEMPTKINEDDDNEILHFPKIPNCPKYRFDQISSLYRSYVHGDPAWEFIRDSFRDNVASWGLVVNSFTAMEGVYLEHLKREMGHDRVWAVGPIIPLSGDNRGGPTSVSVDHVMSWLDAREDNHVVYVCFGSQVVLTKEQTLALASGLEKSGVHFIWAVKEPVEKDSTRGNILDGFDDRVAGRGLVIRGWAPQVAVLRHRAVGAFLTHCGWNSVVEAVVAGVLMLTWPMRADQYTDASLVVDELKVGVRACEGPDTVPDPDELARVFADSVTGNQTERIKAVELRKAALDAIQERGSSVNDLDGFIQHVVSLGLNK

SEQ ID NO: 89741 - protein, 473 aa, Arabidopsis thaliana
  peptide (1)..(473): Ceres Seq. ID no. 12720274
MKVNEENNKPTKTHVLIFPFPAQGHMIPLLDFTHRLALRGGAALKITVLVTPKNLPFLSPLLSAVVNIEPLILPFPSHPSIPSGVENVQDLPPSGFPLMIHALGNLHAPLISWITSHPSPPVAIVSDFFLGWTKNLGIPRFDFSPSAAITCCILNTLWIEMPTKINEDDDNEILHFPKIPNCPKYRFDQISSLYRSYVHGDPAWEFIRDSFRDNVASWGLVVNSFTAMEGVYLEHLKREMGHDRVWAVGPIIPLSGDNRGGPTSVSVDHVMSWLDAREDNHVVYVCFGSQVVLTKEQTLALASGLEKSGVHFIWAVKEPVEKDSTRGNILDGFDDRVAGRGLVIRGWAPQVAVLRHRAVGAFLTHCGWNSVVEAVVAGVLMLTWPMRADQYTDASLVVDELKVGVRACEGPDTVPDPDELARVFADSVTGNQTERIKAVELRKAALDAIQERGSSVNDLDGFIQHVVSLGLNK

SEQ ID NO: 89742 - protein, 448 aa, Arabidopsis thaliana
  peptide (1)..(448): Ceres Seq. ID no. 12720275
MIPLLDFTHRLALRGGAALKITVLVTPKNLPFLSPLLSAVVNIEPLILPFPSHPSIPSGVENVQDLPPSGFPLMIHALGNLHAPLISWITSHPSPPVAIVSDFFLGWTKNLGIPRFDFSPSAAITCCILNTLWIEMPTKINEDDDNEILHFPKIPNCPKYRFDQISSLYRSYVHGDPAWEFIRDSFRDNVASWGLVVNSFTAMEGVYLEHLKREMGHDRVWAVGPIIPLSGDNRGGPTSVSVDHVMSWLDAREDNHVVYVCFGSQVVLTKEQTLALASGLEKSGVHFIWAVKEPVEKDSTRGNILDGFDDRVAGRGLVIRGWAPQVAVLRHRAVGAFLTHCGWNSVVEAVVAGVLMLTWPMRADQYTDASLVVDELKVGVRACEGPDTVPDPDELARVFADSVTGNQTERIKAVELRKAALDAIQERGSSVNDLDGFIQHVVSLGLNK

SEQ ID NO: 89743 - DNA, 1581 bp, Arabidopsis thaliana
  misc_feature (1)..(1581): Ceres Seq. ID no. 12720281
  misc_feature (1)..(1581): Ortholog of  Ceres SEQ ID NO 12583190 as cited in SEQ ID NO 56386
atggattcgaaggagatggttgtggaagaaatcatgagaattcacagatctctaccattgagaccagagatcgacgatgtagaaacggcaacttctctgatacaaaacgttgaaaaggaagatcggaatcgtttagaagccattgataaacttgttaaaacctcttcctctgaggttcctttagagcttttcaatgtgttcaaggagatgaagaaaagtcttgttcgtttccagagcacagaacagacaagagaagctacgaaaattctcgatctggaatctgtacacgttgtgttcgacgaattgattcagagagcttctttttgcattgcttctcccaacagcaccaccgctttgcctcggtctgttccggtaccggcgccggttgtttcttctgatgagattcctttcaagtcaaaggaaattatctcgcgtgacgatacgtttgtgaagaaagctaaatcttcgttttatagtgatgggttgttagctcctagtaagccccaggttctggattcaacacttcatcaggctaagaacgttgcaggcaatgatggggagaagttgagtctcataaaacttgctagtttgattgaggtatctgccaagaaagctactcaagagctaaatttgcagcacaggctgatggatcagctcgaatggcttccggattctctaggcaagttatcgagtcttgtcaggctagatctgtctgagaattgtatcatggtactaccggcaaccataggagggcttatttctttgacgaggcttgatttgcattcgaatagaattggtcagctccctgagtctataggagatttgctaaacttggtcaacctgaatcttagtggaaaccaattatcatctcttccatcgtcatttaatagattgatacatcttgaggaacttgatttgagctctaacagcctctctattctccctgaatctattggttctctcgtgagcctaaagaagctcgatgttgaaacaaataacatcgaagagattccacatagtatctctggctgttcttccatggaagaactccgtgcagattacaacagacttaaagctcttccagaagctgttgggaagttatctaccttagagattctgactgtccgttataataacattcggcagctacccacaacaatgtcctccatggctaacctcaaagagctagatgtgagtttcaacgagcttgagtcagtaccagagagtttatgttatgccaaaacacttgttaagcttaacatcgggaacaattttgccaacctaagatcactcccgggattaataggcaaccttgagaagctagaagagcttgatatgagcaataaccagatccgtttccttccctactcttttaaaacgctttcaaatctgcgtgttcttcaaacagaacaaaatccacttgaagagcttccaagggatataaccgaaaaaggcgcacaggccgtggttcaatacatgaatgatcttgtggaggcaagaaacaccaaatctcaaagaactaagccgaaaaagagttgggttaacagtatttgcttcttctgcaagtcctctaccaactag

SEQ ID NO: 89744 - protein, 526 aa, Arabidopsis thaliana
  peptide (1)..(526): Ceres Seq. ID no. 12720282
MDSKEMVVEEIMRIHRSLPLRPEIDDVETATSLIQNVEKEDRNRLEAIDKLVKTSSSEVPLELFNVFKEMKKSLVRFQSTEQTREATKILDLESVHVVFDELIQRASFCIASPNSTTALPRSVPVPAPVVSSDEIPFKSKEIISRDDTFVKKAKSSFYSDGLLAPSKPQVLDSTLHQAKNVAGNDGEKLSLIKLASLIEVSAKKATQELNLQHRLMDQLEWLPDSLGKLSSLVRLDLSENCIMVLPATIGGLISLTRLDLHSNRIGQLPESIGDLLNLVNLNLSGNQLSSLPSSFNRLIHLEELDLSSNSLSILPESIGSLVSLKKLDVETNNIEEIPHSISGCSSMEELRADYNRLKALPEAVGKLSTLEILTVRYNNIRQLPTTMSSMANLKELDVSFNELESVPESLCYAKTLVKLNIGNNFANLRSLPGLIGNLEKLEELDMSNNQIRFLPYSFKTLSNLRVLQTEQNPLEELPRDITEKGAQAVVQYMNDLVEARNTKSQRTKPKKSWVNSICFFCKSSTN

SEQ ID NO: 89745 - protein, 521 aa, Arabidopsis thaliana
  peptide (1)..(521): Ceres Seq. ID no. 12720283
MVVEEIMRIHRSLPLRPEIDDVETATSLIQNVEKEDRNRLEAIDKLVKTSSSEVPLELFNVFKEMKKSLVRFQSTEQTREATKILDLESVHVVFDELIQRASFCIASPNSTTALPRSVPVPAPVVSSDEIPFKSKEIISRDDTFVKKAKSSFYSDGLLAPSKPQVLDSTLHQAKNVAGNDGEKLSLIKLASLIEVSAKKATQELNLQHRLMDQLEWLPDSLGKLSSLVRLDLSENCIMVLPATIGGLISLTRLDLHSNRIGQLPESIGDLLNLVNLNLSGNQLSSLPSSFNRLIHLEELDLSSNSLSILPESIGSLVSLKKLDVETNNIEEIPHSISGCSSMEELRADYNRLKALPEAVGKLSTLEILTVRYNNIRQLPTTMSSMANLKELDVSFNELESVPESLCYAKTLVKLNIGNNFANLRSLPGLIGNLEKLEELDMSNNQIRFLPYSFKTLSNLRVLQTEQNPLEELPRDITEKGAQAVVQYMNDLVEARNTKSQRTKPKKSWVNSICFFCKSSTN

SEQ ID NO: 89746 - protein, 515 aa, Arabidopsis thaliana
  peptide (1)..(515): Ceres Seq. ID no. 12720284
MRIHRSLPLRPEIDDVETATSLIQNVEKEDRNRLEAIDKLVKTSSSEVPLELFNVFKEMKKSLVRFQSTEQTREATKILDLESVHVVFDELIQRASFCIASPNSTTALPRSVPVPAPVVSSDEIPFKSKEIISRDDTFVKKAKSSFYSDGLLAPSKPQVLDSTLHQAKNVAGNDGEKLSLIKLASLIEVSAKKATQELNLQHRLMDQLEWLPDSLGKLSSLVRLDLSENCIMVLPATIGGLISLTRLDLHSNRIGQLPESIGDLLNLVNLNLSGNQLSSLPSSFNRLIHLEELDLSSNSLSILPESIGSLVSLKKLDVETNNIEEIPHSISGCSSMEELRADYNRLKALPEAVGKLSTLEILTVRYNNIRQLPTTMSSMANLKELDVSFNELESVPESLCYAKTLVKLNIGNNFANLRSLPGLIGNLEKLEELDMSNNQIRFLPYSFKTLSNLRVLQTEQNPLEELPRDITEKGAQAVVQYMNDLVEARNTKSQRTKPKKSWVNSICFFCKSSTN

SEQ ID NO: 89747 - DNA, 1305 bp, Arabidopsis thaliana
  misc_feature (1)..(1305): Ceres Seq. ID no. 12720301
  misc_feature (1)..(1305): Ortholog of  Ceres SEQ ID NO 14303471 as cited in SEQ ID NO 59423
atcgctcgctgcctttctctttcacagtcagcgctcttgaacggagaatctcagtcgcgccgtcaactttttgttgagaagagatatcatctgttttcgatccaaagaatagaaagcttggattccgaaatctccctttttgcttccccaattcgttttcctttacaagctcggcgcttgatctcgctatctctcagagagctgagagctgaggatattggaaatttggaaggtggaatctcaaatggctgaacttcctggtcaaataagacatataggcggtcgaatgagtcaactgctagagcagatatatgggttttcgagaagatctttgtttcgggtcatatctatgggtcctataccttgtcatattgcctttatcatggatggaaatcggagatatgcaaagaagtgtggtcttttagatgggtctggtcacaaagcggggttttctgcgcttatgtcgatgctgcaatactgctacgagctgggtatcaagtatgtaacgatatacgcatttagcatagataattttagaagaaaacctgaggaggttgagtctgtaatggatttgatgctggaaaagataaagtctttgcttgaaaaagagagtattgtgcatcagtatgggattcgggtctattttatcggtaacttagcgcttctaaatgaccaagtgagagctgctgcagaaaaagtcatgaaagccacagctaagaatagtcgggtagtgcttctcatttgcattgcctataactcgacagatgagatcgtacaagctgtcaagaaatcttgtattaacaagtcagacaatattgaagcatctaattataaacacgaggatagcgatagtgatatagaaggaacagatatggagaaccaagagaagaagatacagttggtggatattgaggagaatatgcagatgagcgtggcgccgaatcctgatatactcatcaggagttcaggagagacgaggctgagcaattttctcttatggcaaacaggtaatacccagctctgctctccggctgctctgtggcctgagattggtttgaggcatctgctctgggctatattgaacttccaaagaaatcattcatacttggaaaagaggaagaaacaattatgattgtcttgaaaggagactagtgaaggatatacaaaagctctcttctctatttggctttgtaatgtgatgtgatgctcttgtggtatactatcaaaaggaaacttgggattacatagaacaagcaatgtattttacacacgaactcatttgagtttttctttatgaatccttaa

SEQ ID NO: 89748 - protein, 295 aa, Arabidopsis thaliana
  peptide (1)..(295): Ceres Seq. ID no. 12720302
MAELPGQIRHIGGRMSQLLEQIYGFSRRSLFRVISMGPIPCHIAFIMDGNRRYAKKCGLLDGSGHKAGFSALMSMLQYCYELGIKYVTIYAFSIDNFRRKPEEVESVMDLMLEKIKSLLEKESIVHQYGIRVYFIGNLALLNDQVRAAAEKVMKATAKNSRVVLLICIAYNSTDEIVQAVKKSCINKSDNIEASNYKHEDSDSDIEGTDMENQEKKIQLVDIEENMQMSVAPNPDILIRSSGETRLSNFLLWQTGNTQLCSPAALWPEIGLRHLLWAILNFQRNHSYLEKRKKQL

SEQ ID NO: 89749 - protein, 281 aa, Arabidopsis thaliana
  peptide (1)..(281): Ceres Seq. ID no. 12720303
MSQLLEQIYGFSRRSLFRVISMGPIPCHIAFIMDGNRRYAKKCGLLDGSGHKAGFSALMSMLQYCYELGIKYVTIYAFSIDNFRRKPEEVESVMDLMLEKIKSLLEKESIVHQYGIRVYFIGNLALLNDQVRAAAEKVMKATAKNSRVVLLICIAYNSTDEIVQAVKKSCINKSDNIEASNYKHEDSDSDIEGTDMENQEKKIQLVDIEENMQMSVAPNPDILIRSSGETRLSNFLLWQTGNTQLCSPAALWPEIGLRHLLWAILNFQRNHSYLEKRKKQL

SEQ ID NO: 89750 - protein, 260 aa, Arabidopsis thaliana
  peptide (1)..(260): Ceres Seq. ID no. 12720304
MGPIPCHIAFIMDGNRRYAKKCGLLDGSGHKAGFSALMSMLQYCYELGIKYVTIYAFSIDNFRRKPEEVESVMDLMLEKIKSLLEKESIVHQYGIRVYFIGNLALLNDQVRAAAEKVMKATAKNSRVVLLICIAYNSTDEIVQAVKKSCINKSDNIEASNYKHEDSDSDIEGTDMENQEKKIQLVDIEENMQMSVAPNPDILIRSSGETRLSNFLLWQTGNTQLCSPAALWPEIGLRHLLWAILNFQRNHSYLEKRKKQL

SEQ ID NO: 89751 - DNA, 1114 bp, Arabidopsis thaliana
  misc_feature (1)..(1114): Ceres Seq. ID no. 12720313
  misc_feature (1)..(1114): Ortholog of  Ceres SEQ ID NO 15172958 as cited in SEQ ID NO 51206
  misc_feature (1)..(1114): Ortholog of  Ceres SEQ ID NO 15171139 as cited in SEQ ID NO 60093
  misc_feature (1)..(1114): Ortholog of  Ceres SEQ ID NO 12634262 as cited in SEQ ID NO 0
ctttatcgtctccttggagagatatgaatggcgatgagcttcctttcgagagtggtttcgaggtttacgctaagggaactcataagtcagagtttgactcgaatttgcttgatcctcgttctgatcctatttgggatgctataagagaagaagctaaacttgaggcagagaaagagcctattttgagtagcttcttgtatgctggtatcttagcacatgattgtttagagcaagctttagggtttgttctagccaaccgtctccaaaacccaaccttgttggcaacacaactcttggatatattttatggtgttatgatgcatgacaaaggtattcagagttcgattcgccatgatctccaggcatttaaagatcgtgatcctgcttgtctgtcgtatagttctgctattttacatctgaagggttatcatgcgttacaagcatatagggttgcgcataaactgtggaatgaagggaggaaactattagctcttgcattgcaaagccgaataagcgaggtttttggcattgacatacatccagcggcaagaattggggagggaatattgttggatcatggaactggagtggtcattggtgagaccgctgtgataggcaacggtgtctcgatcttacatggtgtgactttaggaggaaccggaaaggaaactggcgatcgccacccaaagataggtgaaggtgcattgcttggagcttgtgtgactatacttggtaacataagcataggtgctggagcaatggtagctgcaggttcacttgtgttaaaagacgttccttcgcatagtgtggtggctggaaatcctgcaaaactgatcagggtcatggaagagcaagacccgtctctagcaatgaaacacgatgctactaaagagttctttcgacatgtagctgatggttacaaaggggcacaatctaacggaccatcactttcagcaggagatacagagaaaggacacactaacagcacatcatgagatctttgtatgcaaatttcttaccatcataagctaattcttgtatgctcttgcttatcatcataagctaatctcagcatttcctcaataagttgtctaataaaagattttgttcactg

SEQ ID NO: 89752 - protein, 330 aa, Arabidopsis thaliana
  peptide (1)..(330): Ceres Seq. ID no. 12720314
LSSPWRDMNGDELPFESGFEVYAKGTHKSEFDSNLLDPRSDPIWDAIREEAKLEAEKEPILSSFLYAGILAHDCLEQALGFVLANRLQNPTLLATQLLDIFYGVMMHDKGIQSSIRHDLQAFKDRDPACLSYSSAILHLKGYHALQAYRVAHKLWNEGRKLLALALQSRISEVFGIDIHPAARIGEGILLDHGTGVVIGETAVIGNGVSILHGVTLGGTGKETGDRHPKIGEGALLGACVTILGNISIGAGAMVAAGSLVLKDVPSHSVVAGNPAKLIRVMEEQDPSLAMKHDATKEFFRHVADGYKGAQSNGPSLSAGDTEKGHTNSTS

SEQ ID NO: 89753 - protein, 323 aa, Arabidopsis thaliana
  peptide (1)..(323): Ceres Seq. ID no. 12720315
MNGDELPFESGFEVYAKGTHKSEFDSNLLDPRSDPIWDAIREEAKLEAEKEPILSSFLYAGILAHDCLEQALGFVLANRLQNPTLLATQLLDIFYGVMMHDKGIQSSIRHDLQAFKDRDPACLSYSSAILHLKGYHALQAYRVAHKLWNEGRKLLALALQSRISEVFGIDIHPAARIGEGILLDHGTGVVIGETAVIGNGVSILHGVTLGGTGKETGDRHPKIGEGALLGACVTILGNISIGAGAMVAAGSLVLKDVPSHSVVAGNPAKLIRVMEEQDPSLAMKHDATKEFFRHVADGYKGAQSNGPSLSAGDTEKGHTNSTS

SEQ ID NO: 89754 - protein, 226 aa, Arabidopsis thaliana
  peptide (1)..(226): Ceres Seq. ID no. 12720316
MMHDKGIQSSIRHDLQAFKDRDPACLSYSSAILHLKGYHALQAYRVAHKLWNEGRKLLALALQSRISEVFGIDIHPAARIGEGILLDHGTGVVIGETAVIGNGVSILHGVTLGGTGKETGDRHPKIGEGALLGACVTILGNISIGAGAMVAAGSLVLKDVPSHSVVAGNPAKLIRVMEEQDPSLAMKHDATKEFFRHVADGYKGAQSNGPSLSAGDTEKGHTNSTS

SEQ ID NO: 89755 - DNA, 2104 bp, Arabidopsis thaliana
  misc_feature (1)..(2104): Ceres Seq. ID no. 12720327
  misc_feature (1)..(2104): Ortholog of  Ceres SEQ ID NO 13593889 as cited in SEQ ID NO 53305
  misc_feature (1)..(2104): Ortholog of  Ceres SEQ ID NO 13581959 as cited in SEQ ID NO 56156
attttctgtttggaatcttggatctttctttctgagatcattcgtcttttgtactgattttgagagatttcatttttgtttgtttaccgatccgccgccgtggatttttgttttccgatgacgatcaaagatgagtcggagagttgcggtagcagagccgtcgttgcttcgccgtcacaagaaaaccctagacattaccggatgaaacttgatgtctatagtgaggttttacagcgacttcaagaatctaattacgaagaagccactcttcctgatttcgaggatcaactttggctccatttcaatcgtcttcctgctcgatatgctcttgatgttaaagtcgagagagcggaagatgttctcacacatcagagattgctaaaattggctgcagatcctgctactaggcctgtctttgaagttcgaagtgtacaggtttctcccagaatctctgctgactctgaccctgcggtggaggaagatgctcaaagctctcaccaaccaagcggaccgggggttcttgctcctccaacttttggttcttctccaaattttgaggctattactcagggaagtaaaattgttgaagatgttgatagtgttgtgaatgcaacattgtctacacgaccgatgcacgagatcactttttcaaccattgataaaccgaaactccttagccagctaacttccctgcttggtgagcttggactgaatatacaagaggctcatgctttttccactgtagatggtttctctttagatgtctttgtagttgacggttggtctcaggaggaaactgatggcctaagagatgcattgagcaaagaaatactgaagcttaaggatcaacctggttcaaaacagaaatctatttctttctttgagcatgacaaatcaagcaatgagcttatacccgcctgcattgaaatacccacggatggaactgatgagtgggaaatcgacgtgactcagctcaaaattgaaaagaaagtggcatctggttcatatggggatctgcatagaggcacttattgcagtcaggaagtagctatcaaatttctcaagcctgatcgtgtaaacaatgagatgctgagagaattttctcaagaagtttttataatgaggaaagttcgacacaaaaacgtcgttcaatttttgggtgcatgcacaagatctccaaccctctgtatagtgactgagtttatggctcgagggagcatatatgattttcttcacaaacagaaatgcgctttcaaacttcaaactttactcaaagttgcacttgatgtcgcaaaaggaatgagctatttgcatcaaaacaacattattcacagggaccttaagactgcgaatcttcttatggatgaacatggacttgtcaaggttgctgatttcggagttgccagagtgcagattgaatcaggggtcatgactgctgaaactgggacataccggtggatggctccagaggtcattgagcacaaaccttacaatcacaaggcagatgtgttcagttatgcgatagtgctatgggaacttctgactggtgacatcccatatgctttcttgactccactacaagcagctgttggcgttgtccaaaaggggcttcgacccaaaatcccaaagaaaacacacccaaaagtgaaggggcttctagagagatgctggcatcaagacccagaacagagaccactgtttgaggaaatcatagaaatgctacaacagataatgaaagaggtaaacgtcgtagtgtgatctcccgagtaaaaaaaacaccttacaagggcgagaatctcagagcaggatgtggtgaaaacaaagcaggttggagatgaggaccctagcaaggacaagcactgcatatctttctttactcccttcagaaagccccgttactagttcttctgatcatcaacagttacacgattcaaggcattattttctggcctgccttgtacagtttcttttttgcttgacctagtttttgaccttagagactgtttttctccttttagttactctttgattcctttccacttagaaattagaaacgctctattacgttttcctcttttttttaccttcataagaaaggaagttt

SEQ ID NO: 89756 - protein, 546 aa, Arabidopsis thaliana
  peptide (1)..(546): Ceres Seq. ID no. 12720328
MTIKDESESCGSRAVVASPSQENPRHYRMKLDVYSEVLQRLQESNYEEATLPDFEDQLWLHFNRLPARYALDVKVERAEDVLTHQRLLKLAADPATRPVFEVRSVQVSPRISADSDPAVEEDAQSSHQPSGPGVLAPPTFGSSPNFEAITQGSKIVEDVDSVVNATLSTRPMHEITFSTIDKPKLLSQLTSLLGELGLNIQEAHAFSTVDGFSLDVFVVDGWSQEETDGLRDALSKEILKLKDQPGSKQKSISFFEHDKSSNELIPACIEIPTDGTDEWEIDVTQLKIEKKVASGSYGDLHRGTYCSQEVAIKFLKPDRVNNEMLREFSQEVFIMRKVRHKNVVQFLGACTRSPTLCIVTEFMARGSIYDFLHKQKCAFKLQTLLKVALDVAKGMSYLHQNNIIHRDLKTANLLMDEHGLVKVADFGVARVQIESGVMTAETGTYRWMAPEVIEHKPYNHKADVFSYAIVLWELLTGDIPYAFLTPLQAAVGVVQKGLRPKIPKKTHPKVKGLLERCWHQDPEQRPLFEEIIEMLQQIMKEVNVVV

SEQ ID NO: 89757 - protein, 518 aa, Arabidopsis thaliana
  peptide (1)..(518): Ceres Seq. ID no. 12720329
MKLDVYSEVLQRLQESNYEEATLPDFEDQLWLHFNRLPARYALDVKVERAEDVLTHQRLLKLAADPATRPVFEVRSVQVSPRISADSDPAVEEDAQSSHQPSGPGVLAPPTFGSSPNFEAITQGSKIVEDVDSVVNATLSTRPMHEITFSTIDKPKLLSQLTSLLGELGLNIQEAHAFSTVDGFSLDVFVVDGWSQEETDGLRDALSKEILKLKDQPGSKQKSISFFEHDKSSNELIPACIEIPTDGTDEWEIDVTQLKIEKKVASGSYGDLHRGTYCSQEVAIKFLKPDRVNNEMLREFSQEVFIMRKVRHKNVVQFLGACTRSPTLCIVTEFMARGSIYDFLHKQKCAFKLQTLLKVALDVAKGMSYLHQNNIIHRDLKTANLLMDEHGLVKVADFGVARVQIESGVMTAETGTYRWMAPEVIEHKPYNHKADVFSYAIVLWELLTGDIPYAFLTPLQAAVGVVQKGLRPKIPKKTHPKVKGLLERCWHQDPEQRPLFEEIIEMLQQIMKEVNVVV

SEQ ID NO: 89758 - protein, 375 aa, Arabidopsis thaliana
  peptide (1)..(375): Ceres Seq. ID no. 12720330
MHEITFSTIDKPKLLSQLTSLLGELGLNIQEAHAFSTVDGFSLDVFVVDGWSQEETDGLRDALSKEILKLKDQPGSKQKSISFFEHDKSSNELIPACIEIPTDGTDEWEIDVTQLKIEKKVASGSYGDLHRGTYCSQEVAIKFLKPDRVNNEMLREFSQEVFIMRKVRHKNVVQFLGACTRSPTLCIVTEFMARGSIYDFLHKQKCAFKLQTLLKVALDVAKGMSYLHQNNIIHRDLKTANLLMDEHGLVKVADFGVARVQIESGVMTAETGTYRWMAPEVIEHKPYNHKADVFSYAIVLWELLTGDIPYAFLTPLQAAVGVVQKGLRPKIPKKTHPKVKGLLERCWHQDPEQRPLFEEIIEMLQQIMKEVNVVV

SEQ ID NO: 89759 - DNA, 1098 bp, Arabidopsis thaliana
  misc_feature (1)..(1098): Ceres Seq. ID no. 12720381
  misc_feature (1)..(1098): Ortholog of  Ceres SEQ ID NO 13582619 as cited in SEQ ID NO 56520
  misc_feature (1)..(1098): Ortholog of  Ceres SEQ ID NO 14315846 as cited in SEQ ID NO 58094
  misc_feature (1)..(1098): Ortholog of  Ceres SEQ ID NO 13660872 as cited in SEQ ID NO 60830
  misc_feature (1)..(1098): Ortholog of  Ceres SEQ ID NO 15226831 as cited in SEQ ID NO 62916
  misc_feature (1)..(1098): Ortholog of  Ceres SEQ ID NO 12616221 as cited in SEQ ID NO 63291
atggagccaatggaatcttgtagcgttcctccaggatttaggttccatccgacggacgaagagcttgtcgggtactatctaaggaagaaaatcgcatcgcaaaagattgatctcgacgtcatcagagacatcgatctctacagaatagaaccatgggatctacaagaacaatgtcgaatcggttatgaggaacaaaatgaatggtatttttttagtcacaaggacaagaaatatccaacggggacaagaactaatagagcgaccatggctggattttggaaagccacgggaagagacaaagctgtttacgacaaaacaaaactaattggtatgaggaaaacacttgtgttctacaaaggacgtgcacctaatggcaagaaatccgattggatcatgcatgagtaccggctcgagtcagatgagaatgcaccgccccaggaagaaggatgggtggtttgtagagcattcaaaaaaagagctacagggcaagccaagaacacggaaacttggagctcaagttacttttacgatgaagttgcaccgaatggagttaactcggttatggaccccattgattacatatctaagcagcaacataacatttttgggaaaggtttgatgtgtaagcaagaactagaaggaatggttgatggtataaactatatacaatcgaatcaattcattcagctcccacaactccaaagcccttctctcccgctgatgaaaagaccttcaagctcgatgtccataacatcaatggataacaattacaactataaactcccattagcggatgaagaaagcttcgagtcattcataagaggagaggatagaaggaagaagaaaaagcaagtaatgatgacgggaaattggagagagttagacaagtttgttgcttcacaacttatgagccaagaagacaatggaacttcaagtttcgcaggtcatcatatagttaatgaagataaaaacaacaatgatgtggagatggattcgtcaatgtttttgagcgaaagagaagaagaaaacaggttcgtcagtgaattcttgagtacaaactcggattatgatattgggatttgcgtatttgataattga

SEQ ID NO: 89760 - protein, 365 aa, Arabidopsis thaliana
  peptide (1)..(365): Ceres Seq. ID no. 12720382
MEPMESCSVPPGFRFHPTDEELVGYYLRKKIASQKIDLDVIRDIDLYRIEPWDLQEQCRIGYEEQNEWYFFSHKDKKYPTGTRTNRATMAGFWKATGRDKAVYDKTKLIGMRKTLVFYKGRAPNGKKSDWIMHEYRLESDENAPPQEEGWVVCRAFKKRATGQAKNTETWSSSYFYDEVAPNGVNSVMDPIDYISKQQHNIFGKGLMCKQELEGMVDGINYIQSNQFIQLPQLQSPSLPLMKRPSSSMSITSMDNNYNYKLPLADEESFESFIRGEDRRKKKKQVMMTGNWRELDKFVASQLMSQEDNGTSSFAGHHIVNEDKNNNDVEMDSSMFLSEREEENRFVSEFLSTNSDYDIGICVFDN

SEQ ID NO: 89761 - protein, 362 aa, Arabidopsis thaliana
  peptide (1)..(362): Ceres Seq. ID no. 12720383
MESCSVPPGFRFHPTDEELVGYYLRKKIASQKIDLDVIRDIDLYRIEPWDLQEQCRIGYEEQNEWYFFSHKDKKYPTGTRTNRATMAGFWKATGRDKAVYDKTKLIGMRKTLVFYKGRAPNGKKSDWIMHEYRLESDENAPPQEEGWVVCRAFKKRATGQAKNTETWSSSYFYDEVAPNGVNSVMDPIDYISKQQHNIFGKGLMCKQELEGMVDGINYIQSNQFIQLPQLQSPSLPLMKRPSSSMSITSMDNNYNYKLPLADEESFESFIRGEDRRKKKKQVMMTGNWRELDKFVASQLMSQEDNGTSSFAGHHIVNEDKNNNDVEMDSSMFLSEREEENRFVSEFLSTNSDYDIGICVFDN

SEQ ID NO: 89762 - protein, 277 aa, Arabidopsis thaliana
  peptide (1)..(277): Ceres Seq. ID no. 12720384
MAGFWKATGRDKAVYDKTKLIGMRKTLVFYKGRAPNGKKSDWIMHEYRLESDENAPPQEEGWVVCRAFKKRATGQAKNTETWSSSYFYDEVAPNGVNSVMDPIDYISKQQHNIFGKGLMCKQELEGMVDGINYIQSNQFIQLPQLQSPSLPLMKRPSSSMSITSMDNNYNYKLPLADEESFESFIRGEDRRKKKKQVMMTGNWRELDKFVASQLMSQEDNGTSSFAGHHIVNEDKNNNDVEMDSSMFLSEREEENRFVSEFLSTNSDYDIGICVFDN

SEQ ID NO: 89763 - DNA, 1014 bp, Arabidopsis thaliana
  misc_feature (1)..(1014): Ceres Seq. ID no. 12720392
  misc_feature (1)..(1014): Ortholog of  Ceres SEQ ID NO 13594727 as cited in SEQ ID NO 52169
  misc_feature (1)..(1014): Ortholog of  Ceres SEQ ID NO 13596474 as cited in SEQ ID NO 62169
  misc_feature (1)..(1014): Ortholog of  Ceres SEQ ID NO 13598714 as cited in SEQ ID NO 62656
  misc_feature (1)..(1014): Ortholog of  Ceres SEQ ID NO 13596969 as cited in SEQ ID NO 63375
  misc_feature (1)..(1014): Ortholog of  Ceres SEQ ID NO 13597519 as cited in SEQ ID NO 64759
  misc_feature (1)..(1014): Ortholog of  Ceres SEQ ID NO 14302388 as cited in SEQ ID NO 65655
  misc_feature (1)..(1014): Ortholog of  Ceres SEQ ID NO 15170183 as cited in SEQ ID NO 65667
  misc_feature (1)..(1014): Ortholog of  Ceres SEQ ID NO 13587054 as cited in SEQ ID NO 0
atggcaagaatcgggagctttctcattcttctgtctctcacttacgctcttactctctgcatctgtgacaacgcgagtaactttggcggcaacaaaaggaacctcttcccagatttctacaggagctcgtgccctagagcggaggagatcgtgaggtccgttgtagccaaggcatttgaaagggagactcgtatggctgcttctctcatgaggctccatttccacgattgtttcgttcagggttgtgatggatcgttgcttctagacaccagtgggagtatagttactgagaagaactctaaccctaacagcagatcggctcgcgggtttgaagttgttgacgagatcaaggcagcattagagaatgaatgccctaacactgtctcttgtgctgacgccttaactctagctgctagagactcctctgttcttacaggtgggccaagctggacggttcctttgggaagaagagattcggcaactgcaagccgggctaaaccaaacaaagaccttcctgaacccgacaacttgttcgacacaattttcttgagatttagcaatgaaggtctcaatctgactgacctcgttgctctatccgggagccacaccattggattctcaagatgcactagtttcagacagagactttacaatcaatccggaagcggaagtcccgacacaaccttagagaaatcctacgctgctatcttgcgccaaaggtgccctagatcgggtggggaccagaacctttccgagcttgacatcaacagtgctggaagatttgataacagctactttaagaacttgattgagaacatgggactgttgaattccgaccaagtcttgttctctagcaacgaacaatcgagagagctcgtgaagaagtatgcagaggatcaagaagagttcttcgagcaattcgcggaatcgatgatcaagatggggaagatctctcccttgacaggttcgagtggtgagatcagaaagaaatgcaggaaaattaataactcctga

SEQ ID NO: 89764 - protein, 337 aa, Arabidopsis thaliana
  peptide (1)..(337): Ceres Seq. ID no. 12720393
MARIGSFLILLSLTYALTLCICDNASNFGGNKRNLFPDFYRSSCPRAEEIVRSVVAKAFERETRMAASLMRLHFHDCFVQGCDGSLLLDTSGSIVTEKNSNPNSRSARGFEVVDEIKAALENECPNTVSCADALTLAARDSSVLTGGPSWTVPLGRRDSATASRAKPNKDLPEPDNLFDTIFLRFSNEGLNLTDLVALSGSHTIGFSRCTSFRQRLYNQSGSGSPDTTLEKSYAAILRQRCPRSGGDQNLSELDINSAGRFDNSYFKNLIENMGLLNSDQVLFSSNEQSRELVKKYAEDQEEFFEQFAESMIKMGKISPLTGSSGEIRKKCRKINNS

SEQ ID NO: 89765 - protein, 273 aa, Arabidopsis thaliana
  peptide (1)..(273): Ceres Seq. ID no. 12720394
MAASLMRLHFHDCFVQGCDGSLLLDTSGSIVTEKNSNPNSRSARGFEVVDEIKAALENECPNTVSCADALTLAARDSSVLTGGPSWTVPLGRRDSATASRAKPNKDLPEPDNLFDTIFLRFSNEGLNLTDLVALSGSHTIGFSRCTSFRQRLYNQSGSGSPDTTLEKSYAAILRQRCPRSGGDQNLSELDINSAGRFDNSYFKNLIENMGLLNSDQVLFSSNEQSRELVKKYAEDQEEFFEQFAESMIKMGKISPLTGSSGEIRKKCRKINNS

SEQ ID NO: 89766 - protein, 268 aa, Arabidopsis thaliana
  peptide (1)..(268): Ceres Seq. ID no. 12720395
MRLHFHDCFVQGCDGSLLLDTSGSIVTEKNSNPNSRSARGFEVVDEIKAALENECPNTVSCADALTLAARDSSVLTGGPSWTVPLGRRDSATASRAKPNKDLPEPDNLFDTIFLRFSNEGLNLTDLVALSGSHTIGFSRCTSFRQRLYNQSGSGSPDTTLEKSYAAILRQRCPRSGGDQNLSELDINSAGRFDNSYFKNLIENMGLLNSDQVLFSSNEQSRELVKKYAEDQEEFFEQFAESMIKMGKISPLTGSSGEIRKKCRKINNS

SEQ ID NO: 89767 - DNA, 531 bp, Arabidopsis thaliana
  misc_feature (1)..(531): Ceres Seq. ID no. 12720402
  misc_feature (1)..(531): Ortholog of  Ceres SEQ ID NO 13594090 as cited in SEQ ID NO 51093
atggcagctccggaagattcaaagatgtctccggcgaattcgtttggagctgtcgttctcggcggtacgtttgatcgattacacgatgggcatcgaatgttcctcaaggcggcggcggagctggccagggatcggatcgtagtgggagtctgtgatggcccaatgttgacgaaaaagcaattctctgacatgattcaacccattgaagaaaggatgcgtaatgtggagacctatgtcaagtctatcaagcccgagctggttgtacaagccgaacccattacagatccatatggcccttctatcgtagatgaaaatttggaagctattgttgtcagcaaagagacattacctggtggcttgtcagttaacagaaaaagagcagaaagaggtctttcacagcttaagattgaagttgtggaaatagtttctgatggatcgagtggaaataagataagttcaagtactctgagaaaaatggaggctgagaaagcgtctaaacaaaaacaaccagcagaagaaaaagcatcatga

SEQ ID NO: 89768 - protein, 176 aa, Arabidopsis thaliana
  peptide (1)..(176): Ceres Seq. ID no. 12720403
MAAPEDSKMSPANSFGAVVLGGTFDRLHDGHRMFLKAAAELARDRIVVGVCDGPMLTKKQFSDMIQPIEERMRNVETYVKSIKPELVVQAEPITDPYGPSIVDENLEAIVVSKETLPGGLSVNRKRAERGLSQLKIEVVEIVSDGSSGNKISSSTLRKMEAEKASKQKQPAEEKAS

SEQ ID NO: 89769 - protein, 168 aa, Arabidopsis thaliana
  peptide (1)..(168): Ceres Seq. ID no. 12720404
MSPANSFGAVVLGGTFDRLHDGHRMFLKAAAELARDRIVVGVCDGPMLTKKQFSDMIQPIEERMRNVETYVKSIKPELVVQAEPITDPYGPSIVDENLEAIVVSKETLPGGLSVNRKRAERGLSQLKIEVVEIVSDGSSGNKISSSTLRKMEAEKASKQKQPAEEKAS

SEQ ID NO: 89770 - protein, 144 aa, Arabidopsis thaliana
  peptide (1)..(144): Ceres Seq. ID no. 12720405
MFLKAAAELARDRIVVGVCDGPMLTKKQFSDMIQPIEERMRNVETYVKSIKPELVVQAEPITDPYGPSIVDENLEAIVVSKETLPGGLSVNRKRAERGLSQLKIEVVEIVSDGSSGNKISSSTLRKMEAEKASKQKQPAEEKAS

SEQ ID NO: 89771 - DNA, 624 bp, Arabidopsis thaliana
  misc_feature (1)..(624): Ceres Seq. ID no. 12720414
  misc_feature (1)..(624): Ortholog of  Ceres SEQ ID NO 13587149 as cited in SEQ ID NO 0
atgggataccaaacaaactctaatttctccatgtttttttcctcggaaaatgacgaccaaaaccaccacaactacgatccttataataatttctcttcatcaacttctgttgattgcactctctcacttggaacaccctctactcgtctcgacgaccaccatagattttcttctgctaattctaacaacatctccggcgacttttatattcacggaggaaacgctaagacttcttcgtacaagaagggtggtgttgctcatagcctacctcgccgttgtgctagctgcgacaccacttcaactcctctatggagaaacggaccaaaaggacctaagtcgttatgtaacgcgtgtggaatccgattcaagaaagaggagaggcgtgcgacggccagaaacttaacgatctccggtggaggttcatcagcggcagaagtcccagtagagaattcgtacaacggaggtggaaactattacagtcatcatcatcatcactatgcctcgtcgtcgccgtcgtgggctcatcagaacacacaaagagttccatatttctcaccggttccggagatggaatatccctacgtggataacgtcacggcttcttcttttatgtcttggaattga

SEQ ID NO: 89772 - protein, 207 aa, Arabidopsis thaliana
  peptide (1)..(207): Ceres Seq. ID no. 12720415
MGYQTNSNFSMFFSSENDDQNHHNYDPYNNFSSSTSVDCTLSLGTPSTRLDDHHRFSSANSNNISGDFYIHGGNAKTSSYKKGGVAHSLPRRCASCDTTSTPLWRNGPKGPKSLCNACGIRFKKEERRATARNLTISGGGSSAAEVPVENSYNGGGNYYSHHHHHYASSSPSWAHQNTQRVPYFSPVPEMEYPYVDNVTASSFMSWN

SEQ ID NO: 89773 - protein, 197 aa, Arabidopsis thaliana
  peptide (1)..(197): Ceres Seq. ID no. 12720416
MFFSSENDDQNHHNYDPYNNFSSSTSVDCTLSLGTPSTRLDDHHRFSSANSNNISGDFYIHGGNAKTSSYKKGGVAHSLPRRCASCDTTSTPLWRNGPKGPKSLCNACGIRFKKEERRATARNLTISGGGSSAAEVPVENSYNGGGNYYSHHHHHYASSSPSWAHQNTQRVPYFSPVPEMEYPYVDNVTASSFMSWN

SEQ ID NO: 89774 - protein, 133 aa, Arabidopsis thaliana
  peptide (1)..(133): Ceres Seq. ID no. 12720417
WDTKQTLISPCFFPRKMTTKTTTTTILIIISLHQLLLIALSHLEHPLLVSTTTIDFLLLILTTSPATFIFTEETLRLLRTRRVVLLIAYLAVVLAATPLQLLYGETDQKDLSRYVTRVESDSRKRRGVRRPET

SEQ ID NO: 89775 - DNA, 663 bp, Arabidopsis thaliana
  misc_feature (1)..(663): Ceres Seq. ID no. 12720425
  misc_feature (1)..(663): Ortholog of  Ceres SEQ ID NO 13661617 as cited in SEQ ID NO 61132
atgaataaccagaatgtagatgatcataatcttctactcatttctcaattgtaccctaatgtctatactccattagtaccacaacaaggaggagaagcaaaaccaacacggcggaggaaaaggaagagcaagagtgttgtggtggcagaggagggtgaaaacgaaggcaatgggtggtttagaaagagaaaattgagtgatgagcaagtaagaatgttggagattagctttgaagacgatcataagcttgaatccgagaggaaagatcggcttgcttctgagttagggcttgatcctcgtcaagtcgccgtctggttccaaaaccgccgtgcacggtggaagaacaaacgagtcgaggatgaatacactaaactcaagaatgcatacgaaaccaccgtcgttgagaaatgtcgtcttgattctgaggttattcacctaaaggaacaactttacgaggctgaaagagagatccaacggcttgcaaaaagagttgaaggaactttaagtaacagtcctatctcatcctctgtgaccattgaagccaatcatacgacaccgttttttggagattacgacatcggatttgacggtgaggctgacgagaacttgctctactcgccagattacattgatggattagactggatgagccaatttatgtaa

SEQ ID NO: 89776 - protein, 220 aa, Arabidopsis thaliana
  peptide (1)..(220): Ceres Seq. ID no. 12720426
MNNQNVDDHNLLLISQLYPNVYTPLVPQQGGEAKPTRRRKRKSKSVVVAEEGENEGNGWFRKRKLSDEQVRMLEISFEDDHKLESERKDRLASELGLDPRQVAVWFQNRRARWKNKRVEDEYTKLKNAYETTVVEKCRLDSEVIHLKEQLYEAEREIQRLAKRVEGTLSNSPISSSVTIEANHTTPFFGDYDIGFDGEADENLLYSPDYIDGLDWMSQFM

SEQ ID NO: 89777 - protein, 149 aa, Arabidopsis thaliana
  peptide (1)..(149): Ceres Seq. ID no. 12720427
MLEISFEDDHKLESERKDRLASELGLDPRQVAVWFQNRRARWKNKRVEDEYTKLKNAYETTVVEKCRLDSEVIHLKEQLYEAEREIQRLAKRVEGTLSNSPISSSVTIEANHTTPFFGDYDIGFDGEADENLLYSPDYIDGLDWMSQFM

SEQ ID NO: 89778 - DNA, 1335 bp, Arabidopsis thaliana
  misc_feature (1)..(1335): Ceres Seq. ID no. 12720428
  misc_feature (1)..(1335): Ortholog of  Ceres SEQ ID NO 13646595 as cited in SEQ ID NO 20561
  misc_feature (1)..(1335): Ortholog of  Ceres SEQ ID NO 13594345 as cited in SEQ ID NO 58043
  misc_feature (1)..(1335): Ortholog of  Ceres SEQ ID NO 15171614 as cited in SEQ ID NO 60106
  misc_feature (1)..(1335): Ortholog of  Ceres SEQ ID NO 13597574 as cited in SEQ ID NO 64677
  misc_feature (1)..(1335): Ortholog of  Ceres SEQ ID NO 13597843 as cited in SEQ ID NO 64850
  misc_feature (1)..(1335): Ortholog of  Ceres SEQ ID NO 13597678 as cited in SEQ ID NO 65375
  misc_feature (1)..(1335): Ortholog of  Ceres SEQ ID NO 12779098 as cited in SEQ ID NO 67698
  misc_feature (1)..(1335): Ortholog of  Ceres SEQ ID NO 13596180 as cited in SEQ ID NO 67941
  misc_feature (1)..(1335): Ortholog of  Ceres SEQ ID NO 13591190 as cited in SEQ ID NO 68044
  misc_feature (1)..(1335): Ortholog of  Ceres SEQ ID NO 13595961 as cited in SEQ ID NO 68223
atggagcatcctcacgtgcttttagtcgctagccctggcttggggcaccttatccctgccctcgaactcggaaaccgtctctccttcgtcctcaacgtccacgtcaccattcttgcaatcacctccggctcctcttccctcacagaaaccgagaccatacatacagccgcggctagagggaccttgagcaagatgcgagaaatgaagtccacggttcgtgatgccgtgaaatcaatgaagcaaaaaccgacggtcatgattgttgacttttttggtacagcgttgttgtccataaccgatgtaggtgtgacgagtaagtatgtgtacataccgtctcacgcgtggttcttggcattaattgtctacttgccggtattggataaggtaatggaaggtgagtatgttgatattaaggagcctatgaaaataccaggttgtaaaccggtcggaccaaaagagcttttggacacaatgttagaccggtccgaccaacaataccgtgattgtgtacagattgggttggagatacctatgagcgatggagttttggtaaatacttggggggagttacaagggaagactctagctgcgctaagagaggacatagatttgaaccgggttataaaagtaccggtttatcctattggacctattgttaggactaatgtgcttattgaaaaaccaaacagtacattcgagtggctagacaaacaagaggaaagatctgttgtatatgtgtgtttagggagtggtggaacattgtcgtttgagcaaacgatggaactagcttgggggttagagttaagttgtcaaagtttcttatgggttctacgtaagcctccttcttaccttggagcaagctcaaaagatgatgatcaagtaagtgacggtctaccagaaggtttcttggaccgcacacgtggtgtagggcttgtggtaacgcaatgggcaccgcaagttgagatcttaagccatagatcaatcggtgggtttttgtcacattgtggttggagctcggtgttggagagtttaactaaaggagttccgatcatcgcttggcctctttatgcggagcaatggatgaatgccacgttgctgacggaggagattggtatggctattcgtacgtcagagttaccgtcgaagaaagtgatcagccgggaagaagtggcgtctttggtgaagaagattgtagcggaagaggataaagaaggacgaaagataaagactaaagctgaagaggtgagggttagctccgaacgagcttggactcatggtgggtcgtctcatagttctctctttgaatgggcaaaacgatgtgggcttgtatcttaa

SEQ ID NO: 89779 - protein, 444 aa, Arabidopsis thaliana
  peptide (1)..(444): Ceres Seq. ID no. 12720429
MEHPHVLLVASPGLGHLIPALELGNRLSFVLNVHVTILAITSGSSSLTETETIHTAAARGTLSKMREMKSTVRDAVKSMKQKPTVMIVDFFGTALLSITDVGVTSKYVYIPSHAWFLALIVYLPVLDKVMEGEYVDIKEPMKIPGCKPVGPKELLDTMLDRSDQQYRDCVQIGLEIPMSDGVLVNTWGELQGKTLAALREDIDLNRVIKVPVYPIGPIVRTNVLIEKPNSTFEWLDKQEERSVVYVCLGSGGTLSFEQTMELAWGLELSCQSFLWVLRKPPSYLGASSKDDDQVSDGLPEGFLDRTRGVGLVVTQWAPQVEILSHRSIGGFLSHCGWSSVLESLTKGVPIIAWPLYAEQWMNATLLTEEIGMAIRTSELPSKKVISREEVASLVKKIVAEEDKEGRKIKTKAEEVRVSSERAWTHGGSSHSSLFEWAKRCGLVS

SEQ ID NO: 89780 - protein, 380 aa, Arabidopsis thaliana
  peptide (1)..(380): Ceres Seq. ID no. 12720430
MREMKSTVRDAVKSMKQKPTVMIVDFFGTALLSITDVGVTSKYVYIPSHAWFLALIVYLPVLDKVMEGEYVDIKEPMKIPGCKPVGPKELLDTMLDRSDQQYRDCVQIGLEIPMSDGVLVNTWGELQGKTLAALREDIDLNRVIKVPVYPIGPIVRTNVLIEKPNSTFEWLDKQEERSVVYVCLGSGGTLSFEQTMELAWGLELSCQSFLWVLRKPPSYLGASSKDDDQVSDGLPEGFLDRTRGVGLVVTQWAPQVEILSHRSIGGFLSHCGWSSVLESLTKGVPIIAWPLYAEQWMNATLLTEEIGMAIRTSELPSKKVISREEVASLVKKIVAEEDKEGRKIKTKAEEVRVSSERAWTHGGSSHSSLFEWAKRCGLVS

SEQ ID NO: 89781 - protein, 377 aa, Arabidopsis thaliana
  peptide (1)..(377): Ceres Seq. ID no. 12720431
MKSTVRDAVKSMKQKPTVMIVDFFGTALLSITDVGVTSKYVYIPSHAWFLALIVYLPVLDKVMEGEYVDIKEPMKIPGCKPVGPKELLDTMLDRSDQQYRDCVQIGLEIPMSDGVLVNTWGELQGKTLAALREDIDLNRVIKVPVYPIGPIVRTNVLIEKPNSTFEWLDKQEERSVVYVCLGSGGTLSFEQTMELAWGLELSCQSFLWVLRKPPSYLGASSKDDDQVSDGLPEGFLDRTRGVGLVVTQWAPQVEILSHRSIGGFLSHCGWSSVLESLTKGVPIIAWPLYAEQWMNATLLTEEIGMAIRTSELPSKKVISREEVASLVKKIVAEEDKEGRKIKTKAEEVRVSSERAWTHGGSSHSSLFEWAKRCGLVS

SEQ ID NO: 89782 - DNA, 918 bp, Arabidopsis thaliana
  misc_feature (1)..(918): Ceres Seq. ID no. 12720464
  misc_feature (1)..(918): Ortholog of  Ceres SEQ ID NO 14307355 as cited in SEQ ID NO 54610
  misc_feature (1)..(918): Ortholog of  Ceres SEQ ID NO 13594298 as cited in SEQ ID NO 57803
  misc_feature (1)..(918): Ortholog of  Ceres SEQ ID NO 14301894 as cited in SEQ ID NO 61677
  misc_feature (1)..(918): Ortholog of  Ceres SEQ ID NO 13503476 as cited in SEQ ID NO 61978
  misc_feature (1)..(918): Ortholog of  Ceres SEQ ID NO 12578438 as cited in SEQ ID NO 62201
  misc_feature (1)..(918): Ortholog of  Ceres SEQ ID NO 12617675 as cited in SEQ ID NO 64656
atggtttctagtacacttttggttatgtcaatatctctctttcttggtttaagcatattgcttgttgtacacggtaaagatttcaaccaagacattgacataacctggggtgatggtagaggaaatattttgaacaatggtactcttctaaatctcggtcttgatcaatcttcgggttcagggtttcaatcgaaagccgagtatttgtacggaaaagttgatatgcagatcaaacttgtcccgggaaattcagccgggaccgtgaccaccttctacttgaagtctcaaggattaacatgggacgagatagatttcgagtttttggggaatgttagtggagatccatacattgttcacactaatgtttacactcaaggcaagggtgatagagagcaacaattctacctttggttcgatccaacagccgcgttccacaactactctattctatggaatccgagtcacatagtgttctatattgatgggaagccaatcagagaattcaagaacttggaagtattgggtgtggcttatccaaagaaccaacccatgagaatgtatggaagtctatggaacgcagacgattgggccacgaggggagggctggtaaagacaaactggtcacagggaccattcgtagcctctttcatgaactacaactccgagaatgcttgtgtttggtccatcgttaatggaaccacaactacttctccttgtagccccggtgactcgacttcttcttcttcgagcagtactagcgagtggttttcgcagagagggatggattcttcaagcaagaaagttcttagatgggttcagaggaagttcatggtttacaattattgtaaggacaagaagcgattctctaatggtttgcctgttgaatgcactgctaagaacaagaacacaaagtcttga

SEQ ID NO: 89783 - protein, 305 aa, Arabidopsis thaliana
  peptide (1)..(305): Ceres Seq. ID no. 12720465
MVSSTLLVMSISLFLGLSILLVVHGKDFNQDIDITWGDGRGNILNNGTLLNLGLDQSSGSGFQSKAEYLYGKVDMQIKLVPGNSAGTVTTFYLKSQGLTWDEIDFEFLGNVSGDPYIVHTNVYTQGKGDREQQFYLWFDPTAAFHNYSILWNPSHIVFYIDGKPIREFKNLEVLGVAYPKNQPMRMYGSLWNADDWATRGGLVKTNWSQGPFVASFMNYNSENACVWSIVNGTTTTSPCSPGDSTSSSSSSTSEWFSQRGMDSSSKKVLRWVQRKFMVYNYCKDKKRFSNGLPVECTAKNKNTKS

SEQ ID NO: 89784 - protein, 297 aa, Arabidopsis thaliana
  peptide (1)..(297): Ceres Seq. ID no. 12720466
MSISLFLGLSILLVVHGKDFNQDIDITWGDGRGNILNNGTLLNLGLDQSSGSGFQSKAEYLYGKVDMQIKLVPGNSAGTVTTFYLKSQGLTWDEIDFEFLGNVSGDPYIVHTNVYTQGKGDREQQFYLWFDPTAAFHNYSILWNPSHIVFYIDGKPIREFKNLEVLGVAYPKNQPMRMYGSLWNADDWATRGGLVKTNWSQGPFVASFMNYNSENACVWSIVNGTTTTSPCSPGDSTSSSSSSTSEWFSQRGMDSSSKKVLRWVQRKFMVYNYCKDKKRFSNGLPVECTAKNKNTKS

SEQ ID NO: 89785 - protein, 231 aa, Arabidopsis thaliana
  peptide (1)..(231): Ceres Seq. ID no. 12720467
MQIKLVPGNSAGTVTTFYLKSQGLTWDEIDFEFLGNVSGDPYIVHTNVYTQGKGDREQQFYLWFDPTAAFHNYSILWNPSHIVFYIDGKPIREFKNLEVLGVAYPKNQPMRMYGSLWNADDWATRGGLVKTNWSQGPFVASFMNYNSENACVWSIVNGTTTTSPCSPGDSTSSSSSSTSEWFSQRGMDSSSKKVLRWVQRKFMVYNYCKDKKRFSNGLPVECTAKNKNTKS

SEQ ID NO: 89786 - DNA, 1319 bp, Arabidopsis thaliana
  misc_feature (1)..(1319): Ceres Seq. ID no. 12720490
  misc_feature (1)..(1319): Ortholog of  Ceres SEQ ID NO 13596581 as cited in SEQ ID NO 62420
  misc_feature (1)..(1319): Ortholog of  Ceres SEQ ID NO 13591273 as cited in SEQ ID NO 65904
  misc_feature (1)..(1319): Ortholog of  Ceres SEQ ID NO 13623086 as cited in SEQ ID NO 0
gcagtttcaactttcaaagccagcaaataataaacagaggagaaatatggaaacacaaggcaaagtaatcacttgcaaagctgctgtggcatggggagctggagagcctctagtaatggaagatgtaaaagtggatcctcctcaaagattggaagtgagaattcgaatcctcttcacttccatctgtcacactgatctcagcgcatggaaaggcgagaacgaggctcagcgagcataccctcgaatccttggccatgaggcagcagggatagtggagagcgtaggggaaggtgtggaagagatgatggcaggagatcatgtgctccctattttcacaggagagtgtggagactgcagagtgtgcaagcgagacggagccaatctgtgcgagagattccgagtggatccgatgaagaaggtgatggtaaccgatggaaagaccagattcttcaccagcaaagacaacaaaccaatctaccattttctcaacacatccaccttctccgagtacacggtcatagactcggcctgcgtgctcaaggtggaccctctgtttcctctggagaagataagcctcctcagctgcggtgtctccactggagtcggtgcggcgtggaatgtggctgatattcaacctgcctccaccgtcgctatttttggacttggcgctgttggacttgccgtggctgaaggtgcaagagccagaggagcctctaaaatcattgggatcgacatcaaccctgacaagttccaactaggcagagaagcagggattagtgaattcataaatccaaaggagagtgacaaggcagttcatgagagagtaatggagataacagagggaggagtggagtacagcttcgagtgtgcaggaagtatagaagcacttagagaagcctttctgtctacaaactcaggagtgggagtgactgtcatgctgggcgttcacgcaagcccacagcttctccctatccatcccatggagctcttccaaggcagatccatcaccgcctctgttttcggaggcttcaaacccaaaacccaattaccctttttcatcacccagtgcctccaaggtcttctcaatctcgatctcttcatctctcaccagcttcccttccacgatatcaacgaagccatgcagctgcttcaccaaggcaaagctcttcgttgccttctccacctctaaactgaacaaacatcttttacattttccaaatccgtttgattgattgttctactgcttttagagtttccttattgggtctggtccacccccatactaaaataaaagttggaaatgttttctccaacttgct

SEQ ID NO: 89787 - protein, 395 aa, Arabidopsis thaliana
  peptide (1)..(395): Ceres Seq. ID no. 12720491
QFQLSKPANNKQRRNMETQGKVITCKAAVAWGAGEPLVMEDVKVDPPQRLEVRIRILFTSICHTDLSAWKGENEAQRAYPRILGHEAAGIVESVGEGVEEMMAGDHVLPIFTGECGDCRVCKRDGANLCERFRVDPMKKVMVTDGKTRFFTSKDNKPIYHFLNTSTFSEYTVIDSACVLKVDPLFPLEKISLLSCGVSTGVGAAWNVADIQPASTVAIFGLGAVGLAVAEGARARGASKIIGIDINPDKFQLGREAGISEFINPKESDKAVHERVMEITEGGVEYSFECAGSIEALREAFLSTNSGVGVTVMLGVHASPQLLPIHPMELFQGRSITASVFGGFKPKTQLPFFITQCLQGLLNLDLFISHQLPFHDINEAMQLLHQGKALRCLLHL

SEQ ID NO: 89788 - protein, 380 aa, Arabidopsis thaliana
  peptide (1)..(380): Ceres Seq. ID no. 12720492
METQGKVITCKAAVAWGAGEPLVMEDVKVDPPQRLEVRIRILFTSICHTDLSAWKGENEAQRAYPRILGHEAAGIVESVGEGVEEMMAGDHVLPIFTGECGDCRVCKRDGANLCERFRVDPMKKVMVTDGKTRFFTSKDNKPIYHFLNTSTFSEYTVIDSACVLKVDPLFPLEKISLLSCGVSTGVGAAWNVADIQPASTVAIFGLGAVGLAVAEGARARGASKIIGIDINPDKFQLGREAGISEFINPKESDKAVHERVMEITEGGVEYSFECAGSIEALREAFLSTNSGVGVTVMLGVHASPQLLPIHPMELFQGRSITASVFGGFKPKTQLPFFITQCLQGLLNLDLFISHQLPFHDINEAMQLLHQGKALRCLLHL

SEQ ID NO: 89789 - protein, 357 aa, Arabidopsis thaliana
  peptide (1)..(357): Ceres Seq. ID no. 12720493
MEDVKVDPPQRLEVRIRILFTSICHTDLSAWKGENEAQRAYPRILGHEAAGIVESVGEGVEEMMAGDHVLPIFTGECGDCRVCKRDGANLCERFRVDPMKKVMVTDGKTRFFTSKDNKPIYHFLNTSTFSEYTVIDSACVLKVDPLFPLEKISLLSCGVSTGVGAAWNVADIQPASTVAIFGLGAVGLAVAEGARARGASKIIGIDINPDKFQLGREAGISEFINPKESDKAVHERVMEITEGGVEYSFECAGSIEALREAFLSTNSGVGVTVMLGVHASPQLLPIHPMELFQGRSITASVFGGFKPKTQLPFFITQCLQGLLNLDLFISHQLPFHDINEAMQLLHQGKALRCLLHL

SEQ ID NO: 89790 - DNA, 1509 bp, Arabidopsis thaliana
  misc_feature (1)..(1509): Ceres Seq. ID no. 12720502
  misc_feature (1)..(1509): Ortholog of  Ceres SEQ ID NO 13660287 as cited in SEQ ID NO 67316
atggaaacggatttctcgttggtgcgtaaggaggaggaagaagaagaagataacaggaatgggatgagttatttgtcaatggagatgatgaagaaggtgagctccatggcggctccaatggtggcagtttcggtttctcaattcctccttcaagtcatctccatggttatggctggtcatttggacgagctctcgctctcagctgtcgcaattgccacttccctcaccaatgtcactggtttcagcctcatcgttgggtttgcaggtgcgttagacactctttgcggtcaagcttttggagcagaacaatttggaaaaattggtgcatacacttacagctcaatgctctgtcttctcgttttctgtttttcaatctctatcgtatggtttttcatggacaagctcttggagattttccatcaagatcctctcatctctcaattagcttgcagatactcaatctggctcataccggctttattcggattcactcttcttcaacctatgactcggtatttccagtcacaaggaataactcttcctctcttcgtgagctctcttggagctctttgttttcacattcctttctgttggcttcttgtctataaactgaaatttggaatagttggcgccgctttgtccatcggtttttcatattggctcaacgtatttttgctttggattttcatgagatactctgctttgcatcgtgaaatgaagaatcttggtttgcaagaactcatctcgagcatgaagcagttcatcgccctcgcgatcccctctgcaatgatgatatgcctggaatggtggtcgtttgagattctactactaatgtctggactcttaccaaactcaaagctcgaaacatcggtgatatccatttgcctcacaacatcggctgtgcatttcgttctggtgaatgcgataggagcatccgcaagcacacatgtctcaaacgagctaggagctggaaatcatagggcagctcgagccgcggttaattctgccattttccttggtggtgttggtgcattaataacaaccatcacactttacagttaccgaaaaagttggggttatgtattcagcaacgagagagaagtggttcgctacgcaacccaaatcacacccattctctgcctatccattttcgttaacagctttctcgccgtgctctcaggggttgccagaggatcagggtggcaacgtataggaggttatgcaagcttaggatcatattatcttgtcggaatcccgttaggatggttcttgtgttttgtcatgaaattgagagggaaaggactttggattggtatactcatagcctccactatccaactcattgtttttgctcttgtcaccttcttcaccaattgggaacaagaggcaacgaaagctagagacagagtattcgagatgacacctcaagtcaaaggcaaccaaaaaacacaaattatagtagaagaggatacacaagttttacttaatcatattgcagaaactgtgtaa

SEQ ID NO: 89791 - protein, 502 aa, Arabidopsis thaliana
  peptide (1)..(502): Ceres Seq. ID no. 12720503
METDFSLVRKEEEEEEDNRNGMSYLSMEMMKKVSSMAAPMVAVSVSQFLLQVISMVMAGHLDELSLSAVAIATSLTNVTGFSLIVGFAGALDTLCGQAFGAEQFGKIGAYTYSSMLCLLVFCFSISIVWFFMDKLLEIFHQDPLISQLACRYSIWLIPALFGFTLLQPMTRYFQSQGITLPLFVSSLGALCFHIPFCWLLVYKLKFGIVGAALSIGFSYWLNVFLLWIFMRYSALHREMKNLGLQELISSMKQFIALAIPSAMMICLEWWSFEILLLMSGLLPNSKLETSVISICLTTSAVHFVLVNAIGASASTHVSNELGAGNHRAARAAVNSAIFLGGVGALITTITLYSYRKSWGYVFSNEREVVRYATQITPILCLSIFVNSFLAVLSGVARGSGWQRIGGYASLGSYYLVGIPLGWFLCFVMKLRGKGLWIGILIASTIQLIVFALVTFFTNWEQEATKARDRVFEMTPQVKGNQKTQIIVEEDTQVLLNHIAETV

SEQ ID NO: 89792 - protein, 481 aa, Arabidopsis thaliana
  peptide (1)..(481): Ceres Seq. ID no. 12720504
MSYLSMEMMKKVSSMAAPMVAVSVSQFLLQVISMVMAGHLDELSLSAVAIATSLTNVTGFSLIVGFAGALDTLCGQAFGAEQFGKIGAYTYSSMLCLLVFCFSISIVWFFMDKLLEIFHQDPLISQLACRYSIWLIPALFGFTLLQPMTRYFQSQGITLPLFVSSLGALCFHIPFCWLLVYKLKFGIVGAALSIGFSYWLNVFLLWIFMRYSALHREMKNLGLQELISSMKQFIALAIPSAMMICLEWWSFEILLLMSGLLPNSKLETSVISICLTTSAVHFVLVNAIGASASTHVSNELGAGNHRAARAAVNSAIFLGGVGALITTITLYSYRKSWGYVFSNEREVVRYATQITPILCLSIFVNSFLAVLSGVARGSGWQRIGGYASLGSYYLVGIPLGWFLCFVMKLRGKGLWIGILIASTIQLIVFALVTFFTNWEQEATKARDRVFEMTPQVKGNQKTQIIVEEDTQVLLNHIAETV

SEQ ID NO: 89793 - protein, 476 aa, Arabidopsis thaliana
  peptide (1)..(476): Ceres Seq. ID no. 12720505
MEMMKKVSSMAAPMVAVSVSQFLLQVISMVMAGHLDELSLSAVAIATSLTNVTGFSLIVGFAGALDTLCGQAFGAEQFGKIGAYTYSSMLCLLVFCFSISIVWFFMDKLLEIFHQDPLISQLACRYSIWLIPALFGFTLLQPMTRYFQSQGITLPLFVSSLGALCFHIPFCWLLVYKLKFGIVGAALSIGFSYWLNVFLLWIFMRYSALHREMKNLGLQELISSMKQFIALAIPSAMMICLEWWSFEILLLMSGLLPNSKLETSVISICLTTSAVHFVLVNAIGASASTHVSNELGAGNHRAARAAVNSAIFLGGVGALITTITLYSYRKSWGYVFSNEREVVRYATQITPILCLSIFVNSFLAVLSGVARGSGWQRIGGYASLGSYYLVGIPLGWFLCFVMKLRGKGLWIGILIASTIQLIVFALVTFFTNWEQEATKARDRVFEMTPQVKGNQKTQIIVEEDTQVLLNHIAETV

SEQ ID NO: 89794 - DNA, 1344 bp, Arabidopsis thaliana
  misc_feature (1)..(1344): Ceres Seq. ID no. 12720522
  misc_feature (1)..(1344): Ortholog of  Ceres SEQ ID NO 13582281 as cited in SEQ ID NO 51014
  misc_feature (1)..(1344): Ortholog of  Ceres SEQ ID NO 14315606 as cited in SEQ ID NO 53515
  misc_feature (1)..(1344): Ortholog of  Ceres SEQ ID NO 12617417 as cited in SEQ ID NO 65089
atgggccaaacgtttcacgcctttatgttcccatggttcgcttttggtcatatgactccatacttgcatttagccaacaagttagctgagagaggtcacagaatcactttcttgatccccaagaaagctcagaagcagcttgaacatctcaatctgtttccagacagcatcgtctttcactctcttactattcctcatgttgatggtctccccgctggagccgagactttctcggatatccctatgccattgtggaagttcttgcccccagctatagatctcacacgcgatcaagttgaagcagcggttagtgccttgagtccggacctgatcttgttcgatattgcttcatgggttccagaagtggctaaagagtatagagtcaagagtatgttgtacaacatcatatcagctacttctatagctcatgactttgtcccaggtggtgaacttggagttcctccacctggttatccttcctcaaagttgttgtaccgcaaacacgatgctcacgccttgttgtccttctccgtctactacaagaggttttctcatcggctcatcacaggtcttatgaattgtgatttcatttcgataaggacatgcaaagaaatcgagggtaaattctgcgagtatcttgagcgtcaataccataaaaaggttttcttgacgggtccaatgcttcctgagccaaacaaaggtaaaccactggaagatcgatggagtcattggctgaacgggtttgaacaaggctctgtagtgttctgtgcattgggaagtcaagtcactctagagaaggaccagttccaagaactttgtttaggaatagagcttacaggtttaccgttttttgtagctgtaacaccaccaaaaggcgcaaagacgattcaagatgcgttaccagaagggttcgaggagagggtgaaagatcgtggagtggttttgggagaatgggtgcaacaaccgttattattggctcatccatcagtaggctgcttcttgagtcattgcggattcgggtcaatgtgggaatctataatgagtgattgccaaatagttttgcttccatttttggctgatcaagttctcaacacaagattgatgaccgaagaactcaaggtttcggttgaagtgcaaagagaagaaacaggatggttctcgaaggagagcttgagtgttgctatcacatctgtgatggaccaagctagtgagatcgggaatctggtgagaaggaaccattccaaattgaaggaggttttggttagtgatggattattaaccggttacaccgataaatttgttgacactttggagaatcttgtcagcgagacaaagcgtgaatga

SEQ ID NO: 89795 - protein, 447 aa, Arabidopsis thaliana
  peptide (1)..(447): Ceres Seq. ID no. 12720523
MGQTFHAFMFPWFAFGHMTPYLHLANKLAERGHRITFLIPKKAQKQLEHLNLFPDSIVFHSLTIPHVDGLPAGAETFSDIPMPLWKFLPPAIDLTRDQVEAAVSALSPDLILFDIASWVPEVAKEYRVKSMLYNIISATSIAHDFVPGGELGVPPPGYPSSKLLYRKHDAHALLSFSVYYKRFSHRLITGLMNCDFISIRTCKEIEGKFCEYLERQYHKKVFLTGPMLPEPNKGKPLEDRWSHWLNGFEQGSVVFCALGSQVTLEKDQFQELCLGIELTGLPFFVAVTPPKGAKTIQDALPEGFEERVKDRGVVLGEWVQQPLLLAHPSVGCFLSHCGFGSMWESIMSDCQIVLLPFLADQVLNTRLMTEELKVSVEVQREETGWFSKESLSVAITSVMDQASEIGNLVRRNHSKLKEVLVSDGLLTGYTDKFVDTLENLVSETKRE

SEQ ID NO: 89796 - protein, 439 aa, Arabidopsis thaliana
  peptide (1)..(439): Ceres Seq. ID no. 12720524
MFPWFAFGHMTPYLHLANKLAERGHRITFLIPKKAQKQLEHLNLFPDSIVFHSLTIPHVDGLPAGAETFSDIPMPLWKFLPPAIDLTRDQVEAAVSALSPDLILFDIASWVPEVAKEYRVKSMLYNIISATSIAHDFVPGGELGVPPPGYPSSKLLYRKHDAHALLSFSVYYKRFSHRLITGLMNCDFISIRTCKEIEGKFCEYLERQYHKKVFLTGPMLPEPNKGKPLEDRWSHWLNGFEQGSVVFCALGSQVTLEKDQFQELCLGIELTGLPFFVAVTPPKGAKTIQDALPEGFEERVKDRGVVLGEWVQQPLLLAHPSVGCFLSHCGFGSMWESIMSDCQIVLLPFLADQVLNTRLMTEELKVSVEVQREETGWFSKESLSVAITSVMDQASEIGNLVRRNHSKLKEVLVSDGLLTGYTDKFVDTLENLVSETKRE

SEQ ID NO: 89797 - protein, 430 aa, Arabidopsis thaliana
  peptide (1)..(430): Ceres Seq. ID no. 12720525
MTPYLHLANKLAERGHRITFLIPKKAQKQLEHLNLFPDSIVFHSLTIPHVDGLPAGAETFSDIPMPLWKFLPPAIDLTRDQVEAAVSALSPDLILFDIASWVPEVAKEYRVKSMLYNIISATSIAHDFVPGGELGVPPPGYPSSKLLYRKHDAHALLSFSVYYKRFSHRLITGLMNCDFISIRTCKEIEGKFCEYLERQYHKKVFLTGPMLPEPNKGKPLEDRWSHWLNGFEQGSVVFCALGSQVTLEKDQFQELCLGIELTGLPFFVAVTPPKGAKTIQDALPEGFEERVKDRGVVLGEWVQQPLLLAHPSVGCFLSHCGFGSMWESIMSDCQIVLLPFLADQVLNTRLMTEELKVSVEVQREETGWFSKESLSVAITSVMDQASEIGNLVRRNHSKLKEVLVSDGLLTGYTDKFVDTLENLVSETKRE

SEQ ID NO: 89798 - DNA, 1536 bp, Arabidopsis thaliana
  misc_feature (1)..(1536): Ceres Seq. ID no. 12720530
  misc_feature (1)..(1536): Ortholog of  Ceres SEQ ID NO 15169627 as cited in SEQ ID NO 64517
  misc_feature (1)..(1536): Ortholog of  Ceres SEQ ID NO 14307952 as cited in SEQ ID NO 66029
  misc_feature (1)..(1536): Ortholog of  Ceres SEQ ID NO 12614124 as cited in SEQ ID NO 68392
atggagatatggttacttatcttgggctctctctccctctctctccttctcaatctcctcttctttcgcctccgtgactcctcctctcttccgttaccacctgcccctaacttcttccctttccttggaacccttcaatggctccggcaaggtttaggtggtttcaacaactatgtccgctccgtccatcaccgtctcggtcctatcatcaccctccgcatcacttcccgccctgccatctttgtcgccgatggttcccttgctcaccaggctctggtcttaaacggggccgttttcgccgatcgtccaccggcggctccgatcagtaagattctttcgaataaccaacataccatcacctcttgtttatatggagttacgtggcggcttcttcgccggaatatcactgagattcttcacccctcgcgtatgaaatcttattctcacgtgcggcattgggttcttgagatcctctttgatcgacttcgtaagagcggaggtgaagaaccgatcgtcgtttttgatcatcttcactatgcgatgtttgcagttcttgttctcatgtgttttggagataagcttgatgagaagcaaatcaaacaggtggaatatgttcagagacaaatgcttcttggctttgccagatatagcatccttaacctttgccctaagttcactaaattgattttgcgaaagagatgggaagagttcttccagatgaggagagagcagcaggatgtcttgcttcggctgatttatgctcggagaaagatcgttgaagagaggaagaagagatcatcagaggaagaagaagagaacaaagagtatgtgcaatcatatgttgatactctgctcgatgtggagcttccagatgagaagaggaagctgaacgaagatgagattgtgagtttgtgctctgagtttctaattgctgggagtgatacaacggccactgtgctgcaatggatcatggcgaacctcgtgaagaatcaagaaatccaggagagattatacgaggagatcacaaacgtagtcggggaagaagcaaaggtagtggaggaaaaagacacgcagaagatgccatatctaaaggcagtagtgatggaggctctccgacgacaccctccgggaaacactgtgctcccgcacagtgtcacggaggacactgtcttgggagggtacaaagtaccgaagaaggggacgattaacttcttagtggcagagatagggagggatccaaaggtgtgggaggaaccaatggcgtttaagccagagaggtttatgggagaagaagaagcggtggacataaccggaagcagagggataaagatgatgccgttcggagcgggtagaaggatatgtcccgggattgggctagcgatgctgcacctcgagtattatgtggcgaatatggtgagggaattccaatggaaagaggtcgaaggtcatgaagttgacttgactgagaaggtcgagtttaccgtaatcatgaaacatccgcttaaggctattgctgttcctaggagaagtcactag

SEQ ID NO: 89799 - protein, 511 aa, Arabidopsis thaliana
  peptide (1)..(511): Ceres Seq. ID no. 12720531
MEIWLLILGSLSLSLLLNLLFFRLRDSSSLPLPPAPNFFPFLGTLQWLRQGLGGFNNYVRSVHHRLGPIITLRITSRPAIFVADGSLAHQALVLNGAVFADRPPAAPISKILSNNQHTITSCLYGVTWRLLRRNITEILHPSRMKSYSHVRHWVLEILFDRLRKSGGEEPIVVFDHLHYAMFAVLVLMCFGDKLDEKQIKQVEYVQRQMLLGFARYSILNLCPKFTKLILRKRWEEFFQMRREQQDVLLRLIYARRKIVEERKKRSSEEEEENKEYVQSYVDTLLDVELPDEKRKLNEDEIVSLCSEFLIAGSDTTATVLQWIMANLVKNQEIQERLYEEITNVVGEEAKVVEEKDTQKMPYLKAVVMEALRRHPPGNTVLPHSVTEDTVLGGYKVPKKGTINFLVAEIGRDPKVWEEPMAFKPERFMGEEEAVDITGSRGIKMMPFGAGRRICPGIGLAMLHLEYYVANMVREFQWKEVEGHEVDLTEKVEFTVIMKHPLKAIAVPRRSH

SEQ ID NO: 89800 - protein, 368 aa, Arabidopsis thaliana
  peptide (1)..(368): Ceres Seq. ID no. 12720532
MKSYSHVRHWVLEILFDRLRKSGGEEPIVVFDHLHYAMFAVLVLMCFGDKLDEKQIKQVEYVQRQMLLGFARYSILNLCPKFTKLILRKRWEEFFQMRREQQDVLLRLIYARRKIVEERKKRSSEEEEENKEYVQSYVDTLLDVELPDEKRKLNEDEIVSLCSEFLIAGSDTTATVLQWIMANLVKNQEIQERLYEEITNVVGEEAKVVEEKDTQKMPYLKAVVMEALRRHPPGNTVLPHSVTEDTVLGGYKVPKKGTINFLVAEIGRDPKVWEEPMAFKPERFMGEEEAVDITGSRGIKMMPFGAGRRICPGIGLAMLHLEYYVANMVREFQWKEVEGHEVDLTEKVEFTVIMKHPLKAIAVPRRSH

SEQ ID NO: 89801 - protein, 331 aa, Arabidopsis thaliana
  peptide (1)..(331): Ceres Seq. ID no. 12720533
MFAVLVLMCFGDKLDEKQIKQVEYVQRQMLLGFARYSILNLCPKFTKLILRKRWEEFFQMRREQQDVLLRLIYARRKIVEERKKRSSEEEEENKEYVQSYVDTLLDVELPDEKRKLNEDEIVSLCSEFLIAGSDTTATVLQWIMANLVKNQEIQERLYEEITNVVGEEAKVVEEKDTQKMPYLKAVVMEALRRHPPGNTVLPHSVTEDTVLGGYKVPKKGTINFLVAEIGRDPKVWEEPMAFKPERFMGEEEAVDITGSRGIKMMPFGAGRRICPGIGLAMLHLEYYVANMVREFQWKEVEGHEVDLTEKVEFTVIMKHPLKAIAVPRRSH

SEQ ID NO: 89802 - DNA, 780 bp, Arabidopsis thaliana
  misc_feature (1)..(780): Ceres Seq. ID no. 12720538
  misc_feature (1)..(780): Ortholog of  Ceres SEQ ID NO 15178295 as cited in SEQ ID NO 52699
  misc_feature (1)..(780): Ortholog of  Ceres SEQ ID NO 13597725 as cited in SEQ ID NO 64806
atgacaattagcaacggagatgtcaaatctgaaacctgcaacaatggctcttctgagaagaaaccattcaggatcttcgttggttacgatccacgagaagatcttgcctaccaagtttgtcatcattcaatcacaaaaagatcttcaatccctgtagagatcacaccaattattcaatcagatcttcgaaagaaaggtctgtattggagagaaagaggtcagttagagagcactgagttctctttctctcgtttcttgactcctcacttgtcagattaccaaggttgggctatgttcgtcgactgtgatttcctctaccttgctgatatcaaggaactcactgatttgatcgatgataaatatgcgatcatgtgtgttcaacatgattatactcctaaggagactactaagatggatggtgcggttcaaactgtgtacccgaggaagaactggtcttcaatggtgctttacaactgtggacaccctaagaacaagactttgagccctgagattgttaatactcagactggtgcgtttctccataggttccagtggcttgaggatgaagagattgggtctattccttttgtgtggaactttcttgaagggcacaatagggttgttgagaaagatcccaccacgcagcctaaagcggtgcattatactcgtggagggccttggtttgatgcttggaaggattgcgagtttgcggatctttggcttaatgagatggaagagtacaacaaagagaacaagaaggaagctgataacgcaaagtag

SEQ ID NO: 89803 - protein, 259 aa, Arabidopsis thaliana
  peptide (1)..(259): Ceres Seq. ID no. 12720539
MTISNGDVKSETCNNGSSEKKPFRIFVGYDPREDLAYQVCHHSITKRSSIPVEITPIIQSDLRKKGLYWRERGQLESTEFSFSRFLTPHLSDYQGWAMFVDCDFLYLADIKELTDLIDDKYAIMCVQHDYTPKETTKMDGAVQTVYPRKNWSSMVLYNCGHPKNKTLSPEIVNTQTGAFLHRFQWLEDEEIGSIPFVWNFLEGHNRVVEKDPTTQPKAVHYTRGGPWFDAWKDCEFADLWLNEMEEYNKENKKEADNAK

SEQ ID NO: 89804 - protein, 162 aa, Arabidopsis thaliana
  peptide (1)..(162): Ceres Seq. ID no. 12720540
MFVDCDFLYLADIKELTDLIDDKYAIMCVQHDYTPKETTKMDGAVQTVYPRKNWSSMVLYNCGHPKNKTLSPEIVNTQTGAFLHRFQWLEDEEIGSIPFVWNFLEGHNRVVEKDPTTQPKAVHYTRGGPWFDAWKDCEFADLWLNEMEEYNKENKKEADNAK

SEQ ID NO: 89805 - protein, 136 aa, Arabidopsis thaliana
  peptide (1)..(136): Ceres Seq. ID no. 12720541
MCVQHDYTPKETTKMDGAVQTVYPRKNWSSMVLYNCGHPKNKTLSPEIVNTQTGAFLHRFQWLEDEEIGSIPFVWNFLEGHNRVVEKDPTTQPKAVHYTRGGPWFDAWKDCEFADLWLNEMEEYNKENKKEADNAK

SEQ ID NO: 89806 - DNA, 2013 bp, Arabidopsis thaliana
  misc_feature (1)..(2013): Ceres Seq. ID no. 12720611
  misc_feature (1)..(2013): Ortholog of  Ceres SEQ ID NO 15176302 as cited in SEQ ID NO 58592
acgagagagagagaaagtatctaaaattaagctttgtgtttgaaatcgaaatcgaatcgagaagaagagaatctcaatggaagctgatgacgatttctacagcggcaccgaaaactactccgattacgccgactccgacgaagatgacgccgacggcgagtacgagttcgttgacgacgctgctgatgattccgatgaccttatcttccgtcgccgccagcaaaattatagtgtgttaagcgaagcagatatttgtaagcttcaagaagatgatatttcaaggatttctactgttttgtccatttcgaggaattcatctgcgatcctgcttcgtcactacaattggtgtgtgagcagagttcatgatgaatggtttgctgatgaggaaaaggttcgagatgctgttggtttattagagaaacctgttgttgatttcccaactgatggagaacttgattgtggaatttgttttgagactttcctttctgacaaattgcatgctgctgcttgtggtcatccattctgcgactcatgttgggaaggttatatcaccacagcgattaatgatggtccagggtgtcttacattacgatgtccagatccttcttgcagagctgctgttggtcaggatatgatcaatttgctagctcctgataaagataagcaaaagtacactagttattttgtcagatcatacgttgaagacaatagaaagaccaagtggtgtcccgctcctggctgtgactatgctgtaaattttgttgttggaagtggtaattatgatgtgaattgtcgctgctgttacagtttctgctggaattgtgctgaagaagctcaccgtcctgtagattgtgacactgtttctaagtgggtattgaagaatagtgctgagtcggagaatatgaattggattttggcaaattccaagccctgtccaaaatgcaaacggccaatagagaaaaaccagggttgtatgcatattacgtgcaccccaccatgtaaatttgagttctgctggctttgccttggggcgtggacagagcatggtgagaagacaggtggcttttatgcttgtaaccgttatgaagcagcaaagcaagatggcatttatgatgagactgaaaaacgccgagagatggcaaagaactctcttgagagatatacccactactatgagagatgggcaaccaatcaatcgtctaggcaaaaggcgctgctggatcttaagaagatgcaaacagatgatattgagaagctcagtgacatacagtgtcagcctgaatcacaactgaagttcattatagaagcatggttacagatagttgaatgcagacgagttctaaaatggacatatgcctatggtttttacatacctgaccaggagcatggaaaaagagtgttttttgagtacttgcaaggcgaagctgagtcgggccttgaacgacttcatcaatgtgctgaaaaagagctgctaccatacttagatgccaaaggtccaagtgaagattttaatgaattccgcacaaaactggcaggtttaacaagtgttaccaaaaactattttgagaacttggttagagcgctggagaatgggctatcggatgtgaactcgcatgatgcatatgatcgaacttcaagttcaaagagcttaggggggaagactaagggatcgagttctaaagccagcagctccgattcaagccattggccttgtgaatattgcacttacgtaaatccaaggtcgaccaccatttgccaaatgtgtgaacatggccggtgaaatgccagaaactggcattaaagactgtaatagtaatgcttcgtcgcttttggtcataattatgatcaagtgtcgtgtaactttgtatgtttctcgtattagaataaacgggtccaataaattggattagattggccattattattgatttgccaatgaccaaaaagtgaaaacatgagaggtgagttatatataagttcttacaaaataattgtaaaacttctgtaagtttt

SEQ ID NO: 89807 - protein, 567 aa, Arabidopsis thaliana
  peptide (1)..(567): Ceres Seq. ID no. 12720612
MEADDDFYSGTENYSDYADSDEDDADGEYEFVDDAADDSDDLIFRRRQQNYSVLSEADICKLQEDDISRISTVLSISRNSSAILLRHYNWCVSRVHDEWFADEEKVRDAVGLLEKPVVDFPTDGELDCGICFETFLSDKLHAAACGHPFCDSCWEGYITTAINDGPGCLTLRCPDPSCRAAVGQDMINLLAPDKDKQKYTSYFVRSYVEDNRKTKWCPAPGCDYAVNFVVGSGNYDVNCRCCYSFCWNCAEEAHRPVDCDTVSKWVLKNSAESENMNWILANSKPCPKCKRPIEKNQGCMHITCTPPCKFEFCWLCLGAWTEHGEKTGGFYACNRYEAAKQDGIYDETEKRREMAKNSLERYTHYYERWATNQSSRQKALLDLKKMQTDDIEKLSDIQCQPESQLKFIIEAWLQIVECRRVLKWTYAYGFYIPDQEHGKRVFFEYLQGEAESGLERLHQCAEKELLPYLDAKGPSEDFNEFRTKLAGLTSVTKNYFENLVRALENGLSDVNSHDAYDRTSSSKSLGGKTKGSSSKASSSDSSHWPCEYCTYVNPRSTTICQMCEHGR

SEQ ID NO: 89808 - protein, 382 aa, Arabidopsis thaliana
  peptide (1)..(382): Ceres Seq. ID no. 12720613
MINLLAPDKDKQKYTSYFVRSYVEDNRKTKWCPAPGCDYAVNFVVGSGNYDVNCRCCYSFCWNCAEEAHRPVDCDTVSKWVLKNSAESENMNWILANSKPCPKCKRPIEKNQGCMHITCTPPCKFEFCWLCLGAWTEHGEKTGGFYACNRYEAAKQDGIYDETEKRREMAKNSLERYTHYYERWATNQSSRQKALLDLKKMQTDDIEKLSDIQCQPESQLKFIIEAWLQIVECRRVLKWTYAYGFYIPDQEHGKRVFFEYLQGEAESGLERLHQCAEKELLPYLDAKGPSEDFNEFRTKLAGLTSVTKNYFENLVRALENGLSDVNSHDAYDRTSSSKSLGGKTKGSSSKASSSDSSHWPCEYCTYVNPRSTTICQMCEHGR

SEQ ID NO: 89809 - protein, 292 aa, Arabidopsis thaliana
  peptide (1)..(292): Ceres Seq. ID no. 12720614
MNWILANSKPCPKCKRPIEKNQGCMHITCTPPCKFEFCWLCLGAWTEHGEKTGGFYACNRYEAAKQDGIYDETEKRREMAKNSLERYTHYYERWATNQSSRQKALLDLKKMQTDDIEKLSDIQCQPESQLKFIIEAWLQIVECRRVLKWTYAYGFYIPDQEHGKRVFFEYLQGEAESGLERLHQCAEKELLPYLDAKGPSEDFNEFRTKLAGLTSVTKNYFENLVRALENGLSDVNSHDAYDRTSSSKSLGGKTKGSSSKASSSDSSHWPCEYCTYVNPRSTTICQMCEHGR

SEQ ID NO: 89810 - DNA, 2328 bp, Arabidopsis thaliana
  misc_feature (1)..(2328): Ceres Seq. ID no. 12720642
  misc_feature (1)..(2328): Ortholog of  Ceres SEQ ID NO 13657138 as cited in SEQ ID NO 65923
  misc_feature (1)..(2328): Ortholog of  Ceres SEQ ID NO 13584744 as cited in SEQ ID NO 69137
atggaaacccgttgctctctcctctttctctctctcattctcctgtatttgcccaaacccggatccggatttggatcctccggtccgattgcggcgtcgttcggcggctctgctttcttctgcgccattgacgctagtggtcgtcaagatgttatctgctggggaaagaactattcatctccttcttctccctcttcttcttcttcttcgtcgtctattgcttcttccacttccgcaagctacaacattccgtcaatggcggttctttcaggcggagacgggtttctctgcggcattttgtcgaacacttctcaagcattctgttttagttcacttgggtcttcttcaggtatggatcttgtccctctagcttacaggactactgcttactctcagatagctgctggaaacagccatgtctgtgctgttagaggagcttactattccgatcacgattctgggactatcgattgttgggagataactagagctacgaacaacaacagcttaatcgccaaggagaatcctaacttctatgatcagattgttagtaatctcgtcttcaacaatattgtttctggtgatgggtttagctgtggtggaatcagagatggtgggatgctctgttttggtcccaattcttctaatttagggtttaacacaacttctgataacttccaagtcttagccgccggtaaaaactccgtttgtgctattcttaatttatctcgagaggttaaatgttggggagaagatgaatcttttgtcaattctccgatgaatgattctcgattcgtctcgctaaccgcgggtcctcgccatttctgcggaatccgtgaggataatcatgaggttgagtgttggggaaactctaatttctctttgattccaaaaggttctggatttaaagcaatagcttcgtctgatttcattgtttgtggtattagagaagaggatcttgttcttgattgttggatggttaatggttcgtccacattagcttacgatcctccgttagagctctgcagtccagggatgtgtagagctggtccttgtaatgaaaaagagtttgctttcaacgcaagtatactcaatgaacctgacctaacgagtttgtgtgtaaggaaagagttaatggtctgttcaccttgcggctcggattgctctcacggattcttcttgtcaagttcgtgcaccgcgaactctgatcggatatgtacgccttgctcgctctgtcaaaacagttcttgttcggatatatgtaagcttcataacagcaattttccagataagcattggcatcaactacagagacttgttcttatcatcgggtcttgcgcatccgctctattgatcattataattggttgctgtgttgtgccacggattgtcactagtcctaataaagaagacggagcagcgaatcaattcaaatcttgcataggaaagcccgatttagacactgatcagccacttgaaaatgtatcccctgctccatcggtaacgccttttgctcaagtgtttagactctctgagcttaaagacgcgaccaacgggtttaaagagttcaatgagttaggcagaggaagctatgggtttgtctacaaagccgtgttggcggacgggaggcaagtagcggttaagagagcaaacgcagcaaccataatccacacaaacactagagaattcgagacagaattggagattctctgcaacattaggcattgcaacattgtgaatctccttggttactctaccgaaatgggagagaggcttcttgtttacgagtacatgcctcacggtacgcttcacgatcatctgcacagtgggttttcgccattgagttggagcttaaggatcaaaatcgctatgcaaaccgcaaagggtcttgagtatcttcacaatgaagctgagccgagaatcattcatggcgatgtgaagtcttcgaatgtactattggactcggaatgggtggcgagagttgcggatttcgggctcgtgacatcgtcgaacgagaagaatttggacatcaaaagagatgtttatgactttggagttgtgctgttagagattttaaccggtaggaaacgttatgatagggactgtgatccgccggagattgttgaatggacggttccggtgatcagagaaggcaaagcggcggcgattgtggatacgtatattgcgttgccgagaaacgtggagccgttgttgaaacttgctgacgtggcagagttgtgtgtacgggaggatccgaatcaacaaccaactatgtcggaacttgcgaattggttggaacatgtcgcaagagatgcattgatcttctag

SEQ ID NO: 89811 - protein, 775 aa, Arabidopsis thaliana
  peptide (1)..(775): Ceres Seq. ID no. 12720643
METRCSLLFLSLILLYLPKPGSGFGSSGPIAASFGGSAFFCAIDASGRQDVICWGKNYSSPSSPSSSSSSSSIASSTSASYNIPSMAVLSGGDGFLCGILSNTSQAFCFSSLGSSSGMDLVPLAYRTTAYSQIAAGNSHVCAVRGAYYSDHDSGTIDCWEITRATNNNSLIAKENPNFYDQIVSNLVFNNIVSGDGFSCGGIRDGGMLCFGPNSSNLGFNTTSDNFQVLAAGKNSVCAILNLSREVKCWGEDESFVNSPMNDSRFVSLTAGPRHFCGIREDNHEVECWGNSNFSLIPKGSGFKAIASSDFIVCGIREEDLVLDCWMVNGSSTLAYDPPLELCSPGMCRAGPCNEKEFAFNASILNEPDLTSLCVRKELMVCSPCGSDCSHGFFLSSSCTANSDRICTPCSLCQNSSCSDICKLHNSNFPDKHWHQLQRLVLIIGSCASALLIIIIGCCVVPRIVTSPNKEDGAANQFKSCIGKPDLDTDQPLENVSPAPSVTPFAQVFRLSELKDATNGFKEFNELGRGSYGFVYKAVLADGRQVAVKRANAATIIHTNTREFETELEILCNIRHCNIVNLLGYSTEMGERLLVYEYMPHGTLHDHLHSGFSPLSWSLRIKIAMQTAKGLEYLHNEAEPRIIHGDVKSSNVLLDSEWVARVADFGLVTSSNEKNLDIKRDVYDFGVVLLEILTGRKRYDRDCDPPEIVEWTVPVIREGKAAAIVDTYIALPRNVEPLLKLADVAELCVREDPNQQPTMSELANWLEHVARDALIF

SEQ ID NO: 89812 - protein, 690 aa, Arabidopsis thaliana
  peptide (1)..(690): Ceres Seq. ID no. 12720644
MAVLSGGDGFLCGILSNTSQAFCFSSLGSSSGMDLVPLAYRTTAYSQIAAGNSHVCAVRGAYYSDHDSGTIDCWEITRATNNNSLIAKENPNFYDQIVSNLVFNNIVSGDGFSCGGIRDGGMLCFGPNSSNLGFNTTSDNFQVLAAGKNSVCAILNLSREVKCWGEDESFVNSPMNDSRFVSLTAGPRHFCGIREDNHEVECWGNSNFSLIPKGSGFKAIASSDFIVCGIREEDLVLDCWMVNGSSTLAYDPPLELCSPGMCRAGPCNEKEFAFNASILNEPDLTSLCVRKELMVCSPCGSDCSHGFFLSSSCTANSDRICTPCSLCQNSSCSDICKLHNSNFPDKHWHQLQRLVLIIGSCASALLIIIIGCCVVPRIVTSPNKEDGAANQFKSCIGKPDLDTDQPLENVSPAPSVTPFAQVFRLSELKDATNGFKEFNELGRGSYGFVYKAVLADGRQVAVKRANAATIIHTNTREFETELEILCNIRHCNIVNLLGYSTEMGERLLVYEYMPHGTLHDHLHSGFSPLSWSLRIKIAMQTAKGLEYLHNEAEPRIIHGDVKSSNVLLDSEWVARVADFGLVTSSNEKNLDIKRDVYDFGVVLLEILTGRKRYDRDCDPPEIVEWTVPVIREGKAAAIVDTYIALPRNVEPLLKLADVAELCVREDPNQQPTMSELANWLEHVARDALIF

SEQ ID NO: 89813 - protein, 658 aa, Arabidopsis thaliana
  peptide (1)..(658): Ceres Seq. ID no. 12720645
MDLVPLAYRTTAYSQIAAGNSHVCAVRGAYYSDHDSGTIDCWEITRATNNNSLIAKENPNFYDQIVSNLVFNNIVSGDGFSCGGIRDGGMLCFGPNSSNLGFNTTSDNFQVLAAGKNSVCAILNLSREVKCWGEDESFVNSPMNDSRFVSLTAGPRHFCGIREDNHEVECWGNSNFSLIPKGSGFKAIASSDFIVCGIREEDLVLDCWMVNGSSTLAYDPPLELCSPGMCRAGPCNEKEFAFNASILNEPDLTSLCVRKELMVCSPCGSDCSHGFFLSSSCTANSDRICTPCSLCQNSSCSDICKLHNSNFPDKHWHQLQRLVLIIGSCASALLIIIIGCCVVPRIVTSPNKEDGAANQFKSCIGKPDLDTDQPLENVSPAPSVTPFAQVFRLSELKDATNGFKEFNELGRGSYGFVYKAVLADGRQVAVKRANAATIIHTNTREFETELEILCNIRHCNIVNLLGYSTEMGERLLVYEYMPHGTLHDHLHSGFSPLSWSLRIKIAMQTAKGLEYLHNEAEPRIIHGDVKSSNVLLDSEWVARVADFGLVTSSNEKNLDIKRDVYDFGVVLLEILTGRKRYDRDCDPPEIVEWTVPVIREGKAAAIVDTYIALPRNVEPLLKLADVAELCVREDPNQQPTMSELANWLEHVARDALIF

SEQ ID NO: 89814 - DNA, 1911 bp, Arabidopsis thaliana
  misc_feature (1)..(1911): Ceres Seq. ID no. 12720656
  misc_feature (1)..(1911): Ortholog of  Ceres SEQ ID NO 13654989 as cited in SEQ ID NO 63117
  misc_feature (1)..(1911): Ortholog of  Ceres SEQ ID NO 13655640 as cited in SEQ ID NO 63844
  misc_feature (1)..(1911): Ortholog of  Ceres SEQ ID NO 13584744 as cited in SEQ ID NO 69137
aatttaaattctcagttcttcgttctttcgctgactttagctatctctctctgtaaagacttcgttttttttttgttgccgtgtgacgacttcttcttcctcttcttcttcgacctctttctctcggaagcttagcttcttaaaatccatttctctcggaagcttagcttctcaaatcctcgatctcttttgtatcgtgattcattaaccacttcatgataattataatcttccttctcttctgacgattgaattacatcttcttctgatagctgttctgatttttttctgtatacaaagtaaattcaaagtgttttattggtgtcctgcagtggacaaacatcggtattttaatctcctctcgataatgaagtgtttcttgttctctggtggggataagagaggggaacagaagacccctatttcggtttcattgacctctatcttctctgaccgcgaaataaaccgaagcgggtcagagttcaactctcgtgatgtctctgggacgagcacagaatcatccatggggaggaagaactcgtaccctccggtgtctactagagcaagtaatctcagagagttcagcattactgatctcaagtctgcaacaaagaactttagccgatctgttatgattggagaaggcggtttcggttgtgtcttcaggggcacagtgaggaacttagaggactcgtcagttaaaatcgaagtcgcagtgaagcagctcggtaaaagagggttgcaggggcataaggaatgggttacggaagtgaacttcctcggaatagttgagcatacaaacttggtgaaattgcttggctattgtgcagaagatgatgaacgtggaatccaacggcttttggtttatgaatacatgcctaaccgaagtgttgaattccacttatcccctcggtcactcacagttcttacttgggacctcagactgagaatcgcccaagatgcagctcgcggattaacatacctgcatgaagaaatggagtttcagataatattccgcgatttcaagtcctcgaacattcttttggatgaggactggaaagcaaagctctcagatttcggtttggctcgtttaggtccatctgaaggattaacccatgtttctactgatgttgtaggtacaatgggttatgcagcacctgaatacattcaaaccggccgtctcacatcgaaaagcgatgtgtggggttatggagtcttcctctatgagcttatcactgggaggcgaccggtggacagaaacagacccaagggagagcagaagcttctagaatgggtgagaccttatttatctgacacaaggaagttcaagctcatattagatccaaggctggaagggaagtacccgatcaaatcggttcaaaagctagcagttgtggccaacagatgtttggttaggaactcaaaggcacgtcccaagatgagtgaggttttagagatggtgaacaaaattgtggaagcttcttcaggaaatggcagcccacagctagttccgctgaacagtgtaaaagcttcgagagacgcgagaggaaagaacaatggtggtggcggtgaaggaggttggtttggcaagttatggaatccaaagacaataagagcttgttgactgcttatagaattcaacctcttcttacagcaaaaaaaagagtcaagaaaggtttcatggagattccgaaggttgaagattctagcgagatcaagatgaagctcatatacatacataaagataattatatatgaagatttgtgaaagattctaaaatgatgaaatatgatttttgtatgaacttatgaatagtaaccacagctaaattagtaagatatgtatattaagcaagaacggcttatcagagttttgttccaaagctgatcaatctactcgtgcttaagtgt

SEQ ID NO: 89815 - protein, 418 aa, Arabidopsis thaliana
  peptide (1)..(418): Ceres Seq. ID no. 12720657
MKCFLFSGGDKRGEQKTPISVSLTSIFSDREINRSGSEFNSRDVSGTSTESSMGRKNSYPPVSTRASNLREFSITDLKSATKNFSRSVMIGEGGFGCVFRGTVRNLEDSSVKIEVAVKQLGKRGLQGHKEWVTEVNFLGIVEHTNLVKLLGYCAEDDERGIQRLLVYEYMPNRSVEFHLSPRSLTVLTWDLRLRIAQDAARGLTYLHEEMEFQIIFRDFKSSNILLDEDWKAKLSDFGLARLGPSEGLTHVSTDVVGTMGYAAPEYIQTGRLTSKSDVWGYGVFLYELITGRRPVDRNRPKGEQKLLEWVRPYLSDTRKFKLILDPRLEGKYPIKSVQKLAVVANRCLVRNSKARPKMSEVLEMVNKIVEASSGNGSPQLVPLNSVKASRDARGKNNGGGGEGGWFGKLWNPKTIRAC

SEQ ID NO: 89816 - protein, 366 aa, Arabidopsis thaliana
  peptide (1)..(366): Ceres Seq. ID no. 12720658
MGRKNSYPPVSTRASNLREFSITDLKSATKNFSRSVMIGEGGFGCVFRGTVRNLEDSSVKIEVAVKQLGKRGLQGHKEWVTEVNFLGIVEHTNLVKLLGYCAEDDERGIQRLLVYEYMPNRSVEFHLSPRSLTVLTWDLRLRIAQDAARGLTYLHEEMEFQIIFRDFKSSNILLDEDWKAKLSDFGLARLGPSEGLTHVSTDVVGTMGYAAPEYIQTGRLTSKSDVWGYGVFLYELITGRRPVDRNRPKGEQKLLEWVRPYLSDTRKFKLILDPRLEGKYPIKSVQKLAVVANRCLVRNSKARPKMSEVLEMVNKIVEASSGNGSPQLVPLNSVKASRDARGKNNGGGGEGGWFGKLWNPKTIRAC

SEQ ID NO: 89817 - protein, 330 aa, Arabidopsis thaliana
  peptide (1)..(330): Ceres Seq. ID no. 12720659
MIGEGGFGCVFRGTVRNLEDSSVKIEVAVKQLGKRGLQGHKEWVTEVNFLGIVEHTNLVKLLGYCAEDDERGIQRLLVYEYMPNRSVEFHLSPRSLTVLTWDLRLRIAQDAARGLTYLHEEMEFQIIFRDFKSSNILLDEDWKAKLSDFGLARLGPSEGLTHVSTDVVGTMGYAAPEYIQTGRLTSKSDVWGYGVFLYELITGRRPVDRNRPKGEQKLLEWVRPYLSDTRKFKLILDPRLEGKYPIKSVQKLAVVANRCLVRNSKARPKMSEVLEMVNKIVEASSGNGSPQLVPLNSVKASRDARGKNNGGGGEGGWFGKLWNPKTIRAC

SEQ ID NO: 89818 - DNA, 618 bp, Arabidopsis thaliana
  misc_feature (1)..(618): Ceres Seq. ID no. 12720660
  misc_feature (1)..(618): Ortholog of  Ceres SEQ ID NO 12619999 as cited in SEQ ID NO 66123
  misc_feature (1)..(618): Ortholog of  Ceres SEQ ID NO 13656436 as cited in SEQ ID NO 69154
atgggatcttcttctgggcaaagtgggtatgatctatctttcaagatcttgttgattggagattctggtgttggtaaaagcagcttgcttctcagcttcatttccagctctgtcgaagatcttgctcccaccattggtgttgactttaagatcaaacagatgaaagtaagagggaaaaggctgaaacttacaatctgggacacagctggacaagaaaagttcagaacattgacaagttcttatttcagaggctcccaaggaatcattctcgtttatgatgtcacgaaaagagagacatttttgaacttggcagatatttgggctaaagagattgagctatattcgactaaccatgactgcattaagatgctcgttggcaacaaagttgatagagaatcagaaaggaaggttagccgggaagaaggaatggctctagcgaaagacctcaattgtttgtttcatgaatgtagcgcaagaacccgagaaaacgtgaacggatgcttcgaagagctagctttgaagataatggaggtacctagtcttttggaagaaggatcaagctctgtgaagagaaaaccggattaccgagctcatcaaggccggtgttgcagctcgtga

SEQ ID NO: 89819 - protein, 205 aa, Arabidopsis thaliana
  peptide (1)..(205): Ceres Seq. ID no. 12720661
MGSSSGQSGYDLSFKILLIGDSGVGKSSLLLSFISSSVEDLAPTIGVDFKIKQMKVRGKRLKLTIWDTAGQEKFRTLTSSYFRGSQGIILVYDVTKRETFLNLADIWAKEIELYSTNHDCIKMLVGNKVDRESERKVSREEGMALAKDLNCLFHECSARTRENVNGCFEELALKIMEVPSLLEEGSSSVKRKPDYRAHQGRCCSS

SEQ ID NO: 89820 - protein, 152 aa, Arabidopsis thaliana
  peptide (1)..(152): Ceres Seq. ID no. 12720662
MKVRGKRLKLTIWDTAGQEKFRTLTSSYFRGSQGIILVYDVTKRETFLNLADIWAKEIELYSTNHDCIKMLVGNKVDRESERKVSREEGMALAKDLNCLFHECSARTRENVNGCFEELALKIMEVPSLLEEGSSSVKRKPDYRAHQGRCCSS

SEQ ID NO: 89821 - DNA, 1657 bp, Arabidopsis thaliana
  misc_feature (1)..(1657): Ceres Seq. ID no. 12720690
  misc_feature (1)..(1657): Ortholog of  Ceres SEQ ID NO 13599990 as cited in SEQ ID NO 0
tcaccaaaaaacatcttcaacacaaactaaacaaaacttaaaagtaagaactcgaagatactgtacttacaaattcctgtcggaattctcttacttcgtcggaaattcgaaatctgggtttgtgggattccgtgttgatttatctaccattgtttccaagtttcaattttttatccaatttagggttcagtgtttgatggaatcgaatgtgatgttctctgggtttagtccaagaatgttgagcttagaaatgccgcaaaatccaccaaatccccaaaattcaattcagttccagcatcctcatccttacaccacctccggcgaccaacaaactcagccgccgataaaatccttatacccatacgcctcaaaacccaaacaaatgtcacccattagcggtggcggttgcgacgacgaggatcgcgggtcgggttccggatccggttgcaaccctgaagacagcgcgggaactgacgggaagaggaaattgtcacaatggcatagaatgaaatggacggatacaatggttaggcttttgatcatggcggttttctacatcggtgacgaagctggtttaaacgatccagtcgacgccaagaaaaagaccggcggtggcggtggcggcggaggaggaggagggatgttgcagaagaaagggaagtggaaatcagtgtcgagagctatggtggagaaaggtttctctgtgtcaccacaacaatgtgaagacaagttcaatgatttgaacaagaggtacaagagagttaacgatattcttggtaaaggaatcgcttgtcgtgtcgttgagaatcaaggattgttagagagtatggatcatttgactccgaagttgaaagatgaagtcaagaagttgcttaattctaagcatcttttctttagagagatgtgtgcttatcataatagttgtggtcatcttggtggtcatgaccaacaaccaccgcaacagaatcctatttcgattccgattccgagtcagcagcagaactgttttcacgcggcggaagcagggaaaatggcgagaattgcggagagggtggaggtggaggaggaagtagagtctgatatggcggaggattcggagtcagagatggaggaatcagaggaagaagagacgaggaagaagcggaggatatcgacggcggtgaagaggttgagggaagaagcggcaagtgtagtggaagatgttgggaagagtgtgtgggagaagaaagagtggataaggagaaagatgttggagattgaggagaagaagattgggtatgagtgggaaggagtggagatggagaagcagagagtgaagtggatgagatataggagcaagaaagagagagagatggagaaggctaagcttgacaatcagagacggaggcttgagacggagaggatgattctcatgttacggcggagtgaaattgagttgaatgagttacagtcttcgggtacacgggttgacccgagttccgctaaggggtgatgctgattagtatttaggattagagattttttacaactttgtagtttctaatgttaggattctcacgttttagtgacattaggcagtaaattaaatcttaaaagtatgtactattgtagacaaaaggtctttaatcagcaaattgattaagcatgtctacttttg

SEQ ID NO: 89822 - protein, 496 aa, Arabidopsis thaliana
  peptide (1)..(496): Ceres Seq. ID no. 12720691
HQKTSSTQTKQNLKVRTRRYCTYKFLSEFSYFVGNSKSGFVGFRVDLSTIVSKFQFFIQFRVQCLMESNVMFSGFSPRMLSLEMPQNPPNPQNSIQFQHPHPYTTSGDQQTQPPIKSLYPYASKPKQMSPISGGGCDDEDRGSGSGSGCNPEDSAGTDGKRKLSQWHRMKWTDTMVRLLIMAVFYIGDEAGLNDPVDAKKKTGGGGGGGGGGGMLQKKGKWKSVSRAMVEKGFSVSPQQCEDKFNDLNKRYKRVNDILGKGIACRVVENQGLLESMDHLTPKLKDEVKKLLNSKHLFFREMCAYHNSCGHLGGHDQQPPQQNPISIPIPSQQQNCFHAAEAGKMARIAERVEVEEEVESDMAEDSESEMEESEEEETRKKRRISTAVKRLREEAASVVEDVGKSVWEKKEWIRRKMLEIEEKKIGYEWEGVEMEKQRVKWMRYRSKKEREMEKAKLDNQRRRLETERMILMLRRSEIELNELQSSGTRVDPSSAKG

SEQ ID NO: 89823 - protein, 431 aa, Arabidopsis thaliana
  peptide (1)..(431): Ceres Seq. ID no. 12720692
MESNVMFSGFSPRMLSLEMPQNPPNPQNSIQFQHPHPYTTSGDQQTQPPIKSLYPYASKPKQMSPISGGGCDDEDRGSGSGSGCNPEDSAGTDGKRKLSQWHRMKWTDTMVRLLIMAVFYIGDEAGLNDPVDAKKKTGGGGGGGGGGGMLQKKGKWKSVSRAMVEKGFSVSPQQCEDKFNDLNKRYKRVNDILGKGIACRVVENQGLLESMDHLTPKLKDEVKKLLNSKHLFFREMCAYHNSCGHLGGHDQQPPQQNPISIPIPSQQQNCFHAAEAGKMARIAERVEVEEEVESDMAEDSESEMEESEEEETRKKRRISTAVKRLREEAASVVEDVGKSVWEKKEWIRRKMLEIEEKKIGYEWEGVEMEKQRVKWMRYRSKKEREMEKAKLDNQRRRLETERMILMLRRSEIELNELQSSGTRVDPSSAKG

SEQ ID NO: 89824 - protein, 426 aa, Arabidopsis thaliana
  peptide (1)..(426): Ceres Seq. ID no. 12720693
MFSGFSPRMLSLEMPQNPPNPQNSIQFQHPHPYTTSGDQQTQPPIKSLYPYASKPKQMSPISGGGCDDEDRGSGSGSGCNPEDSAGTDGKRKLSQWHRMKWTDTMVRLLIMAVFYIGDEAGLNDPVDAKKKTGGGGGGGGGGGMLQKKGKWKSVSRAMVEKGFSVSPQQCEDKFNDLNKRYKRVNDILGKGIACRVVENQGLLESMDHLTPKLKDEVKKLLNSKHLFFREMCAYHNSCGHLGGHDQQPPQQNPISIPIPSQQQNCFHAAEAGKMARIAERVEVEEEVESDMAEDSESEMEESEEEETRKKRRISTAVKRLREEAASVVEDVGKSVWEKKEWIRRKMLEIEEKKIGYEWEGVEMEKQRVKWMRYRSKKEREMEKAKLDNQRRRLETERMILMLRRSEIELNELQSSGTRVDPSSAKG

SEQ ID NO: 89825 - DNA, 4047 bp, Arabidopsis thaliana
  misc_feature (1)..(4047): Ceres Seq. ID no. 12720713
  misc_feature (1)..(4047): Ortholog of  Ceres SEQ ID NO 13600310 as cited in SEQ ID NO 5086
atggagagaatccatgtctcagtcagagcgcgaccgctttcgtcggaggacgcgaagacaagtccctggaagatctcttccgactcaattttcatgcccaatcactcttctctcgcttttgaatttgatcgaatttttagagaagattgtaaaactgtccaagtgtatgaggcgcggacgaaggagattgtttctgccgctgttcgtggattcaacggaaccgtatttgcttacgggcaaactaacagtggcaagacgcatacaatgcgaggctcacctattgaacctggagttattcctctcgctgtacatgatttgtttgacactatatatcaggatgcaagtagagagtttctgttgcgtatgtcgtacctggagatttataatgaagatattaacgatttgctggcccctgagcacagaaaactacagattcatgaaaatctagagaaaggaatatttgttgctggattacgagaagagattgtcgcttcccctcaacaagtccttgaaatgatggaatttggagaatctcatcggcatattggggagacaaatatgaatctttacagtagcagatctcacactatttttcgcatgattatagaaagtagacagaagatgcaagatgaaggtgttggaaattcctgtgatgcagttcgtgtttctgttctgaatttggtggatctagctggttcagaacgggctgcaaaaaccggtgcagagggtgttaggttgaaggagggctcacatataaacaaaagcttgatgacactcgggactgtcataaaaaaactgagtgaaggagtagaaactcaaggtggtcatgtcccgtaccgagacagcaagcttacaaggatcttgcagcctgccttaggtgggaatgccaacacagctattatatgcaatatcacacttgcaccgattcatgcagatgaaaccaagagcagtcttcagttcgctagccgagcactgcgtgtcactaactgtgcccatgtcaatgagattttgactgatgctgctctattaaagcgccagaagaaggagatagaggagctcagatccaaactaaagacttctcactctgaccattcagaagaagagattcttaacttgcgtaacaccttgttgaagtctgaattagagagagagcgaatagcacttgagttagaagaggagaagaaggcacaagctcagagggaaagagttttgcaggagcaagccaaaaaaatcaagaacttgagttcaatggttcttctttcgaatagagatgagaagcgtgagcaggatcactttaagaagggaaaaaggagggatacatggtgtattggtaagctttcacgagactccacatcagaggatcagtctaatgttttgtcaaggggatcctctcttgaatctgcaagatccgagcgtgagactggtccactacttccattttcagaactagtaaatgaacctttatataacattaacgaggaagatgaagatagtatcgagggaacccttgaagattctgtacttccagatccatgtgcattagtgaatgtgacaagcagaaagaaaccatcaattaagcagaaaaatcctgtagtggttgaaaacgaattagatagaattcaaagggaatatgaggctcttctcttgcaatatgaaaccgaggtgaaattgggtgaagatggtttatctggtgatgcaaaatgcaagcaatcagaagtcgttggcaacgtgcattgcgaagaacatgttgtaaacttaagagatccagaagctattcttctcatcaagcaactacaagagaagataaacatgctagaattggagaagtcttcaagcaaccgaaatcttgatgatcttgttatggtagctactgagcagaatatatgtgccagggaaaaatttgctgagattcaagaagagattcatgctgctagagaagaggcccaggttgctcgtgaacaacttgtgtctaaggagtctgaagttattgatgtgattaatgagaatttcaactcactggtcaacgtagcaaccgaaattgaagtcttagagtctgaatttcaaaaatataaagcatcagtagaaaccatatcatcagttatgaatgagggtctccaagattttgctttcttctctccgttgatacatgatttcacattgtttgtgcgccaaagttctgagcaacatgattcacttatcaacagctaccaaactgtccaatctagtctaaaaaaaaaagttcttgatgttgagaatgagaagcttcttttgcaagagcagtgtgctggtctgcagagccaaatagaagaactaaatcaggaagcccaaaagcatgaaacttccttaaagatgctctcagaacaccatgagtcggagaggtcagatctactctctcacatagaatgtcttgaaaaggatatagggagtctgtcatcctcttccttggccaaagagaaggagaacctaagaaaagattttgagaagacgaaaacaaagctaaaagacactgaatccaagctaaagaattccatgcaagataaaaccaagctagaggccgagaaagcatctgctgaaagagagttaaaacgcttgcatagccagaaggccctactcgagagagacatcagcaaacaggagtcctttgctggtaaaagacgcgactctcttcttgttgagagaagtgctaaccagtcgttgcaggaagaatttaaacagcttgaagtgcttgcttttgaaatggaaaccacaattgcttcactggaggaagagctggccgctgaacgtggagaaaaagaggaggcactctgtagaaatgacggtttaggctcagaaattacagatctgacagagaaactggagcactcaaatactaaactagaacatcttcaaaacgatgtcacggagcttaaaacgagacttgaagtctcatcttctgatcagcagcaactggaaaccaatgttaaacagttgcttgaagaaaaggaagagctagcaatgcatctggcgaactcacttttggaaatggaggaggagaaagcaatatggagctcgaaagaaaaagctttgacagaggctgtggaggaaaagatcagactatataaaaatatacaaattgagtcactatccaaagaaatgtcagaggaaaagaaggagctggaatcttgtcgacttgaatgcgttactcttgctgataggcttagatgttctgaggagaatgctaagcaggacaaagaaagcagcctggagaagtctttggagattgatagactgggtgatgaacttcgatcagctgatgctgtgagtaagcaatctcaagaggttctcaagtctgatatcgacatactaaagtccgaagttcaacatgcttgcaagatgtcggatacatttcagagagagatggattatgtcacaagtgagcgccagggtttgctagctcgcatagaggagttgagtaaggagcttgcttcatcaaatcgttggcaggatgcagctgcagaaaacaaggagaaggcaaagctaaaaatgagactcaggggtatgcaagcacgcttagatgcaatcagtctacggtacaagcagtctgtgcaagaatcagaacttatgaacaggaagttcaaagaggcatctgctaagctaaaggagaagttagcatcaaaagcactcgaagttctcgacctcaagaagcaactctctgcttcttcaagaacaattgatgaaccgagaaactcacttgagagttattgtgatgcggcagttgtggttgcgactgtggtggttgtggttgtcgagcaggagattccaaatcttaggtactcaagcaattcaatagaagttgtggagaaagctgccattaatatgggttcaaaggaagacaaggcagataatccagctttatcttcatatgatgatgccatggaagctctgtcgactcttatttctcgtcgaaaccgtggggatcgcacacctactaaaggaaatcgtgacaagcttgaacaagtcgtcacatatctcaaggtgatacagccatttacagtcaaacgctattaa

SEQ ID NO: 89826 - protein, 1348 aa, Arabidopsis thaliana
  peptide (1)..(1348): Ceres Seq. ID no. 12720714
MERIHVSVRARPLSSEDAKTSPWKISSDSIFMPNHSSLAFEFDRIFREDCKTVQVYEARTKEIVSAAVRGFNGTVFAYGQTNSGKTHTMRGSPIEPGVIPLAVHDLFDTIYQDASREFLLRMSYLEIYNEDINDLLAPEHRKLQIHENLEKGIFVAGLREEIVASPQQVLEMMEFGESHRHIGETNMNLYSSRSHTIFRMIIESRQKMQDEGVGNSCDAVRVSVLNLVDLAGSERAAKTGAEGVRLKEGSHINKSLMTLGTVIKKLSEGVETQGGHVPYRDSKLTRILQPALGGNANTAIICNITLAPIHADETKSSLQFASRALRVTNCAHVNEILTDAALLKRQKKEIEELRSKLKTSHSDHSEEEILNLRNTLLKSELERERIALELEEEKKAQAQRERVLQEQAKKIKNLSSMVLLSNRDEKREQDHFKKGKRRDTWCIGKLSRDSTSEDQSNVLSRGSSLESARSERETGPLLPFSELVNEPLYNINEEDEDSIEGTLEDSVLPDPCALVNVTSRKKPSIKQKNPVVVENELDRIQREYEALLLQYETEVKLGEDGLSGDAKCKQSEVVGNVHCEEHVVNLRDPEAILLIKQLQEKINMLELEKSSSNRNLDDLVMVATEQNICAREKFAEIQEEIHAAREEAQVAREQLVSKESEVIDVINENFNSLVNVATEIEVLESEFQKYKASVETISSVMNEGLQDFAFFSPLIHDFTLFVRQSSEQHDSLINSYQTVQSSLKKKVLDVENEKLLLQEQCAGLQSQIEELNQEAQKHETSLKMLSEHHESERSDLLSHIECLEKDIGSLSSSSLAKEKENLRKDFEKTKTKLKDTESKLKNSMQDKTKLEAEKASAERELKRLHSQKALLERDISKQESFAGKRRDSLLVERSANQSLQEEFKQLEVLAFEMETTIASLEEELAAERGEKEEALCRNDGLGSEITDLTEKLEHSNTKLEHLQNDVTELKTRLEVSSSDQQQLETNVKQLLEEKEELAMHLANSLLEMEEEKAIWSSKEKALTEAVEEKIRLYKNIQIESLSKEMSEEKKELESCRLECVTLADRLRCSEENAKQDKESSLEKSLEIDRLGDELRSADAVSKQSQEVLKSDIDILKSEVQHACKMSDTFQREMDYVTSERQGLLARIEELSKELASSNRWQDAAAENKEKAKLKMRLRGMQARLDAISLRYKQSVQESELMNRKFKEASAKLKEKLASKALEVLDLKKQLSASSRTIDEPRNSLESYCDAAVVVATVVVVVVEQEIPNLRYSSNSIEVVEKAAINMGSKEDKADNPALSSYDDAMEALSTLISRRNRGDRTPTKGNRDKLEQVVTYLKVIQPFTVKRY

SEQ ID NO: 89827 - protein, 1317 aa, Arabidopsis thaliana
  peptide (1)..(1317): Ceres Seq. ID no. 12720715
MPNHSSLAFEFDRIFREDCKTVQVYEARTKEIVSAAVRGFNGTVFAYGQTNSGKTHTMRGSPIEPGVIPLAVHDLFDTIYQDASREFLLRMSYLEIYNEDINDLLAPEHRKLQIHENLEKGIFVAGLREEIVASPQQVLEMMEFGESHRHIGETNMNLYSSRSHTIFRMIIESRQKMQDEGVGNSCDAVRVSVLNLVDLAGSERAAKTGAEGVRLKEGSHINKSLMTLGTVIKKLSEGVETQGGHVPYRDSKLTRILQPALGGNANTAIICNITLAPIHADETKSSLQFASRALRVTNCAHVNEILTDAALLKRQKKEIEELRSKLKTSHSDHSEEEILNLRNTLLKSELERERIALELEEEKKAQAQRERVLQEQAKKIKNLSSMVLLSNRDEKREQDHFKKGKRRDTWCIGKLSRDSTSEDQSNVLSRGSSLESARSERETGPLLPFSELVNEPLYNINEEDEDSIEGTLEDSVLPDPCALVNVTSRKKPSIKQKNPVVVENELDRIQREYEALLLQYETEVKLGEDGLSGDAKCKQSEVVGNVHCEEHVVNLRDPEAILLIKQLQEKINMLELEKSSSNRNLDDLVMVATEQNICAREKFAEIQEEIHAAREEAQVAREQLVSKESEVIDVINENFNSLVNVATEIEVLESEFQKYKASVETISSVMNEGLQDFAFFSPLIHDFTLFVRQSSEQHDSLINSYQTVQSSLKKKVLDVENEKLLLQEQCAGLQSQIEELNQEAQKHETSLKMLSEHHESERSDLLSHIECLEKDIGSLSSSSLAKEKENLRKDFEKTKTKLKDTESKLKNSMQDKTKLEAEKASAERELKRLHSQKALLERDISKQESFAGKRRDSLLVERSANQSLQEEFKQLEVLAFEMETTIASLEEELAAERGEKEEALCRNDGLGSEITDLTEKLEHSNTKLEHLQNDVTELKTRLEVSSSDQQQLETNVKQLLEEKEELAMHLANSLLEMEEEKAIWSSKEKALTEAVEEKIRLYKNIQIESLSKEMSEEKKELESCRLECVTLADRLRCSEENAKQDKESSLEKSLEIDRLGDELRSADAVSKQSQEVLKSDIDILKSEVQHACKMSDTFQREMDYVTSERQGLLARIEELSKELASSNRWQDAAAENKEKAKLKMRLRGMQARLDAISLRYKQSVQESELMNRKFKEASAKLKEKLASKALEVLDLKKQLSASSRTIDEPRNSLESYCDAAVVVATVVVVVVEQEIPNLRYSSNSIEVVEKAAINMGSKEDKADNPALSSYDDAMEALSTLISRRNRGDRTPTKGNRDKLEQVVTYLKVIQPFTVKRY

SEQ ID NO: 89828 - protein, 1260 aa, Arabidopsis thaliana
  peptide (1)..(1260): Ceres Seq. ID no. 12720716
MRGSPIEPGVIPLAVHDLFDTIYQDASREFLLRMSYLEIYNEDINDLLAPEHRKLQIHENLEKGIFVAGLREEIVASPQQVLEMMEFGESHRHIGETNMNLYSSRSHTIFRMIIESRQKMQDEGVGNSCDAVRVSVLNLVDLAGSERAAKTGAEGVRLKEGSHINKSLMTLGTVIKKLSEGVETQGGHVPYRDSKLTRILQPALGGNANTAIICNITLAPIHADETKSSLQFASRALRVTNCAHVNEILTDAALLKRQKKEIEELRSKLKTSHSDHSEEEILNLRNTLLKSELERERIALELEEEKKAQAQRERVLQEQAKKIKNLSSMVLLSNRDEKREQDHFKKGKRRDTWCIGKLSRDSTSEDQSNVLSRGSSLESARSERETGPLLPFSELVNEPLYNINEEDEDSIEGTLEDSVLPDPCALVNVTSRKKPSIKQKNPVVVENELDRIQREYEALLLQYETEVKLGEDGLSGDAKCKQSEVVGNVHCEEHVVNLRDPEAILLIKQLQEKINMLELEKSSSNRNLDDLVMVATEQNICAREKFAEIQEEIHAAREEAQVAREQLVSKESEVIDVINENFNSLVNVATEIEVLESEFQKYKASVETISSVMNEGLQDFAFFSPLIHDFTLFVRQSSEQHDSLINSYQTVQSSLKKKVLDVENEKLLLQEQCAGLQSQIEELNQEAQKHETSLKMLSEHHESERSDLLSHIECLEKDIGSLSSSSLAKEKENLRKDFEKTKTKLKDTESKLKNSMQDKTKLEAEKASAERELKRLHSQKALLERDISKQESFAGKRRDSLLVERSANQSLQEEFKQLEVLAFEMETTIASLEEELAAERGEKEEALCRNDGLGSEITDLTEKLEHSNTKLEHLQNDVTELKTRLEVSSSDQQQLETNVKQLLEEKEELAMHLANSLLEMEEEKAIWSSKEKALTEAVEEKIRLYKNIQIESLSKEMSEEKKELESCRLECVTLADRLRCSEENAKQDKESSLEKSLEIDRLGDELRSADAVSKQSQEVLKSDIDILKSEVQHACKMSDTFQREMDYVTSERQGLLARIEELSKELASSNRWQDAAAENKEKAKLKMRLRGMQARLDAISLRYKQSVQESELMNRKFKEASAKLKEKLASKALEVLDLKKQLSASSRTIDEPRNSLESYCDAAVVVATVVVVVVEQEIPNLRYSSNSIEVVEKAAINMGSKEDKADNPALSSYDDAMEALSTLISRRNRGDRTPTKGNRDKLEQVVTYLKVIQPFTVKRY

SEQ ID NO: 89829 - DNA, 1748 bp, Arabidopsis thaliana
  misc_feature (1)..(1748): Ceres Seq. ID no. 12720754
  misc_feature (1)..(1748): Ortholog of  Ceres SEQ ID NO 13582619 as cited in SEQ ID NO 56520
  misc_feature (1)..(1748): Ortholog of  Ceres SEQ ID NO 12611392 as cited in SEQ ID NO 56826
  misc_feature (1)..(1748): Ortholog of  Ceres SEQ ID NO 13660872 as cited in SEQ ID NO 60830
  misc_feature (1)..(1748): Ortholog of  Ceres SEQ ID NO 12616221 as cited in SEQ ID NO 63291
gggaacgcgaaaagaaagacaaaattttcttgcaattgaaggtgaggtttggtgaaagggaaattgagaaaaccctagaacaagtacggtctctattttgctttaatgggtcgcgaatctgtggctgttgtgactgcgccgccctcggcgactgctccgggtactgcttcggtggcgacctcgcttgctcctggcttccgatttcatccgactgatgaggaactcgtgagctattacttgaagaggaaggttctgggccaacctgtacgcttcgatgcgattggagaggtcgatatatacaagcatgagccctgggatttagcagtgttttcgagattgaagacaagggaccaagaatggtacttctacagtgcattagataagaagtatggaaacggtgctaggatgaaccgagcaactaacagagggtactggaaagctactggaaaagacagagaaatccgccgtgacattctgcttctcggtatgaaaaagacacttgttttccacagtgggcgtgcaccagacgggcttcggactaattgggttatgcatgagtatcgccttgtggaatatgaaaccgagaaaaacggaaacctggtgcaagatgcatatgtgttgtgtagagtcttccacaagaataacattgggccaccaagtgggaacagatatgctccgttcatggaagaggaatgggctgatgatgaaggagctctgattccaggaatagacgttaagctcaggctagagccgccgccagtagccaatggaaacgaccagatggaccagataatttatgcgtcgtctggggttcacttgtaatttgttgtaggaaatccagtcagccagcaagagtctcatcaacatcaatgagccaccgagagagacagctccactggatatcgaatcggaccaacagaatcatcatgagaatgacctcaagccggaggagcataacaacaataataattatgatgaaaacgaggaaacactcaaacgcgagcagatggaagaagaggagcgtcctcctcgacctgtatgcgttctcaacaaagaagctccattacctcttctgcaatacaaacgtagacgccaaagcgagtccaacaacaactcaagcaggaacacacaggaccattgttcgtccacaacaacaactgtcgacaatacaaccactttaatctcatcatctgccgctgccaccaacactgccatctctgcattgcttgagttctcactcatgggtatctccgacaagaaagaaaagccgcagcaaccgctacgtcctcacaaggaacctttgcctcctcaaactccacttgcatctcctgaagagaaggttaatgatctccagaaggagattcaccagatgtctgttgaaagagaaactttcaagcttgaaatgatgagtgcagaagctatgatcagtattctccagtcaaggatcgatgcgctgcgtcaggagaacgaggaactcaagaagaacaatgctaatggacaataaaggctctaaaaacatctctccaggttacttcttattgcccttcgccttttatttagctttaatctccctaatactatgacccatctacatagctcctctagacagattgcgaactgtgtgaatctctgttgtaacataggataaaacggattcgagcccctgagctgagtgttttatccttcttctttttttgtgtggatgttcttgcatcttttgagaacattttttaggttgctccattgtc

SEQ ID NO: 89830 - protein, 238 aa, Arabidopsis thaliana
  peptide (1)..(238): Ceres Seq. ID no. 12720755
MGRESVAVVTAPPSATAPGTASVATSLAPGFRFHPTDEELVSYYLKRKVLGQPVRFDAIGEVDIYKHEPWDLAVFSRLKTRDQEWYFYSALDKKYGNGARMNRATNRGYWKATGKDREIRRDILLLGMKKTLVFHSGRAPDGLRTNWVMHEYRLVEYETEKNGNLVQDAYVLCRVFHKNNIGPPSGNRYAPFMEEEWADDEGALIPGIDVKLRLEPPPVANGNDQMDQIIYASSGVHL

SEQ ID NO: 89831 - protein, 165 aa, Arabidopsis thaliana
  peptide (1)..(165): Ceres Seq. ID no. 12720756
MEEEERPPRPVCVLNKEAPLPLLQYKRRRQSESNNNSSRNTQDHCSSTTTTVDNTTTLISSSAAATNTAISALLEFSLMGISDKKEKPQQPLRPHKEPLPPQTPLASPEEKVNDLQKEIHQMSVERETFKLEMMSAEAMISILQSRIDALRQENEELKKNNANGQ

SEQ ID NO: 89832 - protein, 138 aa, Arabidopsis thaliana
  peptide (1)..(138): Ceres Seq. ID no. 12720757
MNRATNRGYWKATGKDREIRRDILLLGMKKTLVFHSGRAPDGLRTNWVMHEYRLVEYETEKNGNLVQDAYVLCRVFHKNNIGPPSGNRYAPFMEEEWADDEGALIPGIDVKLRLEPPPVANGNDQMDQIIYASSGVHL

SEQ ID NO: 89833 - DNA, 2138 bp, Arabidopsis thaliana
  misc_feature (1)..(2138): Ceres Seq. ID no. 12720778
  misc_feature (1)..(2138): Ortholog of  Ceres SEQ ID NO 13659971 as cited in SEQ ID NO 67565
  misc_feature (1)..(2138): Ortholog of  Ceres SEQ ID NO 13500385 as cited in SEQ ID NO 67583
atgggtaatgcttgcgttggaccaaacatttctggaaatggtttcttgcaaactgttacggctgcaatgtggaggccacggatcggagctgagcaagcttcttcttcttcccatggtaatggacaagtttctaaagaagcagcttcagaaccagctactgatcaagtccagaataaaccccctgagcctatcacaatgccaagctcaaagaccaatcccgaaactaaactgaaacccgatctagagatccaacctgaagaaaagaaggagaaagttcttgcagaagaaaccaagcagaaagttgttcctgaagaaagtaagcaggaagttcctcctgaagaaagtaagcgggaagttgttgtgcagccggagtcagcaaaaccagaaacaaagtctgaatccaagccagagacaacaaaaccagaaacaacgtctgaaaccaagccagagacgaaagctgaacctcagaagcctaaacatatgaggagagtgtccagtgcagggcttagaactgagtcagtgttgcagaggaaaactgaaaactttaaggagttctattcattagggaggaaacttggacaagggcaatttgggacgacgtttttatgccttgagaaaggtactgggaacgaatatgcgtgcaagtcgatttccaagaggaagcttttgactgatgaggatgttgaagatgtgagaagagagattcagataatgcatcacttggctggtcatccgaatgttatatctattaaaggtgcttatgaggatgttgttgcggtacatcttgtgatggagttgtgttcgggtggcgagctttttgatagaattattcaacgtggacattacactgagaggaaagctgctgagcttgcgagaaccattgttggggttttagaggcttgtcactctcttggtgttatgcatcgggacctcaagccagagaattttctatttgttagtagagaggaagattccctgttgaaaacgatcgactttggactctcaatgttctttaagccagatgaggtttttacagatgttgttggtagtccgtattatgtagctccagaagttcttagaaagcgttatggtcctgaatcagatgtgtggagtgctggtgtgattgtttacattttgttaagcggagttcctcctttctgggccgaaaccgaacaaggtattttcgagcaggtccttcatggagatcttgacttttcatctgatccatggccaagcatctctgaaagcgcgaaagacttggtaaggaaaatgcttgttcgagaccccaagcgaagactaaccgcacatcaagtattatgtcatccatgggtacagattgacggtgtggctccagataaacctctggactctgctgttctgagccgtatgaagcaattttctgcaatgaacaagttcaagaaaatggctcttagagtcatagctgagagcttatctgaagaagaaatagccggtttaaaacaaatgttcaagatgatagacgcagacaatagtggtcagatcacttttgaagaactgaaagcaggactaaaacgagttggtgccaatctcaaagagtcagagattcttgatctaatgcaagctgctgatgtggacaatagcggaacgatagactacaaagagttcatagccgccacattgcatctaaacaaaatagagagagaggaccatttgttcgccgccttctcttactttgacaaggacgagagtggctttatcaccccggacgagcttcaacaagcttgcgaagagtttggtgttgaagatgcccgcatagaagaaatgatgcgcgatgttgatcaagacaaggatggacgaatagactacaacgagtttgtggcaatgatgcagaaagggagcataatgggaggacctgtgaagatgggtttagagaacagcattagcatttctctgaaacattagttacaaacccaaatcaagaagtacttcgtctatttattttgttatgaatgatgatgatcatgattgtgtttatctcaacattttgatgagatttttgttcgttagactggtttaggtaaatctgtttctgtactatgtacttttatgcatatacacatagcttttgtctgtaacttttggtcataagttatcttttt

SEQ ID NO: 89834 - protein, 646 aa, Arabidopsis thaliana
  peptide (1)..(646): Ceres Seq. ID no. 12720779
MGNACVGPNISGNGFLQTVTAAMWRPRIGAEQASSSSHGNGQVSKEAASEPATDQVQNKPPEPITMPSSKTNPETKLKPDLEIQPEEKKEKVLAEETKQKVVPEESKQEVPPEESKREVVVQPESAKPETKSESKPETTKPETTSETKPETKAEPQKPKHMRRVSSAGLRTESVLQRKTENFKEFYSLGRKLGQGQFGTTFLCLEKGTGNEYACKSISKRKLLTDEDVEDVRREIQIMHHLAGHPNVISIKGAYEDVVAVHLVMELCSGGELFDRIIQRGHYTERKAAELARTIVGVLEACHSLGVMHRDLKPENFLFVSREEDSLLKTIDFGLSMFFKPDEVFTDVVGSPYYVAPEVLRKRYGPESDVWSAGVIVYILLSGVPPFWAETEQGIFEQVLHGDLDFSSDPWPSISESAKDLVRKMLVRDPKRRLTAHQVLCHPWVQIDGVAPDKPLDSAVLSRMKQFSAMNKFKKMALRVIAESLSEEEIAGLKQMFKMIDADNSGQITFEELKAGLKRVGANLKESEILDLMQAADVDNSGTIDYKEFIAATLHLNKIEREDHLFAAFSYFDKDESGFITPDELQQACEEFGVEDARIEEMMRDVDQDKDGRIDYNEFVAMMQKGSIMGGPVKMGLENSISISLKH

SEQ ID NO: 89835 - protein, 624 aa, Arabidopsis thaliana
  peptide (1)..(624): Ceres Seq. ID no. 12720780
MWRPRIGAEQASSSSHGNGQVSKEAASEPATDQVQNKPPEPITMPSSKTNPETKLKPDLEIQPEEKKEKVLAEETKQKVVPEESKQEVPPEESKREVVVQPESAKPETKSESKPETTKPETTSETKPETKAEPQKPKHMRRVSSAGLRTESVLQRKTENFKEFYSLGRKLGQGQFGTTFLCLEKGTGNEYACKSISKRKLLTDEDVEDVRREIQIMHHLAGHPNVISIKGAYEDVVAVHLVMELCSGGELFDRIIQRGHYTERKAAELARTIVGVLEACHSLGVMHRDLKPENFLFVSREEDSLLKTIDFGLSMFFKPDEVFTDVVGSPYYVAPEVLRKRYGPESDVWSAGVIVYILLSGVPPFWAETEQGIFEQVLHGDLDFSSDPWPSISESAKDLVRKMLVRDPKRRLTAHQVLCHPWVQIDGVAPDKPLDSAVLSRMKQFSAMNKFKKMALRVIAESLSEEEIAGLKQMFKMIDADNSGQITFEELKAGLKRVGANLKESEILDLMQAADVDNSGTIDYKEFIAATLHLNKIEREDHLFAAFSYFDKDESGFITPDELQQACEEFGVEDARIEEMMRDVDQDKDGRIDYNEFVAMMQKGSIMGGPVKMGLENSISISLKH

SEQ ID NO: 89836 - protein, 581 aa, Arabidopsis thaliana
  peptide (1)..(581): Ceres Seq. ID no. 12720781
MPSSKTNPETKLKPDLEIQPEEKKEKVLAEETKQKVVPEESKQEVPPEESKREVVVQPESAKPETKSESKPETTKPETTSETKPETKAEPQKPKHMRRVSSAGLRTESVLQRKTENFKEFYSLGRKLGQGQFGTTFLCLEKGTGNEYACKSISKRKLLTDEDVEDVRREIQIMHHLAGHPNVISIKGAYEDVVAVHLVMELCSGGELFDRIIQRGHYTERKAAELARTIVGVLEACHSLGVMHRDLKPENFLFVSREEDSLLKTIDFGLSMFFKPDEVFTDVVGSPYYVAPEVLRKRYGPESDVWSAGVIVYILLSGVPPFWAETEQGIFEQVLHGDLDFSSDPWPSISESAKDLVRKMLVRDPKRRLTAHQVLCHPWVQIDGVAPDKPLDSAVLSRMKQFSAMNKFKKMALRVIAESLSEEEIAGLKQMFKMIDADNSGQITFEELKAGLKRVGANLKESEILDLMQAADVDNSGTIDYKEFIAATLHLNKIEREDHLFAAFSYFDKDESGFITPDELQQACEEFGVEDARIEEMMRDVDQDKDGRIDYNEFVAMMQKGSIMGGPVKMGLENSISISLKH

SEQ ID NO: 89837 - DNA, 1686 bp, Arabidopsis thaliana
  misc_feature (1)..(1686): Ceres Seq. ID no. 12720785
  misc_feature (1)..(1686): Ortholog of  Ceres SEQ ID NO 13594037 as cited in SEQ ID NO 55666
  misc_feature (1)..(1686): Ortholog of  Ceres SEQ ID NO 13657707 as cited in SEQ ID NO 66407
atgtcctctccttacggcaaagtcgacgagcgtgaacatgtaaggctcgaagctcgtcgtaagacgagaaagaacatcgcaatcatcgctgtatcactagtcattcttgccggaatcgtgatcggagctgtgtttggaaccatggctcacaagaagtcaccagagacagtggagactaataacaacggagactcaatctccgtttccgttaaagccgtttgcgacgttacgttgcataaagaaaaatgcttcgaaaccctcggatcagctccaaacgcaagcagtctcaatccagaagagctcttcagatacgcagtcaaaatcacaatcgccgaagtttcaaaagctatcaacgctttctcttcatccttaggcgatgaaaagaacaacatcaccatgaacgcttgcgctgagcttcttgacctaacgatagataacctcaacaacacgttaacctcatcatcaaacggtgatgtcacggttcctgagctagtcgatgatctccgtacatggctgagttcagccgggacgtatcaacggacgtgcgtggaaacgttggctccagatatgaggccgttcggcgaaagtcatctcaagaactcaacggagttgacgagtaacgcactagcgatcatcacatggctcgggaagatcgctgactctttcaaactccggaggcgtttgttaacaactgcagacgtggaggtggacttccacgcgggtcggagattgttgcagagcacggatttgaggaaagtggcggatattgtggtggcgaaggatggttcagggaagtatagaacgataaagagggctttacaagatgtgccagagaagagtgagaagaggacgattatatatgtgaagaaaggagtttattttgagaatgtgaaggtggagaagaagatgtggaatgttattgtggttggagatggcgagagcaagagtattgtctctggtagacttaatgtcatcgatggaactcccacttttaagaccgccacattcgctgtgtttggaaaagggtttatggcaagagacatgggcttcatcaacacagctggtccatccaaacatcaagctgttgctctaatggtaagcgcagatctcacagcattttaccgttgcacgatgaacgcataccaagacacgctttacgttcatgcacaacgccaattctaccgtgaatgcaccattatcggaacagtagatttcatctttggtaactcagcttcagttctccaaagctgccggattctccctcgccgaccaatgaaaggacaacaaaacacaatcacggctcaaggacgtactgatccgaacatgaacacaggaatctcgattcaccgttgtaacatctctccactcggtgacctaaccgatgttatgacgtttctaggtcgaccatggaagaatttctcgacgacggttataatggactcgtatttgcatggttttattgaccggaaaggctggttaccgtggaccggagattctgcgccggatactatattttacggtgagtataagaataccggtcctggtgcatcgacgaagaatagggttaagtggaagggtttgaggtttcttagtacgaaggaagcgaataggtttacggtgaaacctttcatcgacggtggaagatggcttccggcgacgaaagtgccgttcaggtccggtctctga

SEQ ID NO: 89838 - protein, 561 aa, Arabidopsis thaliana
  peptide (1)..(561): Ceres Seq. ID no. 12720786
MSSPYGKVDEREHVRLEARRKTRKNIAIIAVSLVILAGIVIGAVFGTMAHKKSPETVETNNNGDSISVSVKAVCDVTLHKEKCFETLGSAPNASSLNPEELFRYAVKITIAEVSKAINAFSSSLGDEKNNITMNACAELLDLTIDNLNNTLTSSSNGDVTVPELVDDLRTWLSSAGTYQRTCVETLAPDMRPFGESHLKNSTELTSNALAIITWLGKIADSFKLRRRLLTTADVEVDFHAGRRLLQSTDLRKVADIVVAKDGSGKYRTIKRALQDVPEKSEKRTIIYVKKGVYFENVKVEKKMWNVIVVGDGESKSIVSGRLNVIDGTPTFKTATFAVFGKGFMARDMGFINTAGPSKHQAVALMVSADLTAFYRCTMNAYQDTLYVHAQRQFYRECTIIGTVDFIFGNSASVLQSCRILPRRPMKGQQNTITAQGRTDPNMNTGISIHRCNISPLGDLTDVMTFLGRPWKNFSTTVIMDSYLHGFIDRKGWLPWTGDSAPDTIFYGEYKNTGPGASTKNRVKWKGLRFLSTKEANRFTVKPFIDGGRWLPATKVPFRSGL

SEQ ID NO: 89839 - protein, 514 aa, Arabidopsis thaliana
  peptide (1)..(514): Ceres Seq. ID no. 12720787
MAHKKSPETVETNNNGDSISVSVKAVCDVTLHKEKCFETLGSAPNASSLNPEELFRYAVKITIAEVSKAINAFSSSLGDEKNNITMNACAELLDLTIDNLNNTLTSSSNGDVTVPELVDDLRTWLSSAGTYQRTCVETLAPDMRPFGESHLKNSTELTSNALAIITWLGKIADSFKLRRRLLTTADVEVDFHAGRRLLQSTDLRKVADIVVAKDGSGKYRTIKRALQDVPEKSEKRTIIYVKKGVYFENVKVEKKMWNVIVVGDGESKSIVSGRLNVIDGTPTFKTATFAVFGKGFMARDMGFINTAGPSKHQAVALMVSADLTAFYRCTMNAYQDTLYVHAQRQFYRECTIIGTVDFIFGNSASVLQSCRILPRRPMKGQQNTITAQGRTDPNMNTGISIHRCNISPLGDLTDVMTFLGRPWKNFSTTVIMDSYLHGFIDRKGWLPWTGDSAPDTIFYGEYKNTGPGASTKNRVKWKGLRFLSTKEANRFTVKPFIDGGRWLPATKVPFRSGL

SEQ ID NO: 89840 - protein, 429 aa, Arabidopsis thaliana
  peptide (1)..(429): Ceres Seq. ID no. 12720788
MNACAELLDLTIDNLNNTLTSSSNGDVTVPELVDDLRTWLSSAGTYQRTCVETLAPDMRPFGESHLKNSTELTSNALAIITWLGKIADSFKLRRRLLTTADVEVDFHAGRRLLQSTDLRKVADIVVAKDGSGKYRTIKRALQDVPEKSEKRTIIYVKKGVYFENVKVEKKMWNVIVVGDGESKSIVSGRLNVIDGTPTFKTATFAVFGKGFMARDMGFINTAGPSKHQAVALMVSADLTAFYRCTMNAYQDTLYVHAQRQFYRECTIIGTVDFIFGNSASVLQSCRILPRRPMKGQQNTITAQGRTDPNMNTGISIHRCNISPLGDLTDVMTFLGRPWKNFSTTVIMDSYLHGFIDRKGWLPWTGDSAPDTIFYGEYKNTGPGASTKNRVKWKGLRFLSTKEANRFTVKPFIDGGRWLPATKVPFRSGL

SEQ ID NO: 89841 - DNA, 1227 bp, Arabidopsis thaliana
  misc_feature (1)..(1227): Ceres Seq. ID no. 12720815
  misc_feature (1)..(1227): Ortholog of  Ceres SEQ ID NO 14314108 as cited in SEQ ID NO 63184
atgaagtgtttgtgttttatcgtgcttttagcgattgtgatcgcacaaagctatgtaggagtagaagctgcgccaagtgatgggttcgtgagcagaaatggcgtccaatttattctaaatgggaaaccattttacgctaatggcttcaatgcttactggctcgcgtacgaagctaccgatccgaccacaagatttaagatcactaatgtgtttcaaaacgcaactagtctcggtttgaccatcgcccgcacctgggggttccgcgatggcgccatataccgcgctctccaaacagcccctggttcctacgatgaacaaacgtttcagggtttggattttgtgatagccgaagcaaaaagaatcggtataaaattgataatcctccttgtcaataattgggatgactacggagggaaaaaacaatacgtggattgggctagaagtaaaggcgaagtggtatcttccaatgacgatttctacagaaacccagttattaaagatttctacaagaaccacgtcaagactgtgttaaacagagtgaatacatttactaaagttgcatacaaagatgaacccgccattatggcttggcagcttatgaacgagccacgatgcggtgtggataagagtggaaaaacccttatggattggattaatgaaatggctccttttgtaaaatcagttgatccaaaccatctcctctctactggtcatgaaggtttctatggtgattcatctcctgaaagaaagaattctctaaatccagtttcagccaacacagttggagctgatttcatagctaatcacaatatcgatgccattgatttcgcatcgatgcactgtggaagtgacttatggtttcaaaggttggatcagaactctcgactggccttcataaaaagatggcttgaaggccacatcgaagatgcgcagaacattcttaaaaaacctgtaattctagcagaatttgggttaggatcggacacaccacgttacactctggctaatagagacggcgtgttcaccacaacatatgacatcatttacgcatctgcgcaaaaaggcggttcggccgcgggagcattgttttgggaggttattagcgaaggcatgagcaactttgcaggtccctcctccattatacttagtgacaagtcgtcgacggttaatattataagtgagcatgcacgaaagatgggtttgcttggtgagaccacaagaaagtaa

SEQ ID NO: 89842 - protein, 408 aa, Arabidopsis thaliana
  peptide (1)..(408): Ceres Seq. ID no. 12720816
MKCLCFIVLLAIVIAQSYVGVEAAPSDGFVSRNGVQFILNGKPFYANGFNAYWLAYEATDPTTRFKITNVFQNATSLGLTIARTWGFRDGAIYRALQTAPGSYDEQTFQGLDFVIAEAKRIGIKLIILLVNNWDDYGGKKQYVDWARSKGEVVSSNDDFYRNPVIKDFYKNHVKTVLNRVNTFTKVAYKDEPAIMAWQLMNEPRCGVDKSGKTLMDWINEMAPFVKSVDPNHLLSTGHEGFYGDSSPERKNSLNPVSANTVGADFIANHNIDAIDFASMHCGSDLWFQRLDQNSRLAFIKRWLEGHIEDAQNILKKPVILAEFGLGSDTPRYTLANRDGVFTTTYDIIYASAQKGGSAAGALFWEVISEGMSNFAGPSSIILSDKSSTVNIISEHARKMGLLGETTRK

SEQ ID NO: 89843 - protein, 214 aa, Arabidopsis thaliana
  peptide (1)..(214): Ceres Seq. ID no. 12720817
MAWQLMNEPRCGVDKSGKTLMDWINEMAPFVKSVDPNHLLSTGHEGFYGDSSPERKNSLNPVSANTVGADFIANHNIDAIDFASMHCGSDLWFQRLDQNSRLAFIKRWLEGHIEDAQNILKKPVILAEFGLGSDTPRYTLANRDGVFTTTYDIIYASAQKGGSAAGALFWEVISEGMSNFAGPSSIILSDKSSTVNIISEHARKMGLLGETTRK

SEQ ID NO: 89844 - protein, 209 aa, Arabidopsis thaliana
  peptide (1)..(209): Ceres Seq. ID no. 12720818
MNEPRCGVDKSGKTLMDWINEMAPFVKSVDPNHLLSTGHEGFYGDSSPERKNSLNPVSANTVGADFIANHNIDAIDFASMHCGSDLWFQRLDQNSRLAFIKRWLEGHIEDAQNILKKPVILAEFGLGSDTPRYTLANRDGVFTTTYDIIYASAQKGGSAAGALFWEVISEGMSNFAGPSSIILSDKSSTVNIISEHARKMGLLGETTRK

SEQ ID NO: 89845 - DNA, 477 bp, Arabidopsis thaliana
  misc_feature (1)..(477): Ceres Seq. ID no. 12720848
  misc_feature (1)..(477): Ortholog of  Ceres SEQ ID NO 13595749 as cited in SEQ ID NO 51052
atgacgtcatcttcaccgtctccacaagcctcgatgcttttgtactggcacgagaatcaatacgacgaccggaacttccagattcatggccggacactcttcttcgccttagctttattctccgtcgtgctcttcttcgcactactcactctctacatccaccggaactgcctcccccgggattctatcaatctccacgcgtcctctcccgatcgactcacgcgttgccgtagcggagggcttgatccggcggagattcggagcttgccggtggtgctttgccggagagaaagggcggaggaggaggaggagaaggagtgttgtatatgtctaggtggtttcgaagaaggagagaagatgaaagtgcttcctccgtgtagccattgttaccactgcgaatgtgtggatcggtggcttaaaaccgagtcgagttgtccgctctgccgagtctccatccgtgtcgactcgtcaagctaa

SEQ ID NO: 89846 - protein, 158 aa, Arabidopsis thaliana
  peptide (1)..(158): Ceres Seq. ID no. 12720849
MTSSSPSPQASMLLYWHENQYDDRNFQIHGRTLFFALALFSVVLFFALLTLYIHRNCLPRDSINLHASSPDRLTRCRSGGLDPAEIRSLPVVLCRRERAEEEEEKECCICLGGFEEGEKMKVLPPCSHCYHCECVDRWLKTESSCPLCRVSIRVDSSS

SEQ ID NO: 89847 - protein, 147 aa, Arabidopsis thaliana
  peptide (1)..(147): Ceres Seq. ID no. 12720850
MLLYWHENQYDDRNFQIHGRTLFFALALFSVVLFFALLTLYIHRNCLPRDSINLHASSPDRLTRCRSGGLDPAEIRSLPVVLCRRERAEEEEEKECCICLGGFEEGEKMKVLPPCSHCYHCECVDRWLKTESSCPLCRVSIRVDSSS

SEQ ID NO: 89848 - DNA, 1203 bp, Arabidopsis thaliana
  misc_feature (1)..(1203): Ceres Seq. ID no. 12720851
  misc_feature (1)..(1203): Ortholog of  Ceres SEQ ID NO 12636774 as cited in SEQ ID NO 372
  misc_feature (1)..(1203): Ortholog of  Ceres SEQ ID NO 15170037 as cited in SEQ ID NO 55447
  misc_feature (1)..(1203): Ortholog of  Ceres SEQ ID NO 15175492 as cited in SEQ ID NO 56277
  misc_feature (1)..(1203): Ortholog of  Ceres SEQ ID NO 13582350 as cited in SEQ ID NO 56734
  misc_feature (1)..(1203): Ortholog of  Ceres SEQ ID NO 12476493 as cited in SEQ ID NO 58163
  misc_feature (1)..(1203): Ortholog of  Ceres SEQ ID NO 14310807 as cited in SEQ ID NO 58696
  misc_feature (1)..(1203): Ortholog of  Ceres SEQ ID NO 15175861 as cited in SEQ ID NO 59381
  misc_feature (1)..(1203): Ortholog of  Ceres SEQ ID NO 12578315 as cited in SEQ ID NO 62451
  misc_feature (1)..(1203): Ortholog of  Ceres SEQ ID NO 12615466 as cited in SEQ ID NO 62761
  misc_feature (1)..(1203): Ortholog of  Ceres SEQ ID NO 13597295 as cited in SEQ ID NO 63743
  misc_feature (1)..(1203): Ortholog of  Ceres SEQ ID NO 12617090 as cited in SEQ ID NO 64005
  misc_feature (1)..(1203): Ortholog of  Ceres SEQ ID NO 15226458 as cited in SEQ ID NO 64042
  misc_feature (1)..(1203): Ortholog of  Ceres SEQ ID NO 13597439 as cited in SEQ ID NO 64081
  misc_feature (1)..(1203): Ortholog of  Ceres SEQ ID NO 13597233 as cited in SEQ ID NO 64370
  misc_feature (1)..(1203): Ortholog of  Ceres SEQ ID NO 13598327 as cited in SEQ ID NO 68040
atgaacaacctagacgagatcaagatcgagagcaagacctgcctcaacgatcaagaacaagaagtcaaaatagacaacatgcacatgagcgaccaagacaagaacaagatcgaaatcaagaacaagagtggcctcggcgaaaagtggccagaacccatcgtccgagtccaatctctagccgagagcaacctcactagtctccctgaccgttacatcaagccgccgtctcaacgccctcaaaccaccatcatcgaccaccaaccggaagtagctgacataaatataccgatcatagacctagacagtctattctctggcaatgaagacgacaagaagaggatatccgaggcatgccgtgaatggggattcttccaggtaatcaaccatggcgtgaagccggagctgatggacgcagctagagaaacttggaagagcttctttaatttgcctgttgaagccaaagaagtttactcaaactccccaagaacctatgaaggatatggaagcagattgggtgtggaaaaaggagccattcttgattggaatgattattactatctccattttcttcctcttgccttgaaggatttcaacaaatggccttctttaccttccaacattagagaaatgaatgatgagtacggtaaggaactagtgaagctaggtgggagactaatgacgatcttatcgtcaaatttggggctaagagcagaacaacttcaagaagcatttggtggagaagacgttggtgcatgtttgagggttaattattacccaaagtgccctcaaccggagcttgccctcggcctctcccctcattctgatcccggcggcatgaccatcctcttgccggacgatcaagtcgtcggccttcaggtccgtcacggtgacacgtggatcactgtcaatcctctccgccacgcttttatcgtcaatatcggcgatcaaattcagatactaagcaattcgaaatacaagagcgtggaacatcgagtgatagtgaattcggaaaaagaaagggtttcactagcattcttctataaccctaagagtgacattccgatccaaccaatgcaacaacttgtcacctctacgatgcctcccttgtatcctcccatgacctttgatcaatatagactcttcattagaacgcaaggtccacgtggaaaatcccacgttgagtctcatatatctcctcgttaa

SEQ ID NO: 89849 - protein, 400 aa, Arabidopsis thaliana
  peptide (1)..(400): Ceres Seq. ID no. 12720852
MNNLDEIKIESKTCLNDQEQEVKIDNMHMSDQDKNKIEIKNKSGLGEKWPEPIVRVQSLAESNLTSLPDRYIKPPSQRPQTTIIDHQPEVADINIPIIDLDSLFSGNEDDKKRISEACREWGFFQVINHGVKPELMDAARETWKSFFNLPVEAKEVYSNSPRTYEGYGSRLGVEKGAILDWNDYYYLHFLPLALKDFNKWPSLPSNIREMNDEYGKELVKLGGRLMTILSSNLGLRAEQLQEAFGGEDVGACLRVNYYPKCPQPELALGLSPHSDPGGMTILLPDDQVVGLQVRHGDTWITVNPLRHAFIVNIGDQIQILSNSKYKSVEHRVIVNSEKERVSLAFFYNPKSDIPIQPMQQLVTSTMPPLYPPMTFDQYRLFIRTQGPRGKSHVESHISPR

SEQ ID NO: 89850 - protein, 374 aa, Arabidopsis thaliana
  peptide (1)..(374): Ceres Seq. ID no. 12720853
MHMSDQDKNKIEIKNKSGLGEKWPEPIVRVQSLAESNLTSLPDRYIKPPSQRPQTTIIDHQPEVADINIPIIDLDSLFSGNEDDKKRISEACREWGFFQVINHGVKPELMDAARETWKSFFNLPVEAKEVYSNSPRTYEGYGSRLGVEKGAILDWNDYYYLHFLPLALKDFNKWPSLPSNIREMNDEYGKELVKLGGRLMTILSSNLGLRAEQLQEAFGGEDVGACLRVNYYPKCPQPELALGLSPHSDPGGMTILLPDDQVVGLQVRHGDTWITVNPLRHAFIVNIGDQIQILSNSKYKSVEHRVIVNSEKERVSLAFFYNPKSDIPIQPMQQLVTSTMPPLYPPMTFDQYRLFIRTQGPRGKSHVESHISPR

SEQ ID NO: 89851 - protein, 372 aa, Arabidopsis thaliana
  peptide (1)..(372): Ceres Seq. ID no. 12720854
MSDQDKNKIEIKNKSGLGEKWPEPIVRVQSLAESNLTSLPDRYIKPPSQRPQTTIIDHQPEVADINIPIIDLDSLFSGNEDDKKRISEACREWGFFQVINHGVKPELMDAARETWKSFFNLPVEAKEVYSNSPRTYEGYGSRLGVEKGAILDWNDYYYLHFLPLALKDFNKWPSLPSNIREMNDEYGKELVKLGGRLMTILSSNLGLRAEQLQEAFGGEDVGACLRVNYYPKCPQPELALGLSPHSDPGGMTILLPDDQVVGLQVRHGDTWITVNPLRHAFIVNIGDQIQILSNSKYKSVEHRVIVNSEKERVSLAFFYNPKSDIPIQPMQQLVTSTMPPLYPPMTFDQYRLFIRTQGPRGKSHVESHISPR

SEQ ID NO: 89852 - DNA, 1982 bp, Arabidopsis thaliana
  misc_feature (1)..(1982): Ceres Seq. ID no. 12720859
  misc_feature (1)..(1982): Ortholog of  Ceres SEQ ID NO 15168488 as cited in SEQ ID NO 59179
atcgttgtggattctctccgatcatgtcgtcgaagaaagcgaagacgaagaacgaggcgagtagcagccgtggtggcatcggcggagagagtatagtcgctgattgtggacgaaataaatcaacttgcggttactgtaaatcttctacccgctttagtatttctcacggtttatggacagagagactcaccgttaatgactatcaagctcttcttgacagtggatggagacgatctggctgctatctttacaaacctgagatggagaagacttgttgcccttcttatacaatccgcttgaaagcaagtgattttgtcccttctaaggagcagcagcgagtgcgtagaagaatagaaaggtttttggatggtgaactagatgcgaagccgagtgagcagacagaagatcaagatgtctctttctcccgtgaagtttcagtgtcagtgaaaaaatcacttggagctgctaaaagagaaaaaaacaatgaactggaaccaatcatgaaagatttgtctgaacaaattgataatgcggtacaaaaatgcatacagagtggtgagtttccttctaatgttcagattcccaaagcttcagtaaagaaagttttttctgctaaaaggaagaaactagctgaagggtcagaagacctcttatacaccagcaacattgcttttccaatagtagctgctatgaaacacacacagacattggagaaaggcaaaaacgtagaagaaaacagattatcaccagaggctgtttctgagaagttgttaagtgcaatgaataaggttggagagtttactggtttttctgttaaggtctccaagggtcatatcaacttcctttcagctacccaagttacttcctcagatagaaatgaaggtgaagaaagcctatgtgctacaacaataaagtcttcttcgaacaagcttcatgcaagaaagcggaagctggagatgcacttgaaaaggtcgagttttgaaccagaggaatatgaattatacaaacggtatcaaatgaaagtgcataatgataagccggagagcatctcagaaacttcatacaaacggtttttggtagacactccgctcactgaagttccttcttcaggttatgatgatgaagaaaagattcctctttgtggctttggttctttccatcaacaataccgagttgatgaccgtctaattgctgttggggtgattgatattcttcctaaatgtttgtctagtaaatacctgttctgggatccggatttcgcatccttgtctcttggaaactactcagccctgcaagaaatcgattgggtaaaacagaaccaagctcattgctctactcttgagtattactatcttggctattacatacattcctgtaacaagatgagatataaagcagcctatcgtccgtctgagcttctatgccctctccggtaccaatgggttccattcgaagtagccaagcctctgcttgataaaaagccttattccgtcttgtccaatatcagtaaggtttcttcatcatcatcatcacctcaagcttctgaaaccctattggaatctacgagtgaacatgaagacatggaacaaggggatacaaatgatgatgatgatgaaatgtataactctgatgaagactcagactcagactctagcagtagcagaaaccggagtgacattaccaatatccttatcagtcttaatggacctcgacttcgatacaaggatataccgcggttcaagaatccagtggttcagaaacaactcgaatcgatgttggttagttacaggaaagttgttggggccgagctatcggagataatggtgtatgaactccggtaacattaagcttaagtgcttaactcaagccagttgaaagcattttgcaacattattaacaatattagtgttgtcatgtgtctccttattttgatcacatgatacccaaaaaaatatataatctataattgttacatttttccc

SEQ ID NO: 89853 - protein, 612 aa, Arabidopsis thaliana
  peptide (1)..(612): Ceres Seq. ID no. 12720860
RCGFSPIMSSKKAKTKNEASSSRGGIGGESIVADCGRNKSTCGYCKSSTRFSISHGLWTERLTVNDYQALLDSGWRRSGCYLYKPEMEKTCCPSYTIRLKASDFVPSKEQQRVRRRIERFLDGELDAKPSEQTEDQDVSFSREVSVSVKKSLGAAKREKNNELEPIMKDLSEQIDNAVQKCIQSGEFPSNVQIPKASVKKVFSAKRKKLAEGSEDLLYTSNIAFPIVAAMKHTQTLEKGKNVEENRLSPEAVSEKLLSAMNKVGEFTGFSVKVSKGHINFLSATQVTSSDRNEGEESLCATTIKSSSNKLHARKRKLEMHLKRSSFEPEEYELYKRYQMKVHNDKPESISETSYKRFLVDTPLTEVPSSGYDDEEKIPLCGFGSFHQQYRVDDRLIAVGVIDILPKCLSSKYLFWDPDFASLSLGNYSALQEIDWVKQNQAHCSTLEYYYLGYYIHSCNKMRYKAAYRPSELLCPLRYQWVPFEVAKPLLDKKPYSVLSNISKVSSSSSSPQASETLLESTSEHEDMEQGDTNDDDDEMYNSDEDSDSDSSSSRNRSDITNILISLNGPRLRYKDIPRFKNPVVQKQLESMLVSYRKVVGAELSEIMVYELR

SEQ ID NO: 89854 - protein, 605 aa, Arabidopsis thaliana
  peptide (1)..(605): Ceres Seq. ID no. 12720861
MSSKKAKTKNEASSSRGGIGGESIVADCGRNKSTCGYCKSSTRFSISHGLWTERLTVNDYQALLDSGWRRSGCYLYKPEMEKTCCPSYTIRLKASDFVPSKEQQRVRRRIERFLDGELDAKPSEQTEDQDVSFSREVSVSVKKSLGAAKREKNNELEPIMKDLSEQIDNAVQKCIQSGEFPSNVQIPKASVKKVFSAKRKKLAEGSEDLLYTSNIAFPIVAAMKHTQTLEKGKNVEENRLSPEAVSEKLLSAMNKVGEFTGFSVKVSKGHINFLSATQVTSSDRNEGEESLCATTIKSSSNKLHARKRKLEMHLKRSSFEPEEYELYKRYQMKVHNDKPESISETSYKRFLVDTPLTEVPSSGYDDEEKIPLCGFGSFHQQYRVDDRLIAVGVIDILPKCLSSKYLFWDPDFASLSLGNYSALQEIDWVKQNQAHCSTLEYYYLGYYIHSCNKMRYKAAYRPSELLCPLRYQWVPFEVAKPLLDKKPYSVLSNISKVSSSSSSPQASETLLESTSEHEDMEQGDTNDDDDEMYNSDEDSDSDSSSSRNRSDITNILISLNGPRLRYKDIPRFKNPVVQKQLESMLVSYRKVVGAELSEIMVYELR

SEQ ID NO: 89855 - protein, 526 aa, Arabidopsis thaliana
  peptide (1)..(526): Ceres Seq. ID no. 12720862
MEKTCCPSYTIRLKASDFVPSKEQQRVRRRIERFLDGELDAKPSEQTEDQDVSFSREVSVSVKKSLGAAKREKNNELEPIMKDLSEQIDNAVQKCIQSGEFPSNVQIPKASVKKVFSAKRKKLAEGSEDLLYTSNIAFPIVAAMKHTQTLEKGKNVEENRLSPEAVSEKLLSAMNKVGEFTGFSVKVSKGHINFLSATQVTSSDRNEGEESLCATTIKSSSNKLHARKRKLEMHLKRSSFEPEEYELYKRYQMKVHNDKPESISETSYKRFLVDTPLTEVPSSGYDDEEKIPLCGFGSFHQQYRVDDRLIAVGVIDILPKCLSSKYLFWDPDFASLSLGNYSALQEIDWVKQNQAHCSTLEYYYLGYYIHSCNKMRYKAAYRPSELLCPLRYQWVPFEVAKPLLDKKPYSVLSNISKVSSSSSSPQASETLLESTSEHEDMEQGDTNDDDDEMYNSDEDSDSDSSSSRNRSDITNILISLNGPRLRYKDIPRFKNPVVQKQLESMLVSYRKVVGAELSEIMVYELR

SEQ ID NO: 89856 - DNA, 1797 bp, Arabidopsis thaliana
  misc_feature (1)..(1797): Ceres Seq. ID no. 12720871
  misc_feature (1)..(1797): Ortholog of  Ceres SEQ ID NO 14315279 as cited in SEQ ID NO 52534
  misc_feature (1)..(1797): Ortholog of  Ceres SEQ ID NO 12583190 as cited in SEQ ID NO 56386
ctggatcaatcatcatcttcatcaatttccagattcagattccaaatctccgaagcttaacgaaaacaatggcggcagaacctaaccctaagaatttccctgtcctctcttatgtcttggctcgtctcccttctttcaccgccaaatccccttcctcctccgttcctcccttcgacatcgaacaaccaccaccatcatcatcatcatcatcgattgagatcgtcactcagatgcctcacttaacacaaccagatgttctcgcttcaatgacaagtgcgatctctgacgtcgccgagactcgatctatccttcgaaccctaggacctagaccagatcacgaatcagtcgataaggctcgtgctaaactctcggaaatcgaatcgttcttatctgaatcgttcgaggatatcgcgttaaccgatgcggcggcgaaagatgagaagaggagacaagagatggatcaggagaagacttggtgtgagtcgattttgaagcttgatgaggttcatgcttcgtatgagaagcttttgaaagaagcagaggagaggcttgttaggatttatgaatctgctgagaagaatgcggcggaggatgaggagaatgttgcggctgtggaggttaatgaggaggttgttgggatattgcagcatgcttctgctaatccggtggatcgtgttgatttgtctgggaggaaactgaggttgctacctgaagcttttgggaggattcaagggttgcttgttcttaatctctccaacaataagcttgagtcgattcctgattcaattgctggattgcatagtcttgttgaactggatgtctccacgaattctctggagacattacctgattccatcggtttactgtccaaactaaaaatcctgaatgtttcgactaacaagctcacatccttgcctgactccatctgccgctgtgggtcgttggttatcttggacgtgagcttcaaccgtctcacctacttaccgaccaacatcggtcctgagctagtgaatctagaaaagctcctggttcagtataacaagatccgatccttcccgaccagtataggcgaaatgagatccctaaaacacctcgacgcccacttcaacgaacttaacggccttcctgattctttcgtgttgctcacaaatctcgagtacttaaacctaagcagcaacttcagtgatctcaaggatctcccattctcattcggcgaactcataagcctccaagaactcgacttgagtaacaaccaaatccatgccctccctgacacttttggcacacttgatagcctgaccaaactgaatgtggatcagaacccgctcgtcgtcccacccgaggaagtggtgaaggaaggtgttgaagctgtgaagacgtacatgggtcagagaaggatcagtatgttggaagaagaagagaagaagaaaatggaggaagagatggagcaggcaaacgccgggtggctcacacgaaccacatcgaagctgaaaacatatgtcgcagatgtttcagagtatctcggatcaaattctcctcgagacccttaccttgaacgacagctatgatgtgacttggcttgaagaacaatgaatccaaagaggttgaaatttctcgttttggctggttctgtctcagttttttctcctatcattcggtatataacgaaggggctctcttcgttactgtgttgtctggtgttattctttctgacgggtaaggcctgtcattaacttaggttcaattcaaacttaaaagactctcacggggtccaactaataagagaaaacacttagt

SEQ ID NO: 89857 - protein, 521 aa, Arabidopsis thaliana
  peptide (1)..(521): Ceres Seq. ID no. 12720872
GSIIIFINFQIQIPNLRSLTKTMAAEPNPKNFPVLSYVLARLPSFTAKSPSSSVPPFDIEQPPPSSSSSSIEIVTQMPHLTQPDVLASMTSAISDVAETRSILRTLGPRPDHESVDKARAKLSEIESFLSESFEDIALTDAAAKDEKRRQEMDQEKTWCESILKLDEVHASYEKLLKEAEERLVRIYESAEKNAAEDEENVAAVEVNEEVVGILQHASANPVDRVDLSGRKLRLLPEAFGRIQGLLVLNLSNNKLESIPDSIAGLHSLVELDVSTNSLETLPDSIGLLSKLKILNVSTNKLTSLPDSICRCGSLVILDVSFNRLTYLPTNIGPELVNLEKLLVQYNKIRSFPTSIGEMRSLKHLDAHFNELNGLPDSFVLLTNLEYLNLSSNFSDLKDLPFSFGELISLQELDLSNNQIHALPDTFGTLDSLTKLNVDQNPLVVPPEEVVKEGVEAVKTYMGQRRISMLEEEEKKKMEEEMEQANAGWLTRTTSKLKTYVADVSEYLGSNSPRDPYLERQL

SEQ ID NO: 89858 - protein, 499 aa, Arabidopsis thaliana
  peptide (1)..(499): Ceres Seq. ID no. 12720873
MAAEPNPKNFPVLSYVLARLPSFTAKSPSSSVPPFDIEQPPPSSSSSSIEIVTQMPHLTQPDVLASMTSAISDVAETRSILRTLGPRPDHESVDKARAKLSEIESFLSESFEDIALTDAAAKDEKRRQEMDQEKTWCESILKLDEVHASYEKLLKEAEERLVRIYESAEKNAAEDEENVAAVEVNEEVVGILQHASANPVDRVDLSGRKLRLLPEAFGRIQGLLVLNLSNNKLESIPDSIAGLHSLVELDVSTNSLETLPDSIGLLSKLKILNVSTNKLTSLPDSICRCGSLVILDVSFNRLTYLPTNIGPELVNLEKLLVQYNKIRSFPTSIGEMRSLKHLDAHFNELNGLPDSFVLLTNLEYLNLSSNFSDLKDLPFSFGELISLQELDLSNNQIHALPDTFGTLDSLTKLNVDQNPLVVPPEEVVKEGVEAVKTYMGQRRISMLEEEEKKKMEEEMEQANAGWLTRTTSKLKTYVADVSEYLGSNSPRDPYLERQL

SEQ ID NO: 89859 - protein, 445 aa, Arabidopsis thaliana
  peptide (1)..(445): Ceres Seq. ID no. 12720874
MPHLTQPDVLASMTSAISDVAETRSILRTLGPRPDHESVDKARAKLSEIESFLSESFEDIALTDAAAKDEKRRQEMDQEKTWCESILKLDEVHASYEKLLKEAEERLVRIYESAEKNAAEDEENVAAVEVNEEVVGILQHASANPVDRVDLSGRKLRLLPEAFGRIQGLLVLNLSNNKLESIPDSIAGLHSLVELDVSTNSLETLPDSIGLLSKLKILNVSTNKLTSLPDSICRCGSLVILDVSFNRLTYLPTNIGPELVNLEKLLVQYNKIRSFPTSIGEMRSLKHLDAHFNELNGLPDSFVLLTNLEYLNLSSNFSDLKDLPFSFGELISLQELDLSNNQIHALPDTFGTLDSLTKLNVDQNPLVVPPEEVVKEGVEAVKTYMGQRRISMLEEEEKKKMEEEMEQANAGWLTRTTSKLKTYVADVSEYLGSNSPRDPYLERQL

SEQ ID NO: 89860 - DNA, 1872 bp, Arabidopsis thaliana
  misc_feature (1)..(1872): Ceres Seq. ID no. 12720894
  misc_feature (1)..(1872): Ortholog of  Ceres SEQ ID NO 12586556 as cited in SEQ ID NO 64667
  misc_feature (1)..(1872): Ortholog of  Ceres SEQ ID NO 13660894 as cited in SEQ ID NO 67475
atgatcgtcgttacaagctttgtacggaactccgccgtcgctgcggtggcttcgacgccatggaacgtacgtttgagagagctcgcatatcagtcattgttttctgaatctatatctctttaccggtcaatgctccgttctggttcttctcccgacgcgttctctttccctttcattctcaagtcttgtgcttccctttcgctccctgtctccggccaacagctacattgccacgtgaccaaaggcggttgcgagactgagccgtttgtactaacggctctgatctcaatgtattgtaaatgcggtttggttgcagatgcacgtaaagtgttcgaagaaaatcctcagtcaagtcagcttagtgtttgttacaatgctttgatatctgggtacacagcaaactcgaaggtcactgatgctgcgtatatgtttcgtagaatgaaggaaactggtgtgtctgtggattcagttacaatgcttgggcttgtcccgctatgcacggttcctgaatacctctggcttgggaggtctcttcacggtcaatgtgttaaaggaggactggattctgaagtagctgttttgaatagtttcatcacaatgtacatgaaatgcgggtcggtagaagctggtaggaggttgtttgatgagatgcctgtgaagggtttgattacttggaatgctgtgatttctggatattcacagaacgggctagcttacgatgttctggaactttatgagcagatgaaatcatcgggtgtttgtcctgatccttttacattggttagtgttctgtcttcttgtgcccatcttggagctaagaagattggtcacgaagtagggaagttagtagaatccaatggttttgtaccaaatgtttttgtaagcaatgcatcgattagcatgtatgctagatgcggtaacttggcaaaggcacgtgctgttttcgacatcatgcctgtaaaaagcttagtttcatggaccgccatgattggttgctatgggatgcatggaatgggagagattgggcttatgctttttgatgatatgataaaaagaggcataagaccagatggggcggtgtttgtaatggttttatctgcttgcagccattcagggctaacggataaaggtttagagttatttagagcgatgaagagagagtataagctggagcctggtcctgaacactactcttgtttagttgatctactcggaagagctggtcggctagatgaagccatggagtttatagagtcaatgcctgttgaaccggacggtgctgtttggggtgctctattgggtgcttgtaaaatccataagaatgtggatatggcagagttagcttttgcaaaggtgattgagtttgaacccaataacattggctactatgtattgatgtcaaatatatattcagactcgaaaaaccaagaaggaatctggagaatccgggtaatgatgagagagagagcattcaggaaaaagcctgggtatagttatgtggaacacaagggaagagttcacttgtttttagctggcgatagaagtcatgagcaaacagaggaagtccatagaatgttggatgagttagagacttctgtgatggagcttgcgggaaacatggactgtgatagaggcgaagaggtttcgagcactacccgtgagcatagcgagaggttagcaatagcttttgggattctcaacagtattccaggcacagaaattcttgtgataaagaatttgagggtttgtgaagattgtcatgtgttcctcaagcaggttagcaagattgtagatcgccagtttgttgtaagggatgcatctcggttccactatttcaaagacggggtctgctcgtgcaaagattactggtga

SEQ ID NO: 89861 - protein, 623 aa, Arabidopsis thaliana
  peptide (1)..(623): Ceres Seq. ID no. 12720895
MIVVTSFVRNSAVAAVASTPWNVRLRELAYQSLFSESISLYRSMLRSGSSPDAFSFPFILKSCASLSLPVSGQQLHCHVTKGGCETEPFVLTALISMYCKCGLVADARKVFEENPQSSQLSVCYNALISGYTANSKVTDAAYMFRRMKETGVSVDSVTMLGLVPLCTVPEYLWLGRSLHGQCVKGGLDSEVAVLNSFITMYMKCGSVEAGRRLFDEMPVKGLITWNAVISGYSQNGLAYDVLELYEQMKSSGVCPDPFTLVSVLSSCAHLGAKKIGHEVGKLVESNGFVPNVFVSNASISMYARCGNLAKARAVFDIMPVKSLVSWTAMIGCYGMHGMGEIGLMLFDDMIKRGIRPDGAVFVMVLSACSHSGLTDKGLELFRAMKREYKLEPGPEHYSCLVDLLGRAGRLDEAMEFIESMPVEPDGAVWGALLGACKIHKNVDMAELAFAKVIEFEPNNIGYYVLMSNIYSDSKNQEGIWRIRVMMRERAFRKKPGYSYVEHKGRVHLFLAGDRSHEQTEEVHRMLDELETSVMELAGNMDCDRGEEVSSTTREHSERLAIAFGILNSIPGTEILVIKNLRVCEDCHVFLKQVSKIVDRQFVVRDASRFHYFKDGVCSCKDYW

SEQ ID NO: 89862 - protein, 580 aa, Arabidopsis thaliana
  peptide (1)..(580): Ceres Seq. ID no. 12720896
MLRSGSSPDAFSFPFILKSCASLSLPVSGQQLHCHVTKGGCETEPFVLTALISMYCKCGLVADARKVFEENPQSSQLSVCYNALISGYTANSKVTDAAYMFRRMKETGVSVDSVTMLGLVPLCTVPEYLWLGRSLHGQCVKGGLDSEVAVLNSFITMYMKCGSVEAGRRLFDEMPVKGLITWNAVISGYSQNGLAYDVLELYEQMKSSGVCPDPFTLVSVLSSCAHLGAKKIGHEVGKLVESNGFVPNVFVSNASISMYARCGNLAKARAVFDIMPVKSLVSWTAMIGCYGMHGMGEIGLMLFDDMIKRGIRPDGAVFVMVLSACSHSGLTDKGLELFRAMKREYKLEPGPEHYSCLVDLLGRAGRLDEAMEFIESMPVEPDGAVWGALLGACKIHKNVDMAELAFAKVIEFEPNNIGYYVLMSNIYSDSKNQEGIWRIRVMMRERAFRKKPGYSYVEHKGRVHLFLAGDRSHEQTEEVHRMLDELETSVMELAGNMDCDRGEEVSSTTREHSERLAIAFGILNSIPGTEILVIKNLRVCEDCHVFLKQVSKIVDRQFVVRDASRFHYFKDGVCSCKDYW

SEQ ID NO: 89863 - protein, 527 aa, Arabidopsis thaliana
  peptide (1)..(527): Ceres Seq. ID no. 12720897
MYCKCGLVADARKVFEENPQSSQLSVCYNALISGYTANSKVTDAAYMFRRMKETGVSVDSVTMLGLVPLCTVPEYLWLGRSLHGQCVKGGLDSEVAVLNSFITMYMKCGSVEAGRRLFDEMPVKGLITWNAVISGYSQNGLAYDVLELYEQMKSSGVCPDPFTLVSVLSSCAHLGAKKIGHEVGKLVESNGFVPNVFVSNASISMYARCGNLAKARAVFDIMPVKSLVSWTAMIGCYGMHGMGEIGLMLFDDMIKRGIRPDGAVFVMVLSACSHSGLTDKGLELFRAMKREYKLEPGPEHYSCLVDLLGRAGRLDEAMEFIESMPVEPDGAVWGALLGACKIHKNVDMAELAFAKVIEFEPNNIGYYVLMSNIYSDSKNQEGIWRIRVMMRERAFRKKPGYSYVEHKGRVHLFLAGDRSHEQTEEVHRMLDELETSVMELAGNMDCDRGEEVSSTTREHSERLAIAFGILNSIPGTEILVIKNLRVCEDCHVFLKQVSKIVDRQFVVRDASRFHYFKDGVCSCKDYW

SEQ ID NO: 89864 - DNA, 2174 bp, Arabidopsis thaliana
  misc_feature (1)..(2174): Ceres Seq. ID no. 12720909
  misc_feature (1)..(2174): Ortholog of  Ceres SEQ ID NO 14307827 as cited in SEQ ID NO 54367
agtctgatcaaaaaacctcaaaacacagcaaccgccatttctttccaaattcccccaattcccattccaactttatcttctgaagtagaagaagaagccatagaaatgctttgaagtttctgtaaagagaaagatctacaattgttttgaatatgccgaggcagaatcaaagcgtagagaatctacttctacttggcaaaatcaggaaacgtggttgttcttcgccgacatcgtcgacttcttcgattctccgtgaaggttatagattcaaaagagcgatagttgttggtaaaagaggaggatccactactcctgtacctacatggagacttatgggtcgatctccttctccacgagcttccggtgctttacacgctgctgcttctccgtcgtctcactgcgggagcaaaaccggtaaagtatcagctcctgctcctgtttcagctaggaagttagctgcgacgctttgggagatgaacgagatgccttcacctagagttgtggaggaggctgcgccaatgattagaaagagtagaaaggagagaatcgcgccgcttcctccgccgagatcatcggttcattctggttctctaccgcctcatctttctgatccgtcgcatagtccagtctctgagaggatggaaagatcagggactgggagtcgccagagaagagcttcatcaactgtgcaaaagcttaggcttggagactgcaatgtgggggctagggatcctattaacagtggcagcttcatggatattgagactcgatcacgggtggagacaccgactgggtcaactgtgggtgtcaaaacacggttgaaggattgtagtaacgctctcacaacatcaaaagagcttctcaaaatcattaacagaatgtggggtcaagacgaccgcccatcttctagcatgtccctcgtctctgctttacattctgagctcgaaagagctcgcttacaggtcaatcagttaatccacgaacataaaccggaaaacaacgacattagctacttgatgaagcgttttgccgaagagaaagctgtgtggaaaagcaacgagcaagaagttgttgaggctgcaatcgaatctgttgctggtgagctagaagtggagaggaagctgaggagacggtttgagagcttgaacaagaaattgggcaaagaattggctgaaacaaaatcagctctgatgaaagcagttaaagaaatcgagaacgagaagcgagcgagagtgatggttgagaaagtttgtgatgaactagcaagagacataagcgaagacaaagccgaagttgaagaactgaagagagaatcttttaaagtcaaagaagaagtcgaaaaggaaagagagatgttgcagttagcagatgcattgcgggaagagagagtacagatgaaactatcggaggctaaacaccagctcgaggagaaaaacgcagctgttgataagctaagaaaccagcttcaaacttacctcaaagcaaaaagatgtaaagagaagacccgtgaaccacctcaaactcagctacataacgaagaggctggagattatttaaaccatcacatcagttttggatcatataacatcgaagatggagaagtcgagaatggaaatgaagaaggttcaggcgaaagcgaccttcattccatagaactgaacatagacaacaagagctataaatggccttatggtgaagagaacagaggaagaaaatcaacgccaaggaaaagcctttctttacaaagaagcatatcggattgtgttgattgggttgtacagagcgagaagcttcaaaaaagtggagatggagggttggattggggaagatctattgacgttgagcctaaagggtatatagatgaaacacaagcttataaaccaaacaaggcttcttcaaaagatcaccatatcctctcgggttcgagactaagtaacttccgcggtggatctgtttcaaagtcgcggttatcggatgcttcgaaaggcgagaaccagaatgccagaaaatcaagatggtaatatgatcaagaaattttattcacattttcagcgcagagataacagaatctaaagactttacatctacattttttctctgttcgctcgttttgtcaagagtgattctctcatctgtaagtgacataaaacatgaatttgaactggtaatgatcc

SEQ ID NO: 89865 - protein, 622 aa, Arabidopsis thaliana
  peptide (1)..(622): Ceres Seq. ID no. 12720910
MPRQNQSVENLLLLGKIRKRGCSSPTSSTSSILREGYRFKRAIVVGKRGGSTTPVPTWRLMGRSPSPRASGALHAAASPSSHCGSKTGKVSAPAPVSARKLAATLWEMNEMPSPRVVEEAAPMIRKSRKERIAPLPPPRSSVHSGSLPPHLSDPSHSPVSERMERSGTGSRQRRASSTVQKLRLGDCNVGARDPINSGSFMDIETRSRVETPTGSTVGVKTRLKDCSNALTTSKELLKIINRMWGQDDRPSSSMSLVSALHSELERARLQVNQLIHEHKPENNDISYLMKRFAEEKAVWKSNEQEVVEAAIESVAGELEVERKLRRRFESLNKKLGKELAETKSALMKAVKEIENEKRARVMVEKVCDELARDISEDKAEVEELKRESFKVKEEVEKEREMLQLADALREERVQMKLSEAKHQLEEKNAAVDKLRNQLQTYLKAKRCKEKTREPPQTQLHNEEAGDYLNHHISFGSYNIEDGEVENGNEEGSGESDLHSIELNIDNKSYKWPYGEENRGRKSTPRKSLSLQRSISDCVDWVVQSEKLQKSGDGGLDWGRSIDVEPKGYIDETQAYKPNKASSKDHHILSGSRLSNFRGGSVSKSRLSDASKGENQNARKSRW

SEQ ID NO: 89866 - protein, 562 aa, Arabidopsis thaliana
  peptide (1)..(562): Ceres Seq. ID no. 12720911
MGRSPSPRASGALHAAASPSSHCGSKTGKVSAPAPVSARKLAATLWEMNEMPSPRVVEEAAPMIRKSRKERIAPLPPPRSSVHSGSLPPHLSDPSHSPVSERMERSGTGSRQRRASSTVQKLRLGDCNVGARDPINSGSFMDIETRSRVETPTGSTVGVKTRLKDCSNALTTSKELLKIINRMWGQDDRPSSSMSLVSALHSELERARLQVNQLIHEHKPENNDISYLMKRFAEEKAVWKSNEQEVVEAAIESVAGELEVERKLRRRFESLNKKLGKELAETKSALMKAVKEIENEKRARVMVEKVCDELARDISEDKAEVEELKRESFKVKEEVEKEREMLQLADALREERVQMKLSEAKHQLEEKNAAVDKLRNQLQTYLKAKRCKEKTREPPQTQLHNEEAGDYLNHHISFGSYNIEDGEVENGNEEGSGESDLHSIELNIDNKSYKWPYGEENRGRKSTPRKSLSLQRSISDCVDWVVQSEKLQKSGDGGLDWGRSIDVEPKGYIDETQAYKPNKASSKDHHILSGSRLSNFRGGSVSKSRLSDASKGENQNARKSRW

SEQ ID NO: 89867 - protein, 515 aa, Arabidopsis thaliana
  peptide (1)..(515): Ceres Seq. ID no. 12720912
MNEMPSPRVVEEAAPMIRKSRKERIAPLPPPRSSVHSGSLPPHLSDPSHSPVSERMERSGTGSRQRRASSTVQKLRLGDCNVGARDPINSGSFMDIETRSRVETPTGSTVGVKTRLKDCSNALTTSKELLKIINRMWGQDDRPSSSMSLVSALHSELERARLQVNQLIHEHKPENNDISYLMKRFAEEKAVWKSNEQEVVEAAIESVAGELEVERKLRRRFESLNKKLGKELAETKSALMKAVKEIENEKRARVMVEKVCDELARDISEDKAEVEELKRESFKVKEEVEKEREMLQLADALREERVQMKLSEAKHQLEEKNAAVDKLRNQLQTYLKAKRCKEKTREPPQTQLHNEEAGDYLNHHISFGSYNIEDGEVENGNEEGSGESDLHSIELNIDNKSYKWPYGEENRGRKSTPRKSLSLQRSISDCVDWVVQSEKLQKSGDGGLDWGRSIDVEPKGYIDETQAYKPNKASSKDHHILSGSRLSNFRGGSVSKSRLSDASKGENQNARKSRW

SEQ ID NO: 89868 - DNA, 1968 bp, Arabidopsis thaliana
  misc_feature (1)..(1968): Ceres Seq. ID no. 12720913
  misc_feature (1)..(1968): Ortholog of  Ceres SEQ ID NO 15177043 as cited in SEQ ID NO 57425
aaaactcacatctatctctatctctcttctctgtctctcactctccactttccgatcaccgacgattcaacaaaacatagtaaaaaacaaagcaaattctttttttctccttagttacttcttctacagattatctcaatcttacagagcaccatggatcgttgtatctatggttgctccgtcattactatcttcttctccttcttcttcctcctcaatgcatccgctttagaatcgggtcaccacaacataactgggtcgggtcaaataaactcaaactccgtcctcgtagctctcctcgattctcgttacactgaactcgccgagctagttgagaaggctcttcttctccaaaccctcgaagacgccgttggtcgtcacaatattactattttcgccccacgcaatgaagcactcgagcgtgaccttgacccggattttaaacggttcttgctccaaccaggtaacctcaaatctctccaaacgcttctcttgtctcacattatccccaaacgagtcgggtcaaaccaatggcctgaggagaattcgggtcgggtcaaacacgtcacgttagggcatgaccaagtgctgcatttgagtaaactcaaaggaacaaatggaaagagattggtgaattccgctgtaattacccgacccgatgatttaacccgacccgacgggttgatccacggaatcgaacggcttttaatccctcgttccgttcaagaagatttcaaccgacggagaaatctccgatcaatctccgccgtattacccgaaggagctccggaaatcgacccgagaaccaaccgtctcaagaaatctgccaccgccgtctcagtacccgccggatctccaccagtgcttccgattgaatccgctatggctccaggtccatcgctagctccggctccggctccaggacctggaggtgcacacaaacatttcaacggcgatgctcaggtcaaagatttcatccacacattgttacattacggtggatacaacgaaatggcggatattctcgtgaatctgacgtcacttgcgacggagatgggtcgattggtgtcagaaggttacgtcctcaccgtgttagctccgaacgatgaagctatggggaaattaacgactgatcagcttagcgagcccggagctccggagcaaattatgtattaccacattattccagagtatcagacggaggaaagcatgtataattctgttaggagatttgggaaggtgaagtatgaaacgctgcgttttcctcacaaggttggggctaaagaagctgatggctcggttaaattcggttctggtgaccggtcggcttatttgtttgatccggatatttacaccgatggtcgcatttcggttcaggggattgatggtgttttgttcccagaggagaaggaagaagagacggttaagaaaccgaccggtccggttaagaaagttgttcagccgagaagagggaagttgctggaagtagcatgtagtatgcttggagctattgggaaggactcatatctaagcagatgctgatgaattcacaaacctgaagagattattgaaggaaaatctctcaagtgttatctgtaaacacacacaaaaggttctttggagcagaatgaaagatttagaagaagagcaaaaaaaaaaaaaaaaaacaagagagtaatacatcaatgtccaaaacttcaaaagaatattcttcagtggaatatgagaatagggtttgttgagtttttttatataaaaaatattttttttgggtggggttttgattttggggttataaatactgtaattagatataagaactcattttttcaattgatttggtgtatgaaaaatgaatcaaaaagtggggagcaaaagaaaaagtcttgagaacccaccaccactttctttcttctacttggtcctttatttgtgaatggtttggtaagtaaaatttccacttaattg

SEQ ID NO: 89869 - protein, 462 aa, Arabidopsis thaliana
  peptide (1)..(462): Ceres Seq. ID no. 12720914
MDRCIYGCSVITIFFSFFFLLNASALESGHHNITGSGQINSNSVLVALLDSRYTELAELVEKALLLQTLEDAVGRHNITIFAPRNEALERDLDPDFKRFLLQPGNLKSLQTLLLSHIIPKRVGSNQWPEENSGRVKHVTLGHDQVLHLSKLKGTNGKRLVNSAVITRPDDLTRPDGLIHGIERLLIPRSVQEDFNRRRNLRSISAVLPEGAPEIDPRTNRLKKSATAVSVPAGSPPVLPIESAMAPGPSLAPAPAPGPGGAHKHFNGDAQVKDFIHTLLHYGGYNEMADILVNLTSLATEMGRLVSEGYVLTVLAPNDEAMGKLTTDQLSEPGAPEQIMYYHIIPEYQTEESMYNSVRRFGKVKYETLRFPHKVGAKEADGSVKFGSGDRSAYLFDPDIYTDGRISVQGIDGVLFPEEKEEETVKKPTGPVKKVVQPRRGKLLEVACSMLGAIGKDSYLSRC

SEQ ID NO: 89870 - DNA, 2109 bp, Arabidopsis thaliana
  misc_feature (1)..(2109): Ceres Seq. ID no. 12720922
  misc_feature (1)..(2109): Ortholog of  Ceres SEQ ID NO 14308243 as cited in SEQ ID NO 60493
atggtggtgaagatgatgaagtggcggccatggccgccgttagttacgaggaaatacgaggtgaagctttccgtgaagaagcttgagggttgggatctggtgagggaaggtgtaccggagaaagatagattaacggtggagattcgttggaaaggtcctaaggcgacattgggatctttgagaaggtcggtgaagaggaatttcaccaaggaagctgtgggagaaagcgatgtcgtttcatgggaagatgaagagtttcagagcttatgttcactcacttcttacaaggacagtttgttttatccttgggagataactttctctgtcttcaccaatggaatgaagcaagggcagaagaataaagctcctgttgttggaacggcatttttgaatcttgctgagtacgcgtgtgtgaccgataaaaaagaattcgatataaacataccacttacgctctctgcttgtgtggcctctgagacacatcctttgctctttgtatcattgagcctgcttgagcttagaactactccagaaacatcagactcggcagcacaaaccgcggttgtgcctttgcctctcccatctccatcgccacaacagcctactgaaactcactcagttgagaaggaggatgtctctgcaatcaaagctggtctcagaaaagtcaagattttcacagagtttgtttctacaaggaaagccaagaaggcttgcagggaagaagaaggcagattctcaagctttgaatcatcagaatcgcttgatgatttcgagacagattttgatgaaggcaaagaagaattgatgagtatgagaaaatctttctcttatggacctttgtcttatgcaaatggtgtgggaacttcattaaactgtggcgcgaaagttagcgatgaagacgaagattgggtttattatagccacaggaaatcagacgttggagcaggttgctctgatgctgaagattccgctgcgggtttggtgtatgaggcatcactgcttccacggcgtagcatattgccatggagaaagaggaagttgagctttaggtctccgaaatccaaaggagagcctttgttaaagaaggataatggagaagaaggtggagatgacattgattttgatcggaggcaacttagctcagatgaagctcatcctccatttgggagcaagattgatgaagattcatctgctaatccacgaacttcgttctcggagtttggagaagacagttttgcgattggaagttgggaggagaaagaagtgataagccgagatggacacatgaagctccagacaagtgtctttcttgcttctattgaccagagaagcgagcgagcagctggtgagagtgcatgcactgctcttgtagcggtcattgcggattggtttcagaagaatggtaatctcatgccaatcaagtctcagttcgatagtttgatcagagaaggttctttagaatggagaaacctctgcgaaaacgaaacgtatatgcagaaattccctgacaagcatttcgatcttgataccgtgctacaagcaaagatacggcctctaaccgttatccccggaaaatcctttgttgggtttttccatcctgatgggatgatcaacgagggtagattcgagtttctacaaggcgcaatgtctttcgatagtatttgggctgaaattattagtctggaggaaagctcggcgaatggtgatagctatgatgatgattcgccaccgcacgtttacatagtgagttggaacgatcacttctttgtcctcaaagttgaaaaagaagcttactatatcattgacacacttggagaaaggctttacgagggttgtgatcaagcttacgttttgaaattcgaccataaaaccgtcatccacaagattcttcacacagaggaagcaggatccgaatcagaacctgaatcagagattttgagcagagggaaggagtcatgtaaagagtatattaagaatttcttggcggccataccaattagggagttgcaagaggatatcaagaaaggattagcctcaaccgcgcctgttcatcaccgtttacagatcgagtttcattacaccacaaacgcagagattaccagtctataa

SEQ ID NO: 89871 - protein, 702 aa, Arabidopsis thaliana
  peptide (1)..(702): Ceres Seq. ID no. 12720923
MVVKMMKWRPWPPLVTRKYEVKLSVKKLEGWDLVREGVPEKDRLTVEIRWKGPKATLGSLRRSVKRNFTKEAVGESDVVSWEDEEFQSLCSLTSYKDSLFYPWEITFSVFTNGMKQGQKNKAPVVGTAFLNLAEYACVTDKKEFDINIPLTLSACVASETHPLLFVSLSLLELRTTPETSDSAAQTAVVPLPLPSPSPQQPTETHSVEKEDVSAIKAGLRKVKIFTEFVSTRKAKKACREEEGRFSSFESSESLDDFETDFDEGKEELMSMRKSFSYGPLSYANGVGTSLNCGAKVSDEDEDWVYYSHRKSDVGAGCSDAEDSAAGLVYEASLLPRRSILPWRKRKLSFRSPKSKGEPLLKKDNGEEGGDDIDFDRRQLSSDEAHPPFGSKIDEDSSANPRTSFSEFGEDSFAIGSWEEKEVISRDGHMKLQTSVFLASIDQRSERAAGESACTALVAVIADWFQKNGNLMPIKSQFDSLIREGSLEWRNLCENETYMQKFPDKHFDLDTVLQAKIRPLTVIPGKSFVGFFHPDGMINEGRFEFLQGAMSFDSIWAEIISLEESSANGDSYDDDSPPHVYIVSWNDHFFVLKVEKEAYYIIDTLGERLYEGCDQAYVLKFDHKTVIHKILHTEEAGSESEPESEILSRGKESCKEYIKNFLAAIPIRELQEDIKKGLASTAPVHHRLQIEFHYTTNAEITSL

SEQ ID NO: 89872 - protein, 698 aa, Arabidopsis thaliana
  peptide (1)..(698): Ceres Seq. ID no. 12720924
MMKWRPWPPLVTRKYEVKLSVKKLEGWDLVREGVPEKDRLTVEIRWKGPKATLGSLRRSVKRNFTKEAVGESDVVSWEDEEFQSLCSLTSYKDSLFYPWEITFSVFTNGMKQGQKNKAPVVGTAFLNLAEYACVTDKKEFDINIPLTLSACVASETHPLLFVSLSLLELRTTPETSDSAAQTAVVPLPLPSPSPQQPTETHSVEKEDVSAIKAGLRKVKIFTEFVSTRKAKKACREEEGRFSSFESSESLDDFETDFDEGKEELMSMRKSFSYGPLSYANGVGTSLNCGAKVSDEDEDWVYYSHRKSDVGAGCSDAEDSAAGLVYEASLLPRRSILPWRKRKLSFRSPKSKGEPLLKKDNGEEGGDDIDFDRRQLSSDEAHPPFGSKIDEDSSANPRTSFSEFGEDSFAIGSWEEKEVISRDGHMKLQTSVFLASIDQRSERAAGESACTALVAVIADWFQKNGNLMPIKSQFDSLIREGSLEWRNLCENETYMQKFPDKHFDLDTVLQAKIRPLTVIPGKSFVGFFHPDGMINEGRFEFLQGAMSFDSIWAEIISLEESSANGDSYDDDSPPHVYIVSWNDHFFVLKVEKEAYYIIDTLGERLYEGCDQAYVLKFDHKTVIHKILHTEEAGSESEPESEILSRGKESCKEYIKNFLAAIPIRELQEDIKKGLASTAPVHHRLQIEFHYTTNAEITSL

SEQ ID NO: 89873 - protein, 697 aa, Arabidopsis thaliana
  peptide (1)..(697): Ceres Seq. ID no. 12720925
MKWRPWPPLVTRKYEVKLSVKKLEGWDLVREGVPEKDRLTVEIRWKGPKATLGSLRRSVKRNFTKEAVGESDVVSWEDEEFQSLCSLTSYKDSLFYPWEITFSVFTNGMKQGQKNKAPVVGTAFLNLAEYACVTDKKEFDINIPLTLSACVASETHPLLFVSLSLLELRTTPETSDSAAQTAVVPLPLPSPSPQQPTETHSVEKEDVSAIKAGLRKVKIFTEFVSTRKAKKACREEEGRFSSFESSESLDDFETDFDEGKEELMSMRKSFSYGPLSYANGVGTSLNCGAKVSDEDEDWVYYSHRKSDVGAGCSDAEDSAAGLVYEASLLPRRSILPWRKRKLSFRSPKSKGEPLLKKDNGEEGGDDIDFDRRQLSSDEAHPPFGSKIDEDSSANPRTSFSEFGEDSFAIGSWEEKEVISRDGHMKLQTSVFLASIDQRSERAAGESACTALVAVIADWFQKNGNLMPIKSQFDSLIREGSLEWRNLCENETYMQKFPDKHFDLDTVLQAKIRPLTVIPGKSFVGFFHPDGMINEGRFEFLQGAMSFDSIWAEIISLEESSANGDSYDDDSPPHVYIVSWNDHFFVLKVEKEAYYIIDTLGERLYEGCDQAYVLKFDHKTVIHKILHTEEAGSESEPESEILSRGKESCKEYIKNFLAAIPIRELQEDIKKGLASTAPVHHRLQIEFHYTTNAEITSL

SEQ ID NO: 89874 - DNA, 2913 bp, Arabidopsis thaliana
  misc_feature (1)..(2913): Ceres Seq. ID no. 12720952
  misc_feature (1)..(2913): Ortholog of  Ceres SEQ ID NO 13523550 as cited in SEQ ID NO 58816
atggatcctcctgtgtcggatcttgagagtattgaagatcagaaagaaggaggaccttcctttcactgtgatctttacgatacacaagtagttcacaagattgctcaggtttttctccctggtttagccactgcttgtgtcgataacactaccggagatatcttcaggagtcctggttctgttgctgctgacattcgaaaagaaatgatagagtacttgactcgtagaagcgaaacctttgtggctgaacacattgttcttcaaggaggttctgagattgaagcttctcatgatccttttgacattatatctgatttcatcgatgatttcgccacttctaagcggaatttgttcagccgggtttcgggttggatgcttagcgaaaggagagaagataatatcgatgatttcgcgcaagagatggagataagcgggttttggttgactgatcatagagaaggtatcgctcagactttgcttaaaaacgttgattttaaaagcagtgcacattgtgagatgaaattccaaaccgaaggagaactcgccgagcacgccatgaattgtgggtatagaacaatgaactgtgagaatgagggttgtactgcggtgttttgtgcgaatcagatggagaatcacgattctgtttgcccgttcaagatcattccgtgtgagcagaactgctcagagagtatcatgagacgtgatatggataggcattgtataaccgtatgtcctatgaaacttgtcaactgtccatttcattctgttggttgtctctctgatgtacatcaatgtgaggtccaacaacatcatttggataatgttagctctcatttgatgtacattcttcggagtatttacaaggaagcatctctggatgatctcaaaccccgagctgaacagatacagcagttgtctactaggttatctgaagctcgtaatgcaagatcactaacaaatctggtcaaggaaattgatggaaagctggggcctttagaaatcaaaccaaagattgttactgactcggaatccgataaacctgaaaatacagaaaagaaagccttagaagaagctgagattaaagaaaaaccagagacgagtaacttaaaagctgttacattggagcaaaccgcgagagaagctccggaagataaattggtttcaaaagaagtagatgctgcaatggtgaaagaagctgcaaagaaagtttcagaagctgagatagcagacaatgttaatgaagaaggcgaattaaaagcgcagaagcttttagaaataggcgagttcatcaaagaaggagacaacaactctgcagatgatttatcagagagaaccgaaaccaaagctccagaagttgtggtcatggatgaggctagagaggaggaggatagtgtagagacaaaagacacaagaacatatgaaacaatcagaggtttagagattgaagccaatgaaatgattgatgaagagacaaagaaatcgactgaaaccaaaaccgaagctccatcaagaatagtcatggacaaagagggggatgaagagacaaagaaatcaactgaaacagaaaccgaagctccatcgagaatagtcatggagacagagaaggatgaagagactatgaactctagggctcgtgcttcggatgaagctgaagcactgtcaaagagctctcaagtggcatcaatggagctctcgatctcacaatcaccgcgtgttcggttctcgtctctggcgcctcgtttcttagcagcttctcatcatcatcgtccttctgtgcatttagctgggaagtttataagcctccctcgagatgttcgcttcacgagcttatcaacttcaagaatgcgcatattagccgttgctttgacttttaagtcaagatgtgtttatgtgaactatgagattcctaaagatcaaatcttggttggtgctgctgagtctgatgatccagtgctggatagaattgcccggttccaaaatgcttgctggagatttcttagaccccatacaatccgcggaacagctttaggatccactgccttggtgacaagagctttgatagagaacactcatttgatcaaatggagtcttgtactaaaggcactttcaggtcttcttgctcttatttgtgggaatggttatatagtcggcatcaatcagatctacgacattggaatcgacaaagtgaacaaaccatacttgccaatagcagcaggagatctatcagtgcagtctgcttggttgttagtgatattttttgcgatagcagggcttttagttgtcggatttaactttggtccattcattacaagcctatactctcttggcctttttctgggaaccatctattctgttccacccctcagaatgaaaagattcccagttgcagcatttcttattattgccacggtacgaggtttccttcttaactttggtgtgtaccatgctacaagagctgctcttggacttccatttcagtggagtgcacctgtggcgttcatcacatcttttgtgacactgtttgcactggtcattgctattacaaaggaccttcctgatgttgaaggagatcgaaagttccaaatatcaaccctggcaacaaaacttggagtgagaaacattgcattcctcggttctggacttctgctagtaaattatgtttcagccatatcactagctttctacatgcctcagtatgcagctttgaaaagaccaaccctcttatcctttaacaatgaacaggtttttagaggtagcttgatgattcctgcacatgtgatcttggcttcaggcttaattttccagacatgggtactagaaaaagcaaactacaccaaggaagctatctcaggatattatcggtttatatggaatctcttctacgcagagtatctgttattccccttcctctag

SEQ ID NO: 89875 - protein, 970 aa, Arabidopsis thaliana
  peptide (1)..(970): Ceres Seq. ID no. 12720953
MDPPVSDLESIEDQKEGGPSFHCDLYDTQVVHKIAQVFLPGLATACVDNTTGDIFRSPGSVAADIRKEMIEYLTRRSETFVAEHIVLQGGSEIEASHDPFDIISDFIDDFATSKRNLFSRVSGWMLSERREDNIDDFAQEMEISGFWLTDHREGIAQTLLKNVDFKSSAHCEMKFQTEGELAEHAMNCGYRTMNCENEGCTAVFCANQMENHDSVCPFKIIPCEQNCSESIMRRDMDRHCITVCPMKLVNCPFHSVGCLSDVHQCEVQQHHLDNVSSHLMYILRSIYKEASLDDLKPRAEQIQQLSTRLSEARNARSLTNLVKEIDGKLGPLEIKPKIVTDSESDKPENTEKKALEEAEIKEKPETSNLKAVTLEQTAREAPEDKLVSKEVDAAMVKEAAKKVSEAEIADNVNEEGELKAQKLLEIGEFIKEGDNNSADDLSERTETKAPEVVVMDEAREEEDSVETKDTRTYETIRGLEIEANEMIDEETKKSTETKTEAPSRIVMDKEGDEETKKSTETETEAPSRIVMETEKDEETMNSRARASDEAEALSKSSQVASMELSISQSPRVRFSSLAPRFLAASHHHRPSVHLAGKFISLPRDVRFTSLSTSRMRILAVALTFKSRCVYVNYEIPKDQILVGAAESDDPVLDRIARFQNACWRFLRPHTIRGTALGSTALVTRALIENTHLIKWSLVLKALSGLLALICGNGYIVGINQIYDIGIDKVNKPYLPIAAGDLSVQSAWLLVIFFAIAGLLVVGFNFGPFITSLYSLGLFLGTIYSVPPLRMKRFPVAAFLIIATVRGFLLNFGVYHATRAALGLPFQWSAPVAFITSFVTLFALVIAITKDLPDVEGDRKFQISTLATKLGVRNIAFLGSGLLLVNYVSAISLAFYMPQYAALKRPTLLSFNNEQVFRGSLMIPAHVILASGLIFQTWVLEKANYTKEAISGYYRFIWNLFYAEYLLFPFL

SEQ ID NO: 89876 - protein, 902 aa, Arabidopsis thaliana
  peptide (1)..(902): Ceres Seq. ID no. 12720954
MIEYLTRRSETFVAEHIVLQGGSEIEASHDPFDIISDFIDDFATSKRNLFSRVSGWMLSERREDNIDDFAQEMEISGFWLTDHREGIAQTLLKNVDFKSSAHCEMKFQTEGELAEHAMNCGYRTMNCENEGCTAVFCANQMENHDSVCPFKIIPCEQNCSESIMRRDMDRHCITVCPMKLVNCPFHSVGCLSDVHQCEVQQHHLDNVSSHLMYILRSIYKEASLDDLKPRAEQIQQLSTRLSEARNARSLTNLVKEIDGKLGPLEIKPKIVTDSESDKPENTEKKALEEAEIKEKPETSNLKAVTLEQTAREAPEDKLVSKEVDAAMVKEAAKKVSEAEIADNVNEEGELKAQKLLEIGEFIKEGDNNSADDLSERTETKAPEVVVMDEAREEEDSVETKDTRTYETIRGLEIEANEMIDEETKKSTETKTEAPSRIVMDKEGDEETKKSTETETEAPSRIVMETEKDEETMNSRARASDEAEALSKSSQVASMELSISQSPRVRFSSLAPRFLAASHHHRPSVHLAGKFISLPRDVRFTSLSTSRMRILAVALTFKSRCVYVNYEIPKDQILVGAAESDDPVLDRIARFQNACWRFLRPHTIRGTALGSTALVTRALIENTHLIKWSLVLKALSGLLALICGNGYIVGINQIYDIGIDKVNKPYLPIAAGDLSVQSAWLLVIFFAIAGLLVVGFNFGPFITSLYSLGLFLGTIYSVPPLRMKRFPVAAFLIIATVRGFLLNFGVYHATRAALGLPFQWSAPVAFITSFVTLFALVIAITKDLPDVEGDRKFQISTLATKLGVRNIAFLGSGLLLVNYVSAISLAFYMPQYAALKRPTLLSFNNEQVFRGSLMIPAHVILASGLIFQTWVLEKANYTKEAISGYYRFIWNLFYAEYLLFPFL

SEQ ID NO: 89877 - protein, 846 aa, Arabidopsis thaliana
  peptide (1)..(846): Ceres Seq. ID no. 12720955
MLSERREDNIDDFAQEMEISGFWLTDHREGIAQTLLKNVDFKSSAHCEMKFQTEGELAEHAMNCGYRTMNCENEGCTAVFCANQMENHDSVCPFKIIPCEQNCSESIMRRDMDRHCITVCPMKLVNCPFHSVGCLSDVHQCEVQQHHLDNVSSHLMYILRSIYKEASLDDLKPRAEQIQQLSTRLSEARNARSLTNLVKEIDGKLGPLEIKPKIVTDSESDKPENTEKKALEEAEIKEKPETSNLKAVTLEQTAREAPEDKLVSKEVDAAMVKEAAKKVSEAEIADNVNEEGELKAQKLLEIGEFIKEGDNNSADDLSERTETKAPEVVVMDEAREEEDSVETKDTRTYETIRGLEIEANEMIDEETKKSTETKTEAPSRIVMDKEGDEETKKSTETETEAPSRIVMETEKDEETMNSRARASDEAEALSKSSQVASMELSISQSPRVRFSSLAPRFLAASHHHRPSVHLAGKFISLPRDVRFTSLSTSRMRILAVALTFKSRCVYVNYEIPKDQILVGAAESDDPVLDRIARFQNACWRFLRPHTIRGTALGSTALVTRALIENTHLIKWSLVLKALSGLLALICGNGYIVGINQIYDIGIDKVNKPYLPIAAGDLSVQSAWLLVIFFAIAGLLVVGFNFGPFITSLYSLGLFLGTIYSVPPLRMKRFPVAAFLIIATVRGFLLNFGVYHATRAALGLPFQWSAPVAFITSFVTLFALVIAITKDLPDVEGDRKFQISTLATKLGVRNIAFLGSGLLLVNYVSAISLAFYMPQYAALKRPTLLSFNNEQVFRGSLMIPAHVILASGLIFQTWVLEKANYTKEAISGYYRFIWNLFYAEYLLFPFL

SEQ ID NO: 89878 - DNA, 3093 bp, Arabidopsis thaliana
  misc_feature (1)..(3093): Ceres Seq. ID no. 12720964
  misc_feature (1)..(3093): Ortholog of  Ceres SEQ ID NO 13600310 as cited in SEQ ID NO 5086
  misc_feature (1)..(3093): Ortholog of  Ceres SEQ ID NO 15180362 as cited in SEQ ID NO 0
atggcatctagacaaggatcaaaatcgagaaaagcagggttaaagggtgctgattctactgcatcttcgacaacctcgtcttcgaagctttatcaagagacttctatagatggccatagctcccctgcttcttcatctgctcaaagcaagcagcagttcttctcaccagatcccttaccacaaactgctcagcggtctaaagaaaacgtcacagtgacagttcgctttcgcccactcagtccaagggaaattcgccaaggggaggaggttgcatggtatgcagatggggaaactatcgtgcgaaatgagcataatccgacaatagcttatgcctatgaccgtgtctttggacctacaaccacaacacgcaatgtctatgatattgctgcacaccatgttgttaatggggctatggaggggataaatgggaccattttcgcatatggagtgacaagcagtggaaagacacacacaatgcatggtgaccagagatctcctggtattataccgttagcagtgaaagatgctttcagcatcatccaagagactcctaatcgagaatttcttctgcgtatttcctacatggaaatatataatgaggttgtcaatgatttgttgaatccagcaggacacaatttgaggatcagagaagacaagcagggaacctttgtcgaagggattaaagaagaagttgttttatcccctgctcatgcgctttctcttattgcagctggagaagagcaacgacatgttggatccacaaattttaatttgctcagcagccggagccatacaatatttacgttgacgatagaaagtagtcccttaggtgacaagagtaaaggtgaagctgtacacctctcacaactgaacctcgttgatctggcaggttccgagagttcaaaggttgaaaccagtggtgtaagacgcaaagaaggatcatatataaataaaagtttgctgacgttagggactgtgatatcaaagcttacggatgtgagggcttcacatgtaccatacagagactctaagttaaccaggatccttcagtcctcattgagtggtcatgaccgagtatctctcatttgtaccgtcactcctgcatcaagcagttcggaagaaacacacaatacactgaaatttgctcatcgtgcaaagcatattgagattcaagctgaacaaaacaagataattgatgagaaatcattaatcaagaagtaccaacgcgagattcgtcaactgaaggaagagttggaacagcttaaacaggaaattgtaccagttcctcagctgaaggatattggtgcagatgatattgttcttctgaagcagaagctagaagatggtcaagtcaagctgcaatctagactcgaagaagaggaagaagctaaagcagctctcctgagtcgaatccaaagattgacgaaattaattttggtgtcgactaaaaatccacaagcatctcgattacctcatcgttttaatccgcggaggagacattcatttggggaagaagagcttgcttacctaccatacaagaggcgggacatgatggacgatgagcaacttgacctgtatgtttctgtggagggaaatcatgagattagagataatgcgtatagagaagaaaaaaagacccgcaagcacggattgttaaattggttaaagcctaagaaaagagatcacagttcaagtgccagcgaccagtcaagtgtggtcaaatctaacagcacaccatcaactcctcaagggggaggcagtcatctgcacacagaatcaagactttcagaaggctcgcctttgatggaacaactctcagagcctagggaagacagagaagctttagaagacagttcccatgaaatggagattccggagactagcaataaaatgagcgatgagttggatcttttgagggaacagaaaaagatattatctgaagaggcggcactgcaattaagttctttaaaacggatgtcagatgaagctgcaaagtcccctcaaaatgaggagattaatgaggaaattaaagtactcaatgacgacatcaaagcaaagaatgaccagattgctacgttggagagacagataatggattttgttatgacatctcatgaggcattggataaatctgatatcatgcaggcagttgctgagctgagggatcaacttaatgagaaatcttttgaactcgaggtgatcgaattgtttctgtttatgcaatttttcttcatctatgcagaagttagagatggttttgctattgcctggataagattattcattttagctcaatattatctctcctcatacctgaataaagtttcttctgtgtatattataaaataccagtattcaaaacgccagactatattaacaatgaagctaatggttaaagctgcagataatcgcatcattcagcaaacactcaatgaaaagacatgtgaatgtgaagtgttgcaagaagaagttgcaaatctaaagcagcagctctctgaggccctggaactagcacagggaactaagattaaagagctgaaacaagacgccaaggaactaagtgaatcaaaggagcagttagaactcagaaacaggaaacttgcagaagagagttcatatgcaaaaggtcttgcatcagcagctgcagttgagctcaaggcattatccgaagaagttgcaaagcttatgaatcagaacgagagactagcagctgagctggcaacacagaagagcccaatcgcacaacgaaataagacaggaacaacaacaaatgtaaggaacaatggaagaagagagagtcttgcaaagaggcaagaacatgacagcccatcaatggagctgaagagagaactgaggatgagtaaggaacgtgagctatcgtatgaagctgcacttggtgaaaaagaacaaagagaagctgagcttgaaaggatattagaagaaacaaaacagagagaagcatatctggagaatgagcttgctaatatgtgggttcttgtttctaagctgagaagatctcaaggagcagattcagaaatctctgattctatatcagagacgcgacaaacggaacaaacggaaggttcattttga

SEQ ID NO: 89879 - protein, 1030 aa, Arabidopsis thaliana
  peptide (1)..(1030): Ceres Seq. ID no. 12720965
MASRQGSKSRKAGLKGADSTASSTTSSSKLYQETSIDGHSSPASSSAQSKQQFFSPDPLPQTAQRSKENVTVTVRFRPLSPREIRQGEEVAWYADGETIVRNEHNPTIAYAYDRVFGPTTTTRNVYDIAAHHVVNGAMEGINGTIFAYGVTSSGKTHTMHGDQRSPGIIPLAVKDAFSIIQETPNREFLLRISYMEIYNEVVNDLLNPAGHNLRIREDKQGTFVEGIKEEVVLSPAHALSLIAAGEEQRHVGSTNFNLLSSRSHTIFTLTIESSPLGDKSKGEAVHLSQLNLVDLAGSESSKVETSGVRRKEGSYINKSLLTLGTVISKLTDVRASHVPYRDSKLTRILQSSLSGHDRVSLICTVTPASSSSEETHNTLKFAHRAKHIEIQAEQNKIIDEKSLIKKYQREIRQLKEELEQLKQEIVPVPQLKDIGADDIVLLKQKLEDGQVKLQSRLEEEEEAKAALLSRIQRLTKLILVSTKNPQASRLPHRFNPRRRHSFGEEELAYLPYKRRDMMDDEQLDLYVSVEGNHEIRDNAYREEKKTRKHGLLNWLKPKKRDHSSSASDQSSVVKSNSTPSTPQGGGSHLHTESRLSEGSPLMEQLSEPREDREALEDSSHEMEIPETSNKMSDELDLLREQKKILSEEAALQLSSLKRMSDEAAKSPQNEEINEEIKVLNDDIKAKNDQIATLERQIMDFVMTSHEALDKSDIMQAVAELRDQLNEKSFELEVIELFLFMQFFFIYAEVRDGFAIAWIRLFILAQYYLSSYLNKVSSVYIIKYQYSKRQTILTMKLMVKAADNRIIQQTLNEKTCECEVLQEEVANLKQQLSEALELAQGTKIKELKQDAKELSESKEQLELRNRKLAEESSYAKGLASAAAVELKALSEEVAKLMNQNERLAAELATQKSPIAQRNKTGTTTNVRNNGRRESLAKRQEHDSPSMELKRELRMSKERELSYEAALGEKEQREAELERILEETKQREAYLENELANMWVLVSKLRRSQGADSEISDSISETRQTEQTEGSF

SEQ ID NO: 89880 - protein, 893 aa, Arabidopsis thaliana
  peptide (1)..(893): Ceres Seq. ID no. 12720966
MEGINGTIFAYGVTSSGKTHTMHGDQRSPGIIPLAVKDAFSIIQETPNREFLLRISYMEIYNEVVNDLLNPAGHNLRIREDKQGTFVEGIKEEVVLSPAHALSLIAAGEEQRHVGSTNFNLLSSRSHTIFTLTIESSPLGDKSKGEAVHLSQLNLVDLAGSESSKVETSGVRRKEGSYINKSLLTLGTVISKLTDVRASHVPYRDSKLTRILQSSLSGHDRVSLICTVTPASSSSEETHNTLKFAHRAKHIEIQAEQNKIIDEKSLIKKYQREIRQLKEELEQLKQEIVPVPQLKDIGADDIVLLKQKLEDGQVKLQSRLEEEEEAKAALLSRIQRLTKLILVSTKNPQASRLPHRFNPRRRHSFGEEELAYLPYKRRDMMDDEQLDLYVSVEGNHEIRDNAYREEKKTRKHGLLNWLKPKKRDHSSSASDQSSVVKSNSTPSTPQGGGSHLHTESRLSEGSPLMEQLSEPREDREALEDSSHEMEIPETSNKMSDELDLLREQKKILSEEAALQLSSLKRMSDEAAKSPQNEEINEEIKVLNDDIKAKNDQIATLERQIMDFVMTSHEALDKSDIMQAVAELRDQLNEKSFELEVIELFLFMQFFFIYAEVRDGFAIAWIRLFILAQYYLSSYLNKVSSVYIIKYQYSKRQTILTMKLMVKAADNRIIQQTLNEKTCECEVLQEEVANLKQQLSEALELAQGTKIKELKQDAKELSESKEQLELRNRKLAEESSYAKGLASAAAVELKALSEEVAKLMNQNERLAAELATQKSPIAQRNKTGTTTNVRNNGRRESLAKRQEHDSPSMELKRELRMSKERELSYEAALGEKEQREAELERILEETKQREAYLENELANMWVLVSKLRRSQGADSEISDSISETRQTEQTEGSF

SEQ ID NO: 89881 - protein, 872 aa, Arabidopsis thaliana
  peptide (1)..(872): Ceres Seq. ID no. 12720967
MHGDQRSPGIIPLAVKDAFSIIQETPNREFLLRISYMEIYNEVVNDLLNPAGHNLRIREDKQGTFVEGIKEEVVLSPAHALSLIAAGEEQRHVGSTNFNLLSSRSHTIFTLTIESSPLGDKSKGEAVHLSQLNLVDLAGSESSKVETSGVRRKEGSYINKSLLTLGTVISKLTDVRASHVPYRDSKLTRILQSSLSGHDRVSLICTVTPASSSSEETHNTLKFAHRAKHIEIQAEQNKIIDEKSLIKKYQREIRQLKEELEQLKQEIVPVPQLKDIGADDIVLLKQKLEDGQVKLQSRLEEEEEAKAALLSRIQRLTKLILVSTKNPQASRLPHRFNPRRRHSFGEEELAYLPYKRRDMMDDEQLDLYVSVEGNHEIRDNAYREEKKTRKHGLLNWLKPKKRDHSSSASDQSSVVKSNSTPSTPQGGGSHLHTESRLSEGSPLMEQLSEPREDREALEDSSHEMEIPETSNKMSDELDLLREQKKILSEEAALQLSSLKRMSDEAAKSPQNEEINEEIKVLNDDIKAKNDQIATLERQIMDFVMTSHEALDKSDIMQAVAELRDQLNEKSFELEVIELFLFMQFFFIYAEVRDGFAIAWIRLFILAQYYLSSYLNKVSSVYIIKYQYSKRQTILTMKLMVKAADNRIIQQTLNEKTCECEVLQEEVANLKQQLSEALELAQGTKIKELKQDAKELSESKEQLELRNRKLAEESSYAKGLASAAAVELKALSEEVAKLMNQNERLAAELATQKSPIAQRNKTGTTTNVRNNGRRESLAKRQEHDSPSMELKRELRMSKERELSYEAALGEKEQREAELERILEETKQREAYLENELANMWVLVSKLRRSQGADSEISDSISETRQTEQTEGSF

SEQ ID NO: 89882 - DNA, 669 bp, Arabidopsis thaliana
  misc_feature (1)..(669): Ceres Seq. ID no. 12720976
  misc_feature (1)..(669): Ortholog of  Ceres SEQ ID NO 14308640 as cited in SEQ ID NO 60489
  misc_feature (1)..(669): Ortholog of  Ceres SEQ ID NO 12619999 as cited in SEQ ID NO 66123
  misc_feature (1)..(669): Ortholog of  Ceres SEQ ID NO 13656436 as cited in SEQ ID NO 69154
atgtctaatttgtatggagattataaccaaaagatcgattacgtcttcaaagtcgtgttgatcggtgattctgccgttggcaaaactcagcttcttgctcggttcgctaggaatgagtttagcgtcgattctaaagccaccattggtgttgaattccagactaaaacgctcgtcattgataacaaaaccgtcaaagctcagatttgggatactgctggccaagaaagatatagggcggtgacaagtgcatactaccgtggagcagttggggcaatgttggtctacgacatgaccaaacgtcaatcattcgatcacatggctaaatggctggaagagttacgaggacatgcggacaagaacatagtgattatgctaattgggaacaaatgtgatcttggaagcctaagagcagtgccaacagaagacgcacaagagtttgcacaaagagaaaacttgtttttcatggaaacctctgctctagaagctaccaatgttgaaacagcatttttgaccatcttaacagagatctaccgaataatcagcaagaaatcactaacggctgatgatgatgacgccgatggtaattcaagtctcttgaaaggaactagaatcatcatcccgagcgagcaagagagtgggaaaagaggtggatgttgcggcaaatcgtaa

SEQ ID NO: 89883 - protein, 222 aa, Arabidopsis thaliana
  peptide (1)..(222): Ceres Seq. ID no. 12720977
MSNLYGDYNQKIDYVFKVVLIGDSAVGKTQLLARFARNEFSVDSKATIGVEFQTKTLVIDNKTVKAQIWDTAGQERYRAVTSAYYRGAVGAMLVYDMTKRQSFDHMAKWLEELRGHADKNIVIMLIGNKCDLGSLRAVPTEDAQEFAQRENLFFMETSALEATNVETAFLTILTEIYRIISKKSLTADDDDADGNSSLLKGTRIIIPSEQESGKRGGCCGKS

SEQ ID NO: 89884 - protein, 131 aa, Arabidopsis thaliana
  peptide (1)..(131): Ceres Seq. ID no. 12720978
MLVYDMTKRQSFDHMAKWLEELRGHADKNIVIMLIGNKCDLGSLRAVPTEDAQEFAQRENLFFMETSALEATNVETAFLTILTEIYRIISKKSLTADDDDADGNSSLLKGTRIIIPSEQESGKRGGCCGKS

SEQ ID NO: 89885 - protein, 126 aa, Arabidopsis thaliana
  peptide (1)..(126): Ceres Seq. ID no. 12720979
MTKRQSFDHMAKWLEELRGHADKNIVIMLIGNKCDLGSLRAVPTEDAQEFAQRENLFFMETSALEATNVETAFLTILTEIYRIISKKSLTADDDDADGNSSLLKGTRIIIPSEQESGKRGGCCGKS

SEQ ID NO: 89886 - DNA, 789 bp, Arabidopsis thaliana
  misc_feature (1)..(789): Ceres Seq. ID no. 12720980
  misc_feature (1)..(789): Ortholog of  Ceres SEQ ID NO 15172803 as cited in SEQ ID NO 52102
  misc_feature (1)..(789): Ortholog of  Ceres SEQ ID NO 12593499 as cited in SEQ ID NO 68777
atggagaatgatggaagatccaatgagaaaaatctgtacgaggttcttggtgttgaagcaacagcatctccacaagagataaggaaagcgtatcataagttagcattgaggcttcatcctgataaaaacaaggatgatgaggatgctaaagagaaatttcagcagttgcaaaaggttatttcgattctcggtgatgaagagaaaagagcagtctatgatcaaactggctcagttgatgatgctgatctttcgggagatgtggttgacaacttgagggacttcttcaaggcaatgtacaagaaggtcaccgaggaagatattgaagagtttgaggccaactataggggttctgaatccgagaagaatgatttgattgagctatataacaagtttaagggtaaaatgagcaggcttttctgctcaatgctttgctcgaaccccaagcttgattcgcaccgtttcaaagatattatcgatgaggccattgcagcgggagaagtgaaatcaacaaaagcttacaagaaatgggcaaaggagattgcagaaatggaacctcccacgaatccccagaagatgagacggaaagcagcaaaggctgcagataaagatttatacgctgtaatgtcccagcggggagatgagaggaaagagaagttcgattcaatgttctcttcacttgtctctaggtatggtagcaatgctgactctgagccaaacgaagaagagttcgaagctgctcagagaaaagttgaaagccggagatcatcgaagaagtctagaaaaaaataa

SEQ ID NO: 89887 - protein, 262 aa, Arabidopsis thaliana
  peptide (1)..(262): Ceres Seq. ID no. 12720981
MENDGRSNEKNLYEVLGVEATASPQEIRKAYHKLALRLHPDKNKDDEDAKEKFQQLQKVISILGDEEKRAVYDQTGSVDDADLSGDVVDNLRDFFKAMYKKVTEEDIEEFEANYRGSESEKNDLIELYNKFKGKMSRLFCSMLCSNPKLDSHRFKDIIDEAIAAGEVKSTKAYKKWAKEIAEMEPPTNPQKMRRKAAKAADKDLYAVMSQRGDERKEKFDSMFSSLVSRYGSNADSEPNEEEFEAAQRKVESRRSSKKSRKK

SEQ ID NO: 89888 - protein, 165 aa, Arabidopsis thaliana
  peptide (1)..(165): Ceres Seq. ID no. 12720982
MYKKVTEEDIEEFEANYRGSESEKNDLIELYNKFKGKMSRLFCSMLCSNPKLDSHRFKDIIDEAIAAGEVKSTKAYKKWAKEIAEMEPPTNPQKMRRKAAKAADKDLYAVMSQRGDERKEKFDSMFSSLVSRYGSNADSEPNEEEFEAAQRKVESRRSSKKSRKK

SEQ ID NO: 89889 - DNA, 848 bp, Arabidopsis thaliana
  misc_feature (1)..(848): Ceres Seq. ID no. 12721000
  misc_feature (1)..(848): Ortholog of  Ceres SEQ ID NO 14316118 as cited in SEQ ID NO 52391
  misc_feature (1)..(848): Ortholog of  Ceres SEQ ID NO 14316060 as cited in SEQ ID NO 52465
  misc_feature (1)..(848): Ortholog of  Ceres SEQ ID NO 15177246 as cited in SEQ ID NO 57731
  misc_feature (1)..(848): Ortholog of  Ceres SEQ ID NO 13664032 as cited in SEQ ID NO 67527
cgacagggattccggtggagggcaaaacgggaacaaccagaacggacagtcctccttgtctccaagagagcaagacaggttcttgccgatcgctaacgtcagccggatcatgaagaaggccttgcccgccaacgccaagatctctaaagatgccaaagagacgatgcaggagtgtgtctccgagttcatcagcttcgtcaccggagaagcatctgataagtgtcagaaggagaagaggaagacgatcaacggagacgatttgctctgggctatgactactctaggttttgaggattatgttgagccattgaaagtttacttgcagaggtttagggagatcgaaggggagaggactggactagggaggccacagactggtggtgaggtcggagagcatcagagagatgctgtcggagatggcggtgggttctacggtggtggtggtgggatgcagtatcaccaacatcatcagtttcttcaccagcagaaccatatgtatggagccacaggtggcggtagcgacagtggaggtggagctgcctccggtaggacaaggacttaacaaagattggtgaagtggatctctctctgtatatagatacataaatacatgtatacacatgcctatttttacgacccatataaggtatctatcatgtgatagaacgaacattggtgttggtgatgtaaaatcagatgtgcattaagggtttagattttgaggctgtgtaaagaagatcaagtgtgcttgttgaacaataggattcactaacgaatctgcttcattgaatcttgtatgtaactaaagccattgtattgaatgcaaatgttttcatttgggatgcttt

SEQ ID NO: 89890 - protein, 186 aa, Arabidopsis thaliana
  peptide (1)..(186): Ceres Seq. ID no. 12721001
DRDSGGGQNGNNQNGQSSLSPREQDRFLPIANVSRIMKKALPANAKISKDAKETMQECVSEFISFVTGEASDKCQKEKRKTINGDDLLWAMTTLGFEDYVEPLKVYLQRFREIEGERTGLGRPQTGGEVGEHQRDAVGDGGGFYGGGGGMQYHQHHQFLHQQNHMYGATGGGSDSGGGAASGRTRT

SEQ ID NO: 89891 - protein, 150 aa, Arabidopsis thaliana; identical to SEQ ID NO: 48331
  peptide (1)..(150): Ceres Seq. ID no. 12721002

SEQ ID NO: 89892 - protein, 132 aa, Arabidopsis thaliana; identical to SEQ ID NO: 48332
  peptide (1)..(132): Ceres Seq. ID no. 12721003

SEQ ID NO: 89893 - DNA, 661 bp, Arabidopsis thaliana
  misc_feature (1)..(661): Ceres Seq. ID no. 12721011
  misc_feature (1)..(661): Ortholog of  Ceres SEQ ID NO 13597546 as cited in SEQ ID NO 65017
accaagaaatgtataggttataagagaagtgtacttgatattcggaaaaaaaaaaaaccaaaaactaggtaggttaagattattcaaacttcaaaggcaaaaccaaatgagcttcgtgtggtccgctgcggtgtgggtcatagctgtagccgctgttgtgattagcaaatggttataccgatggtcgaacccgaagtgcaatggcaagttaccaccgggatcaatgggtttaccgatcatcggagagacatgcgacttctttgagccccatggattatacgagatctcaccctttgtcaagaagaggatgttaaagtacgggccattgtttcggacaaatattttcggatcgaacaccgtggttttgacagaacctgatatcatcttcgaagtttttcggcaagagaacaagtcttttgtgtttagctatccagaagcttttgtcaagccatttggaaaagaaaacgtgttcctcaaacatggaaacatccacaagcacgtcaagcaaatcagtcttcaacatcttggctctgaggctttaaaaaaaaagatgataggagaaatagacagagtaacctatgagcatcttagatcgaaggctaaccagggtagcttcgatgctaaggaggcagttgaaagtgtacttacataatttcttaat

SEQ ID NO: 89894 - protein, 181 aa, Arabidopsis thaliana
  peptide (1)..(181): Ceres Seq. ID no. 12721012
MSFVWSAAVWVIAVAAVVISKWLYRWSNPKCNGKLPPGSMGLPIIGETCDFFEPHGLYEISPFVKKRMLKYGPLFRTNIFGSNTVVLTEPDIIFEVFRQENKSFVFSYPEAFVKPFGKENVFLKHGNIHKHVKQISLQHLGSEALKKKMIGEIDRVTYEHLRSKANQGSFDAKEAVESVLT

SEQ ID NO: 89895 - protein, 142 aa, Arabidopsis thaliana
  peptide (1)..(142): Ceres Seq. ID no. 12721013
MGLPIIGETCDFFEPHGLYEISPFVKKRMLKYGPLFRTNIFGSNTVVLTEPDIIFEVFRQENKSFVFSYPEAFVKPFGKENVFLKHGNIHKHVKQISLQHLGSEALKKKMIGEIDRVTYEHLRSKANQGSFDAKEAVESVLT

SEQ ID NO: 89896 - protein, 114 aa, Arabidopsis thaliana
  peptide (1)..(114): Ceres Seq. ID no. 12721014
MLKYGPLFRTNIFGSNTVVLTEPDIIFEVFRQENKSFVFSYPEAFVKPFGKENVFLKHGNIHKHVKQISLQHLGSEALKKKMIGEIDRVTYEHLRSKANQGSFDAKEAVESVLT

SEQ ID NO: 89897 - DNA, 1161 bp, Arabidopsis thaliana
  misc_feature (1)..(1161): Ceres Seq. ID no. 12721188
  misc_feature (1)..(1161): Ortholog of  Ceres SEQ ID NO 14313155 as cited in SEQ ID NO 54706
  misc_feature (1)..(1161): Ortholog of  Ceres SEQ ID NO 13639022 as cited in SEQ ID NO 59811
atggccgggatcttgaataaattgcggaatctagatgcatatcctaagatcaatgaagatttttacagccgtacattatccggcggagttatcactctcctctcctccgttgttatgttccttctcttcttctccgagctccgtctttatcttcatacagtcaccgagacgaagcttatagtagatacttcaaggggagagacgttacgcatcaactttgatattacgtttcctgctctagcatgttcgattcttagtgttgatgctatggatattagtggagagcttcatcttgacgtgaaacatgatatcataaagagaagattagattctaatggcaacactatagaggcaagacaggacggaataggcgctactaagattgaaaacccactgcagaaacatggtggcaggctgggacataatgagacttactgtggttcttgctatggggctgaagcggaagagcatgactgctgcaattcgtgtgaggatgttcgtgaagcatatagaaagaaaggttggggggttactaatccagatttgattgaccagtgtaaacgagaaggttttctacaaagagtaaaggatgaagaaggtgaagggtgtaatatatatgggttcttggaggtcaataaggtggctgggaacttccactttgctcctgggaaaagctttcatcagtcgggcgtgcatgttcacgatcttcttgcttttcagaaagacagttttaacataagtcacaagatcaatagacttacttatggagactactttcctggcgtcgttaaccctcttgacaaagtcgagtggagtcaagacacacctaatgctatgtaccaatactttatcaaggttgtaccaacagtatacacagatatcagaggacacacaattcaatcgaatcagttctcagtgaccgaacatgtaaagagctcagaagcaggtcaactgcaatctttacctggagttttcttcttctatgatctctctccaatcaaggtaacatttacggaggaacacatatcattcttgcacttcttgacgaatgtttgcgccatagttggaggtgtcttcacagtgtccgggataatagacgcgtttatataccatggtcaaaaagctatcaagaagaagatggaaattggtaaatttagctaa

SEQ ID NO: 89898 - protein, 386 aa, Arabidopsis thaliana
  peptide (1)..(386): Ceres Seq. ID no. 12721189
MAGILNKLRNLDAYPKINEDFYSRTLSGGVITLLSSVVMFLLFFSELRLYLHTVTETKLIVDTSRGETLRINFDITFPALACSILSVDAMDISGELHLDVKHDIIKRRLDSNGNTIEARQDGIGATKIENPLQKHGGRLGHNETYCGSCYGAEAEEHDCCNSCEDVREAYRKKGWGVTNPDLIDQCKREGFLQRVKDEEGEGCNIYGFLEVNKVAGNFHFAPGKSFHQSGVHVHDLLAFQKDSFNISHKINRLTYGDYFPGVVNPLDKVEWSQDTPNAMYQYFIKVVPTVYTDIRGHTIQSNQFSVTEHVKSSEAGQLQSLPGVFFFYDLSPIKVTFTEEHISFLHFLTNVCAIVGGVFTVSGIIDAFIYHGQKAIKKKMEIGKFS

SEQ ID NO: 89899 - protein, 348 aa, Arabidopsis thaliana
  peptide (1)..(348): Ceres Seq. ID no. 12721190
MFLLFFSELRLYLHTVTETKLIVDTSRGETLRINFDITFPALACSILSVDAMDISGELHLDVKHDIIKRRLDSNGNTIEARQDGIGATKIENPLQKHGGRLGHNETYCGSCYGAEAEEHDCCNSCEDVREAYRKKGWGVTNPDLIDQCKREGFLQRVKDEEGEGCNIYGFLEVNKVAGNFHFAPGKSFHQSGVHVHDLLAFQKDSFNISHKINRLTYGDYFPGVVNPLDKVEWSQDTPNAMYQYFIKVVPTVYTDIRGHTIQSNQFSVTEHVKSSEAGQLQSLPGVFFFYDLSPIKVTFTEEHISFLHFLTNVCAIVGGVFTVSGIIDAFIYHGQKAIKKKMEIGKFS

SEQ ID NO: 89900 - protein, 297 aa, Arabidopsis thaliana
  peptide (1)..(297): Ceres Seq. ID no. 12721191
MDISGELHLDVKHDIIKRRLDSNGNTIEARQDGIGATKIENPLQKHGGRLGHNETYCGSCYGAEAEEHDCCNSCEDVREAYRKKGWGVTNPDLIDQCKREGFLQRVKDEEGEGCNIYGFLEVNKVAGNFHFAPGKSFHQSGVHVHDLLAFQKDSFNISHKINRLTYGDYFPGVVNPLDKVEWSQDTPNAMYQYFIKVVPTVYTDIRGHTIQSNQFSVTEHVKSSEAGQLQSLPGVFFFYDLSPIKVTFTEEHISFLHFLTNVCAIVGGVFTVSGIIDAFIYHGQKAIKKKMEIGKFS

SEQ ID NO: 89901 - DNA, 1401 bp, Arabidopsis thaliana
  misc_feature (1)..(1401): Ceres Seq. ID no. 12721292
  misc_feature (1)..(1401): Ortholog of  Ceres SEQ ID NO 12584790 as cited in SEQ ID NO 62648
atggataaaaaagcagcgcagagaattgcgatggaatacagagctatgatctcgaaagaatctttgttcagtattggtcaaaactcgaacaatatatacgaatggactgcagtgatccggggtccagatggcactccctatgaaggtggcatgtttaatctcagtattaagtttcctacggattatccttttaaaccacccaagtttacgtttaaaactccgatttaccatccaaatatcaatgatgaaggatcgatttgcatgaacattcttaaagacaaatggactcctgctcttatggttgaaaaggtgcttctgtcaatacttttactattggaaaaaccaaacccagatgatcctcttgtacctgaaattggacagctcttcaagaataacagattccaatttgaccagagagctcgagaattcactgctcgacataggtgcgcttgtaaagtaatattcacggcttttgaagattacttggtggaggaaaatgatcaggtggacaaggaatatattaacactaaatgtttagaagtcaaaaagatgatgtggaagtgttgtactaagactaactctgattactatcagccgtttctaatggcgaagaaagctgttgaggaagagaattctaaagagctcgtagctttatctcgcaagtcgcaagcattctctgaagcaagccgaggagtgattgaggtgagcttttacaatgtgaaaggagattacaagtgtaaaagtgtctacgcacgtggtagctccgtccgggatctgcggagattctcctggatattcggtaggtcagtttcgagatatcaggtccgctccgcgaatatcttcctgttagttcctaggttgttattcgcttacctcccttcatcaggtgatcaggcttatcaggcccaaataaccttttgcgtatgtgggctcatcagttgcgcaagtcctctacttggtgggcttggtgggcttagtgggctggcctgttgttgtcgttgttgcttgacggacaaacactttgctgctagcattggttgtcacagtattaaactagctatggaggctataaccctccagatcgacaaactaatgcagtctcaaacacagatagacaagttgttccagtgtcaacaaaagcttgaggccatggtgacagcgttggtttctcaacagagtggcgaacaagtcaaccgagctccagactccaacttggtagcttccggtgagctcacctcatcatcatcgttaacaccgagacccctagatcctcctgatttaaacgaatatggtcagctttatatgggtttcgtggatggctttaccgatgtgagcagttcaaaagcattggagtggcatcataactacatacgtgatcggtttgatatgttcccatcttga

SEQ ID NO: 89902 - protein, 466 aa, Arabidopsis thaliana
  peptide (1)..(466): Ceres Seq. ID no. 12721293
MDKKAAQRIAMEYRAMISKESLFSIGQNSNNIYEWTAVIRGPDGTPYEGGMFNLSIKFPTDYPFKPPKFTFKTPIYHPNINDEGSICMNILKDKWTPALMVEKVLLSILLLLEKPNPDDPLVPEIGQLFKNNRFQFDQRAREFTARHRCACKVIFTAFEDYLVEENDQVDKEYINTKCLEVKKMMWKCCTKTNSDYYQPFLMAKKAVEEENSKELVALSRKSQAFSEASRGVIEVSFYNVKGDYKCKSVYARGSSVRDLRRFSWIFGRSVSRYQVRSANIFLLVPRLLFAYLPSSGDQAYQAQITFCVCGLISCASPLLGGLGGLSGLACCCRCCLTDKHFAASIGCHSIKLAMEAITLQIDKLMQSQTQIDKLFQCQQKLEAMVTALVSQQSGEQVNRAPDSNLVASGELTSSSSLTPRPLDPPDLNEYGQLYMGFVDGFTDVSSSKALEWHHNYIRDRFDMFPS

SEQ ID NO: 89903 - protein, 456 aa, Arabidopsis thaliana
  peptide (1)..(456): Ceres Seq. ID no. 12721294
MEYRAMISKESLFSIGQNSNNIYEWTAVIRGPDGTPYEGGMFNLSIKFPTDYPFKPPKFTFKTPIYHPNINDEGSICMNILKDKWTPALMVEKVLLSILLLLEKPNPDDPLVPEIGQLFKNNRFQFDQRAREFTARHRCACKVIFTAFEDYLVEENDQVDKEYINTKCLEVKKMMWKCCTKTNSDYYQPFLMAKKAVEEENSKELVALSRKSQAFSEASRGVIEVSFYNVKGDYKCKSVYARGSSVRDLRRFSWIFGRSVSRYQVRSANIFLLVPRLLFAYLPSSGDQAYQAQITFCVCGLISCASPLLGGLGGLSGLACCCRCCLTDKHFAASIGCHSIKLAMEAITLQIDKLMQSQTQIDKLFQCQQKLEAMVTALVSQQSGEQVNRAPDSNLVASGELTSSSSLTPRPLDPPDLNEYGQLYMGFVDGFTDVSSSKALEWHHNYIRDRFDMFPS

SEQ ID NO: 89904 - protein, 451 aa, Arabidopsis thaliana
  peptide (1)..(451): Ceres Seq. ID no. 12721295
MISKESLFSIGQNSNNIYEWTAVIRGPDGTPYEGGMFNLSIKFPTDYPFKPPKFTFKTPIYHPNINDEGSICMNILKDKWTPALMVEKVLLSILLLLEKPNPDDPLVPEIGQLFKNNRFQFDQRAREFTARHRCACKVIFTAFEDYLVEENDQVDKEYINTKCLEVKKMMWKCCTKTNSDYYQPFLMAKKAVEEENSKELVALSRKSQAFSEASRGVIEVSFYNVKGDYKCKSVYARGSSVRDLRRFSWIFGRSVSRYQVRSANIFLLVPRLLFAYLPSSGDQAYQAQITFCVCGLISCASPLLGGLGGLSGLACCCRCCLTDKHFAASIGCHSIKLAMEAITLQIDKLMQSQTQIDKLFQCQQKLEAMVTALVSQQSGEQVNRAPDSNLVASGELTSSSSLTPRPLDPPDLNEYGQLYMGFVDGFTDVSSSKALEWHHNYIRDRFDMFPS

SEQ ID NO: 89905 - DNA, 1746 bp, Arabidopsis thaliana
  misc_feature (1)..(1746): Ceres Seq. ID no. 12721362
  misc_feature (1)..(1746): Ortholog of  Ceres SEQ ID NO 15178169 as cited in SEQ ID NO 58511
aacttggtggcgtcttctctaaccaaccaaccaatcgtctctagtcaaagagaaaaagagcgagcatggaggcaaagctagaaatccttattccgtagtagggaagagaaacagagagaagaaagacgatgaactgttggagagtgttgaaatccgtacaagcctcggtggctcactgctttctcttctctttcacgctcgctttggtgctcaagctcgatcactccattacttactcctggtgggttgtgtgtctaccactgtgggctttccatgctgttgttgcaaggggaagattctcgcttcctgctccaatcgctcctcgtaaccgtcattgggctccatgtcatgctattgtctcaacaccgttgcttatagctttcgaattactcctctgtgtatacctcgagactgcatatgctgattcgccgccagctgtgagcttgaagattgtatttctccctttattggcgtttgaagtaataatactggtggacaatgcgagaatgtgtcgggcactgatgcctggagatgaagagagcgtgaatgatgaagcagtatgggaagctcttcctcatttctgggttgcgatctccatggtgttctttctcgctgctacagtctttaccctccttaagctgtctggcgatgtagctgctcttggctggtgggatttattcattaatttcggaatcgcagagtgctttgcgtttcttgtttgtacaaaatggtctaatccagtgattcatagaagctcacgtgatagagaaactgggtcatcttctaccaatattagatatcttgactggaacagtggccttggggttttttcagaagacgataggaaccaagatacatgtggcctgcaagacattggtggtcatataatgaaaatccccctcattgtatttcaagtggtactttgcatgcatctagaggggactcctgaagctgctaagtctatatctgtccctgtcctgttttctccacttttccttttgcaaggcgttggtgttctatttgctgcttctaaactaatagagaaggttgttctactgctgcgtggcgaagatgatacaggattatattttagatttctatccagagcacatgattgcttgggtttcttgcaccatggatccaggctactaggttggtggtcaattgatgaaggaagccgggaggaggaagctcgactatactttgatcaagaatctgggtacaataccttctgtggtcatccgcctgaaatagtcaagaaaatgccgaagaaagagcttgcggaggaggtgtggagacttcaagcagcacttggtgaacaaacagaaatcacgaaattcagtcagcaggaatatgagagactgcaaaatgagaaagtgctgtgtagggtatgttttgaaagagaaatcagtgttgtactgcttccatgtagacaccgtgttctctgcagaaactgttcagacaagtgtaaaaaatgccccttctgccgtataactatcgaagagcggctccccgtatatgatgtttaacatctaactagaccgtcttcgtctcttcgacatcaaatatttaagtgtatatatgtgtgtgtatagatgatatgattattcactcctttaagaaactctacattgctgagtcgttttatttgtgtgaatcagcattgagcataggtcgagcagaagtctattgttggataagatcttatgtcttatgtttaggctttttgtagatattatttacctc

SEQ ID NO: 89906 - protein, 466 aa, Arabidopsis thaliana
  peptide (1)..(466): Ceres Seq. ID no. 12721363
MNCWRVLKSVQASVAHCFLFSFTLALVLKLDHSITYSWWVVCLPLWAFHAVVARGRFSLPAPIAPRNRHWAPCHAIVSTPLLIAFELLLCVYLETAYADSPPAVSLKIVFLPLLAFEVIILVDNARMCRALMPGDEESVNDEAVWEALPHFWVAISMVFFLAATVFTLLKLSGDVAALGWWDLFINFGIAECFAFLVCTKWSNPVIHRSSRDRETGSSSTNIRYLDWNSGLGVFSEDDRNQDTCGLQDIGGHIMKIPLIVFQVVLCMHLEGTPEAAKSISVPVLFSPLFLLQGVGVLFAASKLIEKVVLLLRGEDDTGLYFRFLSRAHDCLGFLHHGSRLLGWWSIDEGSREEEARLYFDQESGYNTFCGHPPEIVKKMPKKELAEEVWRLQAALGEQTEITKFSQQEYERLQNEKVLCRVCFEREISVVLLPCRHRVLCRNCSDKCKKCPFCRITIEERLPVYDV

SEQ ID NO: 89907 - protein, 340 aa, Arabidopsis thaliana
  peptide (1)..(340): Ceres Seq. ID no. 12721364
MCRALMPGDEESVNDEAVWEALPHFWVAISMVFFLAATVFTLLKLSGDVAALGWWDLFINFGIAECFAFLVCTKWSNPVIHRSSRDRETGSSSTNIRYLDWNSGLGVFSEDDRNQDTCGLQDIGGHIMKIPLIVFQVVLCMHLEGTPEAAKSISVPVLFSPLFLLQGVGVLFAASKLIEKVVLLLRGEDDTGLYFRFLSRAHDCLGFLHHGSRLLGWWSIDEGSREEEARLYFDQESGYNTFCGHPPEIVKKMPKKELAEEVWRLQAALGEQTEITKFSQQEYERLQNEKVLCRVCFEREISVVLLPCRHRVLCRNCSDKCKKCPFCRITIEERLPVYDV

SEQ ID NO: 89908 - protein, 335 aa, Arabidopsis thaliana
  peptide (1)..(335): Ceres Seq. ID no. 12721365
MPGDEESVNDEAVWEALPHFWVAISMVFFLAATVFTLLKLSGDVAALGWWDLFINFGIAECFAFLVCTKWSNPVIHRSSRDRETGSSSTNIRYLDWNSGLGVFSEDDRNQDTCGLQDIGGHIMKIPLIVFQVVLCMHLEGTPEAAKSISVPVLFSPLFLLQGVGVLFAASKLIEKVVLLLRGEDDTGLYFRFLSRAHDCLGFLHHGSRLLGWWSIDEGSREEEARLYFDQESGYNTFCGHPPEIVKKMPKKELAEEVWRLQAALGEQTEITKFSQQEYERLQNEKVLCRVCFEREISVVLLPCRHRVLCRNCSDKCKKCPFCRITIEERLPVYDV

SEQ ID NO: 89909 - DNA, 1701 bp, Arabidopsis thaliana
  misc_feature (1)..(1701): Ceres Seq. ID no. 12721384
  misc_feature (1)..(1701): Ortholog of  Ceres SEQ ID NO 15227226 as cited in SEQ ID NO 54691
  misc_feature (1)..(1701): Ortholog of  Ceres SEQ ID NO 14303169 as cited in SEQ ID NO 65741
acagagagtattttttttaggtatcgtgtaatggctttgactacaaaacctcaccatcttcagagatctttcctctctccgtcgcgtgtttccggcgaacgatatttggaatctgcgccatcatgtctgagattccgtcgcagcggtgtccaatgctcggtggtggctaaggagtgcagagtgaaaggagtgaaagcgagacagattattgatagtagagggaatccgacggtggaggttgatctgattaccgatgatctgtatcgttcggctgttccaagtggtgcatctaccgggatctacgaagcgcttgagcttagagatggagacaagagcgtctatggtggtaaaggtgtattacaggctattaaaaacatcaatgaacttgtggctccaaaactcattggagttgacgttaggaaccaagctgatgtcgatgctcttatgctggaactggatgggaccccaaacaagtcgaaactcggggctaatgcgatattaggagtgtcattgagcgtttgcagggcaggtgctggagctaaaggagtgcctttgtacaaacacatccaggaaacatcaggaacaaaggagcttgtcatgccagttcctgcattcaatgtgatcaatggaggcagtcatgctgggaatagtttggctatgcaagagtttatgatactacctgtaggagctacctcattctcggaggccttccagatgggaagtgaagtttatcatacattgaaggggataatcaaaactaagtatggtcaagatgcttgtaatgtcggagatgaaggagggtttgcgccgaatgttcaagataacagagagggactagttctgctcatagatgcaattgaaaaggccggttacactggaaagatcaaaataggaatggatgttgctgcatcagaatttttcatgaaagatggtagatacgatttgaacttcaagaaacagccaaacgatggagctcacgtactgtcagccgagagtcttgctgacctctacagagaattcatcaaggatttcccaattgtctctatcgaagatccttttgaccaggatgattggagctcatgggcttcattgcaatcctctgtggatatccaactcgtgggagatgacttgttagtcactaacccgaagaggatagctgaagctattaagaaacagtcttgcaatgctctactcttgaaggttaaccagattgggacagtcactgagtcaattcaagcagcacttgactcaaaagctgcaggctggggtgtgatggttagtcacaggagtggcgagacagaggataacttcatcgcagatctctctgttggtttagcaagcggacagatcaaaactggtgctccatgccgaagtgaacgattgtcaaaatacaaccagcttctccgtatcgaagaggaactcggcaatgtgcgctacgccggtgaagctttccgatcaccatgagaaattcgagaaaggcactcattggcggcttttgcttacagaattaggtgaaaccaaatgaggtcctcctagtatcagctccgttgtagctgtctctgaaaagtatcagattttctacaaaaacaaataaaagaacagctttttcactgagtcttctgttgtaatgtcattgataccgatataaacatggatcgaccaaagcgtttttcagattaatcagatgctcagagatatgtc

SEQ ID NO: 89910 - protein, 487 aa, Arabidopsis thaliana
  peptide (1)..(487): Ceres Seq. ID no. 12721385
TESIFFRYRVMALTTKPHHLQRSFLSPSRVSGERYLESAPSCLRFRRSGVQCSVVAKECRVKGVKARQIIDSRGNPTVEVDLITDDLYRSAVPSGASTGIYEALELRDGDKSVYGGKGVLQAIKNINELVAPKLIGVDVRNQADVDALMLELDGTPNKSKLGANAILGVSLSVCRAGAGAKGVPLYKHIQETSGTKELVMPVPAFNVINGGSHAGNSLAMQEFMILPVGATSFSEAFQMGSEVYHTLKGIIKTKYGQDACNVGDEGGFAPNVQDNREGLVLLIDAIEKAGYTGKIKIGMDVAASEFFMKDGRYDLNFKKQPNDGAHVLSAESLADLYREFIKDFPIVSIEDPFDQDDWSSWASLQSSVDIQLVGDDLLVTNPKRIAEAIKKQSCNALLLKVNQIGTVTESIQAALDSKAAGWGVMVSHRSGETEDNFIADLSVGLASGQIKTGAPCRSERLSKYNQLLRIEEELGNVRYAGEAFRSP

SEQ ID NO: 89911 - protein, 477 aa, Arabidopsis thaliana
  peptide (1)..(477): Ceres Seq. ID no. 12721386
MALTTKPHHLQRSFLSPSRVSGERYLESAPSCLRFRRSGVQCSVVAKECRVKGVKARQIIDSRGNPTVEVDLITDDLYRSAVPSGASTGIYEALELRDGDKSVYGGKGVLQAIKNINELVAPKLIGVDVRNQADVDALMLELDGTPNKSKLGANAILGVSLSVCRAGAGAKGVPLYKHIQETSGTKELVMPVPAFNVINGGSHAGNSLAMQEFMILPVGATSFSEAFQMGSEVYHTLKGIIKTKYGQDACNVGDEGGFAPNVQDNREGLVLLIDAIEKAGYTGKIKIGMDVAASEFFMKDGRYDLNFKKQPNDGAHVLSAESLADLYREFIKDFPIVSIEDPFDQDDWSSWASLQSSVDIQLVGDDLLVTNPKRIAEAIKKQSCNALLLKVNQIGTVTESIQAALDSKAAGWGVMVSHRSGETEDNFIADLSVGLASGQIKTGAPCRSERLSKYNQLLRIEEELGNVRYAGEAFRSP

SEQ ID NO: 89912 - protein, 339 aa, Arabidopsis thaliana
  peptide (1)..(339): Ceres Seq. ID no. 12721387
MLELDGTPNKSKLGANAILGVSLSVCRAGAGAKGVPLYKHIQETSGTKELVMPVPAFNVINGGSHAGNSLAMQEFMILPVGATSFSEAFQMGSEVYHTLKGIIKTKYGQDACNVGDEGGFAPNVQDNREGLVLLIDAIEKAGYTGKIKIGMDVAASEFFMKDGRYDLNFKKQPNDGAHVLSAESLADLYREFIKDFPIVSIEDPFDQDDWSSWASLQSSVDIQLVGDDLLVTNPKRIAEAIKKQSCNALLLKVNQIGTVTESIQAALDSKAAGWGVMVSHRSGETEDNFIADLSVGLASGQIKTGAPCRSERLSKYNQLLRIEEELGNVRYAGEAFRSP

SEQ ID NO: 89913 - DNA, 1116 bp, Arabidopsis thaliana
  misc_feature (1)..(1116): Ceres Seq. ID no. 12721407
  misc_feature (1)..(1116): Ortholog of  Ceres SEQ ID NO 14308615 as cited in SEQ ID NO 58538
  misc_feature (1)..(1116): Ortholog of  Ceres SEQ ID NO 13585342 as cited in SEQ ID NO 63601
atggcaagtgattcatcaaggaagagctcactaaagccatcttctcgaaagagttttctttttccttctgttgtgattgtcattgttgggataatcgtggcgttgacttatcagtcgaagttgaaacctcctcagccgaagctatgtggctcctcaagtggtccaccgattacagcaccgcggataaagcttcaagatgggaggtatttggcttacaaagagcatggacttccaagagagaaagctaaccgcaaaatcgtcttcatccatggatccgattgttgtagacacgatgccgtcttcgccacgctgctttctccggatttagtagaggaactaggtgtatatatggtttcattcgacagaccaggctattgtgagagtgatccgcatccaagtcgtacaccgcgaagcttggtttcggatattgaagagctcgatgatcaactgagtctaggatcaaagttctacgtgattgggaaatcaatgggaggacaagcggcgtggggatgccttaaccttaagtacatccctcatcgattagccggagtaacactagttgctcctgtggttaactactattggaggaacttacctttgaacgtttccactgaaggttttaactttcaacaaaagagagatcaatgggcggttcgtgttgctcactatgctccttggcttatttattggtggaacacacaaaaatggttccctggttcgagtattgcgaaccgagacagtctcttgtcacaatcggatagagatatcatttcgaagcgtggttatacgaggaaaccacattgggcagaggtaaggcagcaaggaatacatgagagtattaaccgtgacatgatcgttggttttgggaactgggaatttgatcctttagacctagacaatccgtttttgaacaatgaaggctttgtgcatttgtggcagggagatgaggacatgttagtgcctgtgaagctgcagcgttaccttgctcatcagcttccatgggttcactatcatgaggttccgagaagtggccacttcttccacttcactaaaggtgtggttgataacattgtaacgacgctcttaaccaccgatactgatacgattcgtcagtaa

SEQ ID NO: 89914 - protein, 371 aa, Arabidopsis thaliana
  peptide (1)..(371): Ceres Seq. ID no. 12721408
MASDSSRKSSLKPSSRKSFLFPSVVIVIVGIIVALTYQSKLKPPQPKLCGSSSGPPITAPRIKLQDGRYLAYKEHGLPREKANRKIVFIHGSDCCRHDAVFATLLSPDLVEELGVYMVSFDRPGYCESDPHPSRTPRSLVSDIEELDDQLSLGSKFYVIGKSMGGQAAWGCLNLKYIPHRLAGVTLVAPVVNYYWRNLPLNVSTEGFNFQQKRDQWAVRVAHYAPWLIYWWNTQKWFPGSSIANRDSLLSQSDRDIISKRGYTRKPHWAEVRQQGIHESINRDMIVGFGNWEFDPLDLDNPFLNNEGFVHLWQGDEDMLVPVKLQRYLAHQLPWVHYHEVPRSGHFFHFTKGVVDNIVTTLLTTDTDTIRQ

SEQ ID NO: 89915 - protein, 255 aa, Arabidopsis thaliana
  peptide (1)..(255): Ceres Seq. ID no. 12721409
MVSFDRPGYCESDPHPSRTPRSLVSDIEELDDQLSLGSKFYVIGKSMGGQAAWGCLNLKYIPHRLAGVTLVAPVVNYYWRNLPLNVSTEGFNFQQKRDQWAVRVAHYAPWLIYWWNTQKWFPGSSIANRDSLLSQSDRDIISKRGYTRKPHWAEVRQQGIHESINRDMIVGFGNWEFDPLDLDNPFLNNEGFVHLWQGDEDMLVPVKLQRYLAHQLPWVHYHEVPRSGHFFHFTKGVVDNIVTTLLTTDTDTIRQ

SEQ ID NO: 89916 - protein, 209 aa, Arabidopsis thaliana
  peptide (1)..(209): Ceres Seq. ID no. 12721410
MGGQAAWGCLNLKYIPHRLAGVTLVAPVVNYYWRNLPLNVSTEGFNFQQKRDQWAVRVAHYAPWLIYWWNTQKWFPGSSIANRDSLLSQSDRDIISKRGYTRKPHWAEVRQQGIHESINRDMIVGFGNWEFDPLDLDNPFLNNEGFVHLWQGDEDMLVPVKLQRYLAHQLPWVHYHEVPRSGHFFHFTKGVVDNIVTTLLTTDTDTIRQ

SEQ ID NO: 89917 - DNA, 1558 bp, Arabidopsis thaliana
  misc_feature (1)..(1558): Ceres Seq. ID no. 12721415
  misc_feature (1)..(1558): Ortholog of  Ceres SEQ ID NO 13655992 as cited in SEQ ID NO 65504
  misc_feature (1)..(1558): Ortholog of  Ceres SEQ ID NO 13587581 as cited in SEQ ID NO 0
attttcattttcacaagatccttgtgttgatcctatcctctgttcttcctcgatctgcgcaacgttctctctattacttcaaactccattttcatctcgattaacccctcttcctcaattttcctctcagaccaatcttgcttccgcgtccctcctgtgattttccttcaaaaacagagatttatctttgtgtgtggcattcaaatgacgatgggtggtactgaaaagaatgtagagaataaacaatatcgtttgcctcgagaagtcaaggaagctttacaagcaatagcatcagagtgggaagatgtgattgattcaaaggctctgcaagttattcctttaaaaggtgcaatgacaaatgaggtgtttcagatcaaatggccaactagggaaaaaggtccttctcgtaaggttttggttaggatttatggtgaaggtgttgagattttctttgatcgtgaggatgagatcaggacatttgagttcatgtcgaagcatggtcatggacctttgttgttaggtcggtttggtaatggtcgtatcgaagagttcctccatgcacggaccctatctgcttgtgacttgcgtgatcctgaaatatctggtcgaatagcaactaggatgaaggagtttcatggtcttgaaatgcctggtgcgaaaaaggctttgctttgggacagattacgaaattggctcactgcatgcaagagactggcttcaccagaagaagctaagtcctttcgtctcgatgttatggagatggaaattaatatgcttgagaaatctctctttgacaatgatgaaaatattggattttgccacaatgatttacagtatgggaacatcatgatggatgaagagaccaaagcaataaccatcattgattatgaatattcatgctataatcctgtggcttatgacattgccaatcacttctgtgagatggctgccgattaccacactgaaacacctcacatcatggattatagtaaataccctggtgtggaggagcgacaaagatttctgaaaacatatatgagttattcagatgaaaagcccagcgatactatggtcaaaaaactcctagaagacgttgagaaatatacacttgctagtcatctaatttggggtttatggggaattatatcggaacatgtgaatgaaatcgactttgactacatggagtatgcaagacaaaggttcgagcagtattggttaacaaagccgaggctccttgcagcttccgaacacaagtaaatttctatggacccaacccaagaagagtattttgacggtgttaaagaggtatatacacacaaaaaggtgcctgattacaatggtatttcccagcttcaaaaaataagaaaatgtaacgttttctgttttaccctttttacgaggcaaaatgtaatggtcagtagtttataatcaacagttgaagttgtttcagataaaatgtagttctcacaaattaaatcgtttttatttgtcgattatgatttgaaaatgaaagaactttaaagttaaccctcttgggatcattttagttggttcactt

SEQ ID NO: 89918 - protein, 350 aa, Arabidopsis thaliana
  peptide (1)..(350): Ceres Seq. ID no. 12721416
MTMGGTEKNVENKQYRLPREVKEALQAIASEWEDVIDSKALQVIPLKGAMTNEVFQIKWPTREKGPSRKVLVRIYGEGVEIFFDREDEIRTFEFMSKHGHGPLLLGRFGNGRIEEFLHARTLSACDLRDPEISGRIATRMKEFHGLEMPGAKKALLWDRLRNWLTACKRLASPEEAKSFRLDVMEMEINMLEKSLFDNDENIGFCHNDLQYGNIMMDEETKAITIIDYEYSCYNPVAYDIANHFCEMAADYHTETPHIMDYSKYPGVEERQRFLKTYMSYSDEKPSDTMVKKLLEDVEKYTLASHLIWGLWGIISEHVNEIDFDYMEYARQRFEQYWLTKPRLLAASEHK

SEQ ID NO: 89919 - protein, 348 aa, Arabidopsis thaliana
  peptide (1)..(348): Ceres Seq. ID no. 12721417
MGGTEKNVENKQYRLPREVKEALQAIASEWEDVIDSKALQVIPLKGAMTNEVFQIKWPTREKGPSRKVLVRIYGEGVEIFFDREDEIRTFEFMSKHGHGPLLLGRFGNGRIEEFLHARTLSACDLRDPEISGRIATRMKEFHGLEMPGAKKALLWDRLRNWLTACKRLASPEEAKSFRLDVMEMEINMLEKSLFDNDENIGFCHNDLQYGNIMMDEETKAITIIDYEYSCYNPVAYDIANHFCEMAADYHTETPHIMDYSKYPGVEERQRFLKTYMSYSDEKPSDTMVKKLLEDVEKYTLASHLIWGLWGIISEHVNEIDFDYMEYARQRFEQYWLTKPRLLAASEHK

SEQ ID NO: 89920 - protein, 301 aa, Arabidopsis thaliana
  peptide (1)..(301): Ceres Seq. ID no. 12721418
MTNEVFQIKWPTREKGPSRKVLVRIYGEGVEIFFDREDEIRTFEFMSKHGHGPLLLGRFGNGRIEEFLHARTLSACDLRDPEISGRIATRMKEFHGLEMPGAKKALLWDRLRNWLTACKRLASPEEAKSFRLDVMEMEINMLEKSLFDNDENIGFCHNDLQYGNIMMDEETKAITIIDYEYSCYNPVAYDIANHFCEMAADYHTETPHIMDYSKYPGVEERQRFLKTYMSYSDEKPSDTMVKKLLEDVEKYTLASHLIWGLWGIISEHVNEIDFDYMEYARQRFEQYWLTKPRLLAASEHK

SEQ ID NO: 89921 - DNA, 2688 bp, Arabidopsis thaliana
  misc_feature (1)..(2688): Ceres Seq. ID no. 12721444
  misc_feature (1)..(2688): Ortholog of  Ceres SEQ ID NO 12586556 as cited in SEQ ID NO 64667
  misc_feature (1)..(2688): Ortholog of  Ceres SEQ ID NO 13660894 as cited in SEQ ID NO 67475
atgaattgtctagcgaacgagagcttaaactccttgaagatctctcctttctctacctccagactactatcttccgttaccaatttccgaaaccagttatcattttccagcaaagattccagttcttcttcagctccttttaacccttttcgattcttcaatgatcaatcaaattcaaggctttgtaatctcagaacaacaaaaattctacaagcccatttgcttagacgatatcttctgccatttgatgttttccttactaaatcattgcttagctggtactcaaactcgggttccatggctgatgcagctaagttgttcgatacaattcctcaaccagatgttgtttcttgtaacattatgatctctggttataaacaacatcggttgtttgaagaatcgttgagatttttttctaagatgcatttcttgggttttgaggctaatgagataagttatgggtctgtgatttcggcttgtagtgctttacaagctcctctgtttagtgagctggtgtgttgtcatactataaagatgggttatttcttctatgaagttgttgaatcggctttgatagacgtattctctaagaatctaagatttgaggatgcttataaagtgttccgtgactctttatctgctaatgtgtattgttggaacactatcatagcaggggcacttagaaaccaaaattatggtgctgtttttgatcttttccatgaaatgtgtgttgggtttcagaaacctgatagttatacatattccagtgttttggctgcttgtgcttcccttgagaagcttaggtttggaaaagtggttcaagctcgggtgatcaaatgcggagcagaagatgtatttgtttgtactgcaattgttgacttatacgccaaatgtgggcatatggctgaagctatggaagtattctcccgtatccctaaccctagtgttgtatcttggacagtaatgctgtctggttacacaaagagtaatgatgctttctctgctcttgaaattttcaaggaaatgagacactcaggtgttgagatcaacaactgtaccgtaactagtgtaatctctgcttgtggtagaccttctatggtctgtgaagcaagccaggtccatgcttgggtctttaagagtggtttctatcttgattcctcagtggctgccgctttgattagtatgtactcaaagagtggagatattgatctttctgaacaggtttttgaggatctggacgatattcagagacaaaatatagttaatgtgatgatcacttcgttttcgcaaagtaagaagcctggtaaagcaataagactgtttactagaatgcttcaggagggtttgagaaccgatgagtttagtgtatgcagtttgttaagtgtattggattgtttgaatttaggtaagcaggttcacggttacacccttaaaagtgggttggttcttgatctcactgttggaagttctctttttacattgtactctaaatgtggtagtttggaagaatcatataaattattccaggggataccttttaaagacaatgcttgctgggcttccatgatttctggtttcaatgagtacggttatctaagagaagctattggactattcagcgagatgctggatgatgggactagccctgatgagagtactctagctgctgttctaactgtgtgttcttctcatccttctctgccaagaggtaaagaaatacatgggtatacgctaagagcgggaattgacaagggaatggatcttggttctgcactagtaaacatgtattcaaagtgtggctcactaaagttggctagacaggtctacgataggctccctgaactggatccagtgtcatgttcatctttaatttcgggatattcacaacacgggttaatccaggatggcttccttctatttcgtgatatggtcatgtctggttttactatggactcctttgcaatttcatccattcttaaagccgctgctctctctgacgaatcatcgctgggagctcaagttcacgcctacatcacaaaaattggattgtgcacagagccttctgtaggaagctcactactgacaatgtattcgaaatttggaagcattgacgactgctgtaaagcattcagccagatcaatggcccagatttaatagcgtggacagcgctgattgcaagttatgctcaacatggaaaggccaatgaagcgttacaagtgtacaatcttatgaaggaaaaaggattcaagcctgataaagtgacttttgtgggagtcttgtctgcttgtagtcatggtggtttggtcgaagaaagctatttccatctcaactcgatggtaaaagactatggtatcgaaccagagaaccgacattatgtctgcatggtcgatgctttagggaggtcaggaagacttagagaagctgagagttttatcaacaatatgcatattaaaccagacgccttggtctggggaacattgcttgctgcttgcaaaattcacggggaagttgaactcgggaaggtagctgcaaaaaaggctatagaattagagccatcagacgctggagcatatatttcactctcgaacatccttgcagaggttggtgagtgggacgaagtggaggaaactcgtaagctgatgaaaggaacaggtgtacagaaagaaccagggtggagttctgtctga

SEQ ID NO: 89922 - protein, 895 aa, Arabidopsis thaliana
  peptide (1)..(895): Ceres Seq. ID no. 12721445
MNCLANESLNSLKISPFSTSRLLSSVTNFRNQLSFSSKDSSSSSAPFNPFRFFNDQSNSRLCNLRTTKILQAHLLRRYLLPFDVFLTKSLLSWYSNSGSMADAAKLFDTIPQPDVVSCNIMISGYKQHRLFEESLRFFSKMHFLGFEANEISYGSVISACSALQAPLFSELVCCHTIKMGYFFYEVVESALIDVFSKNLRFEDAYKVFRDSLSANVYCWNTIIAGALRNQNYGAVFDLFHEMCVGFQKPDSYTYSSVLAACASLEKLRFGKVVQARVIKCGAEDVFVCTAIVDLYAKCGHMAEAMEVFSRIPNPSVVSWTVMLSGYTKSNDAFSALEIFKEMRHSGVEINNCTVTSVISACGRPSMVCEASQVHAWVFKSGFYLDSSVAAALISMYSKSGDIDLSEQVFEDLDDIQRQNIVNVMITSFSQSKKPGKAIRLFTRMLQEGLRTDEFSVCSLLSVLDCLNLGKQVHGYTLKSGLVLDLTVGSSLFTLYSKCGSLEESYKLFQGIPFKDNACWASMISGFNEYGYLREAIGLFSEMLDDGTSPDESTLAAVLTVCSSHPSLPRGKEIHGYTLRAGIDKGMDLGSALVNMYSKCGSLKLARQVYDRLPELDPVSCSSLISGYSQHGLIQDGFLLFRDMVMSGFTMDSFAISSILKAAALSDESSLGAQVHAYITKIGLCTEPSVGSSLLTMYSKFGSIDDCCKAFSQINGPDLIAWTALIASYAQHGKANEALQVYNLMKEKGFKPDKVTFVGVLSACSHGGLVEESYFHLNSMVKDYGIEPENRHYVCMVDALGRSGRLREAESFINNMHIKPDALVWGTLLAACKIHGEVELGKVAAKKAIELEPSDAGAYISLSNILAEVGEWDEVEETRKLMKGTGVQKEPGWSSV

SEQ ID NO: 89923 - protein, 796 aa, Arabidopsis thaliana
  peptide (1)..(796): Ceres Seq. ID no. 12721446
MADAAKLFDTIPQPDVVSCNIMISGYKQHRLFEESLRFFSKMHFLGFEANEISYGSVISACSALQAPLFSELVCCHTIKMGYFFYEVVESALIDVFSKNLRFEDAYKVFRDSLSANVYCWNTIIAGALRNQNYGAVFDLFHEMCVGFQKPDSYTYSSVLAACASLEKLRFGKVVQARVIKCGAEDVFVCTAIVDLYAKCGHMAEAMEVFSRIPNPSVVSWTVMLSGYTKSNDAFSALEIFKEMRHSGVEINNCTVTSVISACGRPSMVCEASQVHAWVFKSGFYLDSSVAAALISMYSKSGDIDLSEQVFEDLDDIQRQNIVNVMITSFSQSKKPGKAIRLFTRMLQEGLRTDEFSVCSLLSVLDCLNLGKQVHGYTLKSGLVLDLTVGSSLFTLYSKCGSLEESYKLFQGIPFKDNACWASMISGFNEYGYLREAIGLFSEMLDDGTSPDESTLAAVLTVCSSHPSLPRGKEIHGYTLRAGIDKGMDLGSALVNMYSKCGSLKLARQVYDRLPELDPVSCSSLISGYSQHGLIQDGFLLFRDMVMSGFTMDSFAISSILKAAALSDESSLGAQVHAYITKIGLCTEPSVGSSLLTMYSKFGSIDDCCKAFSQINGPDLIAWTALIASYAQHGKANEALQVYNLMKEKGFKPDKVTFVGVLSACSHGGLVEESYFHLNSMVKDYGIEPENRHYVCMVDALGRSGRLREAESFINNMHIKPDALVWGTLLAACKIHGEVELGKVAAKKAIELEPSDAGAYISLSNILAEVGEWDEVEETRKLMKGTGVQKEPGWSSV

SEQ ID NO: 89924 - protein, 775 aa, Arabidopsis thaliana
  peptide (1)..(775): Ceres Seq. ID no. 12721447
MISGYKQHRLFEESLRFFSKMHFLGFEANEISYGSVISACSALQAPLFSELVCCHTIKMGYFFYEVVESALIDVFSKNLRFEDAYKVFRDSLSANVYCWNTIIAGALRNQNYGAVFDLFHEMCVGFQKPDSYTYSSVLAACASLEKLRFGKVVQARVIKCGAEDVFVCTAIVDLYAKCGHMAEAMEVFSRIPNPSVVSWTVMLSGYTKSNDAFSALEIFKEMRHSGVEINNCTVTSVISACGRPSMVCEASQVHAWVFKSGFYLDSSVAAALISMYSKSGDIDLSEQVFEDLDDIQRQNIVNVMITSFSQSKKPGKAIRLFTRMLQEGLRTDEFSVCSLLSVLDCLNLGKQVHGYTLKSGLVLDLTVGSSLFTLYSKCGSLEESYKLFQGIPFKDNACWASMISGFNEYGYLREAIGLFSEMLDDGTSPDESTLAAVLTVCSSHPSLPRGKEIHGYTLRAGIDKGMDLGSALVNMYSKCGSLKLARQVYDRLPELDPVSCSSLISGYSQHGLIQDGFLLFRDMVMSGFTMDSFAISSILKAAALSDESSLGAQVHAYITKIGLCTEPSVGSSLLTMYSKFGSIDDCCKAFSQINGPDLIAWTALIASYAQHGKANEALQVYNLMKEKGFKPDKVTFVGVLSACSHGGLVEESYFHLNSMVKDYGIEPENRHYVCMVDALGRSGRLREAESFINNMHIKPDALVWGTLLAACKIHGEVELGKVAAKKAIELEPSDAGAYISLSNILAEVGEWDEVEETRKLMKGTGVQKEPGWSSV

SEQ ID NO: 89925 - DNA, 1932 bp, Arabidopsis thaliana
  misc_feature (1)..(1932): Ceres Seq. ID no. 12721448
  misc_feature (1)..(1932): Ortholog of  Ceres SEQ ID NO 12586556 as cited in SEQ ID NO 64667
  misc_feature (1)..(1932): Ortholog of  Ceres SEQ ID NO 13660894 as cited in SEQ ID NO 67475
atgactatagcaattcaccattgtctctctctccttaatagctgcaagaacttaagagctttaacacaaatacatggcttgtttattaaatacggcgtcgacactgattcttacttcactggaaaacttatcctacattgtgcgatttctatatccgacgctttaccttacgctcgtcgtctcttgctctgttttcctgaacctgatgcgtttatgttcaacactctcgtccgaggctactctgaatccgatgagccgcacaattccgttgcggtgtttgttgaaatgatgaggaaaggtttcgtctttccggatagtttctccttcgcgtttgtcatcaaggcggtggagaatttccggtctttaagaactgggtttcagatgcattgtcaagctttaaagcatgggcttgagtcgcatttgtttgttggcactaccttgattggtatgtatgggggatgtgggtgtgttgagtttgctcgcaaggtgttcgatgaaatgcatcaaccgaatttggttgcttggaatgctgtgatcaccgcctgttttagggggaatgatgttgcgggagcgagggaaatcttcgataagatgctggtaaggaatcacacgtcgtggaacgtgatgcttgctgggtacattaaagctggggagcttgagagtgctaaacggatcttctcggaaatgcctcacagagatgatgtctcctggagtactatgattgttggtattgctcataatggaagtttcaatgagtctttcttgtacttcagggagttacaacgagcgggaatgagtccaaatgaggtaagtctgaccggagttctctctgcctgttcacaatctgggtcatttgagtttgggaagatattacacgggtttgtagagaaagcagggtatagttggatagtttcggtgaacaatgcgcttattgatatgtattctaggtgtggtaatgtcccaatggctaggttagtctttgaaggtatgcaagagaagaggtgtattgtatcttggacatcaatgatagcaggcttagctatgcatggtcaaggagaagaagctgttagactattcaatgaaatgaccgcgtatggtgttacaccagacgggatatctttcatttcacttttgcatgcttgcagtcatgctggactgattgaagaaggtgaagattacttttctgagatgaagagagtttaccacatcgaaccagaaattgaacactatggttgcatggttgatttatatggccgatctggaaaactgcaaaaggcttatgatttcatatgccaaatgccaattccgccaactgccatagtatggcggactcttctcggggcttgcagtagtcatgggaatatcgaattggcagagcaagtgaaacaaaggcttaatgagcttgacccaaataactcaggggatcttgtacttctgtcgaatgcttatgcaactgcaggtaaatggaaggatgttgcttctatcagaaagtcaatgattgtccagagaatcaagaagacaactgcttggagcttggttgaagttggcaaaaccatgtacaagttcactgcaggcgagaaaaagaagggaatcgatatagaggctcacgagaagctaaaagaaataatcttgaggcttaaagatgaagctggatataccccagaagtagcaagtgctttatatgatgtagaagaggaagaaaaggaggatcaagtgagtaaacacagtgagaagcttgcacttgcatttgctctagctagattgtccaaaggagcaaatatcaggatagtaaagaatctgagaatttgcagagattgtcacgctgttatgaagctaacgtcgaaggtttatggggtagaaatattggtccgagacagaaatcgctttcattcatttaaggacggttcttgctcatgccgtgactactggtaa

SEQ ID NO: 89926 - protein, 643 aa, Arabidopsis thaliana
  peptide (1)..(643): Ceres Seq. ID no. 12721449
MTIAIHHCLSLLNSCKNLRALTQIHGLFIKYGVDTDSYFTGKLILHCAISISDALPYARRLLLCFPEPDAFMFNTLVRGYSESDEPHNSVAVFVEMMRKGFVFPDSFSFAFVIKAVENFRSLRTGFQMHCQALKHGLESHLFVGTTLIGMYGGCGCVEFARKVFDEMHQPNLVAWNAVITACFRGNDVAGAREIFDKMLVRNHTSWNVMLAGYIKAGELESAKRIFSEMPHRDDVSWSTMIVGIAHNGSFNESFLYFRELQRAGMSPNEVSLTGVLSACSQSGSFEFGKILHGFVEKAGYSWIVSVNNALIDMYSRCGNVPMARLVFEGMQEKRCIVSWTSMIAGLAMHGQGEEAVRLFNEMTAYGVTPDGISFISLLHACSHAGLIEEGEDYFSEMKRVYHIEPEIEHYGCMVDLYGRSGKLQKAYDFICQMPIPPTAIVWRTLLGACSSHGNIELAEQVKQRLNELDPNNSGDLVLLSNAYATAGKWKDVASIRKSMIVQRIKKTTAWSLVEVGKTMYKFTAGEKKKGIDIEAHEKLKEIILRLKDEAGYTPEVASALYDVEEEEKEDQVSKHSEKLALAFALARLSKGANIRIVKNLRICRDCHAVMKLTSKVYGVEILVRDRNRFHSFKDGSCSCRDYW

SEQ ID NO: 89927 - protein, 572 aa, Arabidopsis thaliana
  peptide (1)..(572): Ceres Seq. ID no. 12721450
MFNTLVRGYSESDEPHNSVAVFVEMMRKGFVFPDSFSFAFVIKAVENFRSLRTGFQMHCQALKHGLESHLFVGTTLIGMYGGCGCVEFARKVFDEMHQPNLVAWNAVITACFRGNDVAGAREIFDKMLVRNHTSWNVMLAGYIKAGELESAKRIFSEMPHRDDVSWSTMIVGIAHNGSFNESFLYFRELQRAGMSPNEVSLTGVLSACSQSGSFEFGKILHGFVEKAGYSWIVSVNNALIDMYSRCGNVPMARLVFEGMQEKRCIVSWTSMIAGLAMHGQGEEAVRLFNEMTAYGVTPDGISFISLLHACSHAGLIEEGEDYFSEMKRVYHIEPEIEHYGCMVDLYGRSGKLQKAYDFICQMPIPPTAIVWRTLLGACSSHGNIELAEQVKQRLNELDPNNSGDLVLLSNAYATAGKWKDVASIRKSMIVQRIKKTTAWSLVEVGKTMYKFTAGEKKKGIDIEAHEKLKEIILRLKDEAGYTPEVASALYDVEEEEKEDQVSKHSEKLALAFALARLSKGANIRIVKNLRICRDCHAVMKLTSKVYGVEILVRDRNRFHSFKDGSCSCRDYW

SEQ ID NO: 89928 - protein, 548 aa, Arabidopsis thaliana
  peptide (1)..(548): Ceres Seq. ID no. 12721451
MMRKGFVFPDSFSFAFVIKAVENFRSLRTGFQMHCQALKHGLESHLFVGTTLIGMYGGCGCVEFARKVFDEMHQPNLVAWNAVITACFRGNDVAGAREIFDKMLVRNHTSWNVMLAGYIKAGELESAKRIFSEMPHRDDVSWSTMIVGIAHNGSFNESFLYFRELQRAGMSPNEVSLTGVLSACSQSGSFEFGKILHGFVEKAGYSWIVSVNNALIDMYSRCGNVPMARLVFEGMQEKRCIVSWTSMIAGLAMHGQGEEAVRLFNEMTAYGVTPDGISFISLLHACSHAGLIEEGEDYFSEMKRVYHIEPEIEHYGCMVDLYGRSGKLQKAYDFICQMPIPPTAIVWRTLLGACSSHGNIELAEQVKQRLNELDPNNSGDLVLLSNAYATAGKWKDVASIRKSMIVQRIKKTTAWSLVEVGKTMYKFTAGEKKKGIDIEAHEKLKEIILRLKDEAGYTPEVASALYDVEEEEKEDQVSKHSEKLALAFALARLSKGANIRIVKNLRICRDCHAVMKLTSKVYGVEILVRDRNRFHSFKDGSCSCRDYW

SEQ ID NO: 89929 - DNA, 768 bp, Arabidopsis thaliana
  misc_feature (1)..(768): Ceres Seq. ID no. 12721472
  misc_feature (1)..(768): Ortholog of  Ceres SEQ ID NO 14303487 as cited in SEQ ID NO 54521
  misc_feature (1)..(768): Ortholog of  Ceres SEQ ID NO 14316302 as cited in SEQ ID NO 55232
  misc_feature (1)..(768): Ortholog of  Ceres SEQ ID NO 14308274 as cited in SEQ ID NO 55597
  misc_feature (1)..(768): Ortholog of  Ceres SEQ ID NO 13659710 as cited in SEQ ID NO 60808
atggaaacagttcatggtcaacatccatcatatcgagatcctcacagtttgatctttggttgcaatcactacaagagaaattgtaaacttcttgctccttgttgtgacaagctcttcacatgtatacgatgccatgatgaagaagctgatcactcggtggataggaaacagattacaaagatgatgtgcatgaaatgcctcttgattcaaccgattggtgcaaattgctcaaatacttcgtgcaagtcgtcaatgggaaaatacttctgcaaaatatgcaaattatatgacgatgaaaggaaaatttatcactgtccttactgcaacctctgtcgagtagggaaaggattgggtattgactacttccactgcatgaaatgcaatgcttgtatgtcacgtaccttagtagagcatgtttgcagggaaaagtgcttagaagataattgtccgatttgccatgagtatatcttcacctccagctccccagtgaaggctcttccttgtggtcacttgatgcactccacatgctttcaggagtacacatgttcacattacacatgccctgtctgcagcaagtcgcttggagatatgcaggtctactttaagatgttagacgcattgcttgcagaagagaagatgcctgatgaatactccaacaaaactcaggtgatcttgtgtaatgattgtggaagaaaaggaaatgctccttaccattggctttaccacaaatgcacaacctgtggctcctacaactcaaggctcctttag

SEQ ID NO: 89930 - protein, 255 aa, Arabidopsis thaliana
  peptide (1)..(255): Ceres Seq. ID no. 12721473
METVHGQHPSYRDPHSLIFGCNHYKRNCKLLAPCCDKLFTCIRCHDEEADHSVDRKQITKMMCMKCLLIQPIGANCSNTSCKSSMGKYFCKICKLYDDERKIYHCPYCNLCRVGKGLGIDYFHCMKCNACMSRTLVEHVCREKCLEDNCPICHEYIFTSSSPVKALPCGHLMHSTCFQEYTCSHYTCPVCSKSLGDMQVYFKMLDALLAEEKMPDEYSNKTQVILCNDCGRKGNAPYHWLYHKCTTCGSYNSRLL

SEQ ID NO: 89931 - protein, 195 aa, Arabidopsis thaliana
  peptide (1)..(195): Ceres Seq. ID no. 12721474
MMCMKCLLIQPIGANCSNTSCKSSMGKYFCKICKLYDDERKIYHCPYCNLCRVGKGLGIDYFHCMKCNACMSRTLVEHVCREKCLEDNCPICHEYIFTSSSPVKALPCGHLMHSTCFQEYTCSHYTCPVCSKSLGDMQVYFKMLDALLAEEKMPDEYSNKTQVILCNDCGRKGNAPYHWLYHKCTTCGSYNSRLL

SEQ ID NO: 89932 - protein, 194 aa, Arabidopsis thaliana
  peptide (1)..(194): Ceres Seq. ID no. 12721475
MCMKCLLIQPIGANCSNTSCKSSMGKYFCKICKLYDDERKIYHCPYCNLCRVGKGLGIDYFHCMKCNACMSRTLVEHVCREKCLEDNCPICHEYIFTSSSPVKALPCGHLMHSTCFQEYTCSHYTCPVCSKSLGDMQVYFKMLDALLAEEKMPDEYSNKTQVILCNDCGRKGNAPYHWLYHKCTTCGSYNSRLL

SEQ ID NO: 89933 - DNA, 684 bp, Arabidopsis thaliana
  misc_feature (1)..(684): Ceres Seq. ID no. 12721488
  misc_feature (1)..(684): Ortholog of  Ceres SEQ ID NO 13599568 as cited in SEQ ID NO 509
  misc_feature (1)..(684): Ortholog of  Ceres SEQ ID NO 13638595 as cited in SEQ ID NO 52050
  misc_feature (1)..(684): Ortholog of  Ceres SEQ ID NO 13594748 as cited in SEQ ID NO 52114
  misc_feature (1)..(684): Ortholog of  Ceres SEQ ID NO 12583993 as cited in SEQ ID NO 68098
atggctcatatttcacaaatctcttcttttctctcaatagttttaatcttcctcgcattatgcatcactctcttcacgaaccctactctctcactcccagccctaaaacttaaccctttccaagacttttgtgtagctgatctccaagctaccccaactaacagtggttacccttgcaagtcacaagtcacctctgaagacttcttttattccggcttgaacactcctttaaacacctcgaacccaaaaggtattgccgctaatccagccaatctcttgacctttccaggcctaaacactttgggaatatccatgtataacgttgcaattgcacctggaggatacaaccaacctcactctcaccccggtgtaaccgaggcaggggtcgtgatcgaaggctcggtcttggttgggttcttaacgactaactacacgttgtactcgaaggttattggacccggtgatatgtttgtgattcctccgggactcattcattacgaggggaacgttgggaaaacgcaatgccgtcttttgacggtggttgctgacgacttgcctagcgaggttggtgtgcctcacactctgttggctacgaaacccgcgattccaaacgaggtattgatatcggcgtttaaggcggatagtaaaacaatcaacatgctcaggtcaaagtttactgcttaa

SEQ ID NO: 89934 - protein, 227 aa, Arabidopsis thaliana
  peptide (1)..(227): Ceres Seq. ID no. 12721489
MAHISQISSFLSIVLIFLALCITLFTNPTLSLPALKLNPFQDFCVADLQATPTNSGYPCKSQVTSEDFFYSGLNTPLNTSNPKGIAANPANLLTFPGLNTLGISMYNVAIAPGGYNQPHSHPGVTEAGVVIEGSVLVGFLTTNYTLYSKVIGPGDMFVIPPGLIHYEGNVGKTQCRLLTVVADDLPSEVGVPHTLLATKPAIPNEVLISAFKADSKTINMLRSKFTA

SEQ ID NO: 89935 - protein, 123 aa, Arabidopsis thaliana
  peptide (1)..(123): Ceres Seq. ID no. 12721490
MYNVAIAPGGYNQPHSHPGVTEAGVVIEGSVLVGFLTTNYTLYSKVIGPGDMFVIPPGLIHYEGNVGKTQCRLLTVVADDLPSEVGVPHTLLATKPAIPNEVLISAFKADSKTINMLRSKFTA

SEQ ID NO: 89936 - DNA, 2589 bp, Arabidopsis thaliana
  misc_feature (1)..(2589): Ceres Seq. ID no. 12721495
  misc_feature (1)..(2589): Ortholog of  Ceres SEQ ID NO 13657677 as cited in SEQ ID NO 66119
atgaacctagcaattccaaatcccaactcacaccacctctccttcctcatccagaattcaagcttcatcggaaaccggagattcgccgacggcaaccgtctccgtttcctctcaggaggaaatcgtaaaccatgctccttctccggtaaaatcaaagcaaagactaaagatctcgttctcgggaacccctccgtctccgtggagaaaggaaagtacagctacgacgtcgaatcgctgattaacaagctgagcagtctcccaccacgcgggagcatcgccaggtgcttagacatattcaaaaacaagctttcgttgaacgatttcgcactcgtgttcaaagagttcgctggtcgcggcgattggcaaaggtcgcttcgtctcttcaagtatatgcaacggcagatatggtgcaaacctaacgagcatatctacactattatgatctctttgcttggtagagaaggtctactagataaatgtcttgaggtattcgacgaaatgcctagccaaggtgtgtcccgcagcgttttctcttacactgctttgatcaatgcttatggtcgaaatggacggtatgagacttctcttgagcttcttgataggatgaagaatgaaaagatatcacctagtattttgacttacaacactgtgattaatgcttgtgctagaggtggtttagattgggagggtttattgggtttgtttgcagagatgagacatgaggggatacaacctgatatcgtgacttataatacactgcttagtgcttgtgctattagaggtttaggtgatgaggctgaaatggtttttaggactatgaatgatggtgggattgttccggatttaaccacatatagtcatctagttgagacatttgggaagttacgccggctggagaaagtatgtgatcttttaggcgagatggcctccggcggtagtttgccggatatcacttcttataatgtgttgttagaggcatatgcgaaatccgggtctattaaggaggcaatgggggtcttccatcagatgcaagctgcagggtgtacgccgaacgcaaatacatacagtgttttgctgaatttgtttggacagagtgggaggtatgatgatgtgaggcagctttttcttgagatgaaatcaagcaatacggatcctgatgctgctacatataacattttgattgaggtttttggggaaggggggtattttaaggaggtggtaactttgttccatgatatggtggaggagaatattgaaccggacatggagacatatgagggtataatatttgcttgtgggaaggggggacttcacgaagatgctaggaagatcttacaatatatgacagctaacgatatcgtgccaagttccaaggcgtacactggggttattgaagcgtttgggcaggctgctttatatgaagaagcgcttgttgctttcaacaccatgcatgaagtaggaagcaatccaagtattgaaacattccactcactgttatattcgtttgcaaggggaggactggtcaaggagtctgaggcgattttgtccaggttggtggattctggtattcccaggaacagagatacgttcaatgcacagatagaagcgtacaagcaaggaggcaaatttgaagaggctgtgaagacatatgtagatatggagaagtcaagatgcgatcctgatgaaaggacgcttgaggctgttttaagtgtgtattcttttgcgcggcttgttgatgagtgcagagagcagtttgaggagatgaaagcttctgatatactgcccagtatcatgtgctactgtatgatgctagctgtttatgggaagacggagaggtgggacgatgtcaatgagttattggaggagatgctttcaaatagagtatcaaatattcatcaagttattgggcaaatgatcaagggagattatgatgatgactcaaattggcagatagtggaatacgtgttggacaaactcaattcagaaggatgtggtttgggaataaggttttacaatgcacttctggatgctttgtggtggctgggccagaaagagcgagctgcaagagtactcaatgaggcaacaaagcgtggacttttccctgagttattccggaaaaacaaacttgtgtggtctgtcgatgtacataggatgtcagagggtggcatgtatacagcactatcggtttggctaaatgatataaatgatatgcttttaaagggagatcttcctcaactagctgttgttgtttcagtacggggacagttggagaaaagctctgctgcaagagaatctcctatcgcgaaagctgctttctccttcttgcaggatcatgtctcgtcctcattttccttcacgggatggaatggaggtcgcattatgtgccagcgatctcagctcaagcagttactgtcaacgaaagagccaacttcagaagaatccgaaaataaaaacctagtggcattagcaaactcgccaatatttgcggctggaacaagagcttcaacaagcagtgacacgaaccacagcggtaaccctacacaacgaagaaccaggacgaaaaaagaactagcagggagcacagcttaa

SEQ ID NO: 89937 - protein, 862 aa, Arabidopsis thaliana
  peptide (1)..(862): Ceres Seq. ID no. 12721496
MNLAIPNPNSHHLSFLIQNSSFIGNRRFADGNRLRFLSGGNRKPCSFSGKIKAKTKDLVLGNPSVSVEKGKYSYDVESLINKLSSLPPRGSIARCLDIFKNKLSLNDFALVFKEFAGRGDWQRSLRLFKYMQRQIWCKPNEHIYTIMISLLGREGLLDKCLEVFDEMPSQGVSRSVFSYTALINAYGRNGRYETSLELLDRMKNEKISPSILTYNTVINACARGGLDWEGLLGLFAEMRHEGIQPDIVTYNTLLSACAIRGLGDEAEMVFRTMNDGGIVPDLTTYSHLVETFGKLRRLEKVCDLLGEMASGGSLPDITSYNVLLEAYAKSGSIKEAMGVFHQMQAAGCTPNANTYSVLLNLFGQSGRYDDVRQLFLEMKSSNTDPDAATYNILIEVFGEGGYFKEVVTLFHDMVEENIEPDMETYEGIIFACGKGGLHEDARKILQYMTANDIVPSSKAYTGVIEAFGQAALYEEALVAFNTMHEVGSNPSIETFHSLLYSFARGGLVKESEAILSRLVDSGIPRNRDTFNAQIEAYKQGGKFEEAVKTYVDMEKSRCDPDERTLEAVLSVYSFARLVDECREQFEEMKASDILPSIMCYCMMLAVYGKTERWDDVNELLEEMLSNRVSNIHQVIGQMIKGDYDDDSNWQIVEYVLDKLNSEGCGLGIRFYNALLDALWWLGQKERAARVLNEATKRGLFPELFRKNKLVWSVDVHRMSEGGMYTALSVWLNDINDMLLKGDLPQLAVVVSVRGQLEKSSAARESPIAKAAFSFLQDHVSSSFSFTGWNGGRIMCQRSQLKQLLSTKEPTSEESENKNLVALANSPIFAAGTRASTSSDTNHSGNPTQRRTRTKKELAGSTA

SEQ ID NO: 89938 - protein, 732 aa, Arabidopsis thaliana
  peptide (1)..(732): Ceres Seq. ID no. 12721497
MQRQIWCKPNEHIYTIMISLLGREGLLDKCLEVFDEMPSQGVSRSVFSYTALINAYGRNGRYETSLELLDRMKNEKISPSILTYNTVINACARGGLDWEGLLGLFAEMRHEGIQPDIVTYNTLLSACAIRGLGDEAEMVFRTMNDGGIVPDLTTYSHLVETFGKLRRLEKVCDLLGEMASGGSLPDITSYNVLLEAYAKSGSIKEAMGVFHQMQAAGCTPNANTYSVLLNLFGQSGRYDDVRQLFLEMKSSNTDPDAATYNILIEVFGEGGYFKEVVTLFHDMVEENIEPDMETYEGIIFACGKGGLHEDARKILQYMTANDIVPSSKAYTGVIEAFGQAALYEEALVAFNTMHEVGSNPSIETFHSLLYSFARGGLVKESEAILSRLVDSGIPRNRDTFNAQIEAYKQGGKFEEAVKTYVDMEKSRCDPDERTLEAVLSVYSFARLVDECREQFEEMKASDILPSIMCYCMMLAVYGKTERWDDVNELLEEMLSNRVSNIHQVIGQMIKGDYDDDSNWQIVEYVLDKLNSEGCGLGIRFYNALLDALWWLGQKERAARVLNEATKRGLFPELFRKNKLVWSVDVHRMSEGGMYTALSVWLNDINDMLLKGDLPQLAVVVSVRGQLEKSSAARESPIAKAAFSFLQDHVSSSFSFTGWNGGRIMCQRSQLKQLLSTKEPTSEESENKNLVALANSPIFAAGTRASTSSDTNHSGNPTQRRTRTKKELAGSTA

SEQ ID NO: 89939 - protein, 716 aa, Arabidopsis thaliana
  peptide (1)..(716): Ceres Seq. ID no. 12721498
MISLLGREGLLDKCLEVFDEMPSQGVSRSVFSYTALINAYGRNGRYETSLELLDRMKNEKISPSILTYNTVINACARGGLDWEGLLGLFAEMRHEGIQPDIVTYNTLLSACAIRGLGDEAEMVFRTMNDGGIVPDLTTYSHLVETFGKLRRLEKVCDLLGEMASGGSLPDITSYNVLLEAYAKSGSIKEAMGVFHQMQAAGCTPNANTYSVLLNLFGQSGRYDDVRQLFLEMKSSNTDPDAATYNILIEVFGEGGYFKEVVTLFHDMVEENIEPDMETYEGIIFACGKGGLHEDARKILQYMTANDIVPSSKAYTGVIEAFGQAALYEEALVAFNTMHEVGSNPSIETFHSLLYSFARGGLVKESEAILSRLVDSGIPRNRDTFNAQIEAYKQGGKFEEAVKTYVDMEKSRCDPDERTLEAVLSVYSFARLVDECREQFEEMKASDILPSIMCYCMMLAVYGKTERWDDVNELLEEMLSNRVSNIHQVIGQMIKGDYDDDSNWQIVEYVLDKLNSEGCGLGIRFYNALLDALWWLGQKERAARVLNEATKRGLFPELFRKNKLVWSVDVHRMSEGGMYTALSVWLNDINDMLLKGDLPQLAVVVSVRGQLEKSSAARESPIAKAAFSFLQDHVSSSFSFTGWNGGRIMCQRSQLKQLLSTKEPTSEESENKNLVALANSPIFAAGTRASTSSDTNHSGNPTQRRTRTKKELAGSTA

SEQ ID NO: 89940 - DNA, 1449 bp, Arabidopsis thaliana
  misc_feature (1)..(1449): Ceres Seq. ID no. 12721502
  misc_feature (1)..(1449): Ortholog of  Ceres SEQ ID NO 13657677 as cited in SEQ ID NO 66119
atgaaacgtctttttagcaaatcgctatgtacttcggccgccggagccaatctcaaaccaccgccggcagattccgccgccatagctaagcttatcctctcttctccgaacacaactcaccaagacgatcaatttctactctccaccaaaacaaccccatggaccccaaatctcgtgaactctgttctcaagcgactctggaaccacggccctaaagctctccaattcttccacttcctcgacaatcaccaccgcgaatatgtccacgacgcttcctccttcgatctcgcaatcgacattgccgcccgtcttcacctccaccccaccgtctggtcactcattcaccgtatgcgctctctccgcatcggtccttctcccaaaaccttcgcaatcgtcgccgagaggtacgcatccgctgggaagcccgataaagcggttaagctgtttctgaatatgcacgaacatggttgttttcaagatttagcttctttcaatacgattctcgatgtgttgtgtaaatctaaacgcgtagagaaagcttatgagttgtttagagctcttaggggaagatttagtgttgatacagttacttacaatgtgattcttaacggttggtgtttgattaaaaggacgcctaaggctttagaagttttgaaagagatggttgagagagggataaaccctaatttgactacttataacacaatgctcaaaggttttttcagagctgggcagattagacatgcttgggaattcttcttggagatgaagaaacgggattgtgaaatagatgttgtcacttatactactgtggttcacgggtttggtgttgcgggggagataaagcgggcgaggaatgttttcgatgagatgattagagaaggtgtgcttccttctgttgcgacgtacaatgctatgattcaagttttgtgtaagaaagataatgtggagaatgcggttgtgatgtttgaggaaatggtgaggagaggttatgagccgaatgtgacgacttataatgtgttgataagagggttgtttcacgctggagagtttagtcgtggagaggagttgatgcagagaatggagaatgaaggctgtgaaccaaacttccagacatataacatgatgatccgttattattcggaatgcagcgaggtcgagaaagcgttgggtttgtttgagaaaatggggagtggtgattgcttgccaaatctagatacttacaacatactgataagtggaatgtttgtgagaaaaagatcagaagatatggtggtcgctggtaaactattgcttgagatggttgagagagggtttataccccggaaatttacttttaatcgagttctgaacgggcttcttttgacagggaatcaagcttttgcaaaggagatcttgagattgcagagtaaatctggtagccggcttctccggaagttcaggctatga

SEQ ID NO: 89941 - protein, 482 aa, Arabidopsis thaliana
  peptide (1)..(482): Ceres Seq. ID no. 12721503
MKRLFSKSLCTSAAGANLKPPPADSAAIAKLILSSPNTTHQDDQFLLSTKTTPWTPNLVNSVLKRLWNHGPKALQFFHFLDNHHREYVHDASSFDLAIDIAARLHLHPTVWSLIHRMRSLRIGPSPKTFAIVAERYASAGKPDKAVKLFLNMHEHGCFQDLASFNTILDVLCKSKRVEKAYELFRALRGRFSVDTVTYNVILNGWCLIKRTPKALEVLKEMVERGINPNLTTYNTMLKGFFRAGQIRHAWEFFLEMKKRDCEIDVVTYTTVVHGFGVAGEIKRARNVFDEMIREGVLPSVATYNAMIQVLCKKDNVENAVVMFEEMVRRGYEPNVTTYNVLIRGLFHAGEFSRGEELMQRMENEGCEPNFQTYNMMIRYYSECSEVEKALGLFEKMGSGDCLPNLDTYNILISGMFVRKRSEDMVVAGKLLLEMVERGFIPRKFTFNRVLNGLLLTGNQAFAKEILRLQSKSGSRLLRKFRL

SEQ ID NO: 89942 - protein, 366 aa, Arabidopsis thaliana
  peptide (1)..(366): Ceres Seq. ID no. 12721504
MRSLRIGPSPKTFAIVAERYASAGKPDKAVKLFLNMHEHGCFQDLASFNTILDVLCKSKRVEKAYELFRALRGRFSVDTVTYNVILNGWCLIKRTPKALEVLKEMVERGINPNLTTYNTMLKGFFRAGQIRHAWEFFLEMKKRDCEIDVVTYTTVVHGFGVAGEIKRARNVFDEMIREGVLPSVATYNAMIQVLCKKDNVENAVVMFEEMVRRGYEPNVTTYNVLIRGLFHAGEFSRGEELMQRMENEGCEPNFQTYNMMIRYYSECSEVEKALGLFEKMGSGDCLPNLDTYNILISGMFVRKRSEDMVVAGKLLLEMVERGFIPRKFTFNRVLNGLLLTGNQAFAKEILRLQSKSGSRLLRKFRL

SEQ ID NO: 89943 - protein, 331 aa, Arabidopsis thaliana
  peptide (1)..(331): Ceres Seq. ID no. 12721505
MHEHGCFQDLASFNTILDVLCKSKRVEKAYELFRALRGRFSVDTVTYNVILNGWCLIKRTPKALEVLKEMVERGINPNLTTYNTMLKGFFRAGQIRHAWEFFLEMKKRDCEIDVVTYTTVVHGFGVAGEIKRARNVFDEMIREGVLPSVATYNAMIQVLCKKDNVENAVVMFEEMVRRGYEPNVTTYNVLIRGLFHAGEFSRGEELMQRMENEGCEPNFQTYNMMIRYYSECSEVEKALGLFEKMGSGDCLPNLDTYNILISGMFVRKRSEDMVVAGKLLLEMVERGFIPRKFTFNRVLNGLLLTGNQAFAKEILRLQSKSGSRLLRKFRL

SEQ ID NO: 89944 - DNA, 1623 bp, Arabidopsis thaliana
  misc_feature (1)..(1623): Ceres Seq. ID no. 12721545
  misc_feature (1)..(1623): Ortholog of  Ceres SEQ ID NO 15171856 as cited in SEQ ID NO 55120
atgaatcgtgaaatgacgtcaagctttcttctcctgacgttcgccatatgtaaactgatcatagccgtgggtctaaacgtgggccccagtgagctcctccgcatcggagccatagatgtcgacggccacttcaccgtccacccttccgacttagcctccgtctcctcagacttcggtatgctgaagtcacctgaagagccattggccgtgcttcatccatcatcggccgaagacgtggcacgactcgtcagaacagcttacggttcagccacggcgtttccggtctcagcccgaggccacggccattccataaacggacaagccgcggcggggaggaacggtgtggtggttgaaatgaaccacggcgtaaccgggacgcccaagccactcgtccgaccggatgaaatgtatgtggatgtatggggtggagagttatgggtcgatgtgttgaagaaaacgttggagcatggcttagcaccaaaatcatggacggattacttgtatctaaccgttggaggtacactctccaatgcaggaatcagtggtcaagcttttcaccatggtcctcaaattagtaacgtccttgagctcgacgttgtaactgggaaaggagaggtgatgagatgctcagaagaagagaacacaaggctattccatggagttcttggtggattaggtcaatttgggatcatcactcgagcacgaatctctctcgaaccagctccccaaagggtgagatggatacgggtattgtattcgagcttcaaagtgtttacggaggaccaagagtacttaatctcaatgcatggtcaattaaagtttgattacgtggaaggttttgtgattgtggacgaaggactcgtcaacaattggagatcttctttcttctctccacgtaaccccgtcaagatctcctctgttagttccaacggctctgttttgtattgccttgagatcaccaagaactaccacgactccgactccgaaatcgttgatcaggaagttgagattctgatgaagaaattgaatttcataccgacatcggtctttacaacggatttacaatatgtggactttctcgaccgggtacacaaggccgaattgaagctccggtccaagaatttatgggaggttccacacccatggctcaacctcttcgtgccaaaatcaagaatctctgacttcgataaaggcgttttcaagggcattttgggaaataaaacaagtggccctattcttatctaccccatgaacaaagacaaatgggacgagaggagctcagccgtgacgccggatgaggaagttttctatctggtggctctattgagatcagctttaacggacggtgaagagacacagaagctagagtatctgaaagatcagaaccgtcggatcttggagttctgtgaacaagccaagatcaatgtgaagcagtatcttcctcaccacgcaacacaggaagagtgggtggctcattttggggacaagtgggatcggttcagaagcttaaaggctgagtttgatccgcgacacatactcgctactggtcagagaatctttcaaaacccatctttgtctttgtttcctccgtcgtcgtcttcttcgtcagcggcttcatggtga

SEQ ID NO: 89945 - protein, 540 aa, Arabidopsis thaliana
  peptide (1)..(540): Ceres Seq. ID no. 12721546
MNREMTSSFLLLTFAICKLIIAVGLNVGPSELLRIGAIDVDGHFTVHPSDLASVSSDFGMLKSPEEPLAVLHPSSAEDVARLVRTAYGSATAFPVSARGHGHSINGQAAAGRNGVVVEMNHGVTGTPKPLVRPDEMYVDVWGGELWVDVLKKTLEHGLAPKSWTDYLYLTVGGTLSNAGISGQAFHHGPQISNVLELDVVTGKGEVMRCSEEENTRLFHGVLGGLGQFGIITRARISLEPAPQRVRWIRVLYSSFKVFTEDQEYLISMHGQLKFDYVEGFVIVDEGLVNNWRSSFFSPRNPVKISSVSSNGSVLYCLEITKNYHDSDSEIVDQEVEILMKKLNFIPTSVFTTDLQYVDFLDRVHKAELKLRSKNLWEVPHPWLNLFVPKSRISDFDKGVFKGILGNKTSGPILIYPMNKDKWDERSSAVTPDEEVFYLVALLRSALTDGEETQKLEYLKDQNRRILEFCEQAKINVKQYLPHHATQEEWVAHFGDKWDRFRSLKAEFDPRHILATGQRIFQNPSLSLFPPSSSSSSAASW

SEQ ID NO: 89946 - protein, 536 aa, Arabidopsis thaliana
  peptide (1)..(536): Ceres Seq. ID no. 12721547
MTSSFLLLTFAICKLIIAVGLNVGPSELLRIGAIDVDGHFTVHPSDLASVSSDFGMLKSPEEPLAVLHPSSAEDVARLVRTAYGSATAFPVSARGHGHSINGQAAAGRNGVVVEMNHGVTGTPKPLVRPDEMYVDVWGGELWVDVLKKTLEHGLAPKSWTDYLYLTVGGTLSNAGISGQAFHHGPQISNVLELDVVTGKGEVMRCSEEENTRLFHGVLGGLGQFGIITRARISLEPAPQRVRWIRVLYSSFKVFTEDQEYLISMHGQLKFDYVEGFVIVDEGLVNNWRSSFFSPRNPVKISSVSSNGSVLYCLEITKNYHDSDSEIVDQEVEILMKKLNFIPTSVFTTDLQYVDFLDRVHKAELKLRSKNLWEVPHPWLNLFVPKSRISDFDKGVFKGILGNKTSGPILIYPMNKDKWDERSSAVTPDEEVFYLVALLRSALTDGEETQKLEYLKDQNRRILEFCEQAKINVKQYLPHHATQEEWVAHFGDKWDRFRSLKAEFDPRHILATGQRIFQNPSLSLFPPSSSSSSAASW

SEQ ID NO: 89947 - protein, 481 aa, Arabidopsis thaliana
  peptide (1)..(481): Ceres Seq. ID no. 12721548
MLKSPEEPLAVLHPSSAEDVARLVRTAYGSATAFPVSARGHGHSINGQAAAGRNGVVVEMNHGVTGTPKPLVRPDEMYVDVWGGELWVDVLKKTLEHGLAPKSWTDYLYLTVGGTLSNAGISGQAFHHGPQISNVLELDVVTGKGEVMRCSEEENTRLFHGVLGGLGQFGIITRARISLEPAPQRVRWIRVLYSSFKVFTEDQEYLISMHGQLKFDYVEGFVIVDEGLVNNWRSSFFSPRNPVKISSVSSNGSVLYCLEITKNYHDSDSEIVDQEVEILMKKLNFIPTSVFTTDLQYVDFLDRVHKAELKLRSKNLWEVPHPWLNLFVPKSRISDFDKGVFKGILGNKTSGPILIYPMNKDKWDERSSAVTPDEEVFYLVALLRSALTDGEETQKLEYLKDQNRRILEFCEQAKINVKQYLPHHATQEEWVAHFGDKWDRFRSLKAEFDPRHILATGQRIFQNPSLSLFPPSSSSSSAASW

SEQ ID NO: 89948 - DNA, 594 bp, Arabidopsis thaliana
  misc_feature (1)..(594): Ceres Seq. ID no. 12721549
  misc_feature (1)..(594): Ortholog of  Ceres SEQ ID NO 15175597 as cited in SEQ ID NO 58317
atggttggtgctaataagaaacaacgaaccgtccaagctagttcgaggaaaggttgtatgagaggaaaaggtggacccgataacgcgtcttgcacttacaaaggtgttagacaacgcacttggggcaaatgggtcgctgagatccgcgagcctaaccgaggagctcgtctttggctcggtaccttcgacacctcccgtgaagctgccttggcttatgactccgcagctcgtaagctctatgggcctgaggctcatctcaacctccctgagtccttaagaagttaccctaaaacggcgtcgtctccggcgtcccagactacaccaagcagcaacaccggtggaaaaagcagcagcgactctgagtcgccgtgttcatccaacgagatgtcatcatgtggaagagtgacagaggagatatcatgggagcatataaacgtggatttgccggtaatggatgattcttcaatatgggaagaagctacaatgtcgttaggatttccatgggttcatgaaggagataatgatatttctcggtttgatacttgtatttccggtggctattctaattgggattcctttcattccccactttga

SEQ ID NO: 89949 - protein, 197 aa, Arabidopsis thaliana
  peptide (1)..(197): Ceres Seq. ID no. 12721550
MVGANKKQRTVQASSRKGCMRGKGGPDNASCTYKGVRQRTWGKWVAEIREPNRGARLWLGTFDTSREAALAYDSAARKLYGPEAHLNLPESLRSYPKTASSPASQTTPSSNTGGKSSSDSESPCSSNEMSSCGRVTEEISWEHINVDLPVMDDSSIWEEATMSLGFPWVHEGDNDISRFDTCISGGYSNWDSFHSPL

SEQ ID NO: 89950 - protein, 178 aa, Arabidopsis thaliana
  peptide (1)..(178): Ceres Seq. ID no. 12721551
MRGKGGPDNASCTYKGVRQRTWGKWVAEIREPNRGARLWLGTFDTSREAALAYDSAARKLYGPEAHLNLPESLRSYPKTASSPASQTTPSSNTGGKSSSDSESPCSSNEMSSCGRVTEEISWEHINVDLPVMDDSSIWEEATMSLGFPWVHEGDNDISRFDTCISGGYSNWDSFHSPL

SEQ ID NO: 89951 - DNA, 1041 bp, Arabidopsis thaliana
  misc_feature (1)..(1041): Ceres Seq. ID no. 12721552
  misc_feature (1)..(1041): Ortholog of  Ceres SEQ ID NO 14304528 as cited in SEQ ID NO 53293
  misc_feature (1)..(1041): Ortholog of  Ceres SEQ ID NO 14315162 as cited in SEQ ID NO 60005
  misc_feature (1)..(1041): Ortholog of  Ceres SEQ ID NO 13659881 as cited in SEQ ID NO 66938
atggcagggttcttctatctaggagggagagacaacaacagcaacaacaacaagcaagatcatcatcaagtagacaaggatcatcatcatcaagacaagagcaattatctttatctttacaaagacgagatctataataacaacaagggtttcgagatttggcctccgcaatacttccaacaacaagaacatcaacaacaacaacaacagcaacaacatgcctcagctcctgcaaacttctactcatttggaatggttcctagcggaagcagcagcaacaacaacaataaccgtagccggagtttatacttcaacgtagtctccgatcatgagccgggagggttcacggtgacgagacaaggaggtatgaattgtcaagattgtggaaatcaagctaagaaagattgtcctcatatgagatgtagaacttgttgtaaaagccgaggctttcattgtcaaactcacgttaagagcacttgggttcctgctgctaaacgtcgtgagcgtttagcccaactcgcttccttgcagcaccactcagcctccagccgtgaaacgcaaaacgccaaacgccttcgagaagctagtggtggtgataataatgatgataaagaccatagtggtggtggtggatcggctcttgctaatacccgtgtggtgaatgctaattctaattcagggttggaggtgagtcaacacttaccaccggaggttaactcaccggcgatattccggtgcgttagagtgagctcaatagaagaggatgaagatgatcaagcatatgcttaccaaacggctgtgaacattggaggccatatcttcaaaggcattctctatgaccaaggaccagaacatcaagataatcatcaccttaacctacttgcttccactgcaaccaccaccaatgtggaggagaccgccactaagactgtcaccggtaacaataataatggattaatgcttgatccttcttcgctttacccagctcaactcaactccttcatcgcgggtacgccattcttcacacctccgaggtcttga

SEQ ID NO: 89952 - protein, 346 aa, Arabidopsis thaliana
  peptide (1)..(346): Ceres Seq. ID no. 12721553
MAGFFYLGGRDNNSNNNKQDHHQVDKDHHHQDKSNYLYLYKDEIYNNNKGFEIWPPQYFQQQEHQQQQQQQQHASAPANFYSFGMVPSGSSSNNNNNRSRSLYFNVVSDHEPGGFTVTRQGGMNCQDCGNQAKKDCPHMRCRTCCKSRGFHCQTHVKSTWVPAAKRRERLAQLASLQHHSASSRETQNAKRLREASGGDNNDDKDHSGGGGSALANTRVVNANSNSGLEVSQHLPPEVNSPAIFRCVRVSSIEEDEDDQAYAYQTAVNIGGHIFKGILYDQGPEHQDNHHLNLLASTATTTNVEETATKTVTGNNNNGLMLDPSSLYPAQLNSFIAGTPFFTPPRS

SEQ ID NO: 89953 - protein, 262 aa, Arabidopsis thaliana
  peptide (1)..(262): Ceres Seq. ID no. 12721554
MVPSGSSSNNNNNRSRSLYFNVVSDHEPGGFTVTRQGGMNCQDCGNQAKKDCPHMRCRTCCKSRGFHCQTHVKSTWVPAAKRRERLAQLASLQHHSASSRETQNAKRLREASGGDNNDDKDHSGGGGSALANTRVVNANSNSGLEVSQHLPPEVNSPAIFRCVRVSSIEEDEDDQAYAYQTAVNIGGHIFKGILYDQGPEHQDNHHLNLLASTATTTNVEETATKTVTGNNNNGLMLDPSSLYPAQLNSFIAGTPFFTPPRS

SEQ ID NO: 89954 - protein, 224 aa, Arabidopsis thaliana
  peptide (1)..(224): Ceres Seq. ID no. 12721555
MNCQDCGNQAKKDCPHMRCRTCCKSRGFHCQTHVKSTWVPAAKRRERLAQLASLQHHSASSRETQNAKRLREASGGDNNDDKDHSGGGGSALANTRVVNANSNSGLEVSQHLPPEVNSPAIFRCVRVSSIEEDEDDQAYAYQTAVNIGGHIFKGILYDQGPEHQDNHHLNLLASTATTTNVEETATKTVTGNNNNGLMLDPSSLYPAQLNSFIAGTPFFTPPRS

SEQ ID NO: 89955 - DNA, 996 bp, Arabidopsis thaliana
  misc_feature (1)..(996): Ceres Seq. ID no. 12721560
  misc_feature (1)..(996): Ortholog of  Ceres SEQ ID NO 12608114 as cited in SEQ ID NO 57218
  misc_feature (1)..(996): Ortholog of  Ceres SEQ ID NO 12625980 as cited in SEQ ID NO 65586
atgaagatcaggtgcgacgtctgcgataaagaagaagcgtcggtgttttgcacggccgacgaagcatctctctgcggcggctgcgaccaccaagtccaccacgctaacaaactcgcctctaaacatctccgtttctctctcctttatccttcttcttccaacacctcctctcctctctgcgacatctgtcaggataaaaaagctctgttgttctgtcaacaagatagagctattttatgcaaagattgcgattcatcgatccacgctgcgaacgaacacacaaagaaacacgataggtttcttcttacaggggttaagctctctgcaacatcgtctgtttacaaacctacttcgaaatcttcttcttcttcttcaagcaaccaagatttctctgtccctggatcatcaatctctaatcctcctcctctcaagaaacctctctcagctcctcctcagagcaacaagatccaacccttttcgaagatcaacggcggtgatgcgtcggtgaatcagtggggatccacaagcacgatttctgagtatttgatggatacgttacctggttggcacgttgaggatttcctcgattcctctcttcctacttatggtttctctaagagtggtgatgatgatggagtgttaccatatatggaaccagaagatgacaacaacactaagagaaacaacaacaacaacaacaacaacaacaacaatacagtgtcacttccatctaagaatttagggatttgggtccctcagattccacaaactcttccttcttcatacccaaatcaatacttttctcaagacaacaacatacagtttgggatgtacaacaaagaaacatcaccagaagtagtgtcttttgctccaatacaaaacatgaaacaacaaggacagaacaacaagagatggtatgatgatggtggcttcactgtcccacagatcactcctcctcctctttcttctaataaaaagtttagatctttctggtaa

SEQ ID NO: 89956 - protein, 331 aa, Arabidopsis thaliana
  peptide (1)..(331): Ceres Seq. ID no. 12721561
MKIRCDVCDKEEASVFCTADEASLCGGCDHQVHHANKLASKHLRFSLLYPSSSNTSSPLCDICQDKKALLFCQQDRAILCKDCDSSIHAANEHTKKHDRFLLTGVKLSATSSVYKPTSKSSSSSSSNQDFSVPGSSISNPPPLKKPLSAPPQSNKIQPFSKINGGDASVNQWGSTSTISEYLMDTLPGWHVEDFLDSSLPTYGFSKSGDDDGVLPYMEPEDDNNTKRNNNNNNNNNNNTVSLPSKNLGIWVPQIPQTLPSSYPNQYFSQDNNIQFGMYNKETSPEVVSFAPIQNMKQQGQNNKRWYDDGGFTVPQITPPPLSSNKKFRSFW

SEQ ID NO: 89957 - DNA, 348 bp, Arabidopsis thaliana
  misc_feature (1)..(348): Ceres Seq. ID no. 12721570
  misc_feature (1)..(348): Ortholog of  Ceres SEQ ID NO 13581889 as cited in SEQ ID NO 50900
atggatcttgcggcgaggaaatctgcgccaactaccggtggagtcaagaaacctcaccgttaccgtcccggaaccgtcgctcttcgtgagattcgtaaataccagaagagcacagagttgttgatccgtaaacttccttttcaacgtcttgttcgtgaaatcgcccaagatttcaagacggatctgagattccagagccatgcggtgttagctcttcaagaagctgcggaggcatatttggtgggtttgtttgaagacacaaatctgtgtgccattcatgcaaagagggttacgataatgcctaaagatgttcaattggcaagaaggattcgtggagagcgtgcttag

SEQ ID NO: 89958 - protein, 115 aa, Arabidopsis thaliana
  peptide (1)..(115): Ceres Seq. ID no. 12721571
MDLAARKSAPTTGGVKKPHRYRPGTVALREIRKYQKSTELLIRKLPFQRLVREIAQDFKTDLRFQSHAVLALQEAAEAYLVGLFEDTNLCAIHAKRVTIMPKDVQLARRIRGERA

SEQ ID NO: 89959 - DNA, 1644 bp, Arabidopsis thaliana
  misc_feature (1)..(1644): Ceres Seq. ID no. 12721572
  misc_feature (1)..(1644): Ortholog of  Ceres SEQ ID NO 15174947 as cited in SEQ ID NO 236
atggctgcaaaagccacaacccaaatcgtctccgacgtcaatcatctccgatacttcgctgtcttctttctcctctcgtgccacgtggcatccggcgacgaaggaacatgggagcttctcttaccaaacgtcggaatctcagcaatgcactctcagctcctccacaacgaccgtgtcataatgtacgaccgaaccaacttcggtccttccaacatctctctccctaacggagcctgccgcagtagcccaggtgacgcggtctcgaaaaccgactgcaccgctcactcggtcgaatacgacgtagctttgaaccgtatccgtcccttaacggtccaatccaacacttggtgctcctcaggaggagtcactcccgacggaactcttctacaaacaggaggtgatttagacggagaacgtaaagttagacttatggatccttgcgacgacaattcttgtgactggatagaagtcgataacggactcgctgcaagaagatggtacgctacgaaccatatcctccccgacggtcgtcagatcataatcggtggtcgaggtcaattcaattacgagtttttccccaaaacaaacgctccaaatttctacagtatcccgtttttgtccgaaaccaatgatcctggagacgaaaacaatctttaccctttcgttttcctcaacaccgatggtaacttgttcattttcgctaacaacagagcgatattgctcgattattccacaaacactgtcgtcagaacttatccggagatccctggaggtgatccaagaagctatccaagcactggctccgctgttcttttaccgatcaagaaccttgtgttagaggttcttgtgtgcggaggtgcaccgaaaggatcgtacaacctctcttggagaaacacttttgtcaaggctcttgacacgtgtgcgagaatcaatatcaacgacgtgaatcctcaatggatcgttgaaaagatgccgagagcgagagttatgggagacatgatgcttttacctgacggaaatgttctgttaattaacggtggttcttcagggacagctgcttgggagcttggtcgtgaaccggttttacatcctgatctttaccatcccgataaaccggtcggttcaagatttgaagttcaaaacccaagcactatccctcgaatgtaccattctatcgcgactttgcttcgtgacgggagaattctcgttggaggaagcaaccctcacgcgttttacaatttcaccggcgtgcttttcccgacggagctgagattagaagctttttcgccgtcgtatttggacactaagtactcgagtcttcgtccgagtattgtggatcctaggccacagacaacggtaaactacggtagagtcttgaggcttaggtttattgtgagcggaagagtgaaaagtccggttaaagttacgatgttatttccttcgtttactacacattctttctcgatgcatcaaaggcttttggttcttgatcatgtcatttcttttaaactcgggattagcaagatttatgaagttagagttaggactccaagctctgcgattcttgcaccacccggttattacatggttttcgttgtaaaccaagatatacccagtgaaggtctttgggtacgtttacagtga

SEQ ID NO: 89960 - protein, 547 aa, Arabidopsis thaliana
  peptide (1)..(547): Ceres Seq. ID no. 12721573
MAAKATTQIVSDVNHLRYFAVFFLLSCHVASGDEGTWELLLPNVGISAMHSQLLHNDRVIMYDRTNFGPSNISLPNGACRSSPGDAVSKTDCTAHSVEYDVALNRIRPLTVQSNTWCSSGGVTPDGTLLQTGGDLDGERKVRLMDPCDDNSCDWIEVDNGLAARRWYATNHILPDGRQIIIGGRGQFNYEFFPKTNAPNFYSIPFLSETNDPGDENNLYPFVFLNTDGNLFIFANNRAILLDYSTNTVVRTYPEIPGGDPRSYPSTGSAVLLPIKNLVLEVLVCGGAPKGSYNLSWRNTFVKALDTCARININDVNPQWIVEKMPRARVMGDMMLLPDGNVLLINGGSSGTAAWELGREPVLHPDLYHPDKPVGSRFEVQNPSTIPRMYHSIATLLRDGRILVGGSNPHAFYNFTGVLFPTELRLEAFSPSYLDTKYSSLRPSIVDPRPQTTVNYGRVLRLRFIVSGRVKSPVKVTMLFPSFTTHSFSMHQRLLVLDHVISFKLGISKIYEVRVRTPSSAILAPPGYYMVFVVNQDIPSEGLWVRLQ

SEQ ID NO: 89961 - protein, 499 aa, Arabidopsis thaliana
  peptide (1)..(499): Ceres Seq. ID no. 12721574
MHSQLLHNDRVIMYDRTNFGPSNISLPNGACRSSPGDAVSKTDCTAHSVEYDVALNRIRPLTVQSNTWCSSGGVTPDGTLLQTGGDLDGERKVRLMDPCDDNSCDWIEVDNGLAARRWYATNHILPDGRQIIIGGRGQFNYEFFPKTNAPNFYSIPFLSETNDPGDENNLYPFVFLNTDGNLFIFANNRAILLDYSTNTVVRTYPEIPGGDPRSYPSTGSAVLLPIKNLVLEVLVCGGAPKGSYNLSWRNTFVKALDTCARININDVNPQWIVEKMPRARVMGDMMLLPDGNVLLINGGSSGTAAWELGREPVLHPDLYHPDKPVGSRFEVQNPSTIPRMYHSIATLLRDGRILVGGSNPHAFYNFTGVLFPTELRLEAFSPSYLDTKYSSLRPSIVDPRPQTTVNYGRVLRLRFIVSGRVKSPVKVTMLFPSFTTHSFSMHQRLLVLDHVISFKLGISKIYEVRVRTPSSAILAPPGYYMVFVVNQDIPSEGLWVRLQ

SEQ ID NO: 89962 - protein, 487 aa, Arabidopsis thaliana
  peptide (1)..(487): Ceres Seq. ID no. 12721575
MYDRTNFGPSNISLPNGACRSSPGDAVSKTDCTAHSVEYDVALNRIRPLTVQSNTWCSSGGVTPDGTLLQTGGDLDGERKVRLMDPCDDNSCDWIEVDNGLAARRWYATNHILPDGRQIIIGGRGQFNYEFFPKTNAPNFYSIPFLSETNDPGDENNLYPFVFLNTDGNLFIFANNRAILLDYSTNTVVRTYPEIPGGDPRSYPSTGSAVLLPIKNLVLEVLVCGGAPKGSYNLSWRNTFVKALDTCARININDVNPQWIVEKMPRARVMGDMMLLPDGNVLLINGGSSGTAAWELGREPVLHPDLYHPDKPVGSRFEVQNPSTIPRMYHSIATLLRDGRILVGGSNPHAFYNFTGVLFPTELRLEAFSPSYLDTKYSSLRPSIVDPRPQTTVNYGRVLRLRFIVSGRVKSPVKVTMLFPSFTTHSFSMHQRLLVLDHVISFKLGISKIYEVRVRTPSSAILAPPGYYMVFVVNQDIPSEGLWVRLQ

SEQ ID NO: 89963 - DNA, 501 bp, Arabidopsis thaliana
  misc_feature (1)..(501): Ceres Seq. ID no. 12721576
  misc_feature (1)..(501): Ortholog of  Ceres SEQ ID NO 15177842 as cited in SEQ ID NO 51547
  misc_feature (1)..(501): Ortholog of  Ceres SEQ ID NO 13594859 as cited in SEQ ID NO 51974
  misc_feature (1)..(501): Ortholog of  Ceres SEQ ID NO 13597887 as cited in SEQ ID NO 64295
atggtgtttggatatgcatatcctgcttatgagtgcttcaaaacggtcgaactcaacaagcctgaaattcaacaacttcagttctggtgccagtattggattattgtagctgctttgacgattttcgaaagaattggtgatgctcttgtttcttggttaccaatgtatagcgaggcgaagttggctttcttcatttatctctggtttccaaagactaaaggaacaacatacgtttacgattctttcttcaggccatatatagcaaagcatgaaaatgaaattgaccgcaacttggtgaaggtaaagactagagctaaggatatggcaatgatatatctccaaaaagcaatcaaccaagggcagaccaaattctttgagatcttacagtatatcacagaacaatcaacaccaaaatctaaggctgaggaaaagaaagagacaacaatacctaaactcgatgatccaattcttaaggtgaaagaaaacgaagtcactaaatga

SEQ ID NO: 89964 - protein, 166 aa, Arabidopsis thaliana
  peptide (1)..(166): Ceres Seq. ID no. 12721577
MVFGYAYPAYECFKTVELNKPEIQQLQFWCQYWIIVAALTIFERIGDALVSWLPMYSEAKLAFFIYLWFPKTKGTTYVYDSFFRPYIAKHENEIDRNLVKVKTRAKDMAMIYLQKAINQGQTKFFEILQYITEQSTPKSKAEEKKETTIPKLDDPILKVKENEVTK

SEQ ID NO: 89965 - protein, 112 aa, Arabidopsis thaliana
  peptide (1)..(112): Ceres Seq. ID no. 12721578
MYSEAKLAFFIYLWFPKTKGTTYVYDSFFRPYIAKHENEIDRNLVKVKTRAKDMAMIYLQKAINQGQTKFFEILQYITEQSTPKSKAEEKKETTIPKLDDPILKVKENEVTK

SEQ ID NO: 89966 - DNA, 1140 bp, Arabidopsis thaliana
  misc_feature (1)..(1140): Ceres Seq. ID no. 12721590
  misc_feature (1)..(1140): Ortholog of  Ceres SEQ ID NO 13593955 as cited in SEQ ID NO 54278
  misc_feature (1)..(1140): Ortholog of  Ceres SEQ ID NO 13597380 as cited in SEQ ID NO 64054
  misc_feature (1)..(1140): Ortholog of  Ceres SEQ ID NO 12625474 as cited in SEQ ID NO 64169
  misc_feature (1)..(1140): Ortholog of  Ceres SEQ ID NO 13597502 as cited in SEQ ID NO 64681
atgaaacgaaacagtataaatattcatcacgttacttctttttcttcgagtccgttttggtgtgttttctttctcgtgttgttatgtaagacgtccaccaacgctttggtgaagcagccgccaaacgaaacgactccggcgataattgtgttcggagattcaatcgttgatgccggaaataatgacgacattatgacaacgttggctagatgcaattatcctccttacggcatcgattttgacggtggaattcctaccggaagattttgcaacggcaaagttgcgactgattttatagcgggaaaattcggaattaaaccaagtataccggcatatcgaaatccaaatttgaaaccagaagatctcttaaccggtgtaacatttgcgtctggtggtgctggttacgttcccttcacaacccaattatcgacgtacctttttatatataaaccattgttgttcttaaagggaggaatagctttatcgcagcaactgaagttattcgaagagtatgtagagaagatgaagaaaatggttggggaagaaaggacaaagctcataattaaaaacagtttgttcatggttatatgtggcagtaatgatataaccaacacctactttggtcttccttctgttcaacaacaatacgacgtcgcttcctttaccactcttatggccgacaatgctcgatcttttgctcaaaaattacatgaatatggagcgaggagaatacaagtattcggtgcaccaccagtaggatgtgtcccatcacagagaaccttagcaggagggccaacaagaaattgtgttgttaggttcaatgatgcaacaaagctctacaatgttaagctcgctgcaaatttgggttctttgtcaagaactttaggagacaagacaataatctacgttgacatatatgattctctccttgatatcattcttgaccctcgacaatatggatttaaggtggttgataaaggatgttgtggaactggactaattgaagttgctcttttatgcaacaactttgcagctgatgtatgtccaaatagagatgaatatgtgttttgggatagtttccatccgactgagaagacttacagaattatggccacaaaatattttgagagatatgtatga

SEQ ID NO: 89967 - protein, 379 aa, Arabidopsis thaliana
  peptide (1)..(379): Ceres Seq. ID no. 12721591
MKRNSINIHHVTSFSSSPFWCVFFLVLLCKTSTNALVKQPPNETTPAIIVFGDSIVDAGNNDDIMTTLARCNYPPYGIDFDGGIPTGRFCNGKVATDFIAGKFGIKPSIPAYRNPNLKPEDLLTGVTFASGGAGYVPFTTQLSTYLFIYKPLLFLKGGIALSQQLKLFEEYVEKMKKMVGEERTKLIIKNSLFMVICGSNDITNTYFGLPSVQQQYDVASFTTLMADNARSFAQKLHEYGARRIQVFGAPPVGCVPSQRTLAGGPTRNCVVRFNDATKLYNVKLAANLGSLSRTLGDKTIIYVDIYDSLLDIILDPRQYGFKVVDKGCCGTGLIEVALLCNNFAADVCPNRDEYVFWDSFHPTEKTYRIMATKYFERYV

SEQ ID NO: 89968 - protein, 315 aa, Arabidopsis thaliana
  peptide (1)..(315): Ceres Seq. ID no. 12721592
MTTLARCNYPPYGIDFDGGIPTGRFCNGKVATDFIAGKFGIKPSIPAYRNPNLKPEDLLTGVTFASGGAGYVPFTTQLSTYLFIYKPLLFLKGGIALSQQLKLFEEYVEKMKKMVGEERTKLIIKNSLFMVICGSNDITNTYFGLPSVQQQYDVASFTTLMADNARSFAQKLHEYGARRIQVFGAPPVGCVPSQRTLAGGPTRNCVVRFNDATKLYNVKLAANLGSLSRTLGDKTIIYVDIYDSLLDIILDPRQYGFKVVDKGCCGTGLIEVALLCNNFAADVCPNRDEYVFWDSFHPTEKTYRIMATKYFERYV

SEQ ID NO: 89969 - protein, 205 aa, Arabidopsis thaliana
  peptide (1)..(205): Ceres Seq. ID no. 12721593
MKKMVGEERTKLIIKNSLFMVICGSNDITNTYFGLPSVQQQYDVASFTTLMADNARSFAQKLHEYGARRIQVFGAPPVGCVPSQRTLAGGPTRNCVVRFNDATKLYNVKLAANLGSLSRTLGDKTIIYVDIYDSLLDIILDPRQYGFKVVDKGCCGTGLIEVALLCNNFAADVCPNRDEYVFWDSFHPTEKTYRIMATKYFERYV

SEQ ID NO: 89970 - DNA, 927 bp, Arabidopsis thaliana
  misc_feature (1)..(927): Ceres Seq. ID no. 12721605
  misc_feature (1)..(927): Ortholog of  Ceres SEQ ID NO 15179900 as cited in SEQ ID NO 66942
atggttggagttttccgacgatcactctcattccctaacaaaccttgcggccgatcatctccatcgtcaaagccacgtgtctctcatcacacaagatccatcagtctaccctgccggtctcatcccttaatctcccacgttaaccacgagatctctcagctcaaatcctggttctcattcgccggagaaactcacagccgcaccacctcttggatcaccgacggtctcagtctcctcaaggacgttcaagaaacgctcgctgatatacttcagctcccacaatctcaagaatctctacgaaaccgtcctgttttcttcgagaatcttctagaagatcttctccgattcgttgacgcttacggaatcttccgtacgtcgatcctctgcctccgtgagcaccagtccgccgctcaagtcgctctccgtaaaaaagacgacgagaaaatcgcatcttacctaaaatctcgccgatctctcgcaagagatatcgcgaaactgacgtcatcgatccgtgagccgaagacaaaacaccaacactgccacgtagacaacgttaacggaacgtacggtgacgcagagcttgcgtcagttataggtgacgtcattgaagtaactgttttggtttccgttgctctctttaacggcgtttacttatctctcagagccaccaaaacaacgccgtttatagggtttttgaaacgatccgaaaaaaaggagaaactagacgaaggaatcgtggagttgaagcaagttgaagagaaaagcttgattggtttaagcaagaagaagaacgaagaagtaaagagtttgatgaagaggatgatggaattggagaattcgatccgtgaaatcgaatgtgagagtgagaaagtgtttaggggtttgattagcactcgagtctcattgcttaatgccctaacacattaa

SEQ ID NO: 89971 - protein, 308 aa, Arabidopsis thaliana
  peptide (1)..(308): Ceres Seq. ID no. 12721606
MVGVFRRSLSFPNKPCGRSSPSSKPRVSHHTRSISLPCRSHPLISHVNHEISQLKSWFSFAGETHSRTTSWITDGLSLLKDVQETLADILQLPQSQESLRNRPVFFENLLEDLLRFVDAYGIFRTSILCLREHQSAAQVALRKKDDEKIASYLKSRRSLARDIAKLTSSIREPKTKHQHCHVDNVNGTYGDAELASVIGDVIEVTVLVSVALFNGVYLSLRATKTTPFIGFLKRSEKKEKLDEGIVELKQVEEKSLIGLSKKKNEEVKSLMKRMMELENSIREIECESEKVFRGLISTRVSLLNALTH

SEQ ID NO: 89972 - DNA, 2115 bp, Arabidopsis thaliana
  misc_feature (1)..(2115): Ceres Seq. ID no. 12721607
  misc_feature (1)..(2115): Ortholog of  Ceres SEQ ID NO 14311609 as cited in SEQ ID NO 58341
tttctctctctctctgatgattttgtttgtttgaagaaaagagaatattgttgtttgtctctcgtgatcgaaacaatgctttgtgattctcaaatacagtaacattttcaacatgctttgattccaaaaatccaaactttcattctctctctcaatctctctatatctccgagcagcgaggtagttgcacggcggccgccatgaatttccatcggcggcgctacccttactacaaccgtctccgtcgtctccttcctctcgttatcgccgtctctctatctctcctcattctcttcgcttttctctctttccttgctccgcctcctggagattccgatcgccttcctccacgcgttcgctactcatccaatgatgcgatcaaagctacaggtttccatattccgagagctggaggcagatcagatcgtgatatctggcgttcacgaaatgctgaattcttttttggatgcagcaatgcaagcagcaaattcgcaaattcgaaagcagtgacgagaaatgatcgatacttggtaatagccactagtggtggtttgaaccaacaacgaactggaattgtagatgcagttgttgcggcaaggattctaaatgctactcttgttgttcccaagttagaccagaagtcttactggaaggatgccagtgacttctcgcatattttcgatgttgattggtttatctcatttctgtctggagacgtcagaattataaagcaacttccactgaaaggagggcgtacatggagtacaagtagaatgcgtgtaccacggaaatgtaacgagagatgctatattaaccgtgttttacctgttcttctcaaaaggcatgcagttcaactgaacaaatttgactatagactttcaaacaagttgagtgatgacttgcaaaagctaagatgtagagtaaattaccatgctctaaagttcactgatcctatacttacaatgggtaatgaattggtccggcgcatgagattgaggagcaaacacttcattgctttacatttaaggtatgaacctgatatgcttgcattctcgggatgctattatggtggtggtgataaggaaaggagagaacttgcagcaattagaaggagatggaaaacattacatattaacaacccagagaaacagaggcgacaaggaagatgtccactcactccagaagaagtcggactgatgcttagagctttgggatatggcagtgatgttcatatatatgtcgcgtctggtgaagtatatggaggagaagaatcattggctcctttgaaagcactctttccacacttctattcaaaagacactatagctacaaaggaagagttagaacctttttcttcgtactcttctagaatggctgcactcgacttccttgtttgtgatgaaagcgacgtatttgtaaccaacaacaatggcaatatggcaaaaatattggctgggaggaggagatacttaggacataaacccactgttaggccgaatgcaaaaaagctttacagattattcatgaacaaagagaacacgacatgggaggagttttcatctaaagtccgttcgtttcagagagggttcatgggagagccaaaggaagtaagagctggtagaggtgaatttcacgaaaacccatccacgtgcatatgcgaagatacagaggctaaggcaaaggcgcaattagaatctagaaaacttggaaagaaaaacaaatccactaataaagacgcagcagtaactgtaaccaatgatgatcaaaccgaagaggatgacccagattggtcggagccagactatgaggaagaacagagtgatcttcaggacagaggattatacaacgggacaagtttagattacgatgatccatctacctctgatgagcctgagcttgaagcaatgctatcagattagttagatacgcatcagtgaccttcacatcactacactgaatctgtcctctgcttgggcacttcacagtgagttttccaaccttggtgctaagccttgttgtcaccattttgcatgtaatgtctcctgtacatagaaccacgcgatagagcattgttttgtttatcaggatctgaggacagatcaatttttttcagtc

SEQ ID NO: 89973 - protein, 572 aa, Arabidopsis thaliana
  peptide (1)..(572): Ceres Seq. ID no. 12721608
MNFHRRRYPYYNRLRRLLPLVIAVSLSLLILFAFLSFLAPPPGDSDRLPPRVRYSSNDAIKATGFHIPRAGGRSDRDIWRSRNAEFFFGCSNASSKFANSKAVTRNDRYLVIATSGGLNQQRTGIVDAVVAARILNATLVVPKLDQKSYWKDASDFSHIFDVDWFISFLSGDVRIIKQLPLKGGRTWSTSRMRVPRKCNERCYINRVLPVLLKRHAVQLNKFDYRLSNKLSDDLQKLRCRVNYHALKFTDPILTMGNELVRRMRLRSKHFIALHLRYEPDMLAFSGCYYGGGDKERRELAAIRRRWKTLHINNPEKQRRQGRCPLTPEEVGLMLRALGYGSDVHIYVASGEVYGGEESLAPLKALFPHFYSKDTIATKEELEPFSSYSSRMAALDFLVCDESDVFVTNNNGNMAKILAGRRRYLGHKPTVRPNAKKLYRLFMNKENTTWEEFSSKVRSFQRGFMGEPKEVRAGRGEFHENPSTCICEDTEAKAKAQLESRKLGKKNKSTNKDAAVTVTNDDQTEEDDPDWSEPDYEEEQSDLQDRGLYNGTSLDYDDPSTSDEPELEAMLSD

SEQ ID NO: 89974 - protein, 381 aa, Arabidopsis thaliana
  peptide (1)..(381): Ceres Seq. ID no. 12721609
MRVPRKCNERCYINRVLPVLLKRHAVQLNKFDYRLSNKLSDDLQKLRCRVNYHALKFTDPILTMGNELVRRMRLRSKHFIALHLRYEPDMLAFSGCYYGGGDKERRELAAIRRRWKTLHINNPEKQRRQGRCPLTPEEVGLMLRALGYGSDVHIYVASGEVYGGEESLAPLKALFPHFYSKDTIATKEELEPFSSYSSRMAALDFLVCDESDVFVTNNNGNMAKILAGRRRYLGHKPTVRPNAKKLYRLFMNKENTTWEEFSSKVRSFQRGFMGEPKEVRAGRGEFHENPSTCICEDTEAKAKAQLESRKLGKKNKSTNKDAAVTVTNDDQTEEDDPDWSEPDYEEEQSDLQDRGLYNGTSLDYDDPSTSDEPELEAMLSD

SEQ ID NO: 89975 - protein, 318 aa, Arabidopsis thaliana
  peptide (1)..(318): Ceres Seq. ID no. 12721610
MGNELVRRMRLRSKHFIALHLRYEPDMLAFSGCYYGGGDKERRELAAIRRRWKTLHINNPEKQRRQGRCPLTPEEVGLMLRALGYGSDVHIYVASGEVYGGEESLAPLKALFPHFYSKDTIATKEELEPFSSYSSRMAALDFLVCDESDVFVTNNNGNMAKILAGRRRYLGHKPTVRPNAKKLYRLFMNKENTTWEEFSSKVRSFQRGFMGEPKEVRAGRGEFHENPSTCICEDTEAKAKAQLESRKLGKKNKSTNKDAAVTVTNDDQTEEDDPDWSEPDYEEEQSDLQDRGLYNGTSLDYDDPSTSDEPELEAMLSD

SEQ ID NO: 89976 - DNA, 1485 bp, Arabidopsis thaliana
  misc_feature (1)..(1485): Ceres Seq. ID no. 12721643
  misc_feature (1)..(1485): Ortholog of  Ceres SEQ ID NO 14311367 as cited in SEQ ID NO 53834
atggcggatactgaaatgcaagagcaagatgtgccgtctggtaccaaaggtgttgtagaggagccttcagaactagagaaagacctaaactctattgaaagacctaagtcccctgttccagaggatacgactcatactttggatagtgatgttcatttatctgatgctcccattgctaatcaaattgaggctaatgaagaggttggtggtcagaacagtgttgatgggaggaatggtgatgttgatcagtctgaaaagaagattactagtgatggcggtcaagaggagacaacacttggggaatcaaatcctttgaagggggatccgtcgagtcctcatgttcctgaagaaagtgttaagaagtggaagacatggttgttgagtgatgctgaggccagggaagttgatgaagcaggggcaccacaggatcaagaggcgtttattaaagaagtggaggccttcaacaaggagaatttcctggaatttaaagccccaaagttttacggacagcccttaaattgtctcaagctttggagagccgttatcaagttaggtggctacgatgtggtcaccacatctaagctatggcggcaagttggagaatcgttccatcctccaaagtatggcttgtattgtcctcaatcttcaaccttttccgctttcttaacatgcactacagtctcctggacattccgcattttctatgaaaaggcacttttggagtatgagaagcatttaaggcaaaatggtgagcttaaccttcctggttcagcttctcttccgtcttcaggcattgaaaaggaggcaagtagccatcaagcttcagggtcaggcagaacaagaagagatgctgcagctcgtgctatgcaaggttggcattctcagcgccttcttggatctggggaggttactgagcctattgttaaggagaaaggcttgaattcaaccccaaagcaaaagaacctcaaaaacattggtaatattcctaagcgatggctattgtgtgcagaaacaaaaaacaacaaccggcatggaccttgttttttcacacgaatcagaaaaacagttacgaaagataatcatctcctgtatttttgtgttgcttatgcaagattgctttaccatgtgcaattccatacaatcttatccatcgaaaaaccctgcattgtcaatgtttggtcaactgccgaggttatagatgttggaccccctgcagactgggtgaagatcaatgtcagagaaactaaagactgctttgagatatttgccctggtacctggacttcttcgcgaagaggtccgtgttcagtcagaccctgcagggcggctagttatagcaggccaacctgagcaacttgacaatccttggggaatcacacccttcaaaaaggttgtgaactttcccgcaagaatcgatccgctgcacacgtcagcggttgtgagcctgcatggtcgactgtttgtgcgagtcccatttgagcagtga

SEQ ID NO: 89977 - protein, 494 aa, Arabidopsis thaliana
  peptide (1)..(494): Ceres Seq. ID no. 12721644
MADTEMQEQDVPSGTKGVVEEPSELEKDLNSIERPKSPVPEDTTHTLDSDVHLSDAPIANQIEANEEVGGQNSVDGRNGDVDQSEKKITSDGGQEETTLGESNPLKGDPSSPHVPEESVKKWKTWLLSDAEAREVDEAGAPQDQEAFIKEVEAFNKENFLEFKAPKFYGQPLNCLKLWRAVIKLGGYDVVTTSKLWRQVGESFHPPKYGLYCPQSSTFSAFLTCTTVSWTFRIFYEKALLEYEKHLRQNGELNLPGSASLPSSGIEKEASSHQASGSGRTRRDAAARAMQGWHSQRLLGSGEVTEPIVKEKGLNSTPKQKNLKNIGNIPKRWLLCAETKNNNRHGPCFFTRIRKTVTKDNHLLYFCVAYARLLYHVQFHTILSIEKPCIVNVWSTAEVIDVGPPADWVKINVRETKDCFEIFALVPGLLREEVRVQSDPAGRLVIAGQPEQLDNPWGITPFKKVVNFPARIDPLHTSAVVSLHGRLFVRVPFEQ

SEQ ID NO: 89978 - protein, 489 aa, Arabidopsis thaliana
  peptide (1)..(489): Ceres Seq. ID no. 12721645
MQEQDVPSGTKGVVEEPSELEKDLNSIERPKSPVPEDTTHTLDSDVHLSDAPIANQIEANEEVGGQNSVDGRNGDVDQSEKKITSDGGQEETTLGESNPLKGDPSSPHVPEESVKKWKTWLLSDAEAREVDEAGAPQDQEAFIKEVEAFNKENFLEFKAPKFYGQPLNCLKLWRAVIKLGGYDVVTTSKLWRQVGESFHPPKYGLYCPQSSTFSAFLTCTTVSWTFRIFYEKALLEYEKHLRQNGELNLPGSASLPSSGIEKEASSHQASGSGRTRRDAAARAMQGWHSQRLLGSGEVTEPIVKEKGLNSTPKQKNLKNIGNIPKRWLLCAETKNNNRHGPCFFTRIRKTVTKDNHLLYFCVAYARLLYHVQFHTILSIEKPCIVNVWSTAEVIDVGPPADWVKINVRETKDCFEIFALVPGLLREEVRVQSDPAGRLVIAGQPEQLDNPWGITPFKKVVNFPARIDPLHTSAVVSLHGRLFVRVPFEQ

SEQ ID NO: 89979 - DNA, 1854 bp, Arabidopsis thaliana
  misc_feature (1)..(1854): Ceres Seq. ID no. 12721650
  misc_feature (1)..(1854): Ortholog of  Ceres SEQ ID NO 12624774 as cited in SEQ ID NO 63620
  misc_feature (1)..(1854): Ortholog of  Ceres SEQ ID NO 14307940 as cited in SEQ ID NO 0
  misc_feature (1)..(1854): Ortholog of  Ceres SEQ ID NO 14308560 as cited in SEQ ID NO 0
atggattcagatttcggaatccccagagaactctctcctcttcaacaactccgatctcagtaccaccctgagcttcctccttgtctccaggggactactgtccgtgttgaacttggtgatggaaccactgtggcaaaggctggtgatgctcatatcattgcccgtgccttcccacatactctaggccagcctttggctcatttcctcagggcaactgctaaagttgctgatgctcagatcattactgaacatccagtgaagagggtcggaattgtgttctgtggaaggcaggctcctggtgggcacaatgtagtttggggtctatacgaggctctcaaagtgcacaacgcgaagaacactttgcttggatttttgggtggttctgaaggtctctttgcccagaagaccctggagatcactgatgaggtcctccaaacttacaaaaaccaaggtggctatgatatgcttggaagaaccaaggatcagattagaacaaccgaacaggtcaatgctgcactaaaagcatgcacggatttgaaattggatagcctagttatcattggaggtgtaacatcaaacacagatgccgctcatcttgctgaattttttgctgaagcaaaatgctcaacaaaggtagttggtgttccggtcactattaatggagatcttaagaatcagtttgtggaagcaaatgttggtttcgatactacatgcaaggtgaattctcagctcattagcaatatctgcaccgatgccctttcagcagagaagtattattactttgtccgtctcatgggtcggaagcattcacatgttgcccttgagtgtacacttcagtctcaccccaacatggtgatactgggtgaggaggttacagcatctaagctcacaatatttgacatcataaaacaaatctgtgatgctgttcaagcaagagccgaacaagacaaaaatcatggagtcatcctaattcctgaagggcttgttgagagtattcctgaactctatgctctgttgaaggaaattcatggattgcttaaggagggtgtgcaggttgataatatttctactcagttgtcatcttggtcatctgctttgtttgagtttttgcctccattcattaagaaacagctacttctccatcccgagtctgatgattctgctcagctatcccagattgagacggagaaacttctggcttatcttgtggagactgaaatgaacaagcgcttgaaagaaggaacctacaaagggaagaaattcaacgctatctgtcacttttttggttaccaagctcgtggatctcttccatcaaaattcgattgtgactacgcctatgttcttggacatgtatgttaccacatcctcgcagctggtttgaatggttacatggcgacagtgactaacctgaagagtcctgtaaacaaatggaaatgcggggctgcgcctatctcagcaatgatgacggttaagcgttggtcccaaaattctggttctactacgattggtagacctgtaattcatccagcttcagttgacttgaaaggaaaagcatacgatctattgagacaaaacgcgcagaaattcttgatggaagatatgtaccgaaacccaggaccagtccagtatgatggtccaggtgcagatgcaaaggcggtaagtctgtgtgtagaagaccaggattacatggggaaaatcaagaagctgcaggagtatcttgatcaggtgaggacgattgtgaaaccgggttgctctcaagatgttttgaaagcggcattgagtgttatggcctcggtgactgatgttctcactacgatctcatcttcttccaccagcggtcagcaatttgcttaa

SEQ ID NO: 89980 - protein, 617 aa, Arabidopsis thaliana
  peptide (1)..(617): Ceres Seq. ID no. 12721651
MDSDFGIPRELSPLQQLRSQYHPELPPCLQGTTVRVELGDGTTVAKAGDAHIIARAFPHTLGQPLAHFLRATAKVADAQIITEHPVKRVGIVFCGRQAPGGHNVVWGLYEALKVHNAKNTLLGFLGGSEGLFAQKTLEITDEVLQTYKNQGGYDMLGRTKDQIRTTEQVNAALKACTDLKLDSLVIIGGVTSNTDAAHLAEFFAEAKCSTKVVGVPVTINGDLKNQFVEANVGFDTTCKVNSQLISNICTDALSAEKYYYFVRLMGRKHSHVALECTLQSHPNMVILGEEVTASKLTIFDIIKQICDAVQARAEQDKNHGVILIPEGLVESIPELYALLKEIHGLLKEGVQVDNISTQLSSWSSALFEFLPPFIKKQLLLHPESDDSAQLSQIETEKLLAYLVETEMNKRLKEGTYKGKKFNAICHFFGYQARGSLPSKFDCDYAYVLGHVCYHILAAGLNGYMATVTNLKSPVNKWKCGAAPISAMMTVKRWSQNSGSTTIGRPVIHPASVDLKGKAYDLLRQNAQKFLMEDMYRNPGPVQYDGPGADAKAVSLCVEDQDYMGKIKKLQEYLDQVRTIVKPGCSQDVLKAALSVMASVTDVLTTISSSSTSGQQFA

SEQ ID NO: 89981 - protein, 463 aa, Arabidopsis thaliana
  peptide (1)..(463): Ceres Seq. ID no. 12721652
MLGRTKDQIRTTEQVNAALKACTDLKLDSLVIIGGVTSNTDAAHLAEFFAEAKCSTKVVGVPVTINGDLKNQFVEANVGFDTTCKVNSQLISNICTDALSAEKYYYFVRLMGRKHSHVALECTLQSHPNMVILGEEVTASKLTIFDIIKQICDAVQARAEQDKNHGVILIPEGLVESIPELYALLKEIHGLLKEGVQVDNISTQLSSWSSALFEFLPPFIKKQLLLHPESDDSAQLSQIETEKLLAYLVETEMNKRLKEGTYKGKKFNAICHFFGYQARGSLPSKFDCDYAYVLGHVCYHILAAGLNGYMATVTNLKSPVNKWKCGAAPISAMMTVKRWSQNSGSTTIGRPVIHPASVDLKGKAYDLLRQNAQKFLMEDMYRNPGPVQYDGPGADAKAVSLCVEDQDYMGKIKKLQEYLDQVRTIVKPGCSQDVLKAALSVMASVTDVLTTISSSSTSGQQFA

SEQ ID NO: 89982 - protein, 353 aa, Arabidopsis thaliana
  peptide (1)..(353): Ceres Seq. ID no. 12721653
MGRKHSHVALECTLQSHPNMVILGEEVTASKLTIFDIIKQICDAVQARAEQDKNHGVILIPEGLVESIPELYALLKEIHGLLKEGVQVDNISTQLSSWSSALFEFLPPFIKKQLLLHPESDDSAQLSQIETEKLLAYLVETEMNKRLKEGTYKGKKFNAICHFFGYQARGSLPSKFDCDYAYVLGHVCYHILAAGLNGYMATVTNLKSPVNKWKCGAAPISAMMTVKRWSQNSGSTTIGRPVIHPASVDLKGKAYDLLRQNAQKFLMEDMYRNPGPVQYDGPGADAKAVSLCVEDQDYMGKIKKLQEYLDQVRTIVKPGCSQDVLKAALSVMASVTDVLTTISSSSTSGQQFA

SEQ ID NO: 89983 - DNA, 2532 bp, Arabidopsis thaliana
  misc_feature (1)..(2532): Ceres Seq. ID no. 12721679
  misc_feature (1)..(2532): Ortholog of  Ceres SEQ ID NO 13582534 as cited in SEQ ID NO 57409
  misc_feature (1)..(2532): Ortholog of  Ceres SEQ ID NO 15180683 as cited in SEQ ID NO 0
atgagaagtgtaccaaactaccaccattctttcttcattttcctcattttaattctgtttcttgctttctctgtttctccaaacactctttcagccacagaatctctcactatctcaagcaacaaaaccattatatctcctagtcaaatcttcgagctcggtttcttcaatcccgcatcaagttcgcgttggtatctcggcatatggtacaagataatccctataagaacctacgtatgggttgcaaacagagacaatcctctctctagctccaacggaactctcaaaatatccggcaataacctcgtcattttcgatcagtccgataggcctgtttggtcgacgaatataaccggaggagatgtgagatcaccagtggctgcagagcttcttgataacggtaatttcttgctcagagactccaataacagacttctatggcagagtttcgattttccgacagatactttacttgcggagatgaaattgggatgggatcagaaaaccggattcaacaggatcttgagatcctggaaaacaacagatgatccatcaagcggtgagttttcgacaaaactcgaaaccagcgagttccctgagttttacatatgcagcaaggagtcgatactataccgcagcggtccatggaatggaatgcgttttagcagcgtaccagggacaattcaagttgattacatggtttacaatttcacagcaagtaaggaggaagtgacttactcataccgaatcaacaaaacaaacttatactcgagattatacttaaactctgcgggtttattacaacgattgacttggtttgagacaacacagagttggaagcaactatggtactcaccgaaggacctatgcgataactacaaagtgtgcgggaatttcggttattgcgactcgaacagtttaccaaattgttattgtatcaaagggtttaagccagtgaatgagcaagcgtgggacttgagagatggctccgctggttgcatgaggaagacgaggctgagctgtgacggtagagatggttttacccggttgaagaggatgaaattgccagataccacggcgacaattgtggacagagaaattgggttgaaagtatgtaaagaaaggtgtctagaagattgtaattgcactgcgttcgctaatgcggatattcgcaatggcgggtctggttgtgtgatttggaccagagagattttggatatgcgaaattatgctaagggaggtcaggatctttacgttagactagccgctgctgaactcgaggacaagagaatcaaaaatgaaaaaattataggttcgagtattggagtgagcattttgcttcttttaagttttgtcatcttccatttttggaaaaggaagcagaagcgatcaataacaattcaaacacctaatgttgatcaagtgagaagccaagactcgctaatcaacgatgtggtagtatctaggaggggttacacatccaaagaaaaaaaaagtgagtacctagagcttccattgttggagttggaagctcttgccacggcaacaaacaatttttctaacgacaacaagcttggacaaggtggattcggaattgtttacaagggaagattacttgacggaaaagaaattgcggtaaagagactatcgaaaatgtcctcacaagggaccgatgagttcatgaacgaggttagattaattgcaaagcttcagcacataaaccttgtccggcttctaggttgttgcgtcgataagggtgagaagatgttgatctatgagtacttggagaatttaagccttgactcgcatctctttgaccaaacacgaagctctaacttaaattggcaaaagagatttgatattatcaatggtattgctagaggacttctatatcttcaccaagattcacggtgtaggattatccatagagacttgaaagcaagtaacgtattgcttgataaaaatatgactccaaagatctcggatttcggtatggcgaggatctttggacgggaggagacagaggctaatacaaggagggtggtcggaacttacggctacatgtctccagaatatgcaatggacgggatattctcgatgaagtcggatgttttcagctttggggtcttgcttctagagattataagtggaaaaagaaacaaaggattctacaactcaaaccgtgatcttaatctcctcggttttgtgtggaggcattggaaggaaggaaacgagctagagattgtagatccgatcaacatcgattctttgtcatcaaagttcccgacacatgaaatcttaagatgtatacaaattggtctcttgtgtgttcaagaacgagccgaagacagaccagtgatgtcctcggtaatggtgatgcttggaagcgaaactaccgctattcctcagcctaaacgtcctggattttgcattggtagaagtcctcttgaggctgattcttcttcaagtacacagcgcgacgatgaatgtacagtgaaccaaatcactctctcggtcattgacgctcggtaa

SEQ ID NO: 89984 - protein, 843 aa, Arabidopsis thaliana
  peptide (1)..(843): Ceres Seq. ID no. 12721680
MRSVPNYHHSFFIFLILILFLAFSVSPNTLSATESLTISSNKTIISPSQIFELGFFNPASSSRWYLGIWYKIIPIRTYVWVANRDNPLSSSNGTLKISGNNLVIFDQSDRPVWSTNITGGDVRSPVAAELLDNGNFLLRDSNNRLLWQSFDFPTDTLLAEMKLGWDQKTGFNRILRSWKTTDDPSSGEFSTKLETSEFPEFYICSKESILYRSGPWNGMRFSSVPGTIQVDYMVYNFTASKEEVTYSYRINKTNLYSRLYLNSAGLLQRLTWFETTQSWKQLWYSPKDLCDNYKVCGNFGYCDSNSLPNCYCIKGFKPVNEQAWDLRDGSAGCMRKTRLSCDGRDGFTRLKRMKLPDTTATIVDREIGLKVCKERCLEDCNCTAFANADIRNGGSGCVIWTREILDMRNYAKGGQDLYVRLAAAELEDKRIKNEKIIGSSIGVSILLLLSFVIFHFWKRKQKRSITIQTPNVDQVRSQDSLINDVVVSRRGYTSKEKKSEYLELPLLELEALATATNNFSNDNKLGQGGFGIVYKGRLLDGKEIAVKRLSKMSSQGTDEFMNEVRLIAKLQHINLVRLLGCCVDKGEKMLIYEYLENLSLDSHLFDQTRSSNLNWQKRFDIINGIARGLLYLHQDSRCRIIHRDLKASNVLLDKNMTPKISDFGMARIFGREETEANTRRVVGTYGYMSPEYAMDGIFSMKSDVFSFGVLLLEIISGKRNKGFYNSNRDLNLLGFVWRHWKEGNELEIVDPINIDSLSSKFPTHEILRCIQIGLLCVQERAEDRPVMSSVMVMLGSETTAIPQPKRPGFCIGRSPLEADSSSSTQRDDECTVNQITLSVIDAR

SEQ ID NO: 89985 - protein, 683 aa, Arabidopsis thaliana
  peptide (1)..(683): Ceres Seq. ID no. 12721681
MKLGWDQKTGFNRILRSWKTTDDPSSGEFSTKLETSEFPEFYICSKESILYRSGPWNGMRFSSVPGTIQVDYMVYNFTASKEEVTYSYRINKTNLYSRLYLNSAGLLQRLTWFETTQSWKQLWYSPKDLCDNYKVCGNFGYCDSNSLPNCYCIKGFKPVNEQAWDLRDGSAGCMRKTRLSCDGRDGFTRLKRMKLPDTTATIVDREIGLKVCKERCLEDCNCTAFANADIRNGGSGCVIWTREILDMRNYAKGGQDLYVRLAAAELEDKRIKNEKIIGSSIGVSILLLLSFVIFHFWKRKQKRSITIQTPNVDQVRSQDSLINDVVVSRRGYTSKEKKSEYLELPLLELEALATATNNFSNDNKLGQGGFGIVYKGRLLDGKEIAVKRLSKMSSQGTDEFMNEVRLIAKLQHINLVRLLGCCVDKGEKMLIYEYLENLSLDSHLFDQTRSSNLNWQKRFDIINGIARGLLYLHQDSRCRIIHRDLKASNVLLDKNMTPKISDFGMARIFGREETEANTRRVVGTYGYMSPEYAMDGIFSMKSDVFSFGVLLLEIISGKRNKGFYNSNRDLNLLGFVWRHWKEGNELEIVDPINIDSLSSKFPTHEILRCIQIGLLCVQERAEDRPVMSSVMVMLGSETTAIPQPKRPGFCIGRSPLEADSSSSTQRDDECTVNQITLSVIDAR

SEQ ID NO: 89986 - protein, 625 aa, Arabidopsis thaliana
  peptide (1)..(625): Ceres Seq. ID no. 12721682
MRFSSVPGTIQVDYMVYNFTASKEEVTYSYRINKTNLYSRLYLNSAGLLQRLTWFETTQSWKQLWYSPKDLCDNYKVCGNFGYCDSNSLPNCYCIKGFKPVNEQAWDLRDGSAGCMRKTRLSCDGRDGFTRLKRMKLPDTTATIVDREIGLKVCKERCLEDCNCTAFANADIRNGGSGCVIWTREILDMRNYAKGGQDLYVRLAAAELEDKRIKNEKIIGSSIGVSILLLLSFVIFHFWKRKQKRSITIQTPNVDQVRSQDSLINDVVVSRRGYTSKEKKSEYLELPLLELEALATATNNFSNDNKLGQGGFGIVYKGRLLDGKEIAVKRLSKMSSQGTDEFMNEVRLIAKLQHINLVRLLGCCVDKGEKMLIYEYLENLSLDSHLFDQTRSSNLNWQKRFDIINGIARGLLYLHQDSRCRIIHRDLKASNVLLDKNMTPKISDFGMARIFGREETEANTRRVVGTYGYMSPEYAMDGIFSMKSDVFSFGVLLLEIISGKRNKGFYNSNRDLNLLGFVWRHWKEGNELEIVDPINIDSLSSKFPTHEILRCIQIGLLCVQERAEDRPVMSSVMVMLGSETTAIPQPKRPGFCIGRSPLEADSSSSTQRDDECTVNQITLSVIDAR

SEQ ID NO: 89987 - DNA, 2773 bp, Arabidopsis thaliana
  misc_feature (1)..(2773): Ceres Seq. ID no. 12721683
  misc_feature (1)..(2773): Ortholog of  Ceres SEQ ID NO 13582534 as cited in SEQ ID NO 57409
  misc_feature (1)..(2773): Ortholog of  Ceres SEQ ID NO 13597268 as cited in SEQ ID NO 63929
aaaacagaacacaagaaagtgtcctagctagagagagagagagagatgagaaatgtaccaaactatcatcattcttacttcatattattcatcataattctgtttcttgctttctctgtttatgcaagcaacttttcagccacagaatctctcactatctcaagcaacaaaaccattatatctcctagtcaaatcttcgagctcggtttcttcaatcccgactcaagttcacgttggtatctcggcatatggtacaagataatccctataagaacctacgtatgggttgcaaacagagacaatcctctctctagttccaacggaactctcaaaatatccgacaataacctcgtcattttcgatcagtccgataggcctgtttggtcgacgaatataaccggaggagatgtgagatcaccagtggctgcagagcttcttgattacggtaattttgttcttagagactccaaaaataataaaccaagtggatttttgtggcagagtttcgatttcccgacagatactttactatcggatatgaaaatgggatgggataacaaaagcggaggattcaacagaatcttgagatcttggaaaaccacagatgatccgtcaagcggagatttctcgactaaactccgaaccagcgggttcccggagttttacatatacaacaaagagtccataacgtacaggagcggtccatggctcggaaatcggtttagcagcgtaccggggatgaaaccagttgattacatagacaacagtttcacagagaataatcaacaagttgtttactcataccgagtcaacaaaaccaacatttactcgatattaagcctaagctccacgggactattacaacgattaacttggatggaggcagcacagagttggaaacagttatggtactcaccaaaggacctatgtgataactacaaagagtgtgggaattacggttattgcgatgcgaacacttcacctatttgtaattgtatcaaagggtttgagccaatgaatgagcaagcggctttgagagatgattctgttggttgcgtgaggaagacgaagctaagctgtgacggtagagatgggtttgtgcggttgaagaagatgagactgccagatactacagagacaagtgtggacaaaggaattgggttgaaagaatgtgaagagaggtgcctaaagggttgtaattgtacggcgtttgctaatacggatattcgtaatggcggttcaggttgtgtgatttggtccggagggctgttcgatatccgaaattatgctaagggaggtcaggatctttacgttagagtagctgctggtgatctagaggacaagagaatcaaaagtaaaaaaatcataggttcgagtattggagtgagcattttgcttcttttaagtttcatcatcttccatttttggaaaaggaagcagaagcgatcaataacaattcaaacacctattgttgatcttgtgagaagccaagattctctaatgaacgaattggtaaaagcaagcaggagttacacatccaaagaaaacaaaaccgattatctagagctcccattgatggagtggaaagctttagccatggcaacaaacaatttttcgacggacaataagcttggacaaggtggttttggtattgtttacaagggaatgttacttgatggaaaagaaatcgcggtaaagagactatcgaaaatgtcttcacaagggaccgatgagttcatgaacgaggttagattaattgcaaagcttcagcacataaaccttgtccggcttctaggttgttgcgtcgataagggtgagaagatgttgatctatgagtacttggagaatctaagccttgactcgcatctctttgaccaaacacgaagctctaacttaaattggcaaaagagatttgatattatcaatggtattgctagaggacttctatatcttcaccaagattcacggtgtaggattatccatagagacttgaaagcaagtaacgtattgcttgataaaaatatgactccaaagatctccgattttgggatggcgaggatctttggacgggaggagacagaggctaatacaaggagggtggtcggaacttacggctacatgtctccagaatatgcaatggacgggatattctcgatgaagtcggatgttttcagctttggggtcttgcttctagagattataagtggaaaaagaaacaaaggattctacaactcaaaccgtgatcttaatctccttggttttgtgtggaggcattggaaggaaggaaaagagctagagattgtagatccgatcaacatcgatgctttgtcatcagaattcccgacacatgaaatcttaagatgtatacaaattggtctcttgtgtgttcaagaacgagccgaagacagaccagtgatgtcctcggtaatggtgatgcttggaagcgaaactacggctattcctcagcctaaacgtcctggtttttgcgtggggagaagttctcttgaggttgattcttcgtcaagtacacagcgagacgatgaatgtacagtgaaccaagtcactctctcggtcattgacgctcggtaatatgtaagattgtaagttatcgacccactctttttatataaaaatatagacacagggcagtaaggtctccacactaggggctgatactttgcatcagtcagtgataccttgtgtaacaagtttcctttgcctccatggaacgtatacaaaagttgtattcaacttcgttgtaaatataattaag

SEQ ID NO: 89988 - protein, 847 aa, Arabidopsis thaliana
  peptide (1)..(847): Ceres Seq. ID no. 12721684
MRNVPNYHHSYFILFIIILFLAFSVYASNFSATESLTISSNKTIISPSQIFELGFFNPDSSSRWYLGIWYKIIPIRTYVWVANRDNPLSSSNGTLKISDNNLVIFDQSDRPVWSTNITGGDVRSPVAAELLDYGNFVLRDSKNNKPSGFLWQSFDFPTDTLLSDMKMGWDNKSGGFNRILRSWKTTDDPSSGDFSTKLRTSGFPEFYIYNKESITYRSGPWLGNRFSSVPGMKPVDYIDNSFTENNQQVVYSYRVNKTNIYSILSLSSTGLLQRLTWMEAAQSWKQLWYSPKDLCDNYKECGNYGYCDANTSPICNCIKGFEPMNEQAALRDDSVGCVRKTKLSCDGRDGFVRLKKMRLPDTTETSVDKGIGLKECEERCLKGCNCTAFANTDIRNGGSGCVIWSGGLFDIRNYAKGGQDLYVRVAAGDLEDKRIKSKKIIGSSIGVSILLLLSFIIFHFWKRKQKRSITIQTPIVDLVRSQDSLMNELVKASRSYTSKENKTDYLELPLMEWKALAMATNNFSTDNKLGQGGFGIVYKGMLLDGKEIAVKRLSKMSSQGTDEFMNEVRLIAKLQHINLVRLLGCCVDKGEKMLIYEYLENLSLDSHLFDQTRSSNLNWQKRFDIINGIARGLLYLHQDSRCRIIHRDLKASNVLLDKNMTPKISDFGMARIFGREETEANTRRVVGTYGYMSPEYAMDGIFSMKSDVFSFGVLLLEIISGKRNKGFYNSNRDLNLLGFVWRHWKEGKELEIVDPINIDALSSEFPTHEILRCIQIGLLCVQERAEDRPVMSSVMVMLGSETTAIPQPKRPGFCVGRSSLEVDSSSSTQRDDECTVNQVTLSVIDAR

SEQ ID NO: 89989 - protein, 683 aa, Arabidopsis thaliana
  peptide (1)..(683): Ceres Seq. ID no. 12721685
MKMGWDNKSGGFNRILRSWKTTDDPSSGDFSTKLRTSGFPEFYIYNKESITYRSGPWLGNRFSSVPGMKPVDYIDNSFTENNQQVVYSYRVNKTNIYSILSLSSTGLLQRLTWMEAAQSWKQLWYSPKDLCDNYKECGNYGYCDANTSPICNCIKGFEPMNEQAALRDDSVGCVRKTKLSCDGRDGFVRLKKMRLPDTTETSVDKGIGLKECEERCLKGCNCTAFANTDIRNGGSGCVIWSGGLFDIRNYAKGGQDLYVRVAAGDLEDKRIKSKKIIGSSIGVSILLLLSFIIFHFWKRKQKRSITIQTPIVDLVRSQDSLMNELVKASRSYTSKENKTDYLELPLMEWKALAMATNNFSTDNKLGQGGFGIVYKGMLLDGKEIAVKRLSKMSSQGTDEFMNEVRLIAKLQHINLVRLLGCCVDKGEKMLIYEYLENLSLDSHLFDQTRSSNLNWQKRFDIINGIARGLLYLHQDSRCRIIHRDLKASNVLLDKNMTPKISDFGMARIFGREETEANTRRVVGTYGYMSPEYAMDGIFSMKSDVFSFGVLLLEIISGKRNKGFYNSNRDLNLLGFVWRHWKEGKELEIVDPINIDALSSEFPTHEILRCIQIGLLCVQERAEDRPVMSSVMVMLGSETTAIPQPKRPGFCVGRSSLEVDSSSSTQRDDECTVNQVTLSVIDAR

SEQ ID NO: 89990 - protein, 681 aa, Arabidopsis thaliana
  peptide (1)..(681): Ceres Seq. ID no. 12721686
MGWDNKSGGFNRILRSWKTTDDPSSGDFSTKLRTSGFPEFYIYNKESITYRSGPWLGNRFSSVPGMKPVDYIDNSFTENNQQVVYSYRVNKTNIYSILSLSSTGLLQRLTWMEAAQSWKQLWYSPKDLCDNYKECGNYGYCDANTSPICNCIKGFEPMNEQAALRDDSVGCVRKTKLSCDGRDGFVRLKKMRLPDTTETSVDKGIGLKECEERCLKGCNCTAFANTDIRNGGSGCVIWSGGLFDIRNYAKGGQDLYVRVAAGDLEDKRIKSKKIIGSSIGVSILLLLSFIIFHFWKRKQKRSITIQTPIVDLVRSQDSLMNELVKASRSYTSKENKTDYLELPLMEWKALAMATNNFSTDNKLGQGGFGIVYKGMLLDGKEIAVKRLSKMSSQGTDEFMNEVRLIAKLQHINLVRLLGCCVDKGEKMLIYEYLENLSLDSHLFDQTRSSNLNWQKRFDIINGIARGLLYLHQDSRCRIIHRDLKASNVLLDKNMTPKISDFGMARIFGREETEANTRRVVGTYGYMSPEYAMDGIFSMKSDVFSFGVLLLEIISGKRNKGFYNSNRDLNLLGFVWRHWKEGKELEIVDPINIDALSSEFPTHEILRCIQIGLLCVQERAEDRPVMSSVMVMLGSETTAIPQPKRPGFCVGRSSLEVDSSSSTQRDDECTVNQVTLSVIDAR

SEQ ID NO: 89991 - DNA, 2067 bp, Arabidopsis thaliana
  misc_feature (1)..(2067): Ceres Seq. ID no. 12721687
  misc_feature (1)..(2067): Ortholog of  Ceres SEQ ID NO 14310375 as cited in SEQ ID NO 59612
accaaacccttcatcttcttcgtttcagcttttttttctctcatgtttctcgtcttcttctaaacttttgtgaccacccaaaaaaaaaaacgtaacggaacaaaaaaaaaaatgctccgatcacggaattgtaagatctccgccgcgaacgaagccgttatttctaatcgtctttcaatttctaatctcaaagttttattcgtttttgaatcctcgccattgaataatttgattaatcgtttttccgataagcttcgtcgttgaacttatctccgatctctgcaaattttctctcaaatctctccgatcttcctaattgattagaaacttctccatcgtttgctcaattatttcggatttttctctgtttctttccaacaaaatcttcaatggataagaagaagaattcgtttccagataatcttcctgaaggcacaatctctgagcttatgcagaagcagaacaatgtgcagccttctgttattgtgattggtagtggtatatcaggtcttgctgctgctaggaatctctctgaagcatctttcaaggtgactgttcttgaatcacgcgataggattggtggtcgtatccatacggattattcctttggttgtcctgttgatatgggagcttcatggttacatggagtctctgatgagaatcccttagctcccattatacgccgtttaggactgactttataccgaactagcggggatgactccatcttgtatgatcatgatctggagagttatggactttttgacatgcatgggaataaaattccgccgcagttggttactaaagttggagatgcattcaagagaattctcgaagagacggagaaaataagggatgaaactgccaatgacatgtctgttcttcaaggaatatctatcgtcttggatagaaatccagaactaaggcaagaagggatggcgtacgaagttttacagtggtacttatgtaggatggaggcgtggtttgctgtagatgcgaatttaatttcactaaaatgttgggatcaggatgaatgtctttcaggtggtcatggtctaatggtgcagggttatgagccagtgatcagaacaattgcaaaagatcttgatattcgcttgaaccatagggttactaaagttgtaagaacatctaataacaaggtgatagtcgcagttgaaggcggaaccaattttgttgctgatgctgttattattacggttccaatcggtgttctcaaggcaaatctaattcaatttgagccagagctcccacaatggaaaacctctgcgatatcgggtctcggtgtaggcaatgagaataagattgccttgagatttgacagagcgttttggcctaatgtggagttcctcgggatggtggcaccgacttcttacgcatgtggctattttctgaatcttcacaaggcaacaggccatccggtgcttgtttatatggctgcagggaatctagcacaagacctcgaaaagctatctgatgaagctacagcaaatttcgtgatgctgcaacttaagaaaatgtttccagacgcacctgacccggctcaatatctagtgacacggtggggaacggatccaaatacattggggtgttatgcgtatgacgtagtaggaatgccggaagatctgtacccgaggctaggagagccggttgataatattttcttcggaggagaagccgtgaacgtcgagcatcaaggatccgctcacggagctttcttagcaggagtctcggcctcgcagaattgtcaaaggtatatctttgaacgactcggggcttgggagaaactcaagcttgtttctcttatggggaacagtgacattctcgaaactgcaactgtgcctctccaaatctccaggatgtgattatatctgcttaacagacagaagcagggttccaatttatttttctccatctgaacaaataaaaaaacattcatcaattgtgaatgtgaagtcatgtttttttttctttttcttgttctatgatagatctctcgatgggttatataaactgtttataattcaatgatctaaacatgtttaccag

SEQ ID NO: 89992 - protein, 497 aa, Arabidopsis thaliana
  peptide (1)..(497): Ceres Seq. ID no. 12721688
MDKKKNSFPDNLPEGTISELMQKQNNVQPSVIVIGSGISGLAAARNLSEASFKVTVLESRDRIGGRIHTDYSFGCPVDMGASWLHGVSDENPLAPIIRRLGLTLYRTSGDDSILYDHDLESYGLFDMHGNKIPPQLVTKVGDAFKRILEETEKIRDETANDMSVLQGISIVLDRNPELRQEGMAYEVLQWYLCRMEAWFAVDANLISLKCWDQDECLSGGHGLMVQGYEPVIRTIAKDLDIRLNHRVTKVVRTSNNKVIVAVEGGTNFVADAVIITVPIGVLKANLIQFEPELPQWKTSAISGLGVGNENKIALRFDRAFWPNVEFLGMVAPTSYACGYFLNLHKATGHPVLVYMAAGNLAQDLEKLSDEATANFVMLQLKKMFPDAPDPAQYLVTRWGTDPNTLGCYAYDVVGMPEDLYPRLGEPVDNIFFGGEAVNVEHQGSAHGAFLAGVSASQNCQRYIFERLGAWEKLKLVSLMGNSDILETATVPLQISRM

SEQ ID NO: 89993 - protein, 477 aa, Arabidopsis thaliana
  peptide (1)..(477): Ceres Seq. ID no. 12721689
MQKQNNVQPSVIVIGSGISGLAAARNLSEASFKVTVLESRDRIGGRIHTDYSFGCPVDMGASWLHGVSDENPLAPIIRRLGLTLYRTSGDDSILYDHDLESYGLFDMHGNKIPPQLVTKVGDAFKRILEETEKIRDETANDMSVLQGISIVLDRNPELRQEGMAYEVLQWYLCRMEAWFAVDANLISLKCWDQDECLSGGHGLMVQGYEPVIRTIAKDLDIRLNHRVTKVVRTSNNKVIVAVEGGTNFVADAVIITVPIGVLKANLIQFEPELPQWKTSAISGLGVGNENKIALRFDRAFWPNVEFLGMVAPTSYACGYFLNLHKATGHPVLVYMAAGNLAQDLEKLSDEATANFVMLQLKKMFPDAPDPAQYLVTRWGTDPNTLGCYAYDVVGMPEDLYPRLGEPVDNIFFGGEAVNVEHQGSAHGAFLAGVSASQNCQRYIFERLGAWEKLKLVSLMGNSDILETATVPLQISRM

SEQ ID NO: 89994 - protein, 419 aa, Arabidopsis thaliana
  peptide (1)..(419): Ceres Seq. ID no. 12721690
MGASWLHGVSDENPLAPIIRRLGLTLYRTSGDDSILYDHDLESYGLFDMHGNKIPPQLVTKVGDAFKRILEETEKIRDETANDMSVLQGISIVLDRNPELRQEGMAYEVLQWYLCRMEAWFAVDANLISLKCWDQDECLSGGHGLMVQGYEPVIRTIAKDLDIRLNHRVTKVVRTSNNKVIVAVEGGTNFVADAVIITVPIGVLKANLIQFEPELPQWKTSAISGLGVGNENKIALRFDRAFWPNVEFLGMVAPTSYACGYFLNLHKATGHPVLVYMAAGNLAQDLEKLSDEATANFVMLQLKKMFPDAPDPAQYLVTRWGTDPNTLGCYAYDVVGMPEDLYPRLGEPVDNIFFGGEAVNVEHQGSAHGAFLAGVSASQNCQRYIFERLGAWEKLKLVSLMGNSDILETATVPLQISRM

SEQ ID NO: 89995 - DNA, 642 bp, Arabidopsis thaliana
  misc_feature (1)..(642): Ceres Seq. ID no. 12721749
  misc_feature (1)..(642): Ortholog of  Ceres SEQ ID NO 15179051 as cited in SEQ ID NO 0
atcaatacaagcttacaactctcccacatacatttttgtgatcaaacaactaatcaatcaaaagatggaaggcaagactttgattgtaagtgtgctcataatgagtctgttcatggcacaaaatcaagttgacgcaaatatttgctgtccgtccatccaggctagaactttctataatgcttgcctcttcgcggtaggtagcccgtcaagctgtatacgcaactcgagttgtcttgacattagtgagtcgacatgtcctagaggatatacgaatgacattctcgaaaacacaggtgatgctgtcactgaatactgcaagttggggtgtgtatcctctgtttgcggtgctttaaccattctccagaactccgatgcaagtgaaatcgtgaatggagaagttgaaaaatgtaccatggcatgttctacagtctgtaccaagggctctatgaatgcagttgaaaatgcgtagaccaccatatccatgaagataccacgtacatctgtggtgaagggcgtgaatcgtcgtcatcttttacagtgttgtatatttcatgttttcaataatcgtcgtgtttgtgacatgttaagataatcgtgcttgctgccgtttataatatatttaatcggtgtataatttctgtg

SEQ ID NO: 89996 - protein, 155 aa, Arabidopsis thaliana
  peptide (1)..(155): Ceres Seq. ID no. 12721750
SIQAYNSPTYIFVIKQLINQKMEGKTLIVSVLIMSLFMAQNQVDANICCPSIQARTFYNACLFAVGSPSSCIRNSSCLDISESTCPRGYTNDILENTGDAVTEYCKLGCVSSVCGALTILQNSDASEIVNGEVEKCTMACSTVCTKGSMNAVENA

SEQ ID NO: 89997 - protein, 134 aa, Arabidopsis thaliana
  peptide (1)..(134): Ceres Seq. ID no. 12721751
MEGKTLIVSVLIMSLFMAQNQVDANICCPSIQARTFYNACLFAVGSPSSCIRNSSCLDISESTCPRGYTNDILENTGDAVTEYCKLGCVSSVCGALTILQNSDASEIVNGEVEKCTMACSTVCTKGSMNAVENA

SEQ ID NO: 89998 - protein, 122 aa, Arabidopsis thaliana
  peptide (1)..(122): Ceres Seq. ID no. 12721752
MSLFMAQNQVDANICCPSIQARTFYNACLFAVGSPSSCIRNSSCLDISESTCPRGYTNDILENTGDAVTEYCKLGCVSSVCGALTILQNSDASEIVNGEVEKCTMACSTVCTKGSMNAVENA

SEQ ID NO: 89999 - DNA, 1245 bp, Arabidopsis thaliana
  misc_feature (1)..(1245): Ceres Seq. ID no. 12721753
  misc_feature (1)..(1245): Ortholog of  Ceres SEQ ID NO 14310446 as cited in SEQ ID NO 59610
actctctcctcttttgtgctcccaaaccaaacataacactcacaatttaactctctctgtctctctctcatatctctcacttcttctctttctttttaagtccccaaaataacctcgagatcgatggactcaaatctgttcataactcccacttcttctctcaaatcccaagccttggtctcttcatcatcctaactatataagaaaaagaaaaaacaacgtaaagtttctgccataaatcatgagaccaatattagacctcgaaattgaagcttcatcgggcagtagtagcagccaagtggcctcaaacttgtctccggttggggaagattacaaaccaatctcgctgaatcttagcctcagtttcaacaacaacaacaacaataatctggatcttgaatcatcgtctttgacgctgccactttcgagcacgagtgagagtagtaacccggagcagcagcagcaacaacaaccatctgtatcaaagagagtcttctcttgtaactactgccaaaggaagttctatagctctcaagcgctaggtggtcaccaaaacgctcacaaacgtgagagaacactcgccaaacgcgctatgcgtatgggtcttgctggggtcttccccggtagaggatcaagtagcaattatgcggctgctgccacagcagccgctctctcgtgtttgccgcttcacggaagcggaaacgggaacatgacatcgttcaggactttgggaatccgggcacattcctcggcgcacgacgtcagcatgacaaggcagacaccagaaacacttattagaaacattgccaggttcaaccaggggtatttcggtaattgtatacctttttacgtggaggacgacgaggccgagatgctctggccggggagtttccggcaagctacgaatgcggttgcggttgaagcgggtaatgataatttaggtgaaagaaaaatggatttcttggacgtcaagcaagcgatggatatggaaagttctcttccagatctaaccttgaagctttgagctttcgttttttttgtttttttttttgctgaatttggattcttaatttggtgcatcagcttcataactctattatgtacagtgagagtttcacaaaccatttctgatatgttatggtcactatcgattgatcgaccaaaagtcaattctagtgtttgcttacgtggataaaccatttaaacgtttatgtattgtaaactaaatattaagttaattatgct

SEQ ID NO: 90000 - protein, 260 aa, Arabidopsis thaliana
  peptide (1)..(260): Ceres Seq. ID no. 12721754
MRPILDLEIEASSGSSSSQVASNLSPVGEDYKPISLNLSLSFNNNNNNNLDLESSSLTLPLSSTSESSNPEQQQQQQPSVSKRVFSCNYCQRKFYSSQALGGHQNAHKRERTLAKRAMRMGLAGVFPGRGSSSNYAAAATAAALSCLPLHGSGNGNMTSFRTLGIRAHSSAHDVSMTRQTPETLIRNIARFNQGYFGNCIPFYVEDDEAEMLWPGSFRQATNAVAVEAGNDNLGERKMDFLDVKQAMDMESSLPDLTLKL

SEQ ID NO: 90001 - protein, 143 aa, Arabidopsis thaliana
  peptide (1)..(143): Ceres Seq. ID no. 12721755
MRMGLAGVFPGRGSSSNYAAAATAAALSCLPLHGSGNGNMTSFRTLGIRAHSSAHDVSMTRQTPETLIRNIARFNQGYFGNCIPFYVEDDEAEMLWPGSFRQATNAVAVEAGNDNLGERKMDFLDVKQAMDMESSLPDLTLKL

SEQ ID NO: 90002 - protein, 141 aa, Arabidopsis thaliana
  peptide (1)..(141): Ceres Seq. ID no. 12721756
MGLAGVFPGRGSSSNYAAAATAAALSCLPLHGSGNGNMTSFRTLGIRAHSSAHDVSMTRQTPETLIRNIARFNQGYFGNCIPFYVEDDEAEMLWPGSFRQATNAVAVEAGNDNLGERKMDFLDVKQAMDMESSLPDLTLKL

SEQ ID NO: 90003 - DNA, 1015 bp, Arabidopsis thaliana
  misc_feature (1)..(1015): Ceres Seq. ID no. 12721767
  misc_feature (1)..(1015): Ortholog of  Ceres SEQ ID NO 14303324 as cited in SEQ ID NO 54563
  misc_feature (1)..(1015): Ortholog of  Ceres SEQ ID NO 14308575 as cited in SEQ ID NO 58782
tacatcagtatgcatatatataggtggttgcaaggcttacccaaatctctcttcaacttgccataacatttactctctttggacaaagacacagacagagagatagataaaaacagagaattgtcatagaaccaattcagagagaacgagagagagagagagagaaatggggagacaaccatgctgtgacaaagtagggttgaagaaaggaccatggactgcagaagaggataggaagctcataaacttcatccttaccaatggacaatgttgttggagagctgttcctaagctttctggtcttcttaggtgtggcaagagttgcagacttcgttggactaactatcttagaccagaccttaagagaggtcttctctctgattacgaagagaagatggtcattgatctccattcccagcttggaaacaggtggtcaaagatagcttctcatttaccaggaagaacagacaacgaaatcaagaatcattggaacactcacatcaagaagaagttgaggaaaatggggattgatcctcttacacataaaccactctctatcgtcgaaaaagaagacgaagaacccttaaagaagctacagaataatacagttccttttcaagaaacaatggagcgtcctttagagaacaacatcaagaacatatcaagacttgaagagtctttaggtgatgatcaattcatggagataaatcttgagtatggtgtcgaagatgtccctcttattgaaacagagtctttagaccttatctgcagcaattcaacaatgtcttcatccacgtccacatcttcgcattcttctaatgattcgagtttcttgaaggatttgcagttcccggagttcgagtggtccgactatggtaatagtaataatgataataataatggtgtggacaacattatagagaacaatatgatgagcctgtgggaaattagtgactttagcagtttggatttgctgcttaatgatgagagttcttccacttttgggttgttttga

SEQ ID NO: 90004 - protein, 282 aa, Arabidopsis thaliana
  peptide (1)..(282): Ceres Seq. ID no. 12721768
MGRQPCCDKVGLKKGPWTAEEDRKLINFILTNGQCCWRAVPKLSGLLRCGKSCRLRWTNYLRPDLKRGLLSDYEEKMVIDLHSQLGNRWSKIASHLPGRTDNEIKNHWNTHIKKKLRKMGIDPLTHKPLSIVEKEDEEPLKKLQNNTVPFQETMERPLENNIKNISRLEESLGDDQFMEINLEYGVEDVPLIETESLDLICSNSTMSSSTSTSSHSSNDSSFLKDLQFPEFEWSDYGNSNNDNNNGVDNIIENNMMSLWEISDFSSLDLLLNDESSSTFGLF

SEQ ID NO: 90005 - protein, 206 aa, Arabidopsis thaliana
  peptide (1)..(206): Ceres Seq. ID no. 12721769
MVIDLHSQLGNRWSKIASHLPGRTDNEIKNHWNTHIKKKLRKMGIDPLTHKPLSIVEKEDEEPLKKLQNNTVPFQETMERPLENNIKNISRLEESLGDDQFMEINLEYGVEDVPLIETESLDLICSNSTMSSSTSTSSHSSNDSSFLKDLQFPEFEWSDYGNSNNDNNNGVDNIIENNMMSLWEISDFSSLDLLLNDESSSTFGLF

SEQ ID NO: 90006 - protein, 164 aa, Arabidopsis thaliana
  peptide (1)..(164): Ceres Seq. ID no. 12721770
MGIDPLTHKPLSIVEKEDEEPLKKLQNNTVPFQETMERPLENNIKNISRLEESLGDDQFMEINLEYGVEDVPLIETESLDLICSNSTMSSSTSTSSHSSNDSSFLKDLQFPEFEWSDYGNSNNDNNNGVDNIIENNMMSLWEISDFSSLDLLLNDESSSTFGLF

SEQ ID NO: 90007 - DNA, 741 bp, Arabidopsis thaliana
  misc_feature (1)..(741): Ceres Seq. ID no. 12721795
  misc_feature (1)..(741): Ortholog of  Ceres SEQ ID NO 13595569 as cited in SEQ ID NO 56778
  misc_feature (1)..(741): Ortholog of  Ceres SEQ ID NO 12611159 as cited in SEQ ID NO 59821
atgggcgaatcacccaaagggttgagaaaaggtacatggactactgaagaagatattctcttgaggcaatgcattgataagtatggagaaggcaaatggcatcgagttcctttaagaactggtctcaatcggtgccgaaagagttgtagacttagatggttgaattatttgaagccaagtattaagagaggaaaactctgctccgatgaagttgatcttgttcttcgccttcataaacttctaggaaataggtggtccttgatcgctggtagattgcctggtcggactgctaatgatgtcaagaattactggaacactcatttgagtaagaagcacgatgaacgatgctgtaagacgaagatgataaacaaaaacattacttctcatcctacttcatcggcccaaaaaatcgatgttttaaagcctcggcctcgatccttctccgataaaaatagttgcaacgatgtcaatatcttgccaaaagttgacgttgttcctttacatcttggactcaacaacaattatgtttgtgaaagtagtattacatgtaacaaagatgagcaaaaagataagcttattaatattaatctattggatggagataatatgtggtgggaaagtttactggaggcagatgtgttgggtccagaagctacggaaacagcaaagggtgtgaccttaccgcttgactttgagcaaatttgggctcggtttgatgaagagactttagaactgaattag

SEQ ID NO: 90008 - protein, 246 aa, Arabidopsis thaliana
  peptide (1)..(246): Ceres Seq. ID no. 12721796
MGESPKGLRKGTWTTEEDILLRQCIDKYGEGKWHRVPLRTGLNRCRKSCRLRWLNYLKPSIKRGKLCSDEVDLVLRLHKLLGNRWSLIAGRLPGRTANDVKNYWNTHLSKKHDERCCKTKMINKNITSHPTSSAQKIDVLKPRPRSFSDKNSCNDVNILPKVDVVPLHLGLNNNYVCESSITCNKDEQKDKLININLLDGDNMWWESLLEADVLGPEATETAKGVTLPLDFEQIWARFDEETLELN

SEQ ID NO: 90009 - protein, 126 aa, Arabidopsis thaliana
  peptide (1)..(126): Ceres Seq. ID no. 12721797
MINKNITSHPTSSAQKIDVLKPRPRSFSDKNSCNDVNILPKVDVVPLHLGLNNNYVCESSITCNKDEQKDKLININLLDGDNMWWESLLEADVLGPEATETAKGVTLPLDFEQIWARFDEETLELN

SEQ ID NO: 90010 - DNA, 1367 bp, Arabidopsis thaliana
  misc_feature (1)..(1367): Ceres Seq. ID no. 12721807
  misc_feature (1)..(1367): Ortholog of  Ceres SEQ ID NO 13585382 as cited in SEQ ID NO 63889
atggctctccaagccactactactacgttctgcttctccggtccaactttccgatcaactcctcactcactcacttcaaaacgtcctatctccatcaaagctactacttcttctccttcaagactctccaattcacgatctaatctcaaaggaagagcattgtctagtgatggttcaacacaagaatctccttatgtagtctgttttggagaaatgctaatcgattttgtaccgacgacaagcggactttcattagccgatgcaccggcttttaaaaaagctccaggtggtgcacctgctaatgtagctgttggtattgctcgtcttggtggttcttcagctttcattggaaaggttggtgaagatgagtttggttatatgcttgcgaatattttgaaagataataatgtgaacaatgatggtatgaggtttgatccaggagcaagaactgctttagcttttgtgactttgactaatgaaggtgaaagagagtttatgttttaccgaaacccgagtgctgatatgttgttagaggagtctgagcttgattttgatttgatcaaaaaggcaaagatatttcattacggttcgataagtcttatcaccgaaccgtgcaagtctgcgcatatttctgcagctaaggcggctaaggaggctggtgttatactctcttatgaccctaaccttaggcttccgttgtggccttctgcagacaatgctagggaagagattctgagcatttgggagactgctgatattataaagataagtgaagaggagattgtctttctaacgaaaggagaagatccgtatgatgataatgttgtacgcaagttgtttcatcctaagctgaaacttctccttgtcactgaaggtcctgaaggctgtcggtactacaccaaggattttagtgggagagtgcatggattgaaggtggatgtagtggacacaacaggtgctggtgatgcatttgttgcggggatactatcgcaactagccaatgatctctccttgcttcaggacgaagagcgactgagagaggctcttatgtttgcgaatgcatgcggggcattaaccgttaaagtgagaggcgcaatcccggcccttccaaccaaagaagctgtacatgaggctctactcaaagccgtcgtttaacattcaataacatcaccaatatgagaaacagtttgtacgccagcagatttcgcaagtctgcattttgttgttgtaaaattgttgtataatgtacttaccaatgtttgtattctagtagctgtagagctttaagcctttgaatatattgttgagccaagaactagaatccatcttttgatctttgtaactctcagtttgaattagagagatct

SEQ ID NO: 90011 - protein, 384 aa, Arabidopsis thaliana
  peptide (1)..(384): Ceres Seq. ID no. 12721808
MALQATTTTFCFSGPTFRSTPHSLTSKRPISIKATTSSPSRLSNSRSNLKGRALSSDGSTQESPYVVCFGEMLIDFVPTTSGLSLADAPAFKKAPGGAPANVAVGIARLGGSSAFIGKVGEDEFGYMLANILKDNNVNNDGMRFDPGARTALAFVTLTNEGEREFMFYRNPSADMLLEESELDFDLIKKAKIFHYGSISLITEPCKSAHISAAKAAKEAGVILSYDPNLRLPLWPSADNAREEILSIWETADIIKISEEEIVFLTKGEDPYDDNVVRKLFHPKLKLLLVTEGPEGCRYYTKDFSGRVHGLKVDVVDTTGAGDAFVAGILSQLANDLSLLQDEERLREALMFANACGALTVKVRGAIPALPTKEAVHEALLKAVV

SEQ ID NO: 90012 - protein, 313 aa, Arabidopsis thaliana
  peptide (1)..(313): Ceres Seq. ID no. 12721809
MLIDFVPTTSGLSLADAPAFKKAPGGAPANVAVGIARLGGSSAFIGKVGEDEFGYMLANILKDNNVNNDGMRFDPGARTALAFVTLTNEGEREFMFYRNPSADMLLEESELDFDLIKKAKIFHYGSISLITEPCKSAHISAAKAAKEAGVILSYDPNLRLPLWPSADNAREEILSIWETADIIKISEEEIVFLTKGEDPYDDNVVRKLFHPKLKLLLVTEGPEGCRYYTKDFSGRVHGLKVDVVDTTGAGDAFVAGILSQLANDLSLLQDEERLREALMFANACGALTVKVRGAIPALPTKEAVHEALLKAVV

SEQ ID NO: 90013 - protein, 258 aa, Arabidopsis thaliana
  peptide (1)..(258): Ceres Seq. ID no. 12721810
MLANILKDNNVNNDGMRFDPGARTALAFVTLTNEGEREFMFYRNPSADMLLEESELDFDLIKKAKIFHYGSISLITEPCKSAHISAAKAAKEAGVILSYDPNLRLPLWPSADNAREEILSIWETADIIKISEEEIVFLTKGEDPYDDNVVRKLFHPKLKLLLVTEGPEGCRYYTKDFSGRVHGLKVDVVDTTGAGDAFVAGILSQLANDLSLLQDEERLREALMFANACGALTVKVRGAIPALPTKEAVHEALLKAVV

SEQ ID NO: 90014 - DNA, 1404 bp, Arabidopsis thaliana
  misc_feature (1)..(1404): Ceres Seq. ID no. 12721811
  misc_feature (1)..(1404): Ortholog of  Ceres SEQ ID NO 13654989 as cited in SEQ ID NO 63117
  misc_feature (1)..(1404): Ortholog of  Ceres SEQ ID NO 13657138 as cited in SEQ ID NO 65923
  misc_feature (1)..(1404): Ortholog of  Ceres SEQ ID NO 13584744 as cited in SEQ ID NO 69137
atgattcttgatttgggttttccttgttttgttcctcctcgaaccagctctcgtgaggacaacaaagcttggcttctggctgaaacagagccgaagcttattgactcagaacaacattcgttgcagtcttcgtttaggtttagtctttgctcacagttggagctggagaagattaaaaaggagaaaccttcgttgtcttatcggaattttccagtgtctgaaggatcagagacggttctgctagtgaatctggagaatgagacaggagaattgacaggtgagatgaattggtcgagaggcctttcactggagaagagtatttctccggtggccgattctttgatccgattcagttaccgcgaactcctcactgccacgcgcaatttctcaaaacggagggttttgggaagaggagcttgtagctatgtttttaagggaagaatcgggatttggcgtaaagccgtggccatcaaaagacttgataaaaaagataaagaatctccaaagtcgttttgcagagagttgatgattgcaagctctcttaatagccccaacgttgtgcctctgctaggtttctgtatcgatcccgatcaagggcttttcttggtgtacaagtatgtgtctggtggcagcctcgaacgctttttacatgataagaagaaaaagaagagtaggaagacccccttgaatctgccttggtctacaaggtacaaggttgccttaggtattgcagatgccatagcctatttacataatggcactgagcaatgcgttgtgcatagagacattaaaccctcaaatattcttctttcctcaaacaaaattccaaagttgtgtgattttgggttggctacttggaccgctgcgccttcggttcctttcctctgtaaaaccgtgaaaggaacttttggttatctggctcctgagtatttccaacacggcaagatatctgacaagaccgatgtttacgcatttggagtcgtgttgcttgagctaataactggtcggaagccaattgaagcaagaagaccatctggtgaagaaaatttggtagtttgggcaaaaccgttgttgcatagagggatagaagctacagaggagttgctagatccaaggctgaaatgtactagaaaaaactcggcttcgatggagcgtatgatccgagctgcggcagcgtgtgtgatcaatgaggaatcacgaagaccggggatgaaggagatactttcaatcctaaaaggcggtgaagggatagaactaaggacgttatcaagccggaagaaatcaaatcttccgggtataatggactgttatccgcagttgcaacggacaaaatctgagatgaagagtcatcttacgcttgcgatgctcggagtaacggaatttgaagctgatgatcttttgtag

SEQ ID NO: 90015 - protein, 467 aa, Arabidopsis thaliana
  peptide (1)..(467): Ceres Seq. ID no. 12721812
MILDLGFPCFVPPRTSSREDNKAWLLAETEPKLIDSEQHSLQSSFRFSLCSQLELEKIKKEKPSLSYRNFPVSEGSETVLLVNLENETGELTGEMNWSRGLSLEKSISPVADSLIRFSYRELLTATRNFSKRRVLGRGACSYVFKGRIGIWRKAVAIKRLDKKDKESPKSFCRELMIASSLNSPNVVPLLGFCIDPDQGLFLVYKYVSGGSLERFLHDKKKKKSRKTPLNLPWSTRYKVALGIADAIAYLHNGTEQCVVHRDIKPSNILLSSNKIPKLCDFGLATWTAAPSVPFLCKTVKGTFGYLAPEYFQHGKISDKTDVYAFGVVLLELITGRKPIEARRPSGEENLVVWAKPLLHRGIEATEELLDPRLKCTRKNSASMERMIRAAAACVINEESRRPGMKEILSILKGGEGIELRTLSSRKKSNLPGIMDCYPQLQRTKSEMKSHLTLAMLGVTEFEADDLL

SEQ ID NO: 90016 - protein, 373 aa, Arabidopsis thaliana
  peptide (1)..(373): Ceres Seq. ID no. 12721813
MNWSRGLSLEKSISPVADSLIRFSYRELLTATRNFSKRRVLGRGACSYVFKGRIGIWRKAVAIKRLDKKDKESPKSFCRELMIASSLNSPNVVPLLGFCIDPDQGLFLVYKYVSGGSLERFLHDKKKKKSRKTPLNLPWSTRYKVALGIADAIAYLHNGTEQCVVHRDIKPSNILLSSNKIPKLCDFGLATWTAAPSVPFLCKTVKGTFGYLAPEYFQHGKISDKTDVYAFGVVLLELITGRKPIEARRPSGEENLVVWAKPLLHRGIEATEELLDPRLKCTRKNSASMERMIRAAAACVINEESRRPGMKEILSILKGGEGIELRTLSSRKKSNLPGIMDCYPQLQRTKSEMKSHLTLAMLGVTEFEADDLL

SEQ ID NO: 90017 - protein, 292 aa, Arabidopsis thaliana
  peptide (1)..(292): Ceres Seq. ID no. 12721814
MIASSLNSPNVVPLLGFCIDPDQGLFLVYKYVSGGSLERFLHDKKKKKSRKTPLNLPWSTRYKVALGIADAIAYLHNGTEQCVVHRDIKPSNILLSSNKIPKLCDFGLATWTAAPSVPFLCKTVKGTFGYLAPEYFQHGKISDKTDVYAFGVVLLELITGRKPIEARRPSGEENLVVWAKPLLHRGIEATEELLDPRLKCTRKNSASMERMIRAAAACVINEESRRPGMKEILSILKGGEGIELRTLSSRKKSNLPGIMDCYPQLQRTKSEMKSHLTLAMLGVTEFEADDLL

SEQ ID NO: 90018 - DNA, 1161 bp, Arabidopsis thaliana
  misc_feature (1)..(1161): Ceres Seq. ID no. 12721826
  misc_feature (1)..(1161): Ortholog of  Ceres SEQ ID NO 15169611 as cited in SEQ ID NO 65939
  misc_feature (1)..(1161): Ortholog of  Ceres SEQ ID NO 13502874 as cited in SEQ ID NO 66298
  misc_feature (1)..(1161): Ortholog of  Ceres SEQ ID NO 12614124 as cited in SEQ ID NO 68392
atggtatcagctccgtatagtgagcattggaggaatctccgacgtattggcgccgtcgagattttctccaatcatcggcttaatagcttttacactatccgccgcgacgagatccggcgacttatcgctcgtctctctcggtctccaaacgcttcactcgaatttgcaaaggttgagatgaattcaatgttatctaacttagcattcaacaacattattagaatggtgacgggaaaatgttactatggagatggtgcagaggatgatcctgaggctaaacgtgtgcggcagcttatcgcagaggcgatgagttgttttggtgcaggacatgcggctgatcatttaccgatgttgcgatggattacagatttcgagaggcgggtaaagaagattgctgctaggcttgatgagtttttccaaagattggttgatgagaaacgtgtggcaaaggagaagaaggagaacacgatgattgatcacttgctttctttgcaagtatcccaacctgagtactacacagaccataccattaaaggaaccatgctttctcttatacttgcggggactgatacatcagcggtaacattggaatgggcattatcaagccttttgaacaatcctgaagtactaaaaaaggtgagagatgaaatcgacaatcaaattggcttggacaggcttttggaagaatcagacattccaaaccttccttatcttcagaacattgtctctgaaacgttgcgcttgtatcccgctgggcccttgttagtcccacacatctcatcagaagattgtaaagtagggggttacgatatgccgtgtggcacgatgttattggtgaacgtctgggctatacatagagatcctaggctatgggatgatcccgcgagtttcaagccagagaggtttgagaaagaaggagagacgcataagttattgacgttcgggttaggaagaagagcgtgtcctggttccggactggctcgacggctagtgagcttgagtctcgggtctttgattcaatgttttgaatgggagaggattggagaagaggaggtggatatgactgaaggtggtggactcacaatgcctagagctattccgttggtagccatgtgcagagcacgtgcctttgttggaaaaattccacatgagtctggttga

SEQ ID NO: 90019 - protein, 386 aa, Arabidopsis thaliana
  peptide (1)..(386): Ceres Seq. ID no. 12721827
MVSAPYSEHWRNLRRIGAVEIFSNHRLNSFYTIRRDEIRRLIARLSRSPNASLEFAKVEMNSMLSNLAFNNIIRMVTGKCYYGDGAEDDPEAKRVRQLIAEAMSCFGAGHAADHLPMLRWITDFERRVKKIAARLDEFFQRLVDEKRVAKEKKENTMIDHLLSLQVSQPEYYTDHTIKGTMLSLILAGTDTSAVTLEWALSSLLNNPEVLKKVRDEIDNQIGLDRLLEESDIPNLPYLQNIVSETLRLYPAGPLLVPHISSEDCKVGGYDMPCGTMLLVNVWAIHRDPRLWDDPASFKPERFEKEGETHKLLTFGLGRRACPGSGLARRLVSLSLGSLIQCFEWERIGEEEVDMTEGGGLTMPRAIPLVAMCRARAFVGKIPHESG

SEQ ID NO: 90020 - protein, 327 aa, Arabidopsis thaliana
  peptide (1)..(327): Ceres Seq. ID no. 12721828
MNSMLSNLAFNNIIRMVTGKCYYGDGAEDDPEAKRVRQLIAEAMSCFGAGHAADHLPMLRWITDFERRVKKIAARLDEFFQRLVDEKRVAKEKKENTMIDHLLSLQVSQPEYYTDHTIKGTMLSLILAGTDTSAVTLEWALSSLLNNPEVLKKVRDEIDNQIGLDRLLEESDIPNLPYLQNIVSETLRLYPAGPLLVPHISSEDCKVGGYDMPCGTMLLVNVWAIHRDPRLWDDPASFKPERFEKEGETHKLLTFGLGRRACPGSGLARRLVSLSLGSLIQCFEWERIGEEEVDMTEGGGLTMPRAIPLVAMCRARAFVGKIPHESG

SEQ ID NO: 90021 - protein, 324 aa, Arabidopsis thaliana
  peptide (1)..(324): Ceres Seq. ID no. 12721829
MLSNLAFNNIIRMVTGKCYYGDGAEDDPEAKRVRQLIAEAMSCFGAGHAADHLPMLRWITDFERRVKKIAARLDEFFQRLVDEKRVAKEKKENTMIDHLLSLQVSQPEYYTDHTIKGTMLSLILAGTDTSAVTLEWALSSLLNNPEVLKKVRDEIDNQIGLDRLLEESDIPNLPYLQNIVSETLRLYPAGPLLVPHISSEDCKVGGYDMPCGTMLLVNVWAIHRDPRLWDDPASFKPERFEKEGETHKLLTFGLGRRACPGSGLARRLVSLSLGSLIQCFEWERIGEEEVDMTEGGGLTMPRAIPLVAMCRARAFVGKIPHESG

SEQ ID NO: 90022 - DNA, 765 bp, Arabidopsis thaliana
  misc_feature (1)..(765): Ceres Seq. ID no. 12721830
  misc_feature (1)..(765): Ortholog of  Ceres SEQ ID NO 13595568 as cited in SEQ ID NO 56764
atggtttccaacattgatcacaaggctatggaagcactcctccgtggccaaggatgcgctaacaacctcaagattctccttgaaaacggcgaaataagctcagtttcaacagaaccactcatccacaccattctcgattctttctcacttgctctgtcttttatggattctcctaatcatccaccataccatgaatcctcttctcataacatggcaagtcatatgtcccggagatcatctaagcaagtacaacatcgcagaaaactttgtgtagcagaaggtttagtgaattacaatcacgattcccggactatgtgccccaatgatggcttcacctggaggaaatatggacaaaaaaccattaaagcctcagcgcacaaaaggtgttactatcggtgtacctatgcaaaagaccaaaactgcaatgctacaaagcgggtgcagaagatcaaagacaaccctccagtgtacagaaccacttacttgggaaaacatgtgtgtaaagcttttgcagttcatgatgatacatatagttccacgatgattcgattcgaccaagttgttcctgaaccgattatgccgcagctcacaacaattgaccaccaagtaattaccgtggaggaaaactccgcagaacatatcatgaaccaagaatgtgatattaatgattatttggtggatgatgacccattttgggctagtcaatttcccccgtttccatcgagtgacacaatgttcttggaaaacatttctgcttttgattag

SEQ ID NO: 90023 - protein, 254 aa, Arabidopsis thaliana
  peptide (1)..(254): Ceres Seq. ID no. 12721831
MVSNIDHKAMEALLRGQGCANNLKILLENGEISSVSTEPLIHTILDSFSLALSFMDSPNHPPYHESSSHNMASHMSRRSSKQVQHRRKLCVAEGLVNYNHDSRTMCPNDGFTWRKYGQKTIKASAHKRCYYRCTYAKDQNCNATKRVQKIKDNPPVYRTTYLGKHVCKAFAVHDDTYSSTMIRFDQVVPEPIMPQLTTIDHQVITVEENSAEHIMNQECDINDYLVDDDPFWASQFPPFPSSDTMFLENISAFD

SEQ ID NO: 90024 - protein, 245 aa, Arabidopsis thaliana
  peptide (1)..(245): Ceres Seq. ID no. 12721832
MEALLRGQGCANNLKILLENGEISSVSTEPLIHTILDSFSLALSFMDSPNHPPYHESSSHNMASHMSRRSSKQVQHRRKLCVAEGLVNYNHDSRTMCPNDGFTWRKYGQKTIKASAHKRCYYRCTYAKDQNCNATKRVQKIKDNPPVYRTTYLGKHVCKAFAVHDDTYSSTMIRFDQVVPEPIMPQLTTIDHQVITVEENSAEHIMNQECDINDYLVDDDPFWASQFPPFPSSDTMFLENISAFD

SEQ ID NO: 90025 - protein, 200 aa, Arabidopsis thaliana
  peptide (1)..(200): Ceres Seq. ID no. 12721833
MDSPNHPPYHESSSHNMASHMSRRSSKQVQHRRKLCVAEGLVNYNHDSRTMCPNDGFTWRKYGQKTIKASAHKRCYYRCTYAKDQNCNATKRVQKIKDNPPVYRTTYLGKHVCKAFAVHDDTYSSTMIRFDQVVPEPIMPQLTTIDHQVITVEENSAEHIMNQECDINDYLVDDDPFWASQFPPFPSSDTMFLENISAFD

SEQ ID NO: 90026 - DNA, 1476 bp, Arabidopsis thaliana
  misc_feature (1)..(1476): Ceres Seq. ID no. 12721837
  misc_feature (1)..(1476): Ortholog of  Ceres SEQ ID NO 15177258 as cited in SEQ ID NO 51386
atgagtgacctccaagcaaacaaagatgagacgactgtggatagacagtcttcctcgtcggtggatcttgatgggccatctccgctgagaaagatgatatcggtggcttctattgctgccggtattcagtttggttgggctcttcaactgtctctgcttactccatacgtgcagcttcttggagtcccacacaaatggccatctttcatttggctttgcggtcctgtctccggcttgcttgtccagccatcagtcggttacttcagcgaccgatgcacgtcaagattcggacgtcgtcgtcctttcatcgccacgggtgctttgctggtcgctgtttctgttgtactaatcggatatgcggctgatttcggccacagcatgggagacaaaatcgacaaacctgtcaagatgcgagccgttgttatcttcgctctcgggttctggatccttgacgtggctaacaacactctccaaggaccatgccgtgcttttcttggtgatttagcagctggagacgctcagaaaacgcgaacggcaaacgcgtttttctctttcttcatggccgttggaaacgttttgggatatgcggcaggatcgtacactaacctctacaagatcttccctttcacaatgactaaagcgtgcgacatatattgcgcaaatctcaagagttgtttcttcctttccatcactctcctcctagtcgtcaccatcatagctctatggtacgtggaagacaagcaatggtcgcctaaggcagactccgacaacgagaaaactccgttcttcggtgagatctttggagctttcaaggtaatgaaacgtccaatgtggatgctactaatcgtcacggccttgaactggatcgcatggttcccttttcttttatacgatactgattggatgggtcgtgaagtgtatggtggagactcaaaaggagatgacaaaatgaagaaactatacaaccaaggaattcatgttggtgcattgggattgatgcttaactctatcgttcttggagtcatgtcacttggtattgaaggtattagtaggaagatgggaggagctaaaaggctttggggagctgtgaatattattctcgccgtgtgtttggcaatgacggttttggttactaaaaaggcggaggagcaccggagaatcgccggtccaatggcccttcctaccgatggcatcagagctggagcattgactctctttgctcttcttggaattcctcttgctattacattcagtattccgttcgcactagcttctataatatcaagcagctccggcgccggtcaaagactttctctaggagttttaaacatggcaattgtcataccacaaatgattgtatcgtttggagttggtcctattgatgcgttatttggagatggaaacttaccaggatttgtggtcggagctattgcagcggcagtcagcagtattgtggcatttaccgttttaccttaa

SEQ ID NO: 90027 - protein, 491 aa, Arabidopsis thaliana
  peptide (1)..(491): Ceres Seq. ID no. 12721838
MSDLQANKDETTVDRQSSSSVDLDGPSPLRKMISVASIAAGIQFGWALQLSLLTPYVQLLGVPHKWPSFIWLCGPVSGLLVQPSVGYFSDRCTSRFGRRRPFIATGALLVAVSVVLIGYAADFGHSMGDKIDKPVKMRAVVIFALGFWILDVANNTLQGPCRAFLGDLAAGDAQKTRTANAFFSFFMAVGNVLGYAAGSYTNLYKIFPFTMTKACDIYCANLKSCFFLSITLLLVVTIIALWYVEDKQWSPKADSDNEKTPFFGEIFGAFKVMKRPMWMLLIVTALNWIAWFPFLLYDTDWMGREVYGGDSKGDDKMKKLYNQGIHVGALGLMLNSIVLGVMSLGIEGISRKMGGAKRLWGAVNIILAVCLAMTVLVTKKAEEHRRIAGPMALPTDGIRAGALTLFALLGIPLAITFSIPFALASIISSSSGAGQRLSLGVLNMAIVIPQMIVSFGVGPIDALFGDGNLPGFVVGAIAAAVSSIVAFTVLP

SEQ ID NO: 90028 - protein, 460 aa, Arabidopsis thaliana
  peptide (1)..(460): Ceres Seq. ID no. 12721839
MISVASIAAGIQFGWALQLSLLTPYVQLLGVPHKWPSFIWLCGPVSGLLVQPSVGYFSDRCTSRFGRRRPFIATGALLVAVSVVLIGYAADFGHSMGDKIDKPVKMRAVVIFALGFWILDVANNTLQGPCRAFLGDLAAGDAQKTRTANAFFSFFMAVGNVLGYAAGSYTNLYKIFPFTMTKACDIYCANLKSCFFLSITLLLVVTIIALWYVEDKQWSPKADSDNEKTPFFGEIFGAFKVMKRPMWMLLIVTALNWIAWFPFLLYDTDWMGREVYGGDSKGDDKMKKLYNQGIHVGALGLMLNSIVLGVMSLGIEGISRKMGGAKRLWGAVNIILAVCLAMTVLVTKKAEEHRRIAGPMALPTDGIRAGALTLFALLGIPLAITFSIPFALASIISSSSGAGQRLSLGVLNMAIVIPQMIVSFGVGPIDALFGDGNLPGFVVGAIAAAVSSIVAFTVLP

SEQ ID NO: 90029 - protein, 365 aa, Arabidopsis thaliana
  peptide (1)..(365): Ceres Seq. ID no. 12721840
MGDKIDKPVKMRAVVIFALGFWILDVANNTLQGPCRAFLGDLAAGDAQKTRTANAFFSFFMAVGNVLGYAAGSYTNLYKIFPFTMTKACDIYCANLKSCFFLSITLLLVVTIIALWYVEDKQWSPKADSDNEKTPFFGEIFGAFKVMKRPMWMLLIVTALNWIAWFPFLLYDTDWMGREVYGGDSKGDDKMKKLYNQGIHVGALGLMLNSIVLGVMSLGIEGISRKMGGAKRLWGAVNIILAVCLAMTVLVTKKAEEHRRIAGPMALPTDGIRAGALTLFALLGIPLAITFSIPFALASIISSSSGAGQRLSLGVLNMAIVIPQMIVSFGVGPIDALFGDGNLPGFVVGAIAAAVSSIVAFTVLP

SEQ ID NO: 90030 - DNA, 726 bp, Arabidopsis thaliana
  misc_feature (1)..(726): Ceres Seq. ID no. 12721845
  misc_feature (1)..(726): Ortholog of  Ceres SEQ ID NO 13595568 as cited in SEQ ID NO 56764
atgttttcaaacatcgatcacaaggctgtggcagcactccttcatggccagggatgcgctaacatcctcaagacggtcctcgacaactgtaaagttagctctgtttcaacagaacctctcattaacaccattcttgattccttttcactagctctatcttctgtgaattctcctaatcgtcaaccacaccatgagtcttcttctcgagacatggcaggtcttgtgcctcaaagatcatcaaagaagaagatttgcggagtaaaaggtttagagatttacagagatgattcccccaatccccgccttgatgacggcttcacctggaggaaatatggacaaaaaaccatcaaaacctctttgtaccaaaggtgttactatcgttgtgcctatgcaaaagaccaaaactgctatgctacaaagcgggtgcagatgatccaagacagtcctccagtttacagaaccacttatttgggacaacatacatgtaaagcctttggggtgcatgataatacgtatggctctgaaatgataaacttcgaccaagttgtatctgaatcggttatgcgtcaacttgcaacaattggtgaacaagctgttctcatggaggacgaagctaaccatatcatgaaccaagaatatgatattaatgattatttggtggatgatgaagtcttttgggggaatgaatttcctctattttcatcggaagacctgatgttgttttga

SEQ ID NO: 90031 - protein, 241 aa, Arabidopsis thaliana
  peptide (1)..(241): Ceres Seq. ID no. 12721846
MFSNIDHKAVAALLHGQGCANILKTVLDNCKVSSVSTEPLINTILDSFSLALSSVNSPNRQPHHESSSRDMAGLVPQRSSKKKICGVKGLEIYRDDSPNPRLDDGFTWRKYGQKTIKTSLYQRCYYRCAYAKDQNCYATKRVQMIQDSPPVYRTTYLGQHTCKAFGVHDNTYGSEMINFDQVVSESVMRQLATIGEQAVLMEDEANHIMNQEYDINDYLVDDEVFWGNEFPLFSSEDLMLF

SEQ ID NO: 90032 - protein, 171 aa, Arabidopsis thaliana
  peptide (1)..(171): Ceres Seq. ID no. 12721847
MAGLVPQRSSKKKICGVKGLEIYRDDSPNPRLDDGFTWRKYGQKTIKTSLYQRCYYRCAYAKDQNCYATKRVQMIQDSPPVYRTTYLGQHTCKAFGVHDNTYGSEMINFDQVVSESVMRQLATIGEQAVLMEDEANHIMNQEYDINDYLVDDEVFWGNEFPLFSSEDLMLF

SEQ ID NO: 90033 - DNA, 1190 bp, Arabidopsis thaliana
  misc_feature (1)..(1190): Ceres Seq. ID no. 12721862
  misc_feature (1)..(1190): Ortholog of  Ceres SEQ ID NO 15175048 as cited in SEQ ID NO 59975
  misc_feature (1)..(1190): Ortholog of  Ceres SEQ ID NO 13597333 as cited in SEQ ID NO 63974
  misc_feature (1)..(1190): Ortholog of  Ceres SEQ ID NO 13599307 as cited in SEQ ID NO 0
  misc_feature (1)..(1190): Ortholog of  Ceres SEQ ID NO 15179517 as cited in SEQ ID NO 0
ctctttagcaaaaaatctcagaactcaaaaaaaaaacatccaacaccaaagacaatggagatgagtttgcgtctcgcttcatcttcaacctcaaacccaatttgtctactaaaccctggaaaaaaccttaatttcccaatccgaaaccatagaatccctaaaacttcgaaacccttttgcgttaggtcttcaatgagcttgtctaaaccacccagacaaaccttatctagtaactgggatgtatctagcttctccattgattccgttgctcaatctccttcaagactcccaagtttcgaagaactcgataccaccaacatgttgctccgtcaaagaatcgtctttttgggttctcaggttgatgatatgacggcggatttggttataagtcagctattgttactagatgctgaggactcagaaagagacattacgctttttatcaattcacccggtggatctattactgctgggatgggaatatatgatgcaatgaaacaatgtaaggcggatgtatctactgtttgcttagggttagctgcatctatgggtgcgtttcttcttgcttctggttcaaaagggaaacggtattgtatgcctaactctaaagttatgatccatcagccacttggtactgctggaggcaaagcaacggaaatgagcatacgtataagagaaatgatgtaccacaagattaaacttaacaaaatcttctctagaatcactgggaagcctgaatcagagatcgaaagtgacacagaccgtgataacttcttgaatccatgggaggcgaaagaatatggtttgatcgacgctgtaatcgatgatgggaaaccgggactaatcgctccaattggagatggtactcctcctcctaaaaccaaagtctgggatctttggaaagtcgaaggaaccaagaaagacaacactaacttgccatctgagcgctccatgacacagaatggttatgccgccattgaatagaactgttgttgcagcgtttacgccttttatatgttattctggtggtacctgtaaccatataacgttgcatttcctgtgtttgtaccatttctctgatagatttttggaataatttgaaggcaaaagatagattatttgttgtagaagaagctacaaaatttaatgattaaattgaatcatcaagccatgagaagctttttgttttc

SEQ ID NO: 90034 - protein, 327 aa, Arabidopsis thaliana; identical to SEQ ID NO: 22751
  peptide (1)..(327): Ceres Seq. ID no. 12721863

SEQ ID NO: 90035 - protein, 309 aa, Arabidopsis thaliana; identical to SEQ ID NO: 22752
  peptide (1)..(309): Ceres Seq. ID no. 12721864

SEQ ID NO: 90036 - protein, 307 aa, Arabidopsis thaliana; identical to SEQ ID NO: 22753
  peptide (1)..(307): Ceres Seq. ID no. 12721865

SEQ ID NO: 90037 - DNA, 1482 bp, Arabidopsis thaliana
  misc_feature (1)..(1482): Ceres Seq. ID no. 12721920
  misc_feature (1)..(1482): Ortholog of  Ceres SEQ ID NO 13597407 as cited in SEQ ID NO 64106
atgttgggattgcaacgagaaacatcctcgatgtataagagaacgtcatcgagagattattctccgatgatcgacgtcgaagacagctcaggtcttttagagaatgatgtggacaatgaaatggaaactacaaatccttcatggaagtgttctcttccgcatgttctagtggctacaatttcgtcgtttctatttggttaccatttaggagttgttaatgaacctcttgaaagcatttcgtctgatcttggttttagtggtgatacattagctgaaggtttggtggttagtgtatgtcttggtggtgcatttctcggatctttattcagtgggggagttgctgatgggtttggaagacggagagcttttcagatttgtgctttgcctatgattttgggtgcttttgtgagtggagttagcaacagcttagctgtaatgcttttgggaagattcttggttgggactggcatgggtcttggaccacctgtggcagcactctatgtgacagaggtatcaccagcttttgttaggggaacatatggaagcttcatacagatagctacatgtctgggactgatggcagctctgtttatagggatcccagtccataacatcacgggttggtggcgtgtctgtttctggctttcaacgatacctgctgcactactcgctctgggaatgttcctctgtgctgagtctccacagtggctattcaagcaagggaagatagctgaagcagaagctgagtttgagaggctgcttggagggtctcatgtgaaaacagcaatggcagaattatacaaactagatctagacaagacggatgaaccagatgttgtgagcctctctgagctgttatatggtcggcattcaagagttgtttttattggatcaaccctgtttgctttgcaacagctatctggtataaatgctgttttttatttctcttctaccgtattcaaaagtgctggagtaccatcggacctaggcaacatatttgttggagtttcaaacctcttgggatctgtaatcgcgatggtgttgatggataaagtaggaagaaagcttcttctgctttggagttttattggcatggcagcagcaatggcacttcaagttggtgctacaagttcatacttaccacatttttcggcgttgtgtttgtctgtcggtggcactcttgtgtttgtgctaacattcgccttaggagctggtccagtaccaggtttactcctccctgagatcttcccaagtcgaatcagagcaaaagcgatggctttctgcatgtctgtgcattgggtgataaatttctttgtgggtttactctttctgagattgcttgagaagcttggtcctcggctactatattcgatgttttctacgttctgtttaatggcggtgatgttcgtgaagcggaacgtgattgaaaccaaaggaaaaacacttcaagagattgagatttctctactagccaaaccatga

SEQ ID NO: 90038 - protein, 493 aa, Arabidopsis thaliana
  peptide (1)..(493): Ceres Seq. ID no. 12721921
MLGLQRETSSMYKRTSSRDYSPMIDVEDSSGLLENDVDNEMETTNPSWKCSLPHVLVATISSFLFGYHLGVVNEPLESISSDLGFSGDTLAEGLVVSVCLGGAFLGSLFSGGVADGFGRRRAFQICALPMILGAFVSGVSNSLAVMLLGRFLVGTGMGLGPPVAALYVTEVSPAFVRGTYGSFIQIATCLGLMAALFIGIPVHNITGWWRVCFWLSTIPAALLALGMFLCAESPQWLFKQGKIAEAEAEFERLLGGSHVKTAMAELYKLDLDKTDEPDVVSLSELLYGRHSRVVFIGSTLFALQQLSGINAVFYFSSTVFKSAGVPSDLGNIFVGVSNLLGSVIAMVLMDKVGRKLLLLWSFIGMAAAMALQVGATSSYLPHFSALCLSVGGTLVFVLTFALGAGPVPGLLLPEIFPSRIRAKAMAFCMSVHWVINFFVGLLFLRLLEKLGPRLLYSMFSTFCLMAVMFVKRNVIETKGKTLQEIEISLLAKP

SEQ ID NO: 90039 - protein, 483 aa, Arabidopsis thaliana
  peptide (1)..(483): Ceres Seq. ID no. 12721922
MYKRTSSRDYSPMIDVEDSSGLLENDVDNEMETTNPSWKCSLPHVLVATISSFLFGYHLGVVNEPLESISSDLGFSGDTLAEGLVVSVCLGGAFLGSLFSGGVADGFGRRRAFQICALPMILGAFVSGVSNSLAVMLLGRFLVGTGMGLGPPVAALYVTEVSPAFVRGTYGSFIQIATCLGLMAALFIGIPVHNITGWWRVCFWLSTIPAALLALGMFLCAESPQWLFKQGKIAEAEAEFERLLGGSHVKTAMAELYKLDLDKTDEPDVVSLSELLYGRHSRVVFIGSTLFALQQLSGINAVFYFSSTVFKSAGVPSDLGNIFVGVSNLLGSVIAMVLMDKVGRKLLLLWSFIGMAAAMALQVGATSSYLPHFSALCLSVGGTLVFVLTFALGAGPVPGLLLPEIFPSRIRAKAMAFCMSVHWVINFFVGLLFLRLLEKLGPRLLYSMFSTFCLMAVMFVKRNVIETKGKTLQEIEISLLAKP

SEQ ID NO: 90040 - protein, 471 aa, Arabidopsis thaliana
  peptide (1)..(471): Ceres Seq. ID no. 12721923
MIDVEDSSGLLENDVDNEMETTNPSWKCSLPHVLVATISSFLFGYHLGVVNEPLESISSDLGFSGDTLAEGLVVSVCLGGAFLGSLFSGGVADGFGRRRAFQICALPMILGAFVSGVSNSLAVMLLGRFLVGTGMGLGPPVAALYVTEVSPAFVRGTYGSFIQIATCLGLMAALFIGIPVHNITGWWRVCFWLSTIPAALLALGMFLCAESPQWLFKQGKIAEAEAEFERLLGGSHVKTAMAELYKLDLDKTDEPDVVSLSELLYGRHSRVVFIGSTLFALQQLSGINAVFYFSSTVFKSAGVPSDLGNIFVGVSNLLGSVIAMVLMDKVGRKLLLLWSFIGMAAAMALQVGATSSYLPHFSALCLSVGGTLVFVLTFALGAGPVPGLLLPEIFPSRIRAKAMAFCMSVHWVINFFVGLLFLRLLEKLGPRLLYSMFSTFCLMAVMFVKRNVIETKGKTLQEIEISLLAKP

SEQ ID NO: 90041 - DNA, 2061 bp, Arabidopsis thaliana
  misc_feature (1)..(2061): Ceres Seq. ID no. 12721956
  misc_feature (1)..(2061): Ortholog of  Ceres SEQ ID NO 13663060 as cited in SEQ ID NO 60964
  misc_feature (1)..(2061): Ortholog of  Ceres SEQ ID NO 13598532 as cited in SEQ ID NO 65204
  misc_feature (1)..(2061): Ortholog of  Ceres SEQ ID NO 13656849 as cited in SEQ ID NO 65764
  misc_feature (1)..(2061): Ortholog of  Ceres SEQ ID NO 13656501 as cited in SEQ ID NO 69206
atgggttgtatttgctcaaaaggagtacgtactaatgatgattacatagagacgaatcatgtaagtattggtaaagagaatcctaaagcttctaagaaacaatctgattcagaggaaactagtgttaatggaaacgaagctacattgaggttaatacctgatgatgtcaaggacactttctctgatgaggaagtggaggagctggaggagaagaaagagagtagctttgagatgaaatcttgtgaatctgtgttgcaaaaaggaaatgttttggagatagttgataatgtaggaccgttgcagcctaggatgagtaggattggtagtgttagtaatggagatagagcagctaaagttattgctggttggccttcatggttagtttcagttgctggtgaagctattaatggatggattcctcgtagtgctgattcgttcgagaagttggagatgattgggcaggggacgtatagtagtgtgtacagagctcgtgatctcgaaacaaaccagattgttgcacttaagaaggttcggtttgctaatatggatcctgagagtgtgaggtttatggcaagagaaattatcattctacgtaggcttaaccatccaaacgttatgaaactcgaagggctgatcatttcaaaagcttcgggaagtatgtatcttatatttgaatatatggatcatgatctcgcaggccttgcttcgacccctgggattaagttctctcaggcacagcaattgttgcttgggttagaacattgccatagttgtggtgtgttgcaccgtgacatcaagtgctcaaatcttctgcttgatcgtaacaataatctcaagattggtgattttggtctttctaatttttaccggggccaacgaaagcagcctctgactagccgtgttgtgacattgtggtaccgcccacctgaacttctgcttgggtcaactgactatggagttacggttgatctatggagcacaggatgcatacttgctgaactctttactggaaagcctcttctacccggaagaaccgaggtagaacaaatgcacaagatctttaaactctgcggatcaccttctgaggagtattggagaagatcacggttgcggcatgcaaccatctttaaacctcaacatccctacaagcgatgtgtagctgatacatttaaggatcttccttcttcagctttggccctccttgaggttcttctagctgtagaaccagatgcacgtggaaccgcatcttcggcccttcaaagcgagttctttacgacaaaaccttttccaagtgagccatcaagtttaccgagatatcagccaaggaaagaatttgatgccaagcttcgagaagaggaagcaagacgacggaaaggttcgagcagtaaacagaatgaacagaagcggttggctagagagtccaaagctgtaccggctcctagtgccaatgccgagttactggcatcaatacagaaacgtctaggggagactaaccggacaagcattagtgagaagtttaatcctgagggagattctggcaatggcttccggatcgaaccactgaagggcaataccgcacaaaatccctacccaatctacacaaacggagacaaccatcctaacggatcaagccaactgagaacacaaaggtcctatgtccaacgcgggtctggccaattgtcaagattctcaaactcaatggcacctactagagatggatcacagtttggaagtatgagagacgctatagtgaaccaacgctggcttgaagatggttcagagaatttcaatttgtcccaaagattgttggagaaacctaatggtattaggaaagatgacccttcatcctctagcaaagagtcaataatgggctatgatggtgagaagagagggaggattcagtactcaggaccattgattccaggagaaggaaacttggatgaaatgttgaaagaacatgaaagacagatcttgttggctgtacgacgagctcaagccgataaggctaagagagacgataaccgacaggctcaaaccttgtttccagctaatggaaggtga

SEQ ID NO: 90042 - protein, 686 aa, Arabidopsis thaliana
  peptide (1)..(686): Ceres Seq. ID no. 12721957
MGCICSKGVRTNDDYIETNHVSIGKENPKASKKQSDSEETSVNGNEATLRLIPDDVKDTFSDEEVEELEEKKESSFEMKSCESVLQKGNVLEIVDNVGPLQPRMSRIGSVSNGDRAAKVIAGWPSWLVSVAGEAINGWIPRSADSFEKLEMIGQGTYSSVYRARDLETNQIVALKKVRFANMDPESVRFMAREIIILRRLNHPNVMKLEGLIISKASGSMYLIFEYMDHDLAGLASTPGIKFSQAQQLLLGLEHCHSCGVLHRDIKCSNLLLDRNNNLKIGDFGLSNFYRGQRKQPLTSRVVTLWYRPPELLLGSTDYGVTVDLWSTGCILAELFTGKPLLPGRTEVEQMHKIFKLCGSPSEEYWRRSRLRHATIFKPQHPYKRCVADTFKDLPSSALALLEVLLAVEPDARGTASSALQSEFFTTKPFPSEPSSLPRYQPRKEFDAKLREEEARRRKGSSSKQNEQKRLARESKAVPAPSANAELLASIQKRLGETNRTSISEKFNPEGDSGNGFRIEPLKGNTAQNPYPIYTNGDNHPNGSSQLRTQRSYVQRGSGQLSRFSNSMAPTRDGSQFGSMRDAIVNQRWLEDGSENFNLSQRLLEKPNGIRKDDPSSSSKESIMGYDGEKRGRIQYSGPLIPGEGNLDEMLKEHERQILLAVRRAQADKAKRDDNRQAQTLFPANGR

SEQ ID NO: 90043 - protein, 609 aa, Arabidopsis thaliana
  peptide (1)..(609): Ceres Seq. ID no. 12721958
MKSCESVLQKGNVLEIVDNVGPLQPRMSRIGSVSNGDRAAKVIAGWPSWLVSVAGEAINGWIPRSADSFEKLEMIGQGTYSSVYRARDLETNQIVALKKVRFANMDPESVRFMAREIIILRRLNHPNVMKLEGLIISKASGSMYLIFEYMDHDLAGLASTPGIKFSQAQQLLLGLEHCHSCGVLHRDIKCSNLLLDRNNNLKIGDFGLSNFYRGQRKQPLTSRVVTLWYRPPELLLGSTDYGVTVDLWSTGCILAELFTGKPLLPGRTEVEQMHKIFKLCGSPSEEYWRRSRLRHATIFKPQHPYKRCVADTFKDLPSSALALLEVLLAVEPDARGTASSALQSEFFTTKPFPSEPSSLPRYQPRKEFDAKLREEEARRRKGSSSKQNEQKRLARESKAVPAPSANAELLASIQKRLGETNRTSISEKFNPEGDSGNGFRIEPLKGNTAQNPYPIYTNGDNHPNGSSQLRTQRSYVQRGSGQLSRFSNSMAPTRDGSQFGSMRDAIVNQRWLEDGSENFNLSQRLLEKPNGIRKDDPSSSSKESIMGYDGEKRGRIQYSGPLIPGEGNLDEMLKEHERQILLAVRRAQADKAKRDDNRQAQTLFPANGR

SEQ ID NO: 90044 - protein, 583 aa, Arabidopsis thaliana
  peptide (1)..(583): Ceres Seq. ID no. 12721959
MSRIGSVSNGDRAAKVIAGWPSWLVSVAGEAINGWIPRSADSFEKLEMIGQGTYSSVYRARDLETNQIVALKKVRFANMDPESVRFMAREIIILRRLNHPNVMKLEGLIISKASGSMYLIFEYMDHDLAGLASTPGIKFSQAQQLLLGLEHCHSCGVLHRDIKCSNLLLDRNNNLKIGDFGLSNFYRGQRKQPLTSRVVTLWYRPPELLLGSTDYGVTVDLWSTGCILAELFTGKPLLPGRTEVEQMHKIFKLCGSPSEEYWRRSRLRHATIFKPQHPYKRCVADTFKDLPSSALALLEVLLAVEPDARGTASSALQSEFFTTKPFPSEPSSLPRYQPRKEFDAKLREEEARRRKGSSSKQNEQKRLARESKAVPAPSANAELLASIQKRLGETNRTSISEKFNPEGDSGNGFRIEPLKGNTAQNPYPIYTNGDNHPNGSSQLRTQRSYVQRGSGQLSRFSNSMAPTRDGSQFGSMRDAIVNQRWLEDGSENFNLSQRLLEKPNGIRKDDPSSSSKESIMGYDGEKRGRIQYSGPLIPGEGNLDEMLKEHERQILLAVRRAQADKAKRDDNRQAQTLFPANGR

SEQ ID NO: 90045 - DNA, 1649 bp, Arabidopsis thaliana
  misc_feature (1)..(1649): Ceres Seq. ID no. 12721960
  misc_feature (1)..(1649): Ortholog of  Ceres SEQ ID NO 15178246 as cited in SEQ ID NO 52038
aatttccacactctaatactatttctcgccgccgcttttgtatcttcttctctctcgctttgctctctcggaattgtttttgcagaaagtctctcatctgaactcagaaaatctccgagttcgtatatcttctccgtttgagcaatggcgttggtcatgcacacatacaagggaaacaaaggtgccaataaggcacttattgctgcagagtatgcgggtgtgaagatcgaggagtccgcagactttcagatgggcgtcactaacaagtcacctgagttccttaagatgaaccctattggaaaggttcctgtgcttgagactcctgaaggtcccatatttgagagcaatgccattgcccgatatgtgagccgtaagaatggtgacaactctttgaatggatcctcccttattgaatacgctcacattgagcaatggatcgatttctcctcattggagattgatgctaacatgttgaagtggtttgctccaagaatgggctatgctcccttctctgccccagctgaggaagcggcaatttctgcattgaagagaggacttgaggctctgaacacacatctcgcctccaacactttccttgttggacactctgtcacccttgctgatattgtcacaatctgcaacttgaacttgggatttgccaccgtgatgaccaagaaatttacctctgcattccctcatgttgagagatacttctggacaatggttaaccagccagaattcaagaaggtgttgggtgatgccaaacaaaccgaagctgtccctccagttcctactaagaaagctccacagcctgctaagcccaaggaggagcccaagaaggcagcccctgtagcagaggcaccaaagcctgctgaggaggaggaagcaccaaagcctaaagccaagaatcctcttgacttgctaccaccaagcccaatggttctcgatgactggaagaggctttactcgaacaccaaatccaacttccgtgaggttgctatcaaaggattctgggacatgtatgacccggaggggtactcactatggttctgtgactataagtacaacgatgagaacatggtctcctttgttacactcaacaaggtaggagggttccttcagcgtatggacttggcacgtaaatactcctttggaaagatgcttatttgcgggtcagagggtcctttcaaggtgaagggtttatggcttttccgtggaccagagatccccaagttcataatggatgaggtgtacgacatggagctgtacgagtggactaaggttgatatctccgatgaagcacagaaggagcgtgttagccagatgattgaagacgctgagccatttgaaggcgaggctcttttggacgccaaatgctttaagtgaaaaggctctttgtatctccgtagaggtttactctgttactcgtgttttgataccttctagagagtccttaccaccttttgaatcgtactcgggtttaagaactagttgcttctcaatgttattttgacagaatattgttcttaaatacattacaacttctagttattgtttttattttgttttttattatccaaactcgtgtgtgtgacattctctctttaaattagttgcttggaagatgcaaagaatctcgtttaatgggg

SEQ ID NO: 90046 - protein, 413 aa, Arabidopsis thaliana; identical to SEQ ID NO: 42171
  peptide (1)..(413): Ceres Seq. ID no. 12721961

SEQ ID NO: 90047 - protein, 409 aa, Arabidopsis thaliana; identical to SEQ ID NO: 42172
  peptide (1)..(409): Ceres Seq. ID no. 12721962

SEQ ID NO: 90048 - protein, 378 aa, Arabidopsis thaliana; identical to SEQ ID NO: 42173
  peptide (1)..(378): Ceres Seq. ID no. 12721963

SEQ ID NO: 90049 - DNA, 1045 bp, Arabidopsis thaliana
  misc_feature (1)..(1045): Ceres Seq. ID no. 12722002
  misc_feature (1)..(1045): Ortholog of  Ceres SEQ ID NO 15175949 as cited in SEQ ID NO 58819
  misc_feature (1)..(1045): Ortholog of  Ceres SEQ ID NO 13596660 as cited in SEQ ID NO 63180
atctttcctctcctcttccatcgcttagtcgcctctctcttcgttgttgcagctctcttcctgctcacgatatggagacaaaaccaagtcaaggcctttacccacttcaccgttgcaaaaccatacatctggtgagacatgctcaagggattcacaatgttgaaggagagaagaaccataaggcttacttatctgaggatctatttgatgcacatcttacacctcttggatggcaacaagttgataatttacacaagcatgttaatgcaagtggtatttccaatagaattgagttggtagtcgtatctcctctgctcaggactttgcaaacagcggtcggaacttttggtggggaaggttacaaagatggtgtaaatacacctctgcttatgaccgcaggtgctggaaacagcgatcgtcctgctatatcaaggttaaatcgtccaccgttcattgcggttgaatcctgccgagaacatttgggtgttcatccttgtgacagaagaagcaatatcaccaagtaccgcgaattattccctgcgattgatttttcattgatagaaactgatgaagatgtcttgtggaagcctgacattagagaggaggataaagatattgcgaccagaggcgtgaagttctttaactggttgagtacaaggaaagaaaaagagattgcggttgtaactcatagtgggttcttgtatcaaacattaaactcatttggaaacgattgtgatccatctgtgaaaaacgagatttctaaaaaatttgtcaactgtgaactccgttcatttgttcttgtagataaatgcatgagcagttcggatcctccaatgaccaactatcccggaacaatacttaccggagaagatgcttctagtgatattgctgatcagaagtagttatatgtattatgttaatcttatatgaatctcaaagctgtatatttctatacaatggaatagaaaatggagttagacgtaactattttatttaacgttaccgtatcctacggattcacacttaaatgttatctcgattaagc

SEQ ID NO: 90050 - protein, 299 aa, Arabidopsis thaliana
  peptide (1)..(299): Ceres Seq. ID no. 12722003
LSSPLPSLSRLSLRCCSSLPAHDMETKPSQGLYPLHRCKTIHLVRHAQGIHNVEGEKNHKAYLSEDLFDAHLTPLGWQQVDNLHKHVNASGISNRIELVVVSPLLRTLQTAVGTFGGEGYKDGVNTPLLMTAGAGNSDRPAISRLNRPPFIAVESCREHLGVHPCDRRSNITKYRELFPAIDFSLIETDEDVLWKPDIREEDKDIATRGVKFFNWLSTRKEKEIAVVTHSGFLYQTLNSFGNDCDPSVKNEISKKFVNCELRSFVLVDKCMSSSDPPMTNYPGTILTGEDASSDIADQK

SEQ ID NO: 90051 - protein, 276 aa, Arabidopsis thaliana
  peptide (1)..(276): Ceres Seq. ID no. 12722004
METKPSQGLYPLHRCKTIHLVRHAQGIHNVEGEKNHKAYLSEDLFDAHLTPLGWQQVDNLHKHVNASGISNRIELVVVSPLLRTLQTAVGTFGGEGYKDGVNTPLLMTAGAGNSDRPAISRLNRPPFIAVESCREHLGVHPCDRRSNITKYRELFPAIDFSLIETDEDVLWKPDIREEDKDIATRGVKFFNWLSTRKEKEIAVVTHSGFLYQTLNSFGNDCDPSVKNEISKKFVNCELRSFVLVDKCMSSSDPPMTNYPGTILTGEDASSDIADQK

SEQ ID NO: 90052 - protein, 170 aa, Arabidopsis thaliana
  peptide (1)..(170): Ceres Seq. ID no. 12722005
MTAGAGNSDRPAISRLNRPPFIAVESCREHLGVHPCDRRSNITKYRELFPAIDFSLIETDEDVLWKPDIREEDKDIATRGVKFFNWLSTRKEKEIAVVTHSGFLYQTLNSFGNDCDPSVKNEISKKFVNCELRSFVLVDKCMSSSDPPMTNYPGTILTGEDASSDIADQK

SEQ ID NO: 90053 - DNA, 852 bp, Arabidopsis thaliana
  misc_feature (1)..(852): Ceres Seq. ID no. 12722006
  misc_feature (1)..(852): Ortholog of  Ceres SEQ ID NO 15177518 as cited in SEQ ID NO 1034
  misc_feature (1)..(852): Ortholog of  Ceres SEQ ID NO 14313694 as cited in SEQ ID NO 54115
atggctacatcaagacttaatgcctcttgccgctttcctgcaagcagaagacttgactgcgagagctatgtcagtctgagagctaagacagtgacaataagatatgttcggaccatagccgctcctcgtcgccatcttgtccgaagagcaaacgaagatcagactttggtggtgaatgttgtggcagcagcaggggagaagccagaaagaaggtatcctcgagaaccgaatgggtttgtggaggagatgaggttcgtggtaatgaaaattcacccaagagatcaggtaaaagaaggaaaaagtgactccaacgatcttgtatcaacatggaatttcacaatcgaagggtacttgaagtttctcgtggacagtaagcttgtgtttgagacgcttgaacgaattattaacgaatctgctatccaagcttatgccgggctcaaaaacacggggttggaaagggcagagaatttgagtagggatttggagtggttcaaggaacaaggttacgagattccagagtcaatggttcctggtaaagcatattctcagtatttaaagaatatagcagagaaagatcctccagcattcatctgtcacttctacaacattaactttgcacatagcgctggtggtcgaatgattgggacaaaggtagctgagaagatactcgacaataaagaactcgagttctacaaatgggacggccaactttccgaattgttgcagaacgtgagtgaagaattgaacaaagtggctgagttgtggacgagagaagagaagaatcattgtttggaagagacagagaaatcgttcaagttttattgggagatttttcgttacttattgtcctaa

SEQ ID NO: 90054 - protein, 283 aa, Arabidopsis thaliana
  peptide (1)..(283): Ceres Seq. ID no. 12722007
MATSRLNASCRFPASRRLDCESYVSLRAKTVTIRYVRTIAAPRRHLVRRANEDQTLVVNVVAAAGEKPERRYPREPNGFVEEMRFVVMKIHPRDQVKEGKSDSNDLVSTWNFTIEGYLKFLVDSKLVFETLERIINESAIQAYAGLKNTGLERAENLSRDLEWFKEQGYEIPESMVPGKAYSQYLKNIAEKDPPAFICHFYNINFAHSAGGRMIGTKVAEKILDNKELEFYKWDGQLSELLQNVSEELNKVAELWTREEKNHCLEETEKSFKFYWEIFRYLLS

SEQ ID NO: 90055 - protein, 201 aa, Arabidopsis thaliana
  peptide (1)..(201): Ceres Seq. ID no. 12722008
MRFVVMKIHPRDQVKEGKSDSNDLVSTWNFTIEGYLKFLVDSKLVFETLERIINESAIQAYAGLKNTGLERAENLSRDLEWFKEQGYEIPESMVPGKAYSQYLKNIAEKDPPAFICHFYNINFAHSAGGRMIGTKVAEKILDNKELEFYKWDGQLSELLQNVSEELNKVAELWTREEKNHCLEETEKSFKFYWEIFRYLLS

SEQ ID NO: 90056 - protein, 196 aa, Arabidopsis thaliana
  peptide (1)..(196): Ceres Seq. ID no. 12722009
MKIHPRDQVKEGKSDSNDLVSTWNFTIEGYLKFLVDSKLVFETLERIINESAIQAYAGLKNTGLERAENLSRDLEWFKEQGYEIPESMVPGKAYSQYLKNIAEKDPPAFICHFYNINFAHSAGGRMIGTKVAEKILDNKELEFYKWDGQLSELLQNVSEELNKVAELWTREEKNHCLEETEKSFKFYWEIFRYLLS

SEQ ID NO: 90057 - DNA, 2057 bp, Arabidopsis thaliana
  misc_feature (1)..(2057): Ceres Seq. ID no. 12722014
  misc_feature (1)..(2057): Ortholog of  Ceres SEQ ID NO 14302875 as cited in SEQ ID NO 66242
  misc_feature (1)..(2057): Ortholog of  Ceres SEQ ID NO 13660287 as cited in SEQ ID NO 67316
aaaatattagttcctctcggttccttttatcatttgcataaaatcgttttgcctccaaaagactaaaagctctagactttgtctctttgtccttttatctctactcccaacaaaaccagtttactcctcttaagaatcatgtgtaattcaaaaccatcttctgcttcatcttccttattatcttgtaaagacaaaacccatatctcaaaactcgaaacctgtgatacagataatcctcattattctgaattcagggatactgattctctagaccttaaaagatggccaagttttctggagggcttagaggaagtgaaggcgatcggaaaaatctctgggccgacggcgatgaccgggcttcttatgtactcaagagcgatgatatcgatgctgttcttaggctacctcggtgagcttgagttagccggaggatctctctccataggctttgccaatatcaccggctactccgtcatctccggtttgtccatggggatggaaccaatctgtggccaagcatacggagctaaacaaatgaagcttttaggactaacccttcaaagaaccgtcctcctactcctctcctgctcggtccctatctccttctcgtggctcaacatgcgccgaatcctcttatggtgcggccaagatgaagagatctcctctgttgctcaacagttccttctattcgccatccctgacctcttccttctctctctgcttcaccctcttcgaatttacctccgaacacaaaacattacattgcccgtgacttactccacggccgtgtccgttctcctccacgttcctttgaactacctcctagtggtgaaacttgagatgggagtagcgggagtcgctatagctatggttttgacaaatctcaaccttgtagtcctcttatcctcttttgtgtatttcactagcgtgcatagtgatacatgggtcccaattactattgactctcttaaaggttggtcggctttgctctcacttgccatacccacttgtgtatctgtttgtttggagtggtggtggtacgagtttatgatcattttgtgtggacttttggctaacccaagagccaccgtggcttccatgggaatcttgatccaaacgacggctttggtctacgtcttcccatcctctctcagccttggtgtctctacaagaattagcaacgagcttggggctaaacgtccggcgaaagctcgggtatccatgatcatctcactcttctgcgcgatcgccttaggcctaatggcgatggtgtttgctgtgctggttaggcaccattggggacgcttgtttaccacggatgcagagattcttcagctgacttccatcgcattacccattgtggggttatgtgagctcggaaactgtcctcaaacaaccggttgtggggttttaagaggctgtgcaagacctacacttggtgccaacataaacttgggttcattttactttgtgggcatgccagtcgctattctgtttgggtttgttttcaaacaagggtttccaggtctctggttcgggttgcttgcagctcaagcaacttgtgcttctctcatgttgtgtgcacttttgagaacagattggaaagtccaagccgagagagctgaagagctgacgtcacaaactcccggaaagtctccgccccttctccccatcgcaagctcaaagagccggtctacctccggtacagaagatatgatgagaaccatgttggtttagattgatagctattctctggaggcatttgccatcaacattgacgtacatatatgttcttgtcatcattttttggagtttatagtgctccttaatttctactttttgatttaagaacgactttgttttgtgggctttagtggtgtttgtgttatttatggttgtattggtgtgatagttctaattagctttgacttcagcagtttgtattttatgtgttcccttttgtaataactcgtggtttgattatctttatatatttgtccattttctaggagaatgtgaattttttttgttaaactaagaataaatttattttattt

SEQ ID NO: 90058 - protein, 532 aa, Arabidopsis thaliana
  peptide (1)..(532): Ceres Seq. ID no. 12722015
MCNSKPSSASSSLLSCKDKTHISKLETCDTDNPHYSEFRDTDSLDLKRWPSFLEGLEEVKAIGKISGPTAMTGLLMYSRAMISMLFLGYLGELELAGGSLSIGFANITGYSVISGLSMGMEPICGQAYGAKQMKLLGLTLQRTVLLLLSCSVPISFSWLNMRRILLWCGQDEEISSVAQQFLLFAIPDLFLLSLLHPLRIYLRTQNITLPVTYSTAVSVLLHVPLNYLLVVKLEMGVAGVAIAMVLTNLNLVVLLSSFVYFTSVHSDTWVPITIDSLKGWSALLSLAIPTCVSVCLEWWWYEFMIILCGLLANPRATVASMGILIQTTALVYVFPSSLSLGVSTRISNELGAKRPAKARVSMIISLFCAIALGLMAMVFAVLVRHHWGRLFTTDAEILQLTSIALPIVGLCELGNCPQTTGCGVLRGCARPTLGANINLGSFYFVGMPVAILFGFVFKQGFPGLWFGLLAAQATCASLMLCALLRTDWKVQAERAEELTSQTPGKSPPLLPIASSKSRSTSGTEDMMRTMLV

SEQ ID NO: 90059 - protein, 462 aa, Arabidopsis thaliana
  peptide (1)..(462): Ceres Seq. ID no. 12722016
MTGLLMYSRAMISMLFLGYLGELELAGGSLSIGFANITGYSVISGLSMGMEPICGQAYGAKQMKLLGLTLQRTVLLLLSCSVPISFSWLNMRRILLWCGQDEEISSVAQQFLLFAIPDLFLLSLLHPLRIYLRTQNITLPVTYSTAVSVLLHVPLNYLLVVKLEMGVAGVAIAMVLTNLNLVVLLSSFVYFTSVHSDTWVPITIDSLKGWSALLSLAIPTCVSVCLEWWWYEFMIILCGLLANPRATVASMGILIQTTALVYVFPSSLSLGVSTRISNELGAKRPAKARVSMIISLFCAIALGLMAMVFAVLVRHHWGRLFTTDAEILQLTSIALPIVGLCELGNCPQTTGCGVLRGCARPTLGANINLGSFYFVGMPVAILFGFVFKQGFPGLWFGLLAAQATCASLMLCALLRTDWKVQAERAEELTSQTPGKSPPLLPIASSKSRSTSGTEDMMRTMLV

SEQ ID NO: 90060 - protein, 457 aa, Arabidopsis thaliana
  peptide (1)..(457): Ceres Seq. ID no. 12722017
MYSRAMISMLFLGYLGELELAGGSLSIGFANITGYSVISGLSMGMEPICGQAYGAKQMKLLGLTLQRTVLLLLSCSVPISFSWLNMRRILLWCGQDEEISSVAQQFLLFAIPDLFLLSLLHPLRIYLRTQNITLPVTYSTAVSVLLHVPLNYLLVVKLEMGVAGVAIAMVLTNLNLVVLLSSFVYFTSVHSDTWVPITIDSLKGWSALLSLAIPTCVSVCLEWWWYEFMIILCGLLANPRATVASMGILIQTTALVYVFPSSLSLGVSTRISNELGAKRPAKARVSMIISLFCAIALGLMAMVFAVLVRHHWGRLFTTDAEILQLTSIALPIVGLCELGNCPQTTGCGVLRGCARPTLGANINLGSFYFVGMPVAILFGFVFKQGFPGLWFGLLAAQATCASLMLCALLRTDWKVQAERAEELTSQTPGKSPPLLPIASSKSRSTSGTEDMMRTMLV

SEQ ID NO: 90061 - DNA, 1066 bp, Arabidopsis thaliana
  misc_feature (1)..(1066): Ceres Seq. ID no. 12722058
  misc_feature (1)..(1066): Ortholog of  Ceres SEQ ID NO 15176306 as cited in SEQ ID NO 52784
  misc_feature (1)..(1066): Ortholog of  Ceres SEQ ID NO 13582624 as cited in SEQ ID NO 56287
  misc_feature (1)..(1066): Ortholog of  Ceres SEQ ID NO 14307280 as cited in SEQ ID NO 59443
  misc_feature (1)..(1066): Ortholog of  Ceres SEQ ID NO 14316536 as cited in SEQ ID NO 60272
  misc_feature (1)..(1066): Ortholog of  Ceres SEQ ID NO 13597264 as cited in SEQ ID NO 63897
  misc_feature (1)..(1066): Ortholog of  Ceres SEQ ID NO 13598570 as cited in SEQ ID NO 65434
  misc_feature (1)..(1066): Ortholog of  Ceres SEQ ID NO 13656452 as cited in SEQ ID NO 65745
  misc_feature (1)..(1066): Ortholog of  Ceres SEQ ID NO 13660333 as cited in SEQ ID NO 67464
  misc_feature (1)..(1066): Ortholog of  Ceres SEQ ID NO 13596238 as cited in SEQ ID NO 68834
  misc_feature (1)..(1066): Ortholog of  Ceres SEQ ID NO 15174329 as cited in SEQ ID NO 0
atagaacattgaacaaaatgaagactaatctttttctctttctcatcttttcacttctcctatcattatcctcggccgagcaatgtggtcgccaagctggaggagcactctgccccaacggtctatgctgcagcgagttcggctggtgcggtaacaccgaaccatactgtaagcagcctggctgccaaagccagtgcactcccggtggtactcctcctggacccaccggcgatctttcgggcatcatttcaagttctcagttcgatgatatgcttaagcataggaatgatgccgcttgtcctgctagaggtttctacacttacaacgcctttatcaccgctgcaaagtccttccccggttttggcaccaccggagacaccgccacgaggaagaaggaggtcgccgccttcttcggccagacttcccatgaaactacaggtggatgggctacagcaccagacggaccatattcatggggctactgtttcaagcaagaacagaatcctgcttcagactactgtgaaccgagcgccacgtggccatgcgcatctggcaaacgctactacggaagaggaccaatgcaactgtcgtggaactacaattacggtctatgcggtagagcaataggagttgacttactcaacaaccctgaccttgttgccaacgacgcagtgatcgctttcaaagccgcgatttggttctggatgactgctcagcctcccaaaccgtcttgccatgccgtgatagccggccagtggcagccttcagacgccgaccgtgccgccgggagattaccgggttatggagtgattacgaacatcattaacggtggattggagtgtggacgtggccaagacgggagagtcgccgatcgtatagggttttatcagaggtattgtaacatatttggtgttaatcctggtggtaatcttgattgttacaaccaaagatccttcgttaacggcctcctcgaagctgctatttagtaacgagagtattattattataatataatacgcagctttgtattatcaaaacaataatatcagactaataaaactctttc

SEQ ID NO: 90062 - protein, 327 aa, Arabidopsis thaliana
  peptide (1)..(327): Ceres Seq. ID no. 12722059
RTLNKMKTNLFLFLIFSLLLSLSSAEQCGRQAGGALCPNGLCCSEFGWCGNTEPYCKQPGCQSQCTPGGTPPGPTGDLSGIISSSQFDDMLKHRNDAACPARGFYTYNAFITAAKSFPGFGTTGDTATRKKEVAAFFGQTSHETTGGWATAPDGPYSWGYCFKQEQNPASDYCEPSATWPCASGKRYYGRGPMQLSWNYNYGLCGRAIGVDLLNNPDLVANDAVIAFKAAIWFWMTAQPPKPSCHAVIAGQWQPSDADRAAGRLPGYGVITNIINGGLECGRGQDGRVADRIGFYQRYCNIFGVNPGGNLDCYNQRSFVNGLLEAAI

SEQ ID NO: 90063 - protein, 322 aa, Arabidopsis thaliana
  peptide (1)..(322): Ceres Seq. ID no. 12722060
MKTNLFLFLIFSLLLSLSSAEQCGRQAGGALCPNGLCCSEFGWCGNTEPYCKQPGCQSQCTPGGTPPGPTGDLSGIISSSQFDDMLKHRNDAACPARGFYTYNAFITAAKSFPGFGTTGDTATRKKEVAAFFGQTSHETTGGWATAPDGPYSWGYCFKQEQNPASDYCEPSATWPCASGKRYYGRGPMQLSWNYNYGLCGRAIGVDLLNNPDLVANDAVIAFKAAIWFWMTAQPPKPSCHAVIAGQWQPSDADRAAGRLPGYGVITNIINGGLECGRGQDGRVADRIGFYQRYCNIFGVNPGGNLDCYNQRSFVNGLLEAAI

SEQ ID NO: 90064 - protein, 238 aa, Arabidopsis thaliana
  peptide (1)..(238): Ceres Seq. ID no. 12722061
MLKHRNDAACPARGFYTYNAFITAAKSFPGFGTTGDTATRKKEVAAFFGQTSHETTGGWATAPDGPYSWGYCFKQEQNPASDYCEPSATWPCASGKRYYGRGPMQLSWNYNYGLCGRAIGVDLLNNPDLVANDAVIAFKAAIWFWMTAQPPKPSCHAVIAGQWQPSDADRAAGRLPGYGVITNIINGGLECGRGQDGRVADRIGFYQRYCNIFGVNPGGNLDCYNQRSFVNGLLEAAI

SEQ ID NO: 90065 - DNA, 2221 bp, Arabidopsis thaliana
  misc_feature (1)..(2221): Ceres Seq. ID no. 12722066
  misc_feature (1)..(2221): Ortholog of  Ceres SEQ ID NO 13586013 as cited in SEQ ID NO 1182
acattcttctctatcccaccaattccgatgtccctcgccgtcaaggatctctccaccgcttcatcctcttcatctaaggcgattccggtcaagatcattcctctccagtatcccgattccacctcttctgatcctcactgtcactccattccctttaatgatttcttctcccgatggacggcgaagatcaagcgcatgacgttcttcgactggattgatgcaatatttccttgcttcctttggattcggacttaccggtggcatcagtactttaagctcgatcttatggctggtatcaccgtcggtatcatgcttgttccccaggcaatgtcgtatgcaaggttagctgggcttcaaccaatatacggtctatactcctcatttgtgccggtattcgtgtatgccgtcttcggttcatcccgtcagcttgcagttggacctgtagcattagtttcccttctcgtttctaatgccttgagtggaattgttgatccatctgaagaattatacactgagcttgccattttgttggctcttatggtcggaatatttgagagcattatggggttcttgaggcttggatggcttattcgtttcataagtcactcagtcatttctggatttacaactgcttcagctgttgtaattgggttatcccaactgaaatacttcctagggtatagcgtttctcggagcagcaagattatgccagtaattgatagcataatagctggagctgatcagtttaagtggccacctttcttgttgggatgtaccattctggtgatccttttagtaatgaagcatgtgggaaaagcaaagaaggaacttcggttcatacgagcagcaggaccgctcacaggtcttgctcttggtacaatcattgcaaaagtgttccatccaccttccatcacactggtgggagatatacctcagggacttccaaagttttctttcccaaaaagttttgatcatgccaaattactgcttccaacatcggctctcattactggtgttgccatcttggaatctgtaggtattgcgaaagcactagccgcgaaaaatagatacgaattggattcaaattcagagttgtttggtcttggcgttgcaaatatatttgggtcactattctctgcatatccaactacaggatccttttctaggtcagctgtgaatagcgaaagtgaagccaagactggtctatcaggccttgtaacaggaatcatcattggatgttctctactgttcttgaccccaatgttcaaatttataccacagtgtgctttagcagcaatagttatctctgctgttagtggtttggtggactatgaaggggcaatctttctgtggcgtgtggacaagagagattttactctttggaccatcactagcaccaccactttgttctttggaatagagattggggtcctcattggtgttggtttttcacttgcatttgttatacacgagtctgcaaaccctcatatagctgtcttggggcgtcttccagggaccactgtgtacagaaacatgaaacagtatccagaggcatacacttacaacgggattgtgattgttcgaatcgatgctcccatttattttgccaacataagctacatcaaggacaggctacgagaatatgaagttgctatcgacaaacacacaagcaagggcccagatatggagaggatctactttgttatcctggaaatgtctcctgtcacatacatcgactcgagcgctgtagaagctttaaaagatttgtacgaggagtataaaacaaggggcattcagctagcgatttcgaacccaaacaaagaggttctcttgactctagcaagagcaggcattgtggaacttattggcaaagaatggttcttcgtgagagtacatgacgcagtccaagtttgtgttcattacgtcaatagacccacagatgtagaagaaagcagcaaaccaagcttatggagaagaagcggcctgaaaaactcatcgacctacactgaagttgaatcgaacatagttttagaggaaccattgttgtcaagagagaaatagagacattgaacacttcgattctttttacaataatgtaatgtatgtatcaaataaagcattcactttggttgagaaaaatatgattcccatttctctgtttcaaccttaaaaaactatttcttatgtaatgtatagaaaagcacaataaaaattggaagtc

SEQ ID NO: 90066 - protein, 686 aa, Arabidopsis thaliana
  peptide (1)..(686): Ceres Seq. ID no. 12722067
TFFSIPPIPMSLAVKDLSTASSSSSKAIPVKIIPLQYPDSTSSDPHCHSIPFNDFFSRWTAKIKRMTFFDWIDAIFPCFLWIRTYRWHQYFKLDLMAGITVGIMLVPQAMSYARLAGLQPIYGLYSSFVPVFVYAVFGSSRQLAVGPVALVSLLVSNALSGIVDPSEELYTELAILLALMVGIFESIMGFLRLGWLIRFISHSVISGFTTASAVVIGLSQLKYFLGYSVSRSSKIMPVIDSIIAGADQFKWPPFLLGCTILVILLVMKHVGKAKKELRFIRAAGPLTGLALGTIIAKVFHPPSITLVGDIPQGLPKFSFPKSFDHAKLLLPTSALITGVAILESVGIAKALAAKNRYELDSNSELFGLGVANIFGSLFSAYPTTGSFSRSAVNSESEAKTGLSGLVTGIIIGCSLLFLTPMFKFIPQCALAAIVISAVSGLVDYEGAIFLWRVDKRDFTLWTITSTTTLFFGIEIGVLIGVGFSLAFVIHESANPHIAVLGRLPGTTVYRNMKQYPEAYTYNGIVIVRIDAPIYFANISYIKDRLREYEVAIDKHTSKGPDMERIYFVILEMSPVTYIDSSAVEALKDLYEEYKTRGIQLAISNPNKEVLLTLARAGIVELIGKEWFFVRVHDAVQVCVHYVNRPTDVEESSKPSLWRRSGLKNSSTYTEVESNIVLEEPLLSREK

SEQ ID NO: 90067 - protein, 677 aa, Arabidopsis thaliana
  peptide (1)..(677): Ceres Seq. ID no. 12722068
MSLAVKDLSTASSSSSKAIPVKIIPLQYPDSTSSDPHCHSIPFNDFFSRWTAKIKRMTFFDWIDAIFPCFLWIRTYRWHQYFKLDLMAGITVGIMLVPQAMSYARLAGLQPIYGLYSSFVPVFVYAVFGSSRQLAVGPVALVSLLVSNALSGIVDPSEELYTELAILLALMVGIFESIMGFLRLGWLIRFISHSVISGFTTASAVVIGLSQLKYFLGYSVSRSSKIMPVIDSIIAGADQFKWPPFLLGCTILVILLVMKHVGKAKKELRFIRAAGPLTGLALGTIIAKVFHPPSITLVGDIPQGLPKFSFPKSFDHAKLLLPTSALITGVAILESVGIAKALAAKNRYELDSNSELFGLGVANIFGSLFSAYPTTGSFSRSAVNSESEAKTGLSGLVTGIIIGCSLLFLTPMFKFIPQCALAAIVISAVSGLVDYEGAIFLWRVDKRDFTLWTITSTTTLFFGIEIGVLIGVGFSLAFVIHESANPHIAVLGRLPGTTVYRNMKQYPEAYTYNGIVIVRIDAPIYFANISYIKDRLREYEVAIDKHTSKGPDMERIYFVILEMSPVTYIDSSAVEALKDLYEEYKTRGIQLAISNPNKEVLLTLARAGIVELIGKEWFFVRVHDAVQVCVHYVNRPTDVEESSKPSLWRRSGLKNSSTYTEVESNIVLEEPLLSREK

SEQ ID NO: 90068 - protein, 621 aa, Arabidopsis thaliana
  peptide (1)..(621): Ceres Seq. ID no. 12722069
MTFFDWIDAIFPCFLWIRTYRWHQYFKLDLMAGITVGIMLVPQAMSYARLAGLQPIYGLYSSFVPVFVYAVFGSSRQLAVGPVALVSLLVSNALSGIVDPSEELYTELAILLALMVGIFESIMGFLRLGWLIRFISHSVISGFTTASAVVIGLSQLKYFLGYSVSRSSKIMPVIDSIIAGADQFKWPPFLLGCTILVILLVMKHVGKAKKELRFIRAAGPLTGLALGTIIAKVFHPPSITLVGDIPQGLPKFSFPKSFDHAKLLLPTSALITGVAILESVGIAKALAAKNRYELDSNSELFGLGVANIFGSLFSAYPTTGSFSRSAVNSESEAKTGLSGLVTGIIIGCSLLFLTPMFKFIPQCALAAIVISAVSGLVDYEGAIFLWRVDKRDFTLWTITSTTTLFFGIEIGVLIGVGFSLAFVIHESANPHIAVLGRLPGTTVYRNMKQYPEAYTYNGIVIVRIDAPIYFANISYIKDRLREYEVAIDKHTSKGPDMERIYFVILEMSPVTYIDSSAVEALKDLYEEYKTRGIQLAISNPNKEVLLTLARAGIVELIGKEWFFVRVHDAVQVCVHYVNRPTDVEESSKPSLWRRSGLKNSSTYTEVESNIVLEEPLLSREK
